United States Patent Application Publication US 2014/0057251 A1 - sequence listing, part 157

SEQ ID NO: 302607 - DNA, 1977 bp, Cannabis indica
aaatctcccctcccaggttcgtattcatttttgcattttatcctttaagaaacttaaaatagcagtcttattttggcccattgtacaagaaaagccaagatgaaggctgttattatccatctcagccataccaagtaacccacagacactatgtcgagtgtcatgggagtattagaactaaagaaaatggagtattagaggcatcctcaaataaatccagtaagcgaattacattgcgtttattggctcgacagtatatataactgtcatcagcaaagagcatgtgagaaataatatctttaccactacccacacaacacgtgatgattaatatattaaattgctcacgttctgttaaaaaaaaaattgttcatgttgaaattctagctacaaaatatatactaagattttatgcagctaattaggaattagttcaaataataaaattaaatttaggttatatttggtaggatggagtgagagtatgatgagtagagagtaagagttttttgggagaatgcatgatgaggaagtaggttattaaaattactataatattctttttagtataaatatctattattattttttttaggtatatttttttttttgtagaaaaaattaaaggataattttgtatatgaggattagattttttggtatttggagagagaccttctccctccctttctctctcctactaaacaatagatttcacctcttctttctactccctccctccactcatccctatttacccatctctccttcttaccaattatagtgttagttagaaatatatattagtttacttaatagaaggacgcaaaattaacttaattttgttattttgtgcacttatcatttgttattaattgactttttggtacacttgtgtctttttttctctatgtttgttagggaagaaaagtggaggaaataaatatatgatagaaaagtggaaagaaagtaaataacagctaaagggctcgtttggaacgccgtattaagtcgtattgtattgtattatattgaattatattttatgcaatatttttatgtaaaattatatgtggtattaacttttatagacacctaaatatataatattttagtataaattaaagtttaacataatattatataaaaatatgatatataatccaatttaatataatacaatacaatacaattcgatctaatacggtgttccaaacgagcccaaaaagtattactatagcactatctaaaaatatcatattgacattgatttaattaaatattagttctcacactctcacattatttaatttaatcattattataaaatatcgctaaccatttatataggaaattatgctagacacatatttaataatgctaaaaaaaataagagaaaattataggacccaccaaaaaattttccatccaatttgagaagaaaaaaaaaacttttataaaatgacacaaatttaaaattactatttatttttgtaattcaatttttgcataaataatatagcaattttagaatacctattttctttctttccatctaccaaacaacccaagaaaaatacattttacattttccataatttccttttaattttctctcctttatttttctttctactttatatataatttacgtgtatatatacaaatgatattatacgtaaaaataactatctttatttgctatatattattgagcgagtacataattgagaatttacatgtatagagtgcatgcatgtgctaaatttagaatttcatgaaatcttaagtaaaaaaaataaaaatgtattcttaataaataaatatattaaaaggattcatcttcaaaattttagaaatttatataaacgaaatcacaattttttttaaataataattaaataagtggcatacaaataatattaatgtttatatgtttgtatttttttaaaacaaatttataataataataataat

SEQ ID NO: 302608 - DNA, 3019 bp, Cannabis indica
ttgtttttttacttataaaagaacaacacgaataagtaagaagatagtagtgcttttaccataaatatgaatttacacactaaggcagccggttccagcaaacatatcagtagcattgggtggtttggtttattatgactctgaagactagagcagccgtgagaggtactttcacaaatttgagtatgtatctcaaattcgtacccttttcacatcattttcagggacacttaaatcatttcctttcccgccaacagacgtttgtccttggacctggagaagagatgcaagtattgtacaatgtcatttattttatgaacagaaactgaaaaatatccaactctctacttcatcttccccctctcaactcctttcttctcttttatttgctatgagatatctatgcaaaatgcctatgttttcacaacacaaattctaacctttctttcccattttacttcctaagaataccaaattggagaacttactttctcatctggaacaactgcatatctttctgaaggtgagacccagattttccctgtcaaatatgtaaagacatgccattcactttatatcgaacagaaaaaaaactcatgaaaatagacattaaagatacttagacaatgtggaggtacatacctgatgatggatctacttttgaagattctatctgctgtccattatatccatcgacactaagggcatctaccatctttggagtattcctaaaattttatagcacccaggggttagaaatgtgaccaaaatattagcagactctgaaatgtggtctcgtaaattctactatagctgtttatatacaataatacaagtatatataagttgggtataattggtattctaaaagatgttgtaaacttcaatttgagtaactgatttataaagggcaccctatgagaggctttatactccaggaatggtcattcaagattgtaggaccgtgaaaccatgaagcactgttgataagacctttgacacaacctaatactagttaagttgacctacaaagctcaagttggctcatgcacaacaaactcaagatacaaaacaaagttgcagtatcaaagagagcatagagaacattaccaggacaagtaataacctaacaagcaccaacaaaagaagaattgatctagagaaatatcaccaaagatttaatatgttccttttttaatcagaaaatcaacaaaggtagaaaaaattaagtattgcatttagttacagctctgccattgttcctccaaccaaaagcactctaccaattaggaagaccaaaataactagttcatagattaagaatcacaattctgtgtcaaagagctaattttgactggacagcacaccaagatggagatgacgattaaataaccttttaccaattagctaagcaatggcttagaaatagaaggtgagagtgtccaacagcaggacagaaggattatcatgaagagatcaaatatagcatttgcaactgaaaacccacaaagcctcacaacaacactcatatcaagaatttgagacttatttataaaaggaaccactcaacagaaaacagagtagaaacaagattcagatgtctggaccctctaccattcagattacaaaagaaaaacagcgtgactggtgaaactgctgctaaaagagataaaaataagatagtttagttttcacaatttttaaaaaatgtcaaaactttctaaattataaaagttatgagatcaagtaagaggtatcttggaagaaccttttatagttctgcttacatagcctatcctttagatgcattcaacttcttcccgttttctattgaatatgagtattttgaccaaattacacccaagacatgaatgttttacttttccttatatccccatgtcctatttttattttcatagaaacacagtaagttaccaataaaatatcgcttgaattatagcctagaagctattaacatgtcctattaactctaatggagctttcctgaaggagctggtaaaatttaaagtgggaaatggtgcaactattcagttttgggaagatatttggattggagaaacaacattaaagagtcgctttcaggacctggcagtggtttcaaaggcgaaaaatacgagtataaaagatcttgttgccattgaaggagaggtaggaaattgcgttgcaagctggaattttaagtttagaaggaacttgatggagaaggaaatgcctaatcttatggtgttactgcaactattggaacatattagattgctcaatatctcagaggatatcagagtatggaaatcagatcctggtggaatgttctcttgtaagtcagcattcaaatggtttacttcagaccataatgttggcgagttattttggacgaagaccttatggaaaagaaggtgtccttctaaaagttaaagtcttcggatggttggtggcattaggaaaaattaatgtgcatcctatgatgcaaaaaaggcgaccatttatttacttgtccccgggatggtgtgtttgttgtaagaaaagcagtgaagaagcggcgcatttgtttttggggtgttgtcttgctcaaagactttggataaagctgctgaacgtctttgagatccaatgggtatttcctgaatcagtccctctaatgatggtgagcaaggtgggggtagtaagagtagatcatgcctatggaggacagctgttctagcaatcaattgggttatttggctcgaaaggaataacagaatttttgaagggactgaagcttcagctgatgacttatggaaaaaagtcaaattctggacagctgtttgggtttacaaaactaagagttttgaacatttttcgttcttagatttacatagagattggagattgctgagtaatgttgcttaatagtacctgaattgttttatgactttttggactgattttattttaaatattttctgatatagcacttgtaaccatggtattcctccgccacaagtgaggttatctatatata

SEQ ID NO: 302609 - DNA, 2031 bp, Cannabis indica
ttaggtattatacaaaaattcgaaggggacaaaaatactaattatttcttttatatttgccacattactatcggctttaaagaaataaatcaagtcgggccaagcagagcagtcaagactcgccacatttacatatggtctaaaatggggtgtgccttcatttagacttcacgattagtaccataggtcacaaaatttattattggatgtcaaagtgccttcattggtcagttgcggttatgtattctaactacctttttccttctaagtaacttctcctccatttcaaacatgttttccctctccttttcagttatcttcttggcttgcttcttcttcatccggccatgtcccattcccctatttgttgaccctgttatcctaatctttgtttgtctctttattgtttagttatatcatggatccaatcatgaacgcaattaacactactttgtctttaacagaagaggaatgatcggctttcacccttcctgaggaggctgctgcgtcttctaatcctcactccagccacatgtttattgcttgagttctcactgattcatatgtccataaaccgacattcattgatcaaatgtcgggaccttggaaaggccgttttcctgctacgatttctgcctatggagaagacatgttcaaggtttcttttagttgtgcgggtgataagtttcgggtgatgaataagaaccttggcactttcaaaatcatctcatagtgatgcacactccaagtactctgcagaatgtctcaatcactgatctgttatttacactattttgggttcaagtacatcgtctaccctttttaagtaaatccaaggcccttgccaaggctttgggaaatctaattggagaatttgtagatgtttatgaggacttccttgatgaaggctggggtccttttcttcgaatctgagtgaaactcatggtcaacaagcctcttcctcgtggaagaatgataagtctaccaaaggttcgagatgagttttggatagatttccgatatgagcgtttcccgaattttcgctttcggtgtggcatactcggacatccctatgagaagtgtatcaaatttatggaacatatggacaatggtaatgatgatgatcttccttatggaccttggatgaaaggatcgaaacttcctaccacagggtatgacaagtatcgcacagattaatgcatggccattattaacccgtcttgctcgtaccaccctcacatctaccatccctcgtttaaacactataggccctccacaacctcgacatttgactgatgcttaatcactttctgccccggctatttctcaaccaacacctagcctctcgcctaccattttttccccaaataattctcagccaacaatccctccgtccaccattaacaccccactgcctccactatcaacaagtcttgccacaccaggtggtagaattcctcttggtttacattccaatacatacccctttcatcttcacacccttctcaaactcgatccacttcaactttccccactgctactttttcaccatctgtcatcccaccaacatcaaagtctcactctgaaatgcatgctgactgtagccacttagtcaccaatttgtctgggatctttacaccagatattggatctgcatctaggctatttttccctattgccatgtatccaccaaccttgacaccttccccacttaaacctgcttacacagctgctgatcttgcaacaaccacacctacagtttcgacttcttcaattgttactgctattagcaataaagaaaatgttccacctatgcctgtgaccaaaagacacaatgacacactcactatgaggcagtttctcaaaagatgccgcagccaaaacaattatgttcctacctactttctatgggagaaagctcaagccaaaatatttcctatgatgatatggattcggatggcttcattgataattccgcggagattgctttgcaatcccgcgacacattatgaaaatcttaagttggaatgc

SEQ ID NO: 302610 - DNA, 2410 bp, Cannabis indica
gtttaataaaatctccgaaattgagaaattataacccctaatgcatatttattgaaaataggacccataaaataatcacatttaatcttaaaatataaataattaatgataattgcctctctaatccatattctaagtacgcgatcatgacttaagcactcctcaaaggcctacttgataatggcatttattgcatcacaggtcctctacccatctgcctcccgcgtttgtctcctctcagcctcatctgctcttgtctttcgcttctactatcgatctctggtattctcatcttggtcacccttcacgagatgtcattttgcaagttgcttctctttgtaatttttctttttcaaaaacaaatggatgtaatgcattttgtagtacctgtcaactaggtaaatcccgttgtcttgtatttctaaattctgatcacaggctttcaagccttttgaattaataaactcagattttttgggtgcttcccccattactgctattactggagttcgttactttattttgttcattgatgatttttttttgttttacatggatttattcactcaaaaccaatgatgaagtttttcaaggctttcttactttccaacagattttttccacttaatttgactcaaaaattcaaatggtctgctcggattggggtagtgaatatcgttccatttcctcctttttcaataaaaatggtgttcaccatgatctctcttgcccttatacaccccaacaaaatattctgttgagcgacaaaaccaccatgttctcgaattaggccttactcttctcggccatgctcatatgccccttcattttttgccctataccttttctaccgttgtctagttgattaatcttcttcctacttgggccttacagtctcgcaatctctttcatgttatctacaacaaaaccccccatttactctctattttggatctttggctgcgagtgtttcccatttcttcgcccttacaattatcataagttaaaattttgatactcttctcgtatctttttgggttatagcaaccaacacaagggttatatttttcttcatcattctactaatcgtatttatatctcccattatgttttcttcaatgatctacattccagttcctcaacatctcttttccctccgcttccatgactcctccacatactgttattaacccgcttcattttccttctcctcatacatctactcctcccactattccagttcctctttctctcgcttctacttcaacaatattttcttttccccatattacaccaccctctcgagtatcctctcatacctccccttctcaacttccccacccattattcctccctctccctcttcttcttatcattctagtaccatgattagctcgccctctcatgtcccttctcctccaactgtacttttagtagtagattttcatggtatacctgagactaccattaccccaatgaattttcatcatatggttactcgtgtaaaatcaagtattcataaaccaaggcttttttactctatttcttatggagtccctgttgaacccacaaatattcgagaggccaactcccacaaagaatggaactatgccatggatcgtgaagtagatgccattcgttcttaacgaacttagatacttgttacaccacctcctagtgccaaaatcattggctatattgtaagtgggtacatatatcgtctcaaactaatgtcgatgggattgttgattgtttcaaggctcgcttggtcgccaaaggctagctaccattaaactcccgaccttgattttcatgaaacgtttagcactcagtataagtacaatatatttataaaagaaaaagattacaaaaattagataatattgtgtgaagtgtaacttaatttcctagtgtataatatatttaattcacttctatttattgagttacatttaacttaagaaataactattaattattttaattagttgtttaacccattcgatagatgtatatttttatacaattatctaaaaaatttaactaaatttaaatacaataaatagttaataagtttaattaatttcacacggtaataatatttaagttatatttataaatgtactgaccattaaatgacgatcattatttatatgtcaactttttattaaaaaattattatccacgtatatcttttaggaaaattctacaatgtacccccttaaaatggatatattaatgcacccctatgtgttttagcatccgaaataattttttagtctaaatttttttctcagttgcacgagtgtactattttatttatacgcgtgtaaaatagaatgtttgaatattactttttatattgtaaattattctgaatttttcaaaattttgtaggatatcttaaata

SEQ ID NO: 302611 - DNA, 1481 bp, Cannabis indica
agagagagagagggagatggacaggaggtggtggtccgacgtatgagacggagatgaaagggacaccgacaagaggtggtggtggtccgacgtatgcgacgaagaggagagggagaccgacgggaggaggggtgggtggagatcgatagacgagagagatgagaacaacgggagatcgagagagggaggaaaacgacgagacaggagggtgatggtgcgaaagcgtgggtgggattttggagagttaagattttcggtttagggtgtgggaaatagagaaaaaataggtgggcatgtgggaaatagaaaaaagtaggtgggcacgtgggaaatgtggcgagaagtaggtaacgattttttattgggcccttatacccgaagatttaaaatcgtcgcctatactataattaccctaaaccttaagggcctgtttggccagtgggatagggactagggttaggataaattatttcaatcctatgtttggtggtaatagttgactggacaaataatcctttgaccgaaaaataatccaactcctatgggataagtagtcccaacaatatatatgggattaagtgggataaacctcactgaccactcttctcccaaaacccaacatcaacgtcattatttggatggatttattctttttgtattttttttttcttataaggaatgtgttcttaaatatatataatcttattaatatatacaagtaaattatgtaaataaatttattaaataataattattttttctgcatataaaatattttaatatttttttttccttttaaagaaaatattttaatgtatagataattttatattttaccaataaaatataaattttattaaattaagttttttaaaattatttttttcaataaaaaaatccaatctaactcataaccaaacacattactggattcagcataatcctatctagtccaatccaatccaatccaatctaatacaatcctgtgtaccaaacgggccaagtaaatccaatgggataaaaactatagtaagaaaaaaatagtacatgctgcagttgatgcattccaatatcatgacttaactatttgaagattatagtaggtactgattttgtaaaaagatctaatagattcttaccagatttgatatattatacatttagatcattttttttctcagtttattatgtgaacgaaaaaaatttagtagaaatttgggttttagagaaatttttcagaatatacaacgtcgattttgacaaaattcgtaattgacatttttccaggtgacactattgggagagaattaaccaacggcataaaacactcttgtcggttattagctactaaccgacactttaaaaacaatatttttatagtgtcagttattagcaaataactgacaccttatagttaatatatttaaaatttgatattgatatagaatttattttttctatatttatacttttttttttgt

SEQ ID NO: 302612 - DNA, 2136 bp, Cannabis indica
ttatttaagtcgggtctaggtccggggtcagattcgggtttaagttaaaaatcgggctgtggggaggggatttgggtccggatctggtcgtaatacaaaagattaattaagaaaaaaaaaactgtttaaaaaaatattgaaagtaattttttttatttttaaaattttgatttctaattataaaaattgaaaagtaaaaacagttatatagaacatgtttttgaatttttctttcacttttctatttttaaaaacagaaaactgattaaaaaagtgttaccaaacgccaccttagatgtacaaaaaattcacacttgtacaagaaacaaaattatttatatttggcccctcctagaaataaaggttggtttcgccattttattgattattgtaatagttttgttcattttatctttagatgttcattacatttggggatggtaccccgaatttttcgattgtatatttctggtgtgatatagattgacattttacatgaatgggtatctttttggcattgtttttccaactcactgaatctattcggaaggttttaatgagatatttttctaaaaataaaaaacagtgacaccaatctatgtaattaagaaaacttaacagatttcataggaagaatcaatttaataattaattgattactgatgatataagatgttactttagaaaaatatgatcacatttgtgagttgtaaacaaaaagttaaaaaagctttcttttgcaaccttacgtaaatgataagcataataatttaaagaatcgtgctcgaggcaaaagaaaaacataatcgaaataaattacttattaattttataatataaaataaatttatgcagactcgatcaatatttgtatatatttatatatatagcttttcaagtgggacggcactcatttacaatttctaagtcatgtttgaaatgcttcagtcaaaatctaatgaaactataaactcattaaattagagcaagaaaagaataatattgaaaaaaaattatacatttttatgtattgtttttaaataaaaatcttttattcataacaaagattacgtaggattaaacaagtttaatcttaaaacttgattaacacaaaataggattaattccaatttacatagagaaatttgaaaaaatatgcttaaaatacctttaaaaaaaatttctaaatccataataccccatatttcccatatatgaccacattaccatattccctataatacctctctcatttgaaatccaaaacccaaaccgcctcctctctctttcccctctctttctctctttctctctctatctcgcataccctcaactgcatgcacaccggacacaaacggagaccgtccacacctgtccaccgcaagccgcccacacccgaccgcccccaccgtccacgcagccgacccccaccatcggcccatcggaccctacacaccaaacaaaagagaacaacacataggcatcagccccatcaaacccaccatcggaaccatcggaccaaacacaatttttttgaaaaatcactcaacaccatcgggccccattggacccagcatcgggtgccatcggacccaatgagaataaaatttccaacacaagcatcaaaccccatcgagtccccatcggaccgattgggtcttcgtcttctccaacccattcgcatgagcatcggacctgcatcggactgcatcgggcctgatgaaaatcacaggtccaaatcgcaagcaaaggggcgccgtcacaattggtttgagattgggtccaccgtcgatattagggggcgtcgtcaccgtgggtttaaatcgatgggtttgggatgggttcactgtgggtttgggcgagaagaagaaagaggaggcagtttgggtgagaggaagagagaggaggcgatttgggtttgggatttcagatgcgaggggtactatggggaatatggtaatgtggtcatatatgaaaaatatggggtattatgaatttaagaaaaaaaaaaatagggtattttatgcatgtttttttaaattttcgtttacataacactaaagggaatgttaaaattttggaataatatttaacatttttttttaatttcatataaatatgatttttagattggat

SEQ ID NO: 302613 - DNA, 4397 bp, Cannabis indica
aaatatctgatcaatttaacaaagcacgacataatataaaactgtaaattagcacgacacgacacgaaactagtgaaaatgtggaacctaaattcttacatgtataagaaattaggcttatccatttatgaaaaatgagtcatcctacaaaaagcacgacacaaaaatatatagatttacgagccatttcaagcttactttttaaaatattagtacgatgcgacaagattcatattttttatagaccgacacagtatgacacatattattgcaggcttttcaaaatataagtcagacttatctgacacacgtatttacagttatattagtaattagatagtaacatttctatatatataaaaaaaaaaaacaagattctagtgtaaagtttgacaaagaagtagaaaagtgtataattctcattgattagcaaaacattacaaacagagtatttatacactttaagatacagaggcagagttagttaagatttaactaacagcaaaacagaatttaactaatcttgattaacagtataataacttgacagctcagcaagattagtttcactaacatctagtatttggaaaatcagaaacaaatgttgcaaaactaattcatggtcaaaaaaaaaaaaaaaacaattatcaactttcgtgcgagtttcgactttcgagacgtgttatggtatctaacttatttttttgaccttaatttattttgtgttattttatagcatttcttattttttaaaatattgttattaggtactagtagtggcaccttatgattatttaacgatattttttaaaagttattatattgatttatttggttcaattaaatatcactaaataattataaaatgttactacaagtatctataacaatgcattgaaataataagaaatgataaagaacctagagtgccacctctaaaagatttgggcacacttaagtattaagtaaaaattctagcttccctgttgagtggcctcctatcttgacattttggtcctatagttaaagagtcaaaactcgaaaggtgtcaatattataagaatcgtttgacacacttgtttcttgagagagcatcaatcaaccatatttaatacataagcacatgaaaatttaatactcaccaccgcattatatatctattctcttctctctatatatatataacacatctcatatttctatactcattaatttactatcctcttcctctgttatccaaattatggacattaccattctcaaaaaacctctctatctaaccattctcctctctctctcatttctcttcaccaatgcatgtcatgcagtagacaaagaagcactccttcaattcaaacaaaacatcatatccgacccttcaaagcttctccaatcatggtcttcttccacagattgctgtcattcatggcaaggagtggtatgtgataccacttcaggcagagtcacaaacctcactcgtcctggccttttcattggcaacgacgagttttttgttgacacttcaatggctggtacactctctccttatcttggaaacttgtcatttcttaaagtccttgacttgagcaatctcaagtacttgaaaggaccaatccctttagcattaggtaacttgtttcaacttagttacctttttctcgatactaatcagcttaatggaacattaccctttacatttagaaaccttattagtctcaaaaagcttcatcttagtgataattctttgtctggtgtcatttcttcctctgtttttgagtccatgagttcactttttgaattgggtttggcagggaatcagttttccgggtcgattccaacttcgattcagaacttgagttctttgactaagcttgattttcatggaaaccatttctctggttccattccttatggtattggtaagcttaagagtcttaaatatattgatttgtctgaaaatagtataagtggaatgattcctgagtcaataggtggattatctgagttagttcttttgtaccttaatcagaataggattactggaatgattccttattcaatttcagggcttatttctctttactattgtcgtttatcagagaataagttaaagggtaatttacctgactcaataggtaagttaccaaatattcaaagactcattcttgagaacaatagattgtcaggaaaattaccttcaagtattggaaaactcactactcttacagatattttcttctcaaacaaccattttacaggccaaatcccatcaagctttgaaaatttagttcatttacaaacacttgatttatcaagaaacaaactttctggtaagattcctcctcagctatctaaacttcagaatcttcaaagtttggatctttcattcaatccacttgggttagtttatattcctaagtttatatcaaagatgaagctttttaggttaaagcttgccaaaacaggaattgaaggccatcttccaaaatggttagcttcaacatcaatttcaattcttgatttttcaaacaatggtttaaatgggaaattacctaattggattggtaacatgactaatctgtcatttcttaacttatcaagtaatgggtttcattcatcaatccctattgagttcaaaaacctttctcttttaatggatcttgatcttcattccaacatgttaattggtcacataaatgtgattttctcaaaagaattacaaaacccacttggtcaattcaactccattgatctttccaacaacatgttctctggtccaattgataagaacattggtgaaagaccatcaatggcttcaatcaaatcacttgtgttatcaaacaatccattaagtggtggcatacccgagtcaataggacaactcagtgagttggagattttaaagcttatggggaatgggctttccgggaaaataccaatgaagttgggaaatgcagacaaactttctactatcattctttcaaggaataaattaagaggcacagttcccaaacaagtcatcaacttgataaatcttaaagaattcaatgtctctggaaaccttctcagtggaatgattcctcctcacaatactacattctctgcctcttcattcttggataatcatggcctatgtggacctccactcccaccatgcaaccactcttaatttgtatttttttatttttttttgtatgaaattccatttatttgttgttgttttttattaatatcgacaaaagaattatctttaacggctatttatttaaatatttgtacagtttatttgtttttcttatccttggtagaattcagatatcccatacagccatacttaacatatggtagttaatttatcttattaagtgagattcacgcttgtatttagtgcttagtattttagtgtcttaacgtcactccttaattaaactaatcaaatattttaagtacaatatatattacccaatattttcagtaatgtttatttagtattctgcattctgaaatagtacatatttcgatcaaattgcatttatttatataagttctaaattcagatctaatcatttaattatatgaaactgatactgagaaccaattaagtaaattaatatattttattgatcaaattttactttaattaaagtactaaatatgtacacggtgataaatgctaaaagacaccgtctagcctccaatgtataatgtggttattggtgtaatatcgttatcgagttctatatattttaatgtaataatttttaaaagatatggttaaataatctcaaggcaacacctctataaaaggtgttgttaggcactattgatgagcaatactcatatactaaataaatgtattccctgtacaaaaaactaacttaccattaagactgttttgttgtctctaagcaaaaaaaagaacaaaggaaaacagataagactgttttattgtcttaaagcaaattgtcgttttatacatattccatgctatgaactattgtcgtttggatttatttatatggtttttgtatcgagctccaaaaccactactaatactataactgtataacggctacaaccatacctatgcactatataatgtaatagatcgacgaacacagtaataatactttgtctctgcataaagaatttggagtgtgatcgagttattggtttctaatactgtttctagtactggcagaataacatgcatacattacataaataaagataaaagtgaagatatataataataataataataataataataataataataatagtgtaacaccatgtcatagaagaatattattgatgatcataattaaagaatatttctgtttatttagtcagctaagatgtttcaagtaaaaacgtacgtaacatttcgattt

SEQ ID NO: 302614 - DNA, 3356 bp, Cannabis indica
agtagaacaatttttgtcaactatactacagatgaggaaattaagacttacacttttttccaatctaagacactaaagcacctagacctaatagtttcaatagaggttttttccaaaaaaaaaaaaaaaagcttagaatatagtggggaggacttcactattgttgcaatgtctgtctattctcaattctgagaaattactttagctaagttaactattttaacttttatccctaaggttaattgccccactcatgttagtaactttaggctcattgcatgctataatgtgacctacaagactatcacaaaagttatatcaaatagacttaaacatattcttccatgtttaattgtagaaaatcaaaagaaatttgttcaatggagattgattccacacaacattatgatctgtgaagatctagtgtgttcttatgaaagaagttgtaatgccccattttgtatgattaagatggatttgaaaaagcttaccatacgttggaatagtacttcatcgaagatatgctgattgcaatggagcaaaagtcatcaaactgattatggtatgtgtcacttccccaaaattctccttactagtcaatggaagtatgaattgttattttgattcaaacagaggtcttagagaaggaggcccaatgtctctcctaccctttgtcataagcatggattaatatctctctaaacttcttgtaaacattgcttggaatcctaatttcaaatttcatcctagatgttaagaccgtacactgacccatctctgctttgcagattatgtgctattattttagttatacccatatttcgagcaacaatatgttttcgacacgtgcattaaagctagaaaatgaaccaactagaattatataataataaatatattcagacaactcgcctcgagaagcacaattggtataaatattcgaactcactctcttagagataattgtgagctatgaataataaatactgactaatgagaccagtgagacgaacaaaaaaagtctatctcgagacacacataatacacaacagtatgaattatccaaggatctcacagttcattgacccacatactcatgagtatattagcatggttcacctcgcaattgtcatgttgtgacaaatatctcgcgtatgtctcactcaacattaatagaagaacgcaagaagtattacttgacatatacttagacaattatatataataaagcacttataggagaattgttacattgcgagaaggatgaagcatagtcaacataattgcctatggataatgttaaaagagtggttatgaaaatttatttgtcagtatcccatgtgtgtaaatgtgaaacgtgggatttgtttacatttcacgaatggttacaagtgataatatcctaagggaataagtgtcatccttaacttctataaataggcacagaatctagtgaacaagggacgaccaatttatgaaagagagaagattataccaatccttcattctatatataatttattgtgtttggtatacaatttgtcagtccctaaataagatggactcgtagactatgaagagttaacttcaaaaccatgttaaaaattctcttgtcattttttactattattattctcattgttcatttaattcctaagtgtgttaattataaaaagacttatttattagttaacaacattatgcgttaacaggtgatttcattgagagccttgtaataaaaattgcaaaaatatctgccttgaaaacttattcaaactttccatttatggcagacgatactcctccaaatgaagagaatcaacctggggaaaccacgcagcgtctatggaaagagcattagaatcctcataggatgaacacaactgagaatcctcgctctgggagaggaaatggtggagaatttgagcgaaatcgggataaaatcccagagagatgaaatgaggacgcctatgtcactagacatgttccattagtggaactagaaaataggcaactttgatagtgactggctgagtcaaattgaagaactgcagaactagagcgtgaggcattgactaaaagggctgcacacggtgacgctcctccaaacctacctaacacaccaaatagatgaccacagggaagacctaaaggctataagacatggggataccccaagagggaataatcctggaaatcccatggatactcaggatgatcaacctgggaacacgagggatatcccagtgaatgaagaaaacccccaaaatccaagaaacactggaaatagggaaacttgacccaacgatccaagaacttctctaggaaataaaactgtgggaatgtacaacctgaaaaccaagaatcatctcacatgaatacggatgccaagatatcgtgaccttggaatcaaggattctcgagtaattagttctagtcaaagatttaatcaagactaagattgaaagggctgatttatggtatttgaattttaatgttgctagtttgtacaagaaaatattgtcaaatactcagtagaaagtttgataggcaatgttgtggaagaatgagccttcctaaacaccagtttattgcttggttagcaacatgggggaggcttcaaactagagatagactccatcgatttaaatttattcaagaagatcattgtttggtctgtggaagagagagtgagacacaatctcatctatttttcacttgccactacaataaagtagtcgttgctcaagtgcttagctagattgatattggctctcaacattttaaattggaagaaatgttaaagtggatacagaggttcaatcattcaaagctgaaaagggttatgtatgtttagcaatcaatgtttctgtgtaccatatctaggaagttcagaatcaagttttgtagaaacaaattgtatatagaaataagaaaacctatagttgtaaaaagaattaaaagatcaattgtagataaattttctctttaatacatagcaaataagttttatagatagtgattggcttggccaaaagagagttttagcaatggatgcttaacttgtatagttttgccaaatggttgtgtaattggttgagatagcaataaaattttcttgcttaccaaaaaaaatgaaagatattaaataatgtatatcagtcaaaagatttatggcaaaactgaagataggaaataaattaactagctgatgaaataattatcaataaattaattaataaaactagcaatgatgggagaaataaatagataaataaaaggaatttttcataaatgtacaaaaaaaaaataaaataattataaaaaatgtgtcaaaaaaaattattttaaaaact

SEQ ID NO: 302615 - DNA, 3958 bp, Cannabis indica
tgttatacattgtaggagattaattacagcataaaaataggatcagataagcacaaaattgagttataatttacttgaaaacacagcacaccacgaaataattgaatcatattcagcctagaccagagtaccaaatcaagataatctcatcacttaaaaccataaatagactaataactcagacactccgatctatatcactataacacaactccatctcaattgaattctacaatatccgactctaattacactagaagacatacagaaacacacaaacatactaagatacacaaatacacatacaaaatttaacagtaatatcacctgagcaaggacctgtttggacaaaccagagccctggaagaaagggacagcttcttggccacgaatccggccatcgcggcctaaatcaactcgctgaaaatacgcatcgaatagatccacattcaccggttggttctgcggggaagtcatgattggaatgtgattcacagatcagagcatgaataaacaaagtaaaaaaattaaaaaattatatatgtataagatttcggtcggtttcgcttttattggttggtttactatccaaaaaaaactgaccgaccattggcgatttaaactgttggcagttttttcgatttttggttttgtcagtttcggttctagcggtgtttggtaggtcggtttgaatggttttttcaattttctggattttatgctcaaccctactaaattcaacaccgttcactatacaacctttatagaaggttgctaaataatccaagttagaattaaagcgagcaatttatcactattttgtaagaagtcatgcttgcgcaactcatatatataaatacataaaatatattaatatgacaaaaaatatattatcgaaaaaagtttaaaatactctcattttaccttcttatgaaaccacaggcaaaaagtttttctatgcaaaacattgtggttaccattaggattttcttgtctgatcttctctaaatgttcactgttaaatgtgacaatatcaatgtgtgatagagaaaaagagtaaagaaaaacttaatatttaagatagattatcattgagaggtaacagacttactctaaacaagcttgtaagttttgagaattttgaagtatgtaccgctcggttttttcacgaatgtaatgatcaagaggctttataattcccttagtcaagagatgacataaattgaagattgtaagagtgcgagagtcaacaggtgcatgttcattttgatcaagacgactaaattttgtttcacaccctttaaagtacattaaacaaaatgttaccgcctcaactgcgacataaaatttggcgatggacactttaggacgtgccttgttttccatataatcttcaactttatacatgtatctattaaaaggatacatccaactcataaatatcgagccacccaggatagcttcttcaggcaaatgtataaccaaatgtatcattatgtcaaaaaaggcaggagaaaaaccgattccaccttgcacaatatcagaattagatccttttgagcatcatccatatcttttacctttaaagttctcaaacataattgtctgatgaaattacatagctgagtaatagtagttgtagtatcacttggtagaaatttatgaacatcgacagaatgaactccctgcatgatgacatgacaatcatgaaattttaacctaagaatattagacttatctgtagaaactttgctctttaaatttgaacaaaagccatcgaaaaacttgattccttcaacaattgacaaaatagctgtctttttttagtcaaaacataaggagcatgtagtttcatcaacctatcattcccatcttcataaatccacaacaattccttgacacccatctttttaattcatgtcttccattgatggtgtccttagatttatcattatctaagatggtgccaaggagactatcatacacattcttctcaacatgcatgacatttatattgtgctttcaaatatttgtgctctatttaccgatatttttagaaactaaatatttaagaactaatgaaattataaattgcagaaatgaagagatgatgatgtttttacgtggttcaggtgttaaaaaaccttagaccatgagtcaacctattcatctcttaggacgagtttgatgtatttacaatatttgagtaaaaacccctaactctttaccctaagtttctcttgaagaagaataagacctagagtaatcttagaaaagttttgctatgtaaattgtgatggtatttataggctaagtgtcgggtatagacagactcatgacctgcctaaagcctctactaaaatcccactattggggtaatttacatgcaatattagagctaactgaatgatcccatgggagacattatgcccgtgcgtgctacagatggataatggggaccattttgtaccacatggacaaatgtcactcaaaggttcaacctttaaatgtagaggtcatgtgtcgctcaaaccttgctcctttacaagtgggggtctgtactacccgcctggcaaaaaggtggtggtggaacgcacactaccatgctcgaatgtagaagacaagatttgatcttcgttataaaagcataacagttactttggtgacttggcatgcataaaaggtgatgtctgcgacacttcatgatggtcaatatccggtttagacctttcaaatatctatccgaactagaccctcccggatccaggagaagtattttgccttccgcgtttgagaggtcaaggcgggtatgagtaggcttctgtgcgtccttccatcctgaataatttctagttccaggaagcctttccatgatagagtagcatcaaaggacttcgattaaggaagggttaaattatccctcctcattaagtgccacgtgtcatactttgcagaaacgaggataacatttatccccaagcttctgggatgcaatgcggtcttggagcttgcagtgttcctccgcttcttggtgacaagtccttgacatgtggtgtaacaccctactagattaggcgtgttactatgttttctaaatactgcgcatgcctttactaatcaaaaggtttattgtaaaatgtggataattaaaaatttcttgaataatttagctttaataaataaacataataatttacataatttgggatccatttatttaaaagttacataagtttacaaaaacattatactacaaaagttatcgtttagcgactatcaaaagtgagcctaaactatctcgaagatcctgaacactctaggtctaaccgtcttgatatgtacaatcttcatccttagttttggactcacactgattcaattatagctcttacctgcacatacatgtaataattgtagtcgacagattcagtaagaaaagtataatcataaacataaacatatatctagatcgtaaccaggcgcccatacacctagttacaatttgataactgggtcaggaacgttctcaacaaagtatgacttacagaaaatctagcctatactcagtactctagtcataccgatgtggtagcagttaattcatactatctggaggcatagcatatatatgttggcatcttcgtgcagctctatgtacacctcactgatttttcgatatgctaatctgatggccaccaattttcctaacatatatttgttggtacctcagtgcaactctatgtacacctcactggcaccgtgatatgttattctgatggcaattaacatgcacactaaacatgtatacatatatgcaaatcattctactaatcttaccttgattctgaatgcaagtgtgtcggtcgatcaaaatagaaaattacgcgttgaatgacgaccctatgtcacaatgtaaaattgataagtgtttactctagaacacttctctaatgcccga

SEQ ID NO: 302616 - DNA, 1866 bp, Cannabis indica
gtataacttatcaattattgtttttgctgaattatatgaataacccaattttatggtgattccttaaatacatcggctgttggtatcttatatatatctctctcactgaaaaggaaagcaaaaaaaacaaaactttagaatgcccatatcacaaataataatatttaatttgaaactaaaattttaaaatagaattattgtctgtatttttgaaaagaaaaatgattcgttattgattaaacttgttgaaaagcatccattagagaagcataaatcttcctagagattgcaaattgtaatatgcaacacattagcgaatattataacacaattataagtttcagcgaaaaaacaataataataagtatggaggattgagctttaaaagatactagttttgcaaaaatttgtaaaaaaaaaaaaacttacgtagagaataaacaattcattacgtacgtgtataacatggtaataacatatttctaatattcacaacatggaccaagtttttcttttttattgttgtatattattacatatatggaatgctttttcttggtctcattaattcaaatatatcaagtatatggatatggacatggtagtcaatggctagctatgacactcaatgtatttatatattattaatttatttatttgtttatttttttgtgcatatatgaaaggaaaaagtaaaacttccccgatttgttgcttttaattatgaagtctgttgacatttaaaatttaagttagctttgaatgaactttgaatattcatattcaatatatatattccttaaaccagacatattttgaagaaaattttgttgttcctcaaatcctttttgtccactaaaatataaacaaaattttaacaaaccataatatataactacatgctgccacatgttttattttttattttacttacatatgttatttataaaaaggtactgttgatgagaagaaaaaagtgacaatagaaatcactttcataacttatattacatatgttaggtaattactaattacatgggaaacctaatacgtacgtaatataataatacatagttataatgtttaaagattttccatttgcttttatatatttgtaaatgttttgttataactttcctccaacaccatagatgatatgtcagaatatatttggctaggctatattaatcttgcacattaaggatcaccaaatacatatgagggccaagtttgaaccattactatgtataattataagtaattaaagacgaatatcatctgaattctggatgaacaagggccacaactgcagcccaaatttcagttatttgaccaagtaattaattgctattggccaaagatatttaacactttttataagtggcgtcctataattaattagcgatattacttaaaaatttattttcttaagttatatgtaaccgatacttttagcaatttacttaataattcaggtatagtcaaacactattgcatcaacgagacaacatcctgaattaaggttcagcatatatagcatcaacgagacagcatacagaatctccaagtgtcttcaactgaattttcgtatactccatactttgaccaattaattaactattaattataatcactacaatttaagttaattaagctcctccccatcacacaacatcatccatgaattggtgtgctttaattaattaatgatatatttaagatgaaaaataatgattgttattaattaaaaaaaaggcattaatagcaatctcgcatattattgttattgggcaccagtggtgcctagcaccttctaaatgtgtcgacttgctgttgctatatttttaaacactacgcaagtatacg

SEQ ID NO: 302617 - DNA, 2968 bp, Cannabis indica
tctcggattccacttgttgaggagtaagtcttggcctctttattgggagttccttgggtgccttatcatgaaaagtatttgggtttgccatatttttctacttgtagcaaatctatcttgtttcaatccatctgtgatcatatgttgaataagctgtttgtgtgaagtctaaaccttctcggtcactggaagggaggttcttactaaatcaactattcaggctttccttacttatgtgatgaatttgtttcagctccttgtgctcagttttaatcggggtgatggcagtgataggaagatgcactagtgtacatgggagagattgtgttggcataagtctgatgggggtttagggtgtcgagatctgtttttgttttcaataaagttgtccttactaaaaaagcttggagattatgtaattttcatgattctcttgcagcttgagttatgaaaggtttatattatccccatagtaacttcctccatgttgattatagaggttcttttattgggagctttttgttaaaggtggtagatgtttcatgggtgatggtaattctattagtcttaggaatgatgtttggattcctagaaacaaggatactattactttctcattctttgttcacccaatttttcaacaggttcgtgatctgtttaaccatctcggggttggaataaggatttgattctcttccttttcttagaggatgaagcacatgctattttgtctattcctttcgtatcttttgggtgttaggattgtcttttttatctgacactataatgcgttggaagattacacggctaagagtgtttattggaatgttatatgttttttgggcatggtctacgttcaggactcgaagattagtcttcttagtggaaaaaaattgtggtctttgcatcttccttcaaaagtgaagaattttgtgtggcaagcgagtcttcattggatttctactatggagaacttggctaatcaccatgtgctcctacatcaggaatttatcctatttgtaatattattattgaaaccacttttcatgctttttggggttgtccaagtttacataccattattttttcttccccttgctttgcgattgttacattttctcctctcactgatttttactcatttcttcgtgaatgtgttgatagtatgcataaggaaaattggaggtgttgttgatagtggtttgaagaatttggttttatcttaaaaaggtggttcatgaaaataagattttggatgtggaaggtgtcattgggtggtcaatgaatttccaccgggagtttgttgaggcgaatgtttcttctccctcgtctttggttggcatgcgtggggtgacgattagaacccttcttactcggcctgattgcctgaaacttaatgtggatgtgggtactacggtggagaacttgaagatcaagtgtggggcgacggctcatgactctcttggccattgtcttgcctccacgtctgttcccttaatttttcatctatgtgccctcagctgctgaagctatggctgtgctccaaggtttgctccttttctctcgtttggggtttcagaatccaaaggttaagttgattgtttgcgtgtttgtgagattttttcatataatactcctcttgttgtggagtttaataatataaaaaaaaaaaaaaattggtaatgtgtccagtttttttttctaattccacagctcataatttggctacattagccctctcctttgatgctgctttagtttggtggctccaaattgttttgaacttatgcattttttggcatatgtcttttaattatcattatcattttattaaaacaaaagatcattaaaaaaaacatattattaaaattctgaatttccaacggcggattaagccaccacttgctgaaacgtgtccctatagtgggcctacaacatttaattggcatgtgacttcaaatttataacattattaatcatttataattttagtattctttattatttcattttttctaaataaattttgttgctgacaatgtaagaaattaaataagaagagcctgaataaaacaataaacataaattagaatgacaaacttgcaagttaatcatctaaataagtattaatctaatatcacaattaaatattagttatgaactagttataagaagccaaatatatgattttctgccgtatataatattttatattagaaaataaagtcaatggtggatcgttatagtctatggtgtgaatcaagtatataatttttcttttcttttttcaaaaaaaaaaaaattattgtaattagctacgtaataacacgtgtttaacaaatattaaaaattaaaataaaaaagaatatttatattaagatcaaatttcttggtaatgacgttattggaggagactaaagaatagtggtgatgaaaggcctaaaaatgtagctatcaaattatagtaaaaaagtgtcagactttagagtcagtcaatgaacatatttttaagtgacttttttggtaaaaataaattaatttatgaaaaagattgacgttagttttatatgtcattttccattaaaacgcaataaatttcaaacccaactattatgatgatattaaataaataactaaactatgttaattgtcaaattattttgtatgctcaataatgatttgtctgagagtaaaagtggagcctatttaatttaagaaaattttgtaaactattaatattattaaggccagctaatctaatttaccagtggtttggtaggcatcattaaattaaatacaattgaatcgaaccgattcaatccaatttaattataaaaagttgaatattcaattacaattggattcgattagatgttaaaagttggattttaattggattggatcagttattggatgtcaatctcaaaatctaattaaaaaccgatctaatctaattacatttatatat

SEQ ID NO: 302618 - DNA, 1283 bp, Cannabis indica
ttttgtcattttaacaaaacacagagtccaattggtaacttttgtaaaacagagggtccaaaatagtatttaccctatattcaagtggggttttttactttttaacatggcacgatattagtattaattcaaaaaaatacaaatacgactcgaaaaaaatataaatttagacctaatactatacgaaaaaacataaatttaagcacgacacaaaaaatataaacttaaatacagtacgactctagcaacttgataaatacaaaaatataacacgaaagcaagaatttaaaaaacacaaattacacccatgaatataattttgggtgattctacgatgcattatctactatatcaacaatgtacatctagtccatcacgaaaaaatttcacaattaaacgtatttattgacttggcataattacacctaacacttggccgtggttaatagaattttatttttaactaagccaagagatcaagatatatataaataaaattaagaagcaaggagaattatatattaatattataattagccactatttttattttgttatttttattttcatttttgttgtcaaaccatgcatgcataatctaataatgatctacgaatatctaagagaaagttctaccaagttgtgaaataattcaataataaataaaatgggatcattaatttacagttaattaagacttaattaagagccgtgcctcaaattaattgttcatttttatactaaacttgttcgttttcacatttatgccattcatcaatattatatatatattttgccaaaaaaaaaatattatatatatttatatatatattatagtttctcagtcaatcataacaagatgatgaaaacatcgaattcgtacatttactttattttaaataaatatatattataagtatatttataatattgtaaaaccattacgtaattaaatttattagaaaattaataaaaatgttctaatatcaaattatttattatatagatgaaaactccaaaacttatagtgtatattataagtgactgagttaatatatttgaggcgtgtggatctatgatggtgatcattaatcaaaaaatatataaatgtaaatgaatgagacattaactatattgtttttattcgattagtaccttattgttagggatgatctatatatattatatatgtttctttaatttaaacattataatcaaatttttatgggaaaaaaacaaaaaaatacaaaaaaggaaaaaaaattacaaaaatactttgggcc

SEQ ID NO: 302619 - DNA, 2321 bp, Cannabis indica
ttattgattattgttattaggtactattgattataggtagagtctataaatggctagcaattttttataataattattaaattaaactatataagactcgatacttaattatactaatattaatattacaccatcaaatagtattcgacctttacataaaattaaaatatatgcaagaaataggggtaaatagtggcatatgtacctaaagtttcaagtttgtaggtggcataatctcaatatttatttttagcggtattagtacccaatatttgtaaaactgtaacttttctctaatttcgtcagtagaaactctgctattttcttaaataggctacatataaggtctagtttctagattattgggtttaaacaggaatatatagtatcagttactttcaaatgttcctttattaaattcaaaacggaatctgtattgacaaaactggaggaaaattacagttttactaacattgggtatttatgccactaaaaataaatattaagtttatgccgcttacaaacttaaaattttaggtacttatcttgctatttatcccaagaaataatagaattttaagtagtgtttagtatagtaagtaacacaaatgtgtctgggattgagtaaattaaaatacatgttatgtgaggttattctatgctatgctgtctatttgctattgagatttgagttatttttttatttgtttattttttttaaggaagaagaattaatggtgatcagtatttataggtaaaggtcattgaatgaaagagcagggtgtggcctcctcctatattagattttcaaagtgttgaatgcattaaataataccaactcttgctttctattaaatgctctttcaatgttcagaatcagcagcacatgtttattgctctttactcaaggcatacacatgcatatgagggcattcaatctcaatccaaaatgtcatttgtgtattgaacacatacagaggtttctttcttcttgtatttcttttttaaaaaaaaacaaaaaatatatatataaatatttatatttatttctcttaggaattcgagtccatattgaaggagaagactcctaaaattcctttttttttttggttggaaaaagaaatctccaccacccacaaacaacaatataataagtttcccactaaattaaaagaagataaagtttaattgctaaattattaggtgattaaaatcaaaatcatgcttatgacacatgactcggtcatctcaaaatgttttacttaagagtaaacttgcatgcatgtttacacgagtctattgtatctagattagaaaatcttatactcaaatatttgttgttggtattgtgcatcaagtatggttgtcaatggtggagctaaggtggggccaaaaataaaaaataagtgaggataaaattaaaaaaaaatatatatataacacttctaatcactataagagtctcataaaaagtcaagcataattttttcaaaaggtgtaattcgaatttcgaatctttaatatgagtaaagaaagttatcggtaaaaatatctttactactaaaccacgtaatatatcgtacagtaaaaagtattgtcctaaccaagtcttatattttttagtactaggttttgaaacttagaggtaaatttatgatccaaccctctactcttaattggaaatacaatatgagacatactaaggaaactttgttgttcattcataaaaattgtataattatggtaaatgatgataagggttataatcagagcaaaagcaacataatatttaaagaacggtacaaaataaaaaataataattaataataaaaactgatgtggataaattatatataaattttgtagtgtccagtgtgggtcaagattatattctactggttaaatattataatcataccatacaacattttactacaactttcttatgggaaaccaaaaattatagtccaaactcaagcattttttacactagggcttcaagtttggtggtaacattttaattgttgttcattaacttacttgtcaactttaaagtttggtgttaaccaattagtcttgaaatagatgagaatggcgttaggtaataaataatgaacaaattacatacataaatattacactcattaattaaaaacttgtaatgtttttttttttttttaaatttggacgacattattttaaacattaatgctagaaacaatttccttttatatactcaaaacattcacacagtaatgtaagtctcaccttaccacttgaggctagttcaagtggccataggagagtgcgtgtgtgttaga

SEQ ID NO: 302620 - DNA, 3651 bp, Cannabis indica
tcaattacttaacatcattatatattatcatattttttattaatattcattgattttttaacatttgataaaacatgttaattagtattttttgtgtgtaataaaagaaacggagggagtagtgtccgtgttccctagcgaaaaacagcagctgcatacaacaaggtcatgggacttcattggatttccagagacagttaagagaagtacaactgaaagtgacatcattattggagttcttgacactggaatttcacctaaatccccgagctttaatgacaaaggtttcggcccacctcctaaaaaatggaaaggctcatgccaagtctccgcaaacttttcttgcaacaagtaagtacatatattcataacataaatcaacaatcattggattgtactgtgattttctccatacatgatttgtatcattgttgaaacagcaaagtgattggagccaagtattaccgaagcgatggttcaattccggaagatgacgttaagtcgccgatggacactgatggccacgggacacacacagcttccactgcagccggggggttagtaagggacgccagctttttcggattagcctcgggcacagcgcgtggaggggtaccgtctgcgcgtgtagcggcctacaaagtgtgctggaatgacggttgtactgatgcagatattcttgcggcatttgatgacgcaattgctgacggcgtcgacataatatccgtttctctttcgtctggttcttcggattacttcaagaatgtcatcgccattggagcttttcatgctatgaggaatggaattttaacgtccgtttctgctggaaacggaggtccgcagctagagactatcgctaactttgcgccttggactctttccgtggctgcttcaactactgatagagacttcttcactaaacttcaattgggtaacaacgtgtcatacaaggtagtcactcacagttaattagcaaaaaactaaagagaaatgtagtcactttgattgtgcggtatagccttatttgttttttctctttctttctcctttttgttaatgttatagggattctcaatatctacttcggatataaaaaatttgcctatcatatacggcggagatgcaccagcagaaggttttgaaggttcatcatccaggtcattatatattagttttctaatcaccaatttcgcaatactcatgcatacttaagtataataatattttaatttaataagttgactctggtcaattcaaattgtatgttattttttttagaaaaagtgggctctttttatagcacatctagaaatatagtttacattgtattttaaaaaaatgcttgctatatttgtcacttgcaagttaaaaattactttaaatttactaaatcccatatgttttatttatctttgtcatcaattgtatatttaattttgattaaatttatttttgggtcaaatatacaatcgcggtggaagtgttgctagataactatatcaatgttagttcatttattaatataaacgtatacatatatattaattgtactttgtaataaaacagattttgcagaacaggttcgttagacaagaataaggtgatgggtaaaatcgtgttttgtgatgatttaacatctggtggtggacccctactggctaatgcagctggtgctgtgttgtctggccgagaatttggagagacttcaagtccttttcccttgcccacagcatacctcactcgaaaggatggtagccaagcatacatatatataaactccactaggttggtaatttacattatgcaataaatagattataactaaaacaaacacattacattagtaaataaataaatatataaatgattaatgaatgaattatattgcattgcagaaacccaactggaacaatatccaaaagtactcaacaaattaataagatggcacctatggtagcttccttttcgtctaggggtccaagcccaattaatcctaacatcctcaaggtataaaaatatttaaatatatcaaattataatcaaacacatgtgtattaatctatgtaaaagtatatatttatgtgtgtgcagccagatttaacagcacctgggtcgaacattttagctgggtggcccgcaacagcctcactctcaggttttgaattggacaaaagagtttccgcgtttaatataatctctgggacatcaatgtcttgtccacatgcttcggctgctgccgcctacgtcaagtcgtttcatccaacatggtcccctgctgctgttaagtcctctctaatgaccacaggtaatgacaaatttttattccttttctaatcatgtttgaactcattaatttccctactattgaattatgtcatatatacatccaaacaaatattcctatattaagtgaatattgattatttaacaacttaagtacacttatccaacacaaattgagatcatatatcggcacaaatttatatggcccgtgttccatatccatatttagtttaaaattaaatatgtgagatctctattaacttataattatgtatgtcacatcaatatcttcaaaagcattatattactcttttaaataatgattaactatagtaactgtggactataataacaaatataataaatttatttgtgtagctaatcccttgaatgccgaccttaatccggatgctgagctttcctacggagctggacaaataaaccctagtaaggctgcattccctggattagtatacgacgtcgttgaagctgactacgtaaacttgctatgtggtgaaggttacacaaccaagttattgcaaattgttaccggaaaccgtaaaagctcatgccctgcaaatcatggaacgagcccggacctaaactatcccgctttcgttacttcagcctcacctgcaaaatccatcaacaaagtttttaataggactgtcacaaacgttgggtcacccacatccacatatgaagccaaggtaattgccccaccaggatttaaagttgaagtgaatcctagtgttctttgttttacttcacttggggagaagcagtcctacactgtgacggtacaaggtgtagcagataagaaaactgtggtgtcaggttcacttatttgggatgatggtacctaccaagtgaagagccctattgttgtctatatcccaatgtaatgagctcgccattgtggaaaagaaattcaaaggaagaagtcatgtcttggaagtgggccactaatcaattaattaattagttgtatggcatatatatggataccattatttaacgtattcataataaaagaaggaaaactccaattttgtttggaaataacttgctgataaattgtgaccttgttaaatagatttcattttaaatattattattaattacaacatggtaataattattgagcatgcaatgttttataacttaaaggtagcataatactattacccgtgctcaacgccgcactgacattacaacaaaaaaacgtgttttatgatcagttctgaatcaatgctcatattcgcggttagagagatattattacaatgaaagataaatcaagacatatacaattcaattgtaaaagttgtacaagaataataaaagagattgattaaatatatgtta

SEQ ID NO: 302621 - DNA, 4011 bp, Cannabis indica
aaaaaaaaaaataataaaatgtctttaagggtgtaaataaaattttccaaaaattattgcatgatattccatttctacaaccaaacaaacaaaagcagtcccaaattctttggctaaatcattttaaaaaattcagtggggactctggtttccaacactcctctactccttcaccatagcagtcgtgggtgtcgatatttctgtttccatggagagcgccttcgcgaacgcgtctgcgatatctgatcagcggcaaaagatcgagcagtacaagcacatactctcatccgtaatttcttccaacgacacaactcaggccaagaagtttattgaccatagtaacatctctaattgacttgcttttcacacacaattcaattcttggttttcttaaaccgtttttcggatgattatttggctctcagttctcctaatcggtttcataattgtattgcagtgttatctgacgatgtaccattggtggtttctcgtcaactactgcagacctttgcgcaagaattagggctattacagccggaaacccagaaggagattgcccattatatccttgcgcagattcagccacgggttgtttcgtttgaggaacaagttcgtttcgccatttatatgtttttttttatatatattttattctacaatggtagttttcaatgcacattgttcttgattgagaatttcggtgaccgtttccccatggaagcggatagggccttggattatcttacccggagatgcttattgatgtttttgcacaacactgttgaagagacttaaccgattttgttgtatttggttttaaaaatgctgcaggtgctaatcatacgagagaaacttgccgaactgtatgaatctaaacagcagtggtcaaaggctgctcagatgctcagtggcattgatctagattctggaatgaggtctgagagtaagatcctattttttttttcttcatgtttgttctcatgaaagtgagtatgttgcaatttgctaggatgttaaccgtatgcaattttgtttaatgtcgttatcagagtgattgacgatacgttcaggttatcaaaatgtgtccaagtagctcgcctttatcttgaggtacatctaaagaatgtttattagacagttattgaatgtattatatgttacttgatgccagtccctcatttggatcaatttctctacgtcgagaaagtgtaggaatagtaatttttcttttgcattgggatttgataaggtggtcaaactcaaacagatgattatgatatctatttcaggcatcattcttacaaaatatttaatcgcacttgaagtctatacacaacttgattattatttgtgaagagaagaataattaataaaaaagagatgcaaagaaattagagttttattcaattaaaaagtcaaaagtaaaagaatataagtaataagaaaatcttatatgggcaactaacataaaagattaaaataatctgaaataactatttaacaccttccctcaaacttacgatgctgctgcaagaagcatcgagagtttccttaaaagaaaacgaaaacgaaaaatcgtatgccacttagtaaaaaagccagcaagctgcaacgaagaaggaacaaaaggcaaagtaatggtgtccaacttcagatggtgacgagtaaaatgacaattaatcacaattttctaacagatttgcattaccatttgctggttttctatttgttccagaaatataaccccaaatcttttttcctttcaaaaaagttttcataacataattccaatataaataattctttccatccaatctcacactgatcgcttgaagggaatcatctttattgggagctattgtagaaaaaaaagaacaaattgcaaaaaaaattccaaatacaaaactgatgaaaatttaaaattgtgctgtgaaaatcaatacccaaaactgctatgcgaatcacgaaaaaacttgaagaaatcaaacaaaaaattggaatgtcgaactgtacggatgacaattgtacagacccctactctgataaatccacaaaagctgtgattacgcttaagaaattgactatcacaaatctttttctgataccataattatttgtgaagagaagaaaaatcaataaagaagtgaagagaaattagaatttcattcaattgcaaaatcaaaataaaagaatacaactaataagaaatccttatataggctataacataaaagattaaaataataataaaaaagactaaaataactatttaacaaattgttcttaaatgtaaatcgaacagtttttagtatgctgttgttgccatgttctccaactttttggttgatgtgtttgcttttacatgatgtaggatgatgatgctgttaacgcagaagcttttattaataaggcttcattcttggttagcagcagtcagcaggaagtactgaacttacaatataaggttcattgatttacgtacagtgaggtgatattgtcaaattttgcattttcaccaaatttgacaggttcttacttctttcattgctccctcttctttcctttctttccgccaggtatgttatgcaaggattttagatttgaagaggaagttcttggaggcagcattacgttattatgacatttctcaaattgagaagaggaaaataggagaagagtatgtattatgtaatttaattttgtagttattaatgcgagttttaaccaaattgttatgattttgcgttggttgtaagtatactccaatgagcctcaggcctgatttagtgagaaactatggatgatatatttttaaattattattttaatttcagagagattgacgaggaagcactggaacaagctctatctgctgctgttacatgtacaattctggctgctgcaggaccgcaacgttctcgtgttcttgcaactttatacaaagtaattagcttctcaagatgaccatatactatttgttttccagttcttgtgtccttgtattgctctgataatttgagattctttgtttaggatgaaaggtgcgcaaaattaaagatttatccaattctccaaaaggtattggcatcatattttgtgctgactggttgctttcttactttgtttctcctgcttacttttgaaacgttatttgctgtacaattgggatgctaggtatacttggagagaattttaagaaaaccagaaatcgatgcatttgctaaagaattaaaagcacatcaggtacctttcttctttctggttgttgtatatacagcatttaatcacattgttgagaaagttgatttatgagacctcgtttatcaactttaacagaaagctgttctacctgacaacttcactgtccttgatcgtgctatgattgagcataatttgctgagtgcgagcaaactttacacaaacataaggtaggatagtgatttggtttcattattgcatatttaggcttccaatgcttttgttcttttattattttgatgggattgataatgttaacagctgcttttcttcttctttacagcttccatgagttgggcaccttgctgggcattgaacctaataaggtcttggtctttgttattttttttctctctatttaagctcgtgtgatttttaatttatttacttttttcactcaactcgatttatttctttcaatttttgaatgcaaatgattttaaaatatgtataaaaatataaatatttgaatgtagaggatctgtggttttaaatttagtatccagtgattgatttaaataggaatgagatactaacaagactcctagattctgcaaattagttgcttctttgtgtcaagtaattgattatgatttatattgagtagtgttattcttcactagttgaggctagctcaagtgagtaatttgtcttgagctattatttctcattctttctgaaagtgctgtaatttgtcttgtaggctgaaaaaatagcgtcaagaatgatctatgaggacagaatgagaggatc

SEQ ID NO: 302622 - DNA, 1093 bp, Cannabis indica
aaaaataatcttgtcatatatgtttggtttgtgtataaaatatctctagaattacttcttattagataaaatagtaccaactaatttctcaaatatctcaatattataaaatttattttagcagattttgactcaaagtttcaacaacgtaattatctcactactcccaattcaaatgagatagtgtcctcaatgtctaaatatgtatgataaaaatatgagatgagaacaccaaagtagtttagaccatgaaaagtgataagttttgattacttagaaaaaaaaaggactaaaaataaaataacataagaaaaaaaaaggaaaaataagctgaaaataaataaagaaataaaagatagaactagaagttaaagaatagactaacttggataaacacaattgaagaagtatttcaattaatttagaagtttcagtcttcttacttctttggaaggtttcaatgcttgtccaatttagattacatgtgggaaaatgggctattagatatagtgttgatttcttagatttttttttcaacaactcatccacaatttttttatattattttattagcaggcagtgcctaccatatatatatgaaagctgaaattcaaaaatagaaaaataaaaaaaagtgtaaaatttaggaggtaatgcttaccatattatatgagtacaaaaataaaagtagagtaataagtatttaatcgaaatatatatactatttactaatataatataaagtacaaaatttaaaggcataattattaatgaataaagtaaaattaggaggcgttgcgtgcaaaaatttaaaagtgaatatttaaatatttaatagaaatataaatatttaatattaattatagtataaactttattataaataaatattaatactattatatgataatataatacataccttacttagttattaagtttaactatatataataataatagtattgttgatccttaaaattttctaagcataaattttagagaccacgtgattaaatgaaggaaagatctcaaaatgcaactaagtaagggtgtatgggaaaaaaatgggaggccaactagcaaggtgaga

SEQ ID NO: 302623 - DNA, 3546 bp, Cannabis indica
ctgaggcgtaagcctcacacgcccgaggcttaagcctcaaggcgtacgcctcacaaggccgaagcgtaagcctcatggacagtgattgaggctaagcctcagaggcgttttttgaaagcctcgttccgaggcgcgcctcgaggcatacgcctcaaacgccttttaaaacattgatatctttcatatatggaggttttgcttagagtttgggagagcagaaactctagttgggagagatcgaaatctcttgaaagtttggaactttatttgtaatttcagatttttataaacaataagagaagtacttttagattttgattgaagattcatcttcttttgagagatttgatgtggaaattcctaacagtcattattaaattctctaattgaagagctgaatggctacccaatattcgctctgtcccaagtctcttttacattatttttaatctcaaacggtccttcattccttttcacccatattgctcaccacacttccgccatccctgttctccaaaaatgcttttttgcttctaaaaaccttgaactaaaagctcttcacaacactttggctgcaccaatggatctgaaattcattcagacaccaatcccatatccttgtggtagtcataagatgttattgatattgaatcaatgtgtgtactgttaatgatatcaaaaggcaaacaggatttttgtcccttgaactataaacactatctgatcgtgtgtttcagatttctctgaacactacaactaccaaaacgtgcctctctaagagtcaaataatttagggggcacacctctgtaatgacgatactttagagtgggcgaaatagttacatgtcaaatttttagcatgtcaagtaactcttttggacatagaggtataatttgacagtggtaatagtttaaggtgaatttaaaataacgtgaaagattcatgaacacagtcaagtagtggcaatagttcaagtgataaaaatcttatttattctatcaaaaataggaaatacaatgaatatccaagtcttcgagtcacctgagaaactccacaagagaaaactcttcattttacaaacaatcacacacccctgtctatagctactccagttatgtatacatatttgtaggtactcttctctaagatccaagtactcacatcaacttctttattctgtactttcaaatacataaccaattcttttcaaaaagagaatttgaaagtaaccaacttacgttaggtgaaaacacttgccagaagaagaggtggcatagaatttggctgaataatttgaaattcatctaatacccaagagcggtagcaattgctatagtttcccagtccccaaatattgtagggttaggcgagaattgtagttgaaaagaaaaaaagaagaaatttgtctaacattatgcttttgaaagattattagagatagagctttctgcaagtcatgtattcctattaaggaaccagagtaaatctcccaagtcacagcgaactttctgaatacaaattaataacttaaaaccattttattgtgaaatttatatttttattgatttgtgacattatgtattatttttttcaaggccatccctgctgcatctaggctcgaaacaaatcgaattgggggaaggattcgagggccatctcctctcatacatcagtggatagaattttgcttgcaagctagcagagcgattccgtttaagcaagaagtaatccccggcgcatctccatcagcactcgaaagtacttgtcttgaagtgcctaaagagcttaaaaatggtaagccaaaacttgacaccaaccttattgccggagtaccaccgcctaatatcttggccagatgtgagtttttggaaccgttaagtgactcttctttggcagagtaccaacggctgattactaacattaagaaatctgaccatggcctgatcaagaaaatgagtctacgttttttgtcacttatttaaacatgtcagatgaagctgaatttgaagacaagataaccattatcttaatttttatcatggggttaattgtattatggcctaattaaatttgtctaagaagcaaaatattcattattgtcgtcatctatagtcgcaatcaaagaacaccagataaatataaacagttcagttgccttctaataaatttgtatagcttgcaatcatttttttggtggaaatgatcttttttaaaagaataattaacatttttgctttttgaacttttaaactattaaggtgtacttcttgtggtatacggcttgttaataatatttttgagtgaagtagatagtagttgataaatagatgcaagttaactatttttttttcttttttgttaatgaataataaatgaaaagactttctttttttataaacttttacagtaatgtaggtttttttattatattttatttaatttatggtaaaatgagtgaagtgaatactagttgatatagttgataaaaggatgtaaattaactgatttgtacttttttttttttttattgttaatgaatgataaaagacaagattttttttttcttttttattaataattcattttttataataattcatattttatttttaattattaaagtgaaaaaataaaataaaatgtacttaatttgtattcatttatcaactactatttataactccacttatttgatgataaaattaaataaaagtaatgaaagggttctattgttgtaaaagttatattttaaagggtattattaacaagtcgtataccacatgggcacaacttgtagtataaaaagttgtgagacaaaaattctaattattttttataatattttaaatttagtatatgctttaaccaacagagtcaatgtttcaatttaaattttaaattcaaaatcaaattgatgatcatcattattatcattgagaaagattctgagacagttgtcaagattttgtaaggagtcgattctgcttggatcattgataattatacagaattgtaatactttttaggtattttttgagttgtaattttgcctttatccttagattttgtaattttgcaattcataatagttttatgtttaaaacttaactaatatagttacagtgccaactattccagctaatattatttgtaataaatatgagatctaaatttctattttattaatgaacgctatttttcaaaattataaaagatcttcattattatcattacctttaaataaataaatcaagaataatttttgacttttttcatttattttctctcacataaataaaataactatttcataaaattaatttcttttactattaaatttgcaaaaaattatatttaattaattaaatataattttgaaattacataattaattattcaactcaaattatcatataattgtatttttgtctcgaagaacaatttttttaagaattgccaaattaccattttaaccttgtatcaactcttatcttgatatagtgttggtagagccactgtaacgccctaatgctaaggcacgctac

SEQ ID NO: 302624 - DNA, 2579 bp, Cannabis indica
gttggtaaagggagtaaagcaaaaggtaaagtggaatcaggggaaactcaaatagctaattcctatcaagttttggctgataattttgagactgtcaattctattactaagacaggggttgagaatgtaatagcagcaggtgccatcactattggttccaacagagttgctatagctagaaaaacaagaggagggggagatcctcctcttggagatggataaaattgtttgttgaaacgtctgagggatcaatgaccattacaagcaaaatcaagttaagagcatgttacatgttcaaaaggtcagtctattggtctactcgagacgagagttaaggccccgaagcttgggatcttatatgtaaacatgtttaagggatggtgttttacatccaatattgcttggcatgatggaggtcgaattattgtggcgtggattccttttagctactccgtgaacatactaaaatgtaccagccagcttattcatctacaagtagctactttagatggtaagcattgcttctttgctacctttgtgtatgctttcaatgagttagaagggaggaaactactttgggcaaatttaaagaatttggctacccatgaaccatggatggttatgggagactttaatgacatattgcttaaggaggaaaggattggaaaaaaggtgaaattcaatgctgcaacagattttatagattgtgttggaacatgtcaattaaaagatataaagtatagtggcagctactatacttggaacaacaaaagacaaggaagcgagaggatttgctcaaaaatagatcgatttcttgccaatcaaagatggttagatagtttctcttctactgaagctatttttgcagcagaggaattatttgattacaccatagctattattgctttgtctcatgaaatagttaatggaaaaaagccattgaagtattttcaaatgtggacttcccatccacaatactcaaagattgtaaaaggggtctataaccaaggaattactggctctaaaatgtaccaagtcatatcaaagctgaagaaacttaaagtggcttttaaggaactcaacatgcagcatttctcaaatattcaagaggccactgatgaagcaaaaaaggagatgttagatgttcagaagaagctgcaattagagcctctaaatcatgaacttactgctaaagaagtagcagcttgggtcaaatatggacaacttttgaaaggccgcaattcatttatgtaccagaaatccaagattagttggattaaaaatagagacgaaaatacggccatttttcatgctagtatcaaagagaggaggaaattatataacatattatctattgaagaccagtagggagtaagaactgataagccaggggaaatttctgaggcttttcttctttcattttatcaccatttacttggctataaaatggaagataggaggaagatcaaagctggggtcatgaatctgggacctcttatttccaaggcacaagcagatttcttaatgatggagtattccaaagatgaagttaagaaagctatttttgcaattccaggaatcaaggctccaggaccagatggctttaccagttatttttttcaagataactatgacttaattggagatgacataagtgaagttgtcctttctttcttgcattcaggtcagattctcaaggaaattaatactgatgtgttaacacttattcctaaatgtaagtttcctaatacggttagtgactttagacctattgcatcctgtaatgttatctacaaagctgcaactaaactaatctgctccagagtaaaagctatcttacttgatctggtaactcaaaatcaggggggatttattactggcaggtttattgcacacaatatcatgatctataaagatctgataaggcactatggaaggaaaagctccaaagttggatgtatgatcaaacttgatctacagaaagcttatgatactctagattgggattacttggaagaaatacttcagtcttttcaattccctgataagtttgtcaagccgattatgacttgcgttcgtactctaagattctcacttatgttcaatggaccgcttcatggatattttgaggggaaaatgggcttatgacaaggagatccaatgtcaccatttttatttgttcttggtatggagtatctatatcatgagtaatgttgaagatcgaatctaaaccaaatttcaaattttatgacaggtgtgcagagcttaatttgaaccacttgatgtttattgatgatgttatactcttttgtcatggagatttcaagagtatctactatgttttacaaggtttaaagctcttttcacgctcttctagtttgcaaccgaatccaaacaagtctgcaatctattgttatggtatggatgatcaagatattcaacgtatcattgactgctcaagatttagcaaaaaagaggtacctctcaaatactttggtatccctatttgtgctaaacgtatatcagttaaagaaagcatggtgttagcagataaaatgacagctagaatcaaaacatgg

SEQ ID NO: 302625 - DNA, 2040 bp, Cannabis indica
tatttcgatccttattcatagtgtatatatgtttgatttaattccgcattttatacataaacatatatatttcagtttatacatataaatgtctaacaaataatcttccaacaaagagcaaaataaaacaaagacataacaatactaaaaacaaaaatattatgattaaaacgtactcacaaaaaacttaaaacataccaaaaataaaacttaataaagacataacaattatatatatacataaataatcaataaagaataatgtatgtctaaataaaataactactcattcttgaaaataacgaaaaactttaaatatagaaagaattaaaataatataaattaatattaatatggaatattttaaagaaaaaaataataataataataaaattaaaataatttcgtgacaactatccttatttatttaaaaaatggaatgtaataataactaaaaaattaaaataatcgttaaaaaatcaagacgactaaaacaaaatgagaaaacggacgagataaacaagatcacaaagagatggagcataacaaagttgccaagatactacgattgctgacgattgaagcttgggaagaagcctttcttctatcgccaaacaggcaactcgccatgttttttgctggccatttcaaaacttcaatggacatatcaaaatcataattgagttttcttatgatgataaaataagttcatacttaaaaccaaactgccataatatctaaattcttgaagaattagtaaggcaaagagtgacacggtattttccccaaaggtcaagagggaagacaaagagaagattcttagcgttttgggaatgcatattttgagcagacatgaaaagtatttgggtaatcctttctttctttcagcaaacaaacgacaagatttctcttttcacaaatctaagattctaaacaagcttgagggctggaaagcaaagcatttatctcaagcggttcggctcactctcatcaactctgttctacatagtatcccttgttacacaatggacactcataaaattttgtatcagtgtgcacggagttggacagaatagtggctcgattctggtggaaaggttgcaatgagaacagcataaacaaccgctatctggctacgaaatgttggtctaaaatctgtcaaccaaagagaaatggtggtttaggcttacgagggtttcgtgatatgaatatggcgcttttggccaaattagcttggcatgtcttatgttaaagtaatagaccgtgggttaaaatcctgagtgcaaaatattgccatagaatggatttctggaatgttgaaaaacataatggggactcctttgtgtggaaagggatcttagaggcacgtaatatatgtgttgctggtgcggggtacctagttacaaggggagaaattgatatatggacagtgccatgggttccaggtttttgtcctgatgaggttcaaagaagtttctcctacagcacaacacatgccttctcatcggtggttgacttatttgttaatggcactcgcaattgggacaccaagctagtaaatcagtgttttgattctgatgttgcagctgcaatcctctctattaggtcgttggatgacgatgtggataccctgttctggaaggttggttcgaaggggagtttcttcatcaaaagcgcctactggctttctcaaaaggccaaattccaccaggaaagaccggtgtggaagtctttgtggaaaatgaaattacatcctcagcaaacactactcatttggaaaattttatctgcctgtcttccccttaaagttcgtttcggtttcctaagttactacgaccgtatgtgcgctttttatggtgaggaagcagaaacggagctgcatctgttctgcaaatgtccgttcgcacgtggagtttggttcctatgtccatgggggctgaaaacagatgctctctttatggatactttcgaagattttttcttgtggttatgcagatcccaggatgattggttgatataaattactgttggaaattattt

SEQ ID NO: 302626 - DNA, 2513 bp, Cannabis indica
aaaaaaaaaaaaagaaaaatcctcatcccataatctcttctaattttctcctcataattaaccccaaaacccaatattttctcccaaaacaaaatatatatcatcatccatccaaagtcttcttctcaaaatctccacaaacccaagaaaatctgcatgccctttttcacgtcaacaaccaaaactctctttattatagcagctagctagggttaatattatttcttccctacatttatattctttcactctgtattttgattacacgagaatgaaaattctactcctatacatgttcttatccttgctattacccatgtctagcactactgctaattttggtattaggtgtgaaaatccttaagaaaatcatgtgcagcttcttgttcgatcagccaagcaataatattaataataagaatattattatggacgagagtacaagtactagcagtactaataatatcaataacatcatcaacaattttcaaggcgatttaacagatatagttcgagccagaccacctgttgggggagctgcttcttcttcaccatcttcttcaaattctcaccttcataataatcctcatatcgatgtcgtttctggttacgaagaagacttaattctccacaacatggcaaacgacaacggtgccagcggcggagtcgtaggctggcagctattctcctccgccgatcccctaatgatgaattgcttcggcgatccattttcaaacttacgcccggatccacttctccaccacaccgtcaccgccccggtacaaacggggcttttccgaaacccggatttatctcccacaacggctaacaatttggtcaacggtgggttttgcagaggagtaagtaatgggcttattgggcctagcgaagaggagatgaacatgatgatgagtagtagtacaactggtgttagtgctaggcctagttgcaatatcttctctagaattcttcagattaatccaactactccaaatagttgtactaatactacttctactacaacaaacaatattactggtgctgttaatattagtacatcaaagttggcttgtactaataatacaacaacggctacaaatagtaataatacgacgtcgtcttctcaaggtgttggagattcgccttctccgccatctatggctgtggcttcaccgaggggattaattaatgtgaacagctcacagttgcaagctggtggtagttgcttgcttgacaacagtactactgctactaccggtggccttcagatctcatctccacggaacccgggcatcaagagaaggttagttagagagaaccaaaaaaaataataataatttatttaattttaattattatttttggacaagttgattcggaggacaagtagtcttaattgagtttatttaattatatttatttattttaatattaccaagttttatggtttcataaattcacaaaatataagattggttttttgtttttatttttgggtaaatatattataagggtttttgagtctgctttgaatatactattattattgtttcaggttagatttttgagtacggtgtaatagcattaatgttagcagtactagcaaaactatgatttctttgatgggttttaatcaataggtcgatccaaagctataaaaggggggtgtaacgtgtagttgtgcaacaattatattcatagacatagctttcattgatatatatatacacatattgtttaacttgaagtacttttctttcaccacgcaaaaacgcacctgaaaaggccaaactgtgtataaattatatgtatgtgattaggatctgtttggtcatttttcttttttgctttcataaagtataaacagtatataatagtagcagtagtactacaactactactacaactggaattgatctcaaagcaatcttagaaccaaactctttctaggaagtgtacaaaaatattttgtaagttacatattaatgtggaagagactttctaaataatacaaattaatatatatgtatgactgggcatatattatgattatatatttattaagtatataattgtatttataattttgtagaaagagtcaagcaaagaaggttgtgtgtattccagcaccagcagctgcaaacagcagagccactggagaagtagttccttctgatctttgggcatggagaaagtacggtcaaaaacccattaaaggttctccttatccaaggtataattaatataaataaccataatttaatatttatttatatatatcatttatgttatcatatcattcatatcattcatcattctcggtaacagaaaattattcctaagatataaaagaaactaataaaaacttcctaaggctgccattttgcttctcgcttttctgacaacaacaaacccttctgcaattcattttttttactacttattcataataataataacaacaattttcttaaattgcattgatcttaagtttataattcatgccattttca

SEQ ID NO: 302627 - DNA, 3659 bp, Cannabis indica
taaaatggttattaaaataaaataaaatatatactgaaaattattctaatttaagtgtttaattaacaaaatggcttagggttaaaatagtcaaacaccattacactgcctaatctcgatattccaaatatcaacttatgaataccccactaaataaaaaggttttatgctaacccatgtgataaattagccaccgtcccattttccattgtcactgagaaaaaaatcataaaaattacatatttcacatttaacataagcttaataaaatctccaaaattgagagattaaaactctaatacccattttcttaaaatgagacccacaacataaataatcatgcataatcataaaatatcaataattattactaattgctttactaatccataatctaatcatgcaatcattacatagccccttcgctcattaaatctaaatgatagaaaaatttctaaaataattttctaaataatggaaacacgtagaaatgagtcatgctctacgattcctattgcaatttgagaacaagctaatggcccctccatgtaagattaactcgctaaaattcacaaatgccaagaagggaactttgacattgttgacatctaagaagggaaatttacaattcgtatgcttcgaagatttaacaaataatttcaaagttaaaaagtctaaaggtatcaagctttggtcgttggaactaagagcttcaaaaatcctaaggcaacttactaaatggcttagtgaacaagggaaagtaggaagcaagtaatataagcatgacaaacaatttaaggatatataaacaagaaaagtttttgttttgaagttattacacatggcctcgcggttaagacatgttaaattttgcaaaaaggtagaaagtaataaaaagaaagctaaaagatagaaatcacatctgggcctgatcttggacttggtcttggatttgaactgaagaagtatcccaaggcaagtcttgggcaagattcaaaaggtcttcaagcttatcttgaggagggtcctagaggtcttgagcaatattcatagaagaaaccacaacctatgtagagtgttaaggttcatggtcttcgacttgttccttggctgattcctcaaagtcgtgacggccaaattcctcaaaataggtgtcgaaatcgatagcctttaccctttgggtgtactcttctccatgtggtctgagatacttgagtatagggggatcttttttccacaaaatgtgatgaagcatggagtaggacatatctaatgatcgaagatgaaacctctcatcccgagcctctattttggcgaagtgttcagtaacatccctgatagattgtccatcggtctctttgatcctctacatagttgccatagctataaagtctctcctgtcattgggtggttgatgtgtagcttctctccataaccatgatatagtgtcgacatgggcatcactagtcaaacgagagcatcagaggacctctatttgagttttcagttagagtttcagtgaattgacctctatctttagatcctcgacattgcccaatatggcttggatcgctagatttttttaatgaacctcaatttttagattgttgacctcctagattttggtgtcaatggcatgtttttgaccatcagtcgagcatccattttgtcttattcctccttacttggcaaagctcgttagtaagggaggattctttaagctggtcctgcccttccttaagatcttagtcagccttagcttgtacttattgtacagcttgaggtatttgtcactcgcctcttaatcttcccgttctcagtaaattttgcctcatgattagaacggttggcctcagtctcacaatttttcctaacttgagtcatctaagcctccgcctttgctttgattttatttatcttaatagtagcctaggctttaaccttctcaagatcagaaagtaaagctctctttctcgtcatttaattttggttcttggactgaactgtctcgagctctatgactaaggaccccacttccttagaagtccattttgcaatcaaggtcatatgacacaacaaaacaacataagatgaaatacacaaaaacaaaagtaaagaccaaaagccaaagcttacccctactgcctgttgtttcacaacttgagccaaagtgaaagcatcactgctattgcatacaacccacttctccaaagtcaacttacacccactactcgtcacttggtctagaagctccacagtaaaaggcaccaggtctttcccatccgtaggcaccatctgcttgccaagggctacaatgtcaatcactagtcctagagcagaagtttgaattccctcaatgatatctcccctcctcacggaatacaaggttttgtctctcctttgaatttccacccgttctttcttgtggcatcacctcagcgagcattatgcctctcccaattttgtctttagaattttatggctaggaatggtagacttcataggaagcttgaaattcagagggagaatcctaggtaaggcagtgacaatctgttgcccttgtggctaattagagaaggtttaatttcttttcaaaagctaaataactcttatttgggatggagtgaccttaggtaggttggggaatgatgtccttagcggttgttgatgtagttgttgtagttgttgtttttgttgttgttgtcattgttgttgttggagttgtgttgatgatgatggtagagaaagtgtaacttcaagatcaggaggtgaaggagtagtatactcacaaagatctccttctcctcttggagaacgtttcctgaccaaagcgcgactgaccttcttggcctcccttttggaatggggaggaggggtttggtgcttagttcacatagaagcacccttttgggaagataggcctgtataagctcccatctgagatagtggtggtctctaaattctgttgggtagccctctttgcaaccaaagtaggcaaagcctttgccagggcttgatgtttaagatggcttgcttgagcagtgccgttcccggacacaaccacttcataggaagccaccctagttgcgaccgaagttttttctgtcccagggggagcctgggaacctgggaacctagagccttaatggttgccttcacaggaggataaatttcctagacccctaaaaaagaagaggtagaaggaggccttggcttatgggtcctattggccttagccttagccttagccttccctttttcgttagtgctctcatcttggtaatggactttgtaatcctgtcctcaacgatctcatccttctctcctctagagtttctacaaacatgacacacaaattgttagcaagcaaccttcaaacaaaaaaaattaattgtagatagcatattgcaacatgctctaaaaagtgtgtgtgggtgcaaccattcagtgagaacctatacggttccccacaggcaaagaagattatttcttcccagccaatgaagcttccatactccctaaagggaaagacatagttctgaaaggatcatctctaatagtatctggagagtgttgggaatattttacaaagatctagatttactaacaagtatgtttattaacatctgatgtcgcccaattagttacactgcggtcgc

SEQ ID NO: 302628 - DNA, 767 bp, Cannabis indica
ccataacaatgttgagttgactcctgagctcactattatctgggctagagattaccttagaaatttccacaacaaacaacaggtagtggctggccccccgtcacaattgagagtgactggttctcaggatggtgcttcagttgcacgcgcggttgggttttccccttgtagttttttgaaagtgaatactaatgttgctcttaatttggcaaatcattgcggtgggttggatatggtgatttgtgatgaattgggtgtggctaaagcctcaggtgtttgacacttggaagattgttttgactcagaagttgttgaaactttggctattcaaaatgctatctcttaatgtttttcttttgggtatgacaatatcattattgaatttgattgtttgaatgttatgcttaaaattaaaaataaaatttatcattatttttttgagtttcgttttagatgatattgttaagttttgtagtaggatctatgttgttaagtttattcattgacatagactgattcacttagacataaccaaattacacatctttagaaatggtcatgataatgtaagagattatatatgttcttttagaattggtcccaacaattaacgcgtacccttcatgtggtttataatctgttgtctggaatggcgagtcccaacttttcaatcaaccatacattttaagtcaatatggaaaggaaaatttgagtttgactaactttttcacttttcattcacctattagaatattttatatatggaa

SEQ ID NO: 302629 - DNA, 2906 bp, Cannabis indica
acaaaaatccaaaacactataggataccgattaccaataatttagagaaattcaaaaagtaaaaaaaaaaagaaaattcattcttgaaaggcattacctcatatctagaaacaacttcatagaatcttaagcgatggagaacatgagttgcaagagaagcgacagcatgtcgtggttttgcaataaaagattcaacaatttactataaccttcactgataccatttggaatgtttccttcttcacgaggccaccagcctaaaaatccttcacaaccaaaagagaatcgagtagcctgctcaacaactttaagtaacagtaatgttgtcgcagtagatttctgtctgtcatagcagaaaacatgagcaagctcatccattcccccaccactaacaaagttaaagcaactatctctaccagagcacaatagaagagccacactcaatcccataatgacatatgtactctgaaaagaaagataagtattagaaatataacttgagcaacctatatgcactgtcttagaatgagcagcctttctgcaactgcctaggctgtaatacagacgataccctatcatcttatacaatgcactcttcttttatatcatataaatatatatacatataatttgagcaagcaaaggaagaagaaagtgagaaagacataatctattctgattgttacaagagtatcagtaatttaacaaaaatgtgattgcatgaataatagcacaagcagtacttaacttacatgtgtgatctggtgttgcccaacatgcaaggactccctcttaaaagagaagtaatgtttcaacatatccaccaactgcttaccagttaagtcagcctcagatccaaagaaggagccatcttctaacaatttggctgatgcattctctgtttcacattgatagagatcaaaaagaccctttaaggcttcactagtaacattctgcagctcttcatagctgttgggtttatccaaaacatcagcataggacgatgctactgagactaaaatgctaacaactttacttacgccattccctaaattcggcaactcccaaatcttaaccaacatctgtagaagttgcttagcttcaatggacatatctgatgcaggaagaggtagtgataaagccttcaaagctgaaataggttcttcaattgttatattagttgaacgcaatgccaacggaaggtcttcaagtgttccatcagcagacctaacaagattagttatcgagctatcaccaaattcaatgttaaactgccccaaatcctctgctgtgtttccatatatgaccaaactcaaactacgataactgcccctgacaacaagatgattggtgacgacagcctgcaagtcatgtgatatgactcctataagcaataggcccaacaaaaacttaaaaattaactacaaacaagcctaggctgaattttttttattacaaaaaaagtgagcactttaaataaggcaagcctgcatgaatagtctttccccaaaaacatattgatcactctgtatataaagaatgacaccaattcattgatgagtgctggcagttcacatttaaaaaatacagtaagaccgcacttgacattgaacaggaatgtaatgaaaaatagcacaattaattacctctacttcaagcacatttgacgatgaatgagaatacaggaaaggctgacaaagacgcctgaaccttgtctctccctcacactgaacaaatacctctaaagcaaaagaaggaggcaatgtagccctataacagaaaacataccaacaataacgttaaatgttactcgggcatcatgaattaaacacttgaactttttctttccacaaatcttgatagaaccacatcaaccaggcaatataacactgctctataaattctctaagattttgcataaacaaaagctcttctattccaagaatgaggatgatgaataaaagagtgtgcaaaccctaacacgagaaaatcagcataaatgacataatcgccaaaccattctcatcatctaagacaaaatagcactttgaagtattataagtataaaacaatatcagaagaagcgtttaactgatataatttccagaattcagtgcaagaaacattaaactagtgattttaattatcaatgccacttacccaacaagtgctactgattgagatgttgaagaagcgttctgttctagaaactcacaagcagtaatgacaactggttcagcaaataacacctgaagaagacaattgcaaaattatgatcactaatacttctcaaataaataacagtaacaaatgtaagttttaaattaacaagaataccccaaaaaattaaagaaagcaattcctctaagtgaaacttcgaaacaaagagaaaatcaacacgacagtaatcgaacaaggagaatcgagacttgagattaagaaaatgaatctatataaatatatgtgtacgaatcattaaactggaaaagaaattaagcaaaaacgaagtaagacaggaaattgcctcgtcgacatattcatcgagatggggatggacgaatgtctgagcgaacaaaacgcaaggctccggccgacccatggggcaatttcggtgaccctcgactgaaatttagatttgtaaagaagacatgtagtggagtgtctccaagttgaggttctagggtttgagcagcactgaactgtatggaggctaaatggcaggcagtattggggattctttttctggtttatcgtcggccaaagcgaacgacggagagggaagggatggatggagggaagacattttgaggtatttatatttatgtgatttttttctttctttttttcaatgtcatttttaaaaaattagtaaaattaagactacttttttttttttttttttttgt

SEQ ID NO: 302630 - DNA, 2888 bp, Cannabis indica
tggatgaggatggtaccgttgggaaaggaatgtcgttattagtttagtcatattttactctctcaccttctaatgagactgattttgtatttaagaacaaatggatggtctggatgacttaaattagctatgtactagttagaaatgagaaatgatagacgctaggtattattttggtattttattgacttattaaatctatctatttggtgattacataattatgggatattactgttcttttatattgatgagtggtcgtgattttattactaatattttcttattaatataggagttaatccataccttttaaattagtattttgtaatataaataaaaggatcatttataagctttattttcctacaagggtcaaagtgtgacctttgaccacctaaattatggatattacacatctgctacagcctagggctcgggtcgtgacaatgtgtccatgcaactttgataaaatattcctaattgacagcgtagtgcatggacggagcacgataaatcgaatttcttatataatatatatatatatatatatatatatatttttattagtttaaaggtgtatcctagattttggctctatttttgtttattttggggagagtttatatgcgaggactcattttatttgtataattagtttggagatagccttgcaattgctaaataattaactccctgttttgtgaaatgggcattcccatctcggtataattctaagcaaataatgccacgactatatagtaataataatagcatatatatcttcttgttcagatacccaattctcagtaaaccctttaaatggctcaattcatagagcttcaacaatcatgcaaataccttatgctatagatagatttgttggtatgctggacctaccctacaagtgagttgtgaactcttgcatttatgaaccttgatatacagcaggttaaaaatcaccctatttttagcatcttcattgagttgacaggagaagaagcatatgtgccttaaacaatggcacctgaatgtaatttggttgaatctctatgctctggtactactaatacatcatttacattgaagtgattaaatactttgcagaattgaggttgatttcgtcatcaagtaagtactctttagattagtaagaattgagcttgattggtttatgttaattttcaaacttctacattttagaatgatctctaaagtgtggtttaaagttttggttagattgaatagcatagtcttcaaggtataaaccaaaataaaaagaaaaaactaatcgttagtagtttttggtaattttctcttaatttatcttatccaaagtttttttcttcagatttgtctaatggatgttgttttgcattcgttatttgcaaagtgataaattagttgagtcattctcttttttataattatagaaaaccattatgatcatgacttttaagtagagtcattttgagaaaccatcgattgtacattcttgcaaatcattctaacatgtttatatacatatagtggaaaatggaaaatggttttcacttaaaacatgctcagtgctgtgtttgagagtaatcctccattagttcatttttccataattttgaacctttgacaagtggaactacggtaaacgttcatatgatgggttccacacttggtgagtatttattttatcttcaataatttttgaatctgtataagtgaaagttttttagtggaaaatgcaaatgtatggcatgatttgttgataagcaatatttatgctcttgtaaagtacttttagaattgttgttgagagtaattttaatcttaaactatcatatatattcatttcacaagttgcatttattgagaaatttgaatcactattagaatattagttcaaagaaagtgaagcctcaatcacccttgaagtatttttgtttgtcaaatgctcttgaaatattgatcattctgtattgatccatatattgcttataaagattaatgaatccaactaagacagtttggtgtttggtctcttacaaattgtgggtttttgcatgtgatggtgatggataattggtggaattgatgtggtggtggtggtgctgctgcaggtagaatttctaatttcctttatttcaactattaagttgttttgaaaagaaaataaaataaattaatatttgatttatgttcaattctatggatttatgtttcttatgtaaaataaatatctttcattcaccattcaaaaaaaaataatatatatatatatatatatatatctttcactctactctattgtaagtaataggtacgtgtagggcggaagtaccttggccccccaccccaccgtatatgtgcactgtttttttaatttttatttatatactagataggatctgcccgcctactgctaggcccacaagtggaactcgtgatcggggatttggcagctgaccatttgcagtctgggaagtattcatcgctggatcttcgtccgtctaacccagggggatgacactcggaggttgctgacatacagtttggtaggcttttcgtaacagcacggtagcttcccgactacgatttcaatctctccatgatgagcccttaacgcttccatctctttgtctctccactaactaaacatacgcctttgttcctcgaacgcgaggtttatcgcagcgcaaagttcttcctgatcatgatgtatggtattggcatgaccctgcacaagtccaagagtagcacagagatttcgtaactcggtatcatctgcaatggtcgtttgagtgttggtaacgggcggaacgacttgttatgaatgccctggttgggtgctgaactgttattcccagtctcttgcacaccaggcgcgattacat

SEQ ID NO: 302631 - DNA, 2008 bp, Cannabis indica
atgtaccaaatcatgctacctgaacttttctgaccgttaaatttttttcttgaactattgaaattgttagatttaaggacttttatctaattacatttaattttactatttcagtgattgtttatgtactaaatcatgctccctaaattttaatatctaccaaattatgcctctcgaactttaatatatattaaattatgtcccctgaactttcattcatattagatttttttattaaaattagacaaaattcattaaatctaacaatcttaatataattaagaaacatttttaacaactttaaaaattaaaaagatataatttcgtacatattaaaattcgaggtcaaaaattataattagctattcacttatataaaaggtgacatggcacgttgaagacaccctataaatcataaacctaacctaaccccttcttatctcactttctaatctcctatcttttactactactactgactaaagataatacagtctctgactttttcaaaccggtcccacctctctcatctcactcactcacacccacgatcacataacaacgaccgttgatgccttgatggtcgttaactactaccctcacaccaagggcattttcgtaacttcacccacacacacacatataagaaacacaacctctcttcccccaccatggctattttctcgtgaagaacaagcgccaggagcgttttctctctcacattcatcaccacacccccccactcctctctctctctctactaaaaaaactcaaagcccatttcatttctctctctataaaaaccacaattcaaaacactcaaaaaaaaaaaataaatcatgaataatcagtctgagctagaaaataacagtattattatggaatcagtaatattaccaccaaagctctctctcttctcactccccaaccaactcccggagccgtcgggcggctcggcttcaccgccgcggcgagtctcggcttcggttcctttccagtgggaagaagcgcctgggaagccgagagccgagccgagtcgtcaaggtggtgcagatcaagaggaggaagaaagaagtttaatgatgaaatcgttggagcttcctccaaggttgttgggtgaggttaaatttacgaatatgacctcgtcatcgcctactacggttctttatgggcctgaagtgggccggtctctttcgttcacgttctcgtttcgaagcccaactggtgatcagaaactgagcagagatagagttgggtattttgggtcttcaaggtggggaagttttagaaagaataataataataacaataaggtaccacctgtagtcgttgggggtagtttcgacatttcacctaaggagttttatcatcatcatgatcatcaacatggtattactactacttctagtaataatactaatcatgattataatggaaaagtcaagattagtagaattagaagaagaggcagcctttcgagtttttctaacgcaaagtcacatttgttggtaagtaacgaaaacgacactactttatttacacaattttcacaacattttttcaaaaaattataaaaaatttatattcattttttaccaataactaacagatttatttaagtttcattactatattactatagagagcattaatattgcatggatctatataaaccattatatttatacctagctatacgtactagcacatatataataataataacattatagaatatggtattattattataacatatacaactcatgaattacaaaaaggtcacatgttatatgcattatgttatatatattgccatgttgtatctcgtttattattagctaatttaatttgcctaactatactaattaagctttttctgcaaaaaagaatcaaccagtgaaacagaatttttattatatatatatatatgggtgactattcaatggttacatttttattgtaaccatatggtaatagcaggttactaataggtagactttccttt

SEQ ID NO: 302632 - DNA, 850 bp, Cannabis indica
caaggccattcacgaaggtgcccaatagtgtttcctttccaccactgtatattataagagtattgttattcgacactccaatccaattaactttattgatagtgttctataattgtttaacaatttttttaaaaattattttttttaagttatataagactcgagtttaattacacttataacaaaattacacaaaaaaaaatactaaacaccaaaaatagattttagcaattatcatattataaatttcagccttgagtagctaaatctcatgacttctttaattagttgagtgattaacaaaaaattatagtttaattatataatggcgatcatgacatcccacacttgaccctaatatatgtttgttacttacaaattcacattctcatatttttttcttctatataattggaaaatcataaagagtttagaaaagtaaacgactctcacatattttaatttaataaataataataaaaattgataattaattataagacttacatattagtataattttagccaccataaaatattcaataacaataatactcctaattacacatataaatgtgttggtagataatagaatttaggagtgataaacataaattgtagcatgtagtgagttgagatgagctgaaattatatgtggtaggaaataaagagagaattacaggtactaccatatttagaaatgtatctaaattcaattatctaaattcaattcaactaccagaatagctactacaaaagcaactaaattgtcatctacatgccctccacgtcactacattgattatttttttttagaaaatttaaaaaaaatactcttcttttatatttt

SEQ ID NO: 302633 - DNA, 1102 bp, Cannabis indica
gtgacgtgcctaattgttagggcattacacaaggtgttcaagaacatgtatgggaaagttgcaccatcttcttggctaaaaagagggcataactcacataagatggcgaatctcacattacaacataaattctctttgtgcagctctttagtaaaatggtcataattcactcaattcttatcgaaatggtttggttcaagttgtgttagaaagatattttcatgacatatctgagcttgtttcatggtcatatcaattctgatattttcgacctttaaattggttcaatccgagtgttatcccaaatttcgtccacacccctccacgtggcaaaaagcataaaatacgttgaagacatgtcactaacctgccaagattagtgttgtgcagcctcccaacccttgagattcccttactgaacggtggacacaagcaaagacaaatgtacaaacctaccagtaaaatcctacatggacttaatactgggagtgatagcttcaaagcattgggcaaccttcaacagggctgaccgaccaagtgtacaaaagcacaccagcatttgtgtttttctcacaagccttgcaactcgcctttagcattctcacaactttagaacagttcaaattgcccacaaagataggaattctccatcaaaaataacaagtgaattatttactttgtattccaaatatagtgtaaatttcctattttccaatgatatcactatgtacagcttataaacaccaatactatataaagggtcataacctaaacctgaagggatgatacaagtacgcttagtagcactatagcaataagcctttctcttttctcatatctcacttacaaaacacattctcgttgtaatactaaagagagcctagctagaaattacaaggttttagcgtgtattctacttaattatctcaagagtgactacaactaaaaggggagtaggtcattatctaaacaaaagggacaaaacctctataaatctgtgtgtctcctacatttattatcattctcacgtgacagtcataagcaaaatccaattctagtcagacttcgcatcggttggctaaatctgttggaaatattttac

SEQ ID NO: 302634 - DNA, 2473 bp, Cannabis indica
ccaaagagaatgaaaataggtccaaaaatagtagattgtattttcattggctatgcataaaataacaatgcatatcattttcttgtacatgagtctaaaaacctagacattcacaagaatacgataatggaatcaaagaatgcatcatctttgaacaggtatttccttgcaaagatgatggggttggaccaagttcttctaagcgaacatttgaaacaatggatgatcgagaataagaagagaaaactaatgaagtccaagtagaccaaggcgaagcagaaaggtaaggatagaaaattcttttggaccaaattttctaatttatatgatagatacagaacctcgaacatataaagaagctatgagctctattgaaggtccttttttggaaggaagccataaggagtgaaattgattccatcctacaaaatcatacttgggaactagttaaccttcctcctagatgtaagcctttaggttccaagtatgttttcaaaaggaaaatgaaaacagatgaaacaattgataagtacaaggcccgattggtaataaaaggttacaaacaacaagaaggccatgactactttgatacttattcttcgatgacgagaattaattctattaggatgattttggcaatcgttgcattacaaaatctagaagtccatcaaatagatgtaagaactatctttctaaatggagatcttaatgaagaaatatacatgaaaaaactcgagatttttcagttctagggaaagaaaggaaagtttgcaaacttgttaagtcactgtatggacttaagcaagcaccaaagcaatggcacaaaaaaattgatggtgtcataatgacaaatggatttaaaatcaatgagtgtgacaaatgtgtgtatatcaaaaccacaaacgagggatgtcattctatgtttgtatgttgatgatatactcattttggaagcaaccaacgaatggttaaatccaccaaaataatgttaaactcaaggtttgacatgacggatatgggactggctgatgtaattttagggatttaaattataaggacgccagatggactcagtttgagtaagtcatactatgtggacaagatacttgacacattcagtaaaaatgattctgaaatttctagaacaccaatcgatacaagtcagcatctgtcctagaataatggtgaaagtgtgtcccaagtagaatatgctagagtaataggaagtctaatgcacttgatgagttgtaatagaccaaacattgcatatactataagtactttgagtcgattcacaagtaatccaggtcttgaacactagaaggcgattgcaagagtcattaggtacttacggtatactcgtgactatggactaaactatactagagatccaactatgcttgaaggatacactgatgcaagttagatatctgatattcataactcaaaaggtactattggatatgtcttcactataggtggtgcagtagtttcatagaaatctttgaaacaaattgtaatcactaggtctacaatagaatccgagtttattgctctagataaatgtagtgaagaggcagaatggctacgtaatttccttgaggatattccagattggcctaaacttgtgcttgcaatatgtatatattgtgataatcaagcaacaattggcagagcaaagaatgttttgtagaatggtaagtcaagacacatatgtcgatgacataatactgttagacaattgatctcaattggagttatctcaattgactatgtgaagtcaaaagataatattgtagattcactaaccaaagggttaaatagagagcaagttgaaaagacatcagaaggaatgtgacttaagcccagaagaaattaaggttgatataaaggaaaacccaacctagttgactggagatctcaagatctaggttcaatgggacaacctaattatagaaaccttgtaagatcactgtgtgggactaaccctacccattatgttgataaaatagtgattcccattatggaaaaaggataagcactaagattttaatgacccttatgcgtcggaagtccgaacggaacaatgcgggattgttcttaattaagaggtcacctatgtgagagagaagtggggtcgcttcgaaggagaattatgggggctaaattttctaaaacctctcgttgaactagacagatgttcatggccaaaaatgaacataatcatgagaaccaaaatgatgccaggaagatatctgtgtaagatatatcattatttacatcaacaacagacaattaaaagacatctcgtccactaatcagctagtaaagtaaatatattttcaaaagggaaggttcaaaggttaacacccacctatcatatgcatgtatctaccgtagaattctatcactgtaaagcccgcttagttaatttggaaattatcagttaattatgattatttatgaaattatt

SEQ ID NO: 302635 - DNA, 2384 bp, Cannabis indica
aaaaaaaaaaaaaaaaccacttaactcttacttgagggttttccattgcgtaacgaaccatatcctcatgattcacttccagaggatcatatcccaacttcgcttttcttacagcctgaaacaataccaataattataaactttctagtagtgaggacattaatagtggctcgattttaaaatagaaagaaatgaacaatgtcaatcttttttcttttcaggaaacaacaaattcactaagtaaaagctattgaacgatacagttttattcccagttcattaattgtatgagcatattacatgaaacacactccacacaaaacaaacacaactgacaagcaaaagaggagaagcaccgcaagagaacaaaacatatggaagatactgtttgatatctaattaaaacaaaaagaccaagatatcccaattgatagctatatataaatataaagaaaataaattatgagaataagatgatataaaacaacacgacgtacttgcaattattggccataagtcccaaaaccatcgcagcaaaccaggacgagctctttaaatccatggaaggacttagcaaggtgagtgaaatcatacttagcgatagacatgtgcttgaggtaagccttggccatggacgtgacccagggcgagaaatttcagctccacgacatcggcttaaaagggaagcagcgactatcgtcgtcgaaatcaaagcctccaaccgccatagatgccgcacttcccattgcacaactctgtcaacaacaatgaagaatgggaagaaggagatgcagcagttaatttagagaaagggaaaaagattaagagaaagtgtattcccgataaaaatggagttgggcagaacacgttcttcagtgtaattattcagaagtcgtataattgccacagaaccgtgtttgtgtattaaattttattttaccatataaataaataaaaaaaatgattattagtgtataagtgaaaaaggccctataaaaaactattaacaaatttcttacacaaaagataatttatgttcttatttatcatgcataccctctaacaaggtgaaatcatgttggctatcatgacaccatgataagaaacataaatccaaccaagtcgagaaagcaaaacatgatttccttcttgttctatgttataagcaccgttaattaaaagtaatgaaaagaatcagatatttaaaacaagcagaggaagaaaacattttcaaaatgcagttgcctaccacagcaattagcaaagcaggtacagaaattctctcagacaggatgtattgttggagaaaaggaatttttgtcagagttaaaagcaccagagctacaaagtcagatttaatagctcaaaatgtacctgaggaacaaaagtttgtgtgttctggccaaagcataccccataggaatcaggtaaaacttcacccgggtagcaagctggtgtaagttgaacagcaaaatcaaattgagaacttatttttccccttttaagaactatatttgagatggaaggaccaatgtgtcgtacctcttcagctttggttatctttactggattctactagaacaacagcatatacctcctgctgctgtcagtttaatcataaagagctgctttatcaccaccaaactttcattctgttcgaaaaatagaagaaaattttcagttagtattacaatgtctgcatttgtccttatctaaacaaaataaagcaacatttcttcagtaactcattataccgaattcccagtttctgtaatcagttgtaaacacttcattactttcatcctacctgaattactatcaatccgctataagtttacaatttttgtcatcgttggaactcgtacacattgttgtttaatatatgcaggaaggagtaacaaataatcagttcgcataaattagtgataaataccttgaagaagtagtcacaagcaattcacattatgggaaaggagctccaccattgattaaactagccaaagactcattctactattagtcttcttactttgcaagtatttcctttgctaaattactagctttctgcagctccccttttgaacaaagagaagcaattttcgagtagtaattgtcgaaattatgaaactgatatcttcctaaaagatcatgatctttcactattttctttccctttgtactgaatgatccaatgagcaaatcatttccttcagggacagttactgactttgacaggtcagaatcatcccgttcataatgtggttgttgtataggtgattcactgaaatatgtactacacatctgagatggataaagtatggacgcaacttcattaagcaaagtaagtgctctctatacttccttgctcacataagtagatgagc

SEQ ID NO: 302636 - DNA, 1504 bp, Cannabis indica
agcatttttttttgaaaaagattagattaaacagaactgatcatttaaggaagcattatcttaggaataacactatgcagtgtgaaagctttataagaataaataaaaagataaataagaaagacagaaaattctgatgggaaaaatgattagtgcaagtaggtagatttgaagtttttgtctttctttctttcttttttttagtggtgggccattagagcggtaggtgagagagtttttagtgcttctcatgctaaccacatctattttactgcaatgaagaagtttcaactgcctagaacataataataaaatcatttggacaattcataaagtgaatactatgaacacaaaattatttacatcagaagtaatctgtctcaaattcaatcaagccactgtgactctgctccagttgctccatttgttttctttctttctttctgaaatattagctcatgcatatgtatgatgagcagtactgatagaccaagtaatgctgttatggcacttaataactatgtaaagatcagagcaacattaagagatatatatccaatttgatgatatcgagccatgaatggcagtggcagagacactattaatctttccttatgagtattgattgataaagggaatgtaaatataaatgtagctcattttttcaatctaagttacttgggaggtgtgttatattgttaaatattaaaattgttgaattgattttgaggatatgagagtgaacagagggggggtcaatatcaatggtcacatttgcatcttaggccactcaatgaaatttctttgtataggaacagtagcaatatacaatgtgagtgctagacatctttaaaatcatataactggctttaataaatgtgaaagcattaaagtactctccatcttctaattaatgcatatgattatatatttgtataaataatagaaaagaacactagtgttttttctttattgttggtataaatacttttatctttgagatgtggtactagtgatgtacgtatctcgttctgtctctctaagtggacataaaagaggccatgctcatcaattatatatgatcctttctatacaagttgacgaagaagattcaagaagaatgaaattgagtgcccaagcccacagatcaaggagtagcggtttattgtgggacaatgtccatgaaataaataataagtgatctaccctttacccattttcggattggtattgtcttgaaatctagagatttaacctttaatacccgaaattagtagcgtagatcaattagaaatttcaatccgatcgaaacccattgatttcccgatgttttccgtcgattttttggccggaaaacacctacagacccgaactgcacaaccgggtcgcgtgacccgtttcacagacccgactggaggttgaagacaactcccagccgcgaagcccactcgcgcaggcggcgcgtgggggcgcgtggggccggctgggaggtccgttttcgacg

SEQ ID NO: 302637 - DNA, 1994 bp, Cannabis indica
tttttaatccatataattcagccctaagccctggttgaaatactataaaaggagcatgatgctctcatctcatccacttgacaacttgactattgccttcagccaaacgtaaatctagttttcattctctgacaactagtagatgagagagttccttccatagtgatttcagcctccttcatatttaggatgttaatcaacatgcttgttagtaaatttagatcctggtaaaatattcccaacgatatttgggttattcggtttaatttgggcgggttgtttgggttggcggtttataaaaatttatgtacagccctagttgccccttaaggcagcttgtactaggatcttccaagctctatgagccgtagtaagacagttgccctgggttttttttgaaggagaaggtatggaaaagacttcaaggttggggaaccaagttcatatcttgggagggtaaagaatttttagtaaaatttgttgctcaatcgctcccaagctatgtcatgaatgttttttcgctacctcttgaaataacgagagagatgaagagttttatgtcaaagtattagtattcattggatgttgtggaaatgactttgtaaacacaaaatagaaggaggaatggattttcgcagtctaagggattttaatttggcacttttaggcaagcaaggttggaagtttcacactaagttagagtccttggtatctcgagttttcaaagccaggtattatccaaaaggaaccttcctcactgcatctattggttccaacccaagttttgtttggcgcagtgtttttgaggcacaatacttagtggctaaatggtgttcactggtctgttggtgatggtataagtatttcggtgctagggaaatcttggttacctgataaagtaaacctaatggttacctctttgcacccgattcttgttaatgcaaagtctctaatcttatgacaatggatggctcggattgggatatggaagtgttgaatgatttatttgaattgagagaccatgaattgattcttcaaattccagtttgagttttgttagctcaagattgtctcacctggtccagagaattatctggtttatatactgttaaaagtgcctataaattgatccaagagcttaaaggagaggtgaatttggatgagtcttttgtgaataaattttggaaccttaagcttcccccaaagatgaaaaatctagttgggagagctggaagtggatttcttcctaccatggttgaacttcgcttaaaacatgtagaggtttgctctctttgtccagtttgttcactagatgatgaatctattttacatgcatttgtaacctgtccaattgctaaactctgctagaatcgtgtggtgttggcataggggtacagcaggaggcgagttttttgtcctagtgtgttgaaaaatttcaagtgctcaatcgagatagaaaggggatgttggtggctatttgtacgttgagttgtttggaatgctaggcatgaacgggtttggcaaaataaagtagtatgtgtggatagcatcattttgtcagcaagcagcttccttaatcaatggttaaatgctcaaaatactggtttggagtcttcatggtctggttttttaccaggcaatggagcagagcattggatggttccacaagaaaatagtgctaatattaatgttgatggaacggtgtttggtgagacccgacagtttgggattggttttgtggattgtgatgcacggggatttctcattgaagactgcactaggactttccatggtcaattttctcctgaaatagctgaagccatagggatccaataagcgctaagttggatcaaggagcgtcaatagccataaatggtgcttgaaacagattgtcttccgatggttcaagccttatgcagttctattgtaatgatttccatgtttggtcaagtggttaataattgtaaggccttgcttaatgttttaaaaaatgt

SEQ ID NO: 302638 - DNA, 2192 bp, Cannabis indica
gagagagagagaggttgaaattagggttcacaattagagagaagaaaaagaagaagaagaaatatatatatatatatattattgttgttgttttttataattttcaaataaggttttttataataatatttaaataattagtattatgtggaccactaaaaaattacagtacatgtggacagtccaccgtagcacttaactaaggcttttgaacggcagtgtaaagagcaaaaagaaatgtgagtttggtaggtcttgccgtcgaaaaaatcaatttatgtggttaagtgttaaaaaataaagttcgggtgattttgcagccaaaatccctataattaattgggtaattggcagcgaaacctacttatgtgtaatttttatatacttaactcctgatcttttgttttagtgataatacctacttaatttacttttttggtaaatttgagacgccagttaaatttcaccgttaaatgccaattatgattgccattgtgtatacctatttacatgtgaactaaaacctcaaagccaataaaaacatgccacgtatacacatgtatacacagtaataatctatttagtatttatcggtaaagtttaaccggtgccttaaacttgcaaacacaagttaaattaagtgggaattgccacgaaaaaaaaaggattattttaaaaatacccaaaaatttatgtttttacggaattttaaattttttaacatttttacagacttttttttcttaaagatttacatattctaaaaaaaaatattatttacacgttagtttcacgttgcaaaaatatagtataacattacgacaatatgaaaacaaaattaaaacgaacataaatgtaaataaaaaaattcataaaaatataataaaaaaatagtattatataaatttctaaaaaaaaatcagatacaaaattaaaacttcaaagaatttcgtcacgaattactctattaaacatatttaatttgtttactttgatcaacttataattttatttgtactagttgcttcttactactttttttttttgataaattgcttcttactacttattaagcggggcattaataatttttataataattattatattattaccatattaaattataggacatttcgcaataatccaaatttggctacaagtcaaagacaaattgttttgacagtcaggatcaatccaaaccaaagcatgagttatttgatttaatttggaacaatgctatttttttatttttgttttgctcaaatgaacaatgctaattaatattctttatctttattaattataaatactaagagaaacttgaaagtaaattacattcagagacaaccaaccaaccaaatactagaagtcactagaaatgtcaaaggaaataagtctgttgctgatcccaacttccaagcaatatattacaattttactagtttctcttgttcatgttctttattcaacatagtaaacaaaacttggttaagatatcacccaccaaaaaagaaagaaaaaaaaaagacttcacaatagagaagcttaaataaatttagatgcttaattgaaccttttcataaaattttcagtaaagatttagcaataaataatattttaaaaccatggagaaggaaaaccccattatataaattccctctctcccgcgccaaccaacaaaaatattaatgcagattaataaagtactctaacagctctagcatttgaatttttctaccaagattacaatgagcatcatcatcatcatcattgctatcccaaaatgattttctctagaattcttgactttaggggttccggcggccggaaggattccaaactcactttagagctctcaacaatctccttgtaaacactgtctcctttctcagatctaataatctccaaggtgtttccaagaacatcgcctgcaagccctgcatgtacaaggctgccaggctcctcaccaccgtcatgtattaacttgccaatctccgccaaagaagccacattctccatgatgactttcgcaaagattcggccaagatactctggtgcttttggtgcatcggttacggtgtcctcaaaattagacagaaccgattcaaacctgcccagaagaaacgttagtgacaaaaagggttcaagtttctattaatacattccaaaaatatttatatttatatata

SEQ ID NO: 302639 - DNA, 2697 bp, Cannabis indica
aaacaatagtagaacaactaaaaacaatcgtataacaacaataaaaatttaacataatacacagtatttttcgaaaaaaaaatctaccctacaataaaaaaaataaaaaattagaaattttgcgtaaatgattctttttttttcaagttgagtgatctatataatcaccatatgtggccattaaggagttggggccaactcttgcattcaccaattcacatctttgctcactaatataactccactttttttattgttgctgttattgattatattgtaagtgaactcattcctaataattttgtttagaccatttaatttaagctataatattttttttttgaatgcttttttatgtttagcaagttttgatgtttcgagatatgcaagagacatcatcaaaagattaattcatgtccaatgccttcagattcaacgaagcaatatgtataaaatgagaatgtgtttagtcacatgaggaagtttagattgattttcacttattaccaatatttttgtatatttataatatattttacttcaatatatattaatatattaatatcacagatttttaaataaactttgctttaaatgtttaatactataacttacttttttttatgtctaaaacatctattagttaaacacttaaaagcaaaaaaaaaaaaaactcttaaatagatcagggcatctccaatgctcaaatttaaatatagtgtcaaaacaaacaccaaaaagagtataaattgtagcactaaatttttttctattctaactacaacactaaaatttacactaaaaaatattttttattattatattattttattgtactatctcacattgtaatatttatataaatattaaatttaatcataaacacattattttaatattaaaaactaagaaaaatatttagtgtagtctatagtgtctcactatttttagtgtgacactatagactcccacatatataatatgacatttagagttccattaaagcagttttatgtctaaattctactatttttaggattttagtgtcccattaaagaagccctcgtataatcaataaaacatacttaatttcatctcatattatgaaatttatgtatttaataatatctgtattttcatatcacttgtgtatttttgtaatagttatggttgatttctataattctatcagtcaataaaaatgattttaatagtttatcattttttttctattcatttattcaaaaactaaataatttttttaatttttttattagttatgaaaaaatatcttcttacaaatatttatattttatgctaagcatataactatcaagtattccttttataaaaataaataaaataatataatatattcactaaatgtatgtttttgataacaatatatataatttaatttttaaaaaatttctcatttatttaaataatttcttattaatgttttattttttttaaaaaatatatataataggaaaattaccccacatactcttttttaattttttttttaaatttattgtttgggttgctatacgaattttgattgcaatttaagatgtttagttagttgctataagtatttcagtgtagaattccgtaaaaatatatatataaaaaaactattttaaagtgtaataatagaaaaactctaaaatagtatcaatcatttttattttcggattaatatatattaaaggctaacatattttattgacaactttattctttattttttttaagttttagttctataaatgcattctaaaaaatttcaattttattccctacataggatataaacatgtagttgttaagatcttatatcctatttacggtgctcttttctttccctccctcatgccttaattctttagttttttttttcttcaaaatttgattctcataaaattcttagttatactatattttaaacgtttcctctctgctctgctttctctctccatggcgaggaagaagagggtaggtcggaaaccagtcacgcgcatccctgtggaagacatcttcaatggaaacacttcagaggtggcggcggatgatgattcgcactcgacggaaggcttgtagctaatcgctgagatggtcaataaccatgacataatcgaagcagaggaactaaatcgcacccccaggagtcgatctcaaagctgggctgaagaggttgatgaagagctcatgaagacgggagaacaccagtaatcaccgaattcgtcgtagaaggtctgggagagtttttcgaaggagaagagtctgaatcgggatcaaaaaatgctatacacagaaccattgattagggatggattgaaaatagcacaggtggattttgatgaagtccaagaagaagaacaatgctggaaatcagcagttatatgcaaggtactgggagctaatccaccaatcactatatttgaaggatttgtgaaacgaatttggggtcatcttggtattgttcaggtttcaaaattgtcaatggggcttatcatggtgagatttaatgatgaggccacgagagatcaggttgtggagtcgggagttgttaaatatcctatctaaggaacagtctccgactgatcctcaagagatagaggacatggcgaaaattccctatgcctctgcagttggaagtctaatgtatgcaatgttatgcactagacctga

SEQ ID NO: 302640 - DNA, 4188 bp, Cannabis indica
tatatcatatacagacattttgcttatgtgggagtttagtatggtcgaagctaggggttttgtgaaaacatctgcaagttgaaggttgctattgaccgggctgagtctgagctttgatttgttaattttgtctcgaataaaatggcagtcaagttcgatgtgttttgttcgttctggaatgttggattgtttgctatgtgaatagctgattcgttgtcacaatagataaaggcaggttgatcttgaggaatttgcatatccttaagtaggtattgtagccatgttagttcactgcctgtggcttctagtattctacttcaacagagcttcgagaaatggtaggttgcttcttggtacgccaagatattaagcagtcgcgaataaaaatgcagaatccagtagttgattgacgtgttattgagcaggaggcccagtctgagtcaaaaaatccctttaggctcaatgaggatgaggcagagtaaagaaggccctgaccagggctcccttttaggtaacggtaaagatggtgtgcagcttgcatgtgtggagtacgtggtgaggacatgaattgactgagaatgttaactgcaaatgttatgtcttgtctggaaagtgtaagatgtaacagttttcccacaagttgtcgatagggagaaggatcttcaaggggttctccttgttgatcatctaacttgattctaggatccatgggggttttggttggcttattccctatatagctgttgtcatctaagagctggagtgtatactttcgttgtgataacaccaaaccttctttggcacgagctatctcaaatcctagaaaatatttgagagtgcaaaaagcttgaagagaaaatttctcatttaaagtagaatgtagttgatttagtagggataaatttggatccgtgagtataatgtcgtccacataaaccaatatggcaaaaaaactgtcttgtgaacctctggtaaatagagtgtagtcggcctgagattgaacaaatccttcctgaatcaaagcatcagacaattttttgtaccattgtcttgttgattgttttaagccatagatcgatttgttcaatttgcacactacgttgggttcatcagcaacttctggtggaagtatcaaacctttggaaagttgcatatagacctcttcattgaggtctccatttagaaacatgttgttgacatctagttgtaatgtgtgccaattcttgatagtgacaattgccaataagagtttgaaagtgaccatcttggcaaccggggaaaatgtgtcgaaaaaatccaacccttcttgttgagtatagccttgtgcaacgaggcgagctttatgtctttttacagaaccgttactgttcaatttgatcttgtatacccaacgacatcctatagctttcttgtttggaggtaaacggacatatgtccaagtcttgtttttgagtagtgcaaatagttcctattgcattgcttgattccaaattttcagctgggatggttgactgtaggtagctggttcaaaaagagctataatgatagaaataaaagccttgtgagtgttagacaatttatcataggacaagaatttatcaagattgtgaggagtggaattttgtcttggagaaatgagtgacattcatagtcacgtaaatatgcaggctgtttgataatcctgctggtgcgtcttggtgctggaggtggttcttcttgttgaatggaaggttgttcattttctggagtttgttcctgtgctgaggagttaatatcattagcttctgtgctttggtcaataagatcatcttgcgaagaactgttagaactaggaactaaaacaggaaattcagtaataatagtttcagatatatgaggagaaggaagaaccatgttagagaagggatcaacatagtctttggtattgttaagccgatggaaaggatatatattctcatgaaaaataacatttctagagataaaaaattccttgttgttgatgtcatataatttgtatccttttatgccttggggatatcccataaacacacaagtcctagctcttggtgtgaatttgttcctatgagcagtgagagtactagcaaaagcaagacatccaaaatttctcatgtgatgatatttaggaaagtcattgtaaagaatctcatagggacttttattttcaagattaggagtaggagtacgatttattaggtatgcagcagttagaatgcactctgtcctaaaatgaataggtaacttagcttgaaaataaagggcacgggcagcattcaaaaggtgttgatgtgtcctttctgctatggcattttgttcaggagtttcaacacaagtaaactcgtgtaagatgccaaacttggcaaagagatctttaaaagttaattcgagggcattatctgatctgaaacatttgaagatgtagttgaattgggtctgaacataagcaagaaaattaggaataatttgcatagcatcaaacttttgcctcataagaaaaatccaagtgaacctagttatatcatcaactaaagttataaaatacttgtggttcgcgtgtgaaggaatatgataagggccccaagtatcacaatgaattaaatcaaatttggatttagcaaaaccagtatgctttgaaaaatgaattttcttttgttttgccataggacaaacataacaaggagatttcttattaacattgtcaatgttacattgaatcttattacaaagtaaagctaatcgtttgtaggaaggatgtcccaaacgggaatgccaaacatcagtagtcattgcattgttgcaagtgtccgtgcgtgtttcatctaaaacatataagccattgcattctttacctttgccaatcactttcttggattgcctttcctgaatacagaaaccatcagtgtaaaatttaactttaatgcattcaattttggttagacaactgacagaaagaatattaaacttaaaattaggtacatagagcacattctcaagagtaagatctttagaaatggcaacagtgcaactttgatttatcataaaagattcattgtttggtagaattaatttggtagcagaaacataagagagactttgaaataatttggcattattgcatatgtgtctagtggcacccgaatcaataatccatgaagtatcaaagtatccagatgaaacataggtgagaaccatacctgaattacccatggaagtgccaggatcagtagtacttgtgttaatttgttgattagcaagaaggttaagaagttgttgatactgattggcacttacttgaggtaaaagggtgtgagtgtcctcggttttggccttgttctcttcattagtttgaatctgatttgccatggcatcctttgacttgtttggtttgttaaaaccaggtggataaccatgaatcttgtaacatctttcgatggtatgaccatgaatgttacagtgtgtacagaaaggtctccctttcttaggagattgagttctttggccttgactatctggtttatttcctttgtctccttggaaggcaaaggcatgacttgtgttaggattatttccagcacaattgtttcccttttgattctcttcatgtgtgaccaagtggaaaacacggttgacatctggtaaaggatccattaacagaatgctcccacgaacttgggaaaagttatctgataaacccgtaaggaaggacatgatgtattccatgtgatgatgctcctgcaatttcttgactcccccacaagtgcatccattgcaggtgcaatttggtctgtagttggccaattcttcccaaattgttttcaatttggtgaagtacatactgatagtttgagcttcttgtttcaggttcatcatattctttctaaggttgtaaatgtgtggtccatttctttgattgaatcggaccttgagatcattccagatattggcaggggattcatcatacaatatactcgaggaaattctctttggaaattagaatttaaaatccaagtatatgacgatattattgttcctaatccaagcatttatacagtacgtataatacaaaaaggcattggtttaggaatagatccatccaagaatccaagtttatttttcacagaaacagaaagttgcatggctctactccaagaagcatagttatcttgtcca

SEQ ID NO: 302641 - DNA, 1760 bp, Cannabis indica
gtggataattttgtattattatgttatttttttgttttgtattattttgtgtgttttgtttcttgtttcttaaaaatttaatgtctttctaaattctttctcaggctctttcttataggatatatagataataagaatattgttattagttcaaaattaccaattaggatagataataaaaatattattattactagcaaagcctttataatatatagtaagcgtcaatctgatcaatagcataatttacaaaggctaagaaaaaaccgagttaaaaaaaagtattgagattgattaattagcgttatatctctctatcaatgcaatcataaaattgagttagtgcatgactagtcaaaaaaatatctctagtgcagtccactatagcatcttttctctcgattcttcaaaatatagtatctaaatcccaagatggtgtttaatggtgtgtcaaatgtgtgcatgtaaaaaatcttatatatatgaatggtccaagggcagccaaggtgtcaagggaaattgacgtagttgcatgagtgagtcatgtgtcatgacttgttatgcatgcgttagatcgtgtaatgcatgagtttaacacaactgatattcctacacgtgtctcattctctctctctaaaatctggttcttattatttcataccatattcgagaggctatcatcgatcgattatcaatgtcttgtctattacaataattaataagaccgaataatcaagaatcttttacatcttttttgatgataaggttgttatatattatttataacaacaatatgcagtataccctttgctaatttgctagctataaataagaggtcaagtagtacacctagcttgttcatcaatttatatctataattaataattaatatggtgattcttactagtagtgagaagaagcctggattttggatggtagatgatgaagctgtgaggaaggaataccaagttgcatcggtcttctcttcttaccaagaatatgatgatgatgacgatgacgatgacgaagatcgagttacagtggcacccgccgcataaaagcttattagggtttaatatttagataaggtttcgaggtataacgtatgcatgcatatgctgcggcattttctctttctttctctctctctcttagtatttgtagagtgagagagaaagaactctagcctttatcgtcaatatataaaaatatgtgtgcaattgtttagctcttgattataatgtacttttgtggacttaattgtcagctaattattaaataatatgtacattttaattgtttcttactgtgaatgtatattgtatatgtgtagaagataggtatatataatagtattcaatttcatacctctaattttttaattatatataaattaaaatgacaaaaaatgtttcacctgaaatcaacataagaaaaagaaacaggttgtacagcggtttcatatatcattcttaattatatggcctaaaatgtagtgatcaaattttatttaaaatgggttcctcaattattatatatagataggtaagtgtgtgctaagtttgtgtttgcaaatcatcattagtgaatatgtacatataaattataaatgtacatcatgtataataaggtatttgtgcgtgagatttcatgaattgaataatatatatatatatatatactagcaaaaaactacgcgcgagacacgtatactaaattttatactaattttttttctatgttatttgaaagtgatacaa

SEQ ID NO: 302642 - DNA, 3937 bp, Cannabis indica
acaaaaatattatttttaatgcaaaaaagtatactataaaaattttagaccctgaatttagatgagccctaactcgcttaaccaagacctatgtggaacaaaaagagtctctctcatattacaattgtatgcatttcattttaatcatcaatttcattctcttccaatattttttcaacttatttaaagtgttgataagtgactcaccaaccaaaacaggaaaattttgtgggggtagcatcaataaatagatacttaagccttgattcatcaaaacaaggtttcttacaattgttggaacttctcaattggattgtgaatattttttgttgtgtgtaactaaagtctcacattatttaaaaatagaaaaatgtcatgattatataaggatgaacaatatttttattagttgaggttttttgaaaaaaaatgtccaaaaataaatctgtaagcgtttaatctcaaaccagataatatcataccaatataaagatacatcgtgtctatcattctcacaatctcgataaaaagatggtatgtgtatatattttaacttgtattgatagaataagtaacattacatattacccttagatgggtacaatggaaacaaacctcgagagacaagattactcacattaaagttgaaaaatcaattggaggcattgtcacatcaaaaagtggtactacttataaaaaccatcttcaattcatagttctttaattttatttttattttcttttgattttaaagtacaagagcattctagaaaacccagcatgctattttcttttcttccaagtgtgttgaaactcctttatttgttaaaagagatgaagaataaaatccaaatcactagtggaatcaaatgattctttctttgttcctcttttttggattaaggaagtagaaagagtaaatatcaaaattggttaaagaagagcctaatttaaagttccgtgattctttcaatacacttgtcaatttttttatttttttttgaattactttgacccttattgattaaagagattattttacaaatataattgtacataattttaaatacttttacaattttattcacaaaaagttatatcttttaatgtatttttatattgtattcttgttatttttttgttatttgaatgttatttttttgttatttgaatgttatttttttgttatttttatgtaatttttttgttatttttgtattgttttataaacatcgtaaaaatgtaaaaaaaaaacctttgaatttgagtcttgtgcaatggttttgagcccattattaactgttctcttatgttaattttagggaatcttgagcctcaataaacaaaactagcatcttttcaaggcattagattccatgttagccaaaatggctatatattcctcactcaacccaattattttgagcattataactaacaaaattgccttaataacaactaaagtaatatattcttctccttagtgaaacttaagcaaagcataatctgcctaacaataatagagctatatagtcactattgaaaaatccctttttcctattcaaaaagacaaatcaaatccatacacatacaattaagcatatatatatcaaaatttcatgtctcccacttccacattcaaaataacccaataaaaaaaacatagcaactcatgaagatagacaaagaaatctctcaccccatccatccataccacaaactcaaacttgaatacactgaaatcccattcaattgtgatggatgtaaagaaggtggaattggcctaaagtacaagtgccaacactgcgaattggacctacacaaaacttgtgttgttgctcgtccaatcataactcatccattttacaacaagtgtgaatttcaactacactactctccaccaggggaagccaagagattatgtgatggttgtaaaaatgaagtgttgggttttgtttaccattgcaagagatgcgatttcgatctccacccatgttgtgctaacctccctcaagtcctagatgatgggaagcacagcctttacttgtgtcacaagttaccgagcgcttgccataggtgcggcggtaaggggtcagggtgggcataccggtcagagtgcaggacatataaccttcatgtgggttgtgttaaggagttggttgtggagagttgggaagccatgtatttgaatgtggacaagaacaaggttagagatttgcagactaagattccaagccttaaagggacactaaagaatcatcatcatcatggaaatgggaaggtgatgaggaaatgttgtgaaattgctggtggagctgttcgagttatagtttctgctattcttggtgatcccactgctcttattggtgctgttgttggtggttttatttctaagtagatgaaaatatgaaacaacattataagtaaataataaggtatatatggtacttgctttagtgtttgtttcatcttaattgatgtgaatgtatgttgatatgtttattatatatgttggaaaattaataattgcaagatacaaatttatttaatttagatacactattaataggtaataattggatagagatatttgattgatttatagtaatttctttaatttgataatgaaatcctattaattaagtcttctttcttagaattctaaattaagaacatctgtttttatccgattatcaaaaatatttgagataatatgtatttatagaattagaaaagagacttagttatataattaatcctagttgaattagctaaaaaaaattatacttacttcaactaaattttatacatatacacagattttaagctcgtttactattgatcacaaataatatgtacttaagaattattcaatcaattcatattttattaaaattaataaagattagtataagttgaaataaaaagtgatacattagtattaatgtttatgctaattaagaaagcatagtatatatgtgtttatttggttataattaatagaatatggtagagcactaactaataatctagcaaatttagtatttaatttatgttttgaaagagtccaatccaattgaggggaattgtttgtttctttggagttttgttatgagaaggcatgtcactcagtcaaaagtctcatgttttattacaatattctaatactacaaaatgctgccaaaacatcacatgttcttcttggtactaccttttgccttttactaaggtggagaccaagactattaattaattacatatatgatttatgctcaagatttaaattgaggaggaacattttttttttctttgtaaaagagagtggtgtacaatataatataatatgctaaaaaaatcaattaaaaattatacaaactactattaaaaagaaacttatattttgttaataaatatatctttaattataaatacatttttattgattaataaaacttcatcttataaaaaaaaactaaaaatacatatttatattttttttcaattttttattttaagggagcaactatccaacggtctcacttgcctctatgtgaatcgtttgtcttcaattcacactcacattataacaaacaactcattaagtagccttcggttagaaaaaatgaaaacaaaattaaaataagaatatattttaatattttaagataaaaccaaacaaaaaaatggaataaaatttattccctctctaatttctatttcattctattttattatctcaaactaaacgtccaccaacttcattaattacaaaagtttaaaaacctttaacattcattgtctaaatcccatttaactaaaacatgaacaacattgttagatgccctaaaagtacatgatggtattgttgtttttgtccccgtgaaagaatttcaagtcttttctcccatgagtattatactcagggccggccctgaaa

SEQ ID NO: 302643 - DNA, 1442 bp, Cannabis indica
ttttgcacatataggggcacaaaatcagctgcctataaatatatattataactaattaaaatgaatatacattttttctcaaatttttgttaggatgctacactctaattttcctttgcgtgttttcatgggcaatagtatattccgagcagctcatcaatcatcatcattattaattatctctttgatttagagtaatacaaagaacatacaataccagcaattaattaattcattcatcttttgtacgtatatcccataaaattggaacacgagggaagcaaataattagattatataataataaaatgagttgaagtgtagctttttggtgataatgaaatgctaatttgtgttggtggtgagaaaggggaccatatacaatagtcttaaatatcttttggcaccaacaaaactttgtctctttggctacagaaaacctagttttcagatttccttgggcacaatgacagagcagagattcccaacactcattctttttgttttttttttgaaaaggatgtgttcattaataaaaattaggattcccaacactcattcaattattctatcaatgtatatttaaaattatgatgctttcagttgaacccatgtgaatgagccacatgtttgtgtaggttttagctctcaaagaaaaaaattaagacgaagcattcaaatcatgttaatttctaacttaaacaacaacaatataaatttgtagagttctgctacaatataattataatatattacattttttagatttttaaacacaatgttttttggttgcaccacataatttttgtcatcaatatcaccataaataaatgataatttaataatctatttgatttaagtaaataccataataagcagtcagtgtcgtgcttgtcttgaaatagtctttcaattaaactaaaaaaagatttatttaattaagtgtcttctttatgagtaattctttaaataggcgtaccttatatttctctacatttcaatttacatcctcttggacataaatattcatttatagccaatttgttttgcacttctagtaatagaaaaataccaaaattttattgttatatcaatttacactccttatgtatgacatcaatctcattttgagaattggaaccttcatgacataagagttgattggataatctactatcattccatttatttcattatatatgttctttcatggattttcttaatgggaatttgttaatttgtttaaaaaaattaccttatctttaatgagaaatttttttatattgttttatgaatgttctgattcacttctcgattaatggatggcttagaaacttaaacattgttaaaagtgatatttgaaattgagttaaacgccaatttcttctcaagagcaatatctctaataatcttatttttctcccaaactcaacatcctcaaa

SEQ ID NO: 302644 - DNA, 5879 bp, Cannabis indica
gttcagatctgggatttgggaaaattgtagtttgggaaagacgatggcctgatggggtctgatgcttgcgagttgggaaaaaaattgggttggggtccgatgggtccgatgggcaccccgatggggggtccgatgcttgcgagttggaaaaaaattgggttgggatccgatggggcccgatgggtccgatgggaggtccgatggggcggtccgatgcatatgcgggttgggaaaaaatggagctgagttatgagaggggtatttttgggttttagataaaagtgtcatatatttttagtttaaaatgtattggtttaagaataaaatattaagattttttaagtataaaaaatcaaatttcccatttaaaactatattatgcctcaattagattggacatttggacagcataaacatatcacatgttacaaatttcaaatgataacattatctttttttttttggtcagatctaataataacatttttttaagcatgtacataatgagaataaatgttttttattctttaacaaaatatatacatcaataattgattgtataatatgaaaaatattatggttgatattattttagactttatgttttgtaagagttattaactgaactttttatttcgttaaatgataaaatatattttgtatttttcaaaatggtatgaatagaaccctataaggtaaattttcgataattttttttatataaccaacttgaagataattcttaatatgaaaatatacataatgtgattaattttgtcatgacactattacatcaagttattattaaattttattttaataaaaactcaatttaaggtactatttaaataaaatggccacaagtcgagctgataaaaaaagaagtttttttaactttactttaaaggagtcccaggatcttgagcgcccgaagtccctggattttggacagtagaggtaggattggtaggcttggtcttctccttagtacgaaaaatttcttttgccacatcctcatccttcatcatctcgcaatatctgatcatgtcttcgtgtatcctctttaagataaccaaagaaagcctcaggattagccttcaagaacttataaaacacctctgcaacagttgtttcatgatactcaacatctttagtataggacttttgctcaacagcaagtgtttctcgctcagcagccaatgcttcctcaagagcagttttctcctttagagagaattcttcttttttcttaagggcctcagtaaagtccttaacattggtctcctggctttgaagaagtgttgggagcccttccctctctttagttagttcccatactctcttggattcctactccaagtcttcctccaacttggcaatggacgacatatcctctatttgttgctttaagtctttgatggtgttgttcgcatcaatgagttgcttattcacttttccaacctgaatgccctttttctcggcatcacccttggcttcttctaagacctcctttagattgttggtggtcgtgctatttttaagagctgtggacttagtccgggaataaacatatgcaagcttcaaattggactaagaaaagaaacaataaagctaagttaaaaggtctaaacagtatgatctgaacaaaaacttaatagtagttgtaaacttaccctagtgatttctttcaaaacccttgaccaaaagctccaccggtaaaggcctcagtactagctagttggtcattcacatcggtcataacacacttttgataaaaaccgtgtatttccttagccttcttagttttaggctgaaggttggttgtggtagcagtcgacttaggtaaggtgtgccactcaccattggaaacattaaccccaaccaaacccttagaagacttggaattttttgactggctggtaggcgggcaagccttagaagacttcttgtccaaagatggaaaattcgagatgttaatgcccacaacttcttccatcccaggagtcagtgcctccgtagtttcttcagtattaaaacatgcacttttgatgcttggggcaatgttgactggaaaagtatcccctaactttggctgtttaacgggagatttttatccatagttgtcaccgactttcctcttcaacatgtttttaatcctggtcgacatagctgcacagaacaaaatacttgataagtatctgtacaaatcaaaaaggaaataaggttaaatattaaaatacctaccttgaactttcggaggagcaccctcccgaactagtaaagataaagcatcctcatcagaggagtctcctttgtccgactcctcaactattaccttccctttgccaacaaccacttgggcggctggacgagcagctgcttcagaatcatctctaaattgaataggttgctctcatggcccctagatttgcttttcgagtgtctccttcttcttcttcgggacctcccgctcagtagtaaaatccttatctgcctgatcatttttttgttccttttcagacggataaagtctatacctgaggaaattctcaacagtagccaggagagaaatgtccgacatagtttggaagttaaagaatttcttatgcccttgccccaaccccaaagtagaaggggacatcaataactcggagccaactgaatgaaagatggtcaacatctatgtcattcacaatatagtaatcttggagaaagctaccaatctttgagacgttcttatgcatcgtgctactcagccattggtactcgttatgggtaaataaaagtaacatgacatgttctatttggggctaaatttcaagtcaaagaaccaatgtgtatcatggccagatacttaatgactttcggggtgaattgggttgggcagatcttatcgtaatttgcaatctttttgaaatacgaatacagaggcaagatcatgctatattcagcaaggggtccagaccaatctcagagtccctcttcgaggttagtggccaggtaattggtattaggcaaaaaggcatccactctgccaagaagtcctttatgatagagattcttaagtctcttgtacgtaaggacgaacagaggagaaatccactaaggagcccttttctccccagttctcataggatagggcttcctcgtactcttctttgacgtagtcttggtccaaaaccaagacatcccccgactaagagaaaggctctccggcctcattgtatcatttgaacggaagaacttgggcaccatcctcttcctctatttcttctccttcaccattagggaaagtggctacacagatctagtcttgatcatcaacctcttagacttgaatgtcctcagtggtcactttaatatcctccctaagaggtacaacttattccacattggtgataacaaaaaatcgggcaaagtgagggtgcttatttgaggtctttctgtaagtttatttagttttttccatcatcttacgtctgggcggaggatttgtttcaatagtatagaatgtttctttaaaggctctggatggccttctggcaatgtgtcatagacatcagcctagaccttgtacgtccaagtactaggaaataacacctctagcccctgttcaattcccaaatgaactgactgtatccttccccaccgatctggccaggataaaggtgatgttgtaccacgggctccggggactccgatgagttactcgtaacctttcactcatcaaagctcaaagttgatgagttttcactcgatgaagatgagtctacaaggagtcgaggttgggtctcgtaaaggagatggaagagatcactatctatctagtggttacctccccaattttagctaggagtatgaagtttttgagaggacaaaacatgtgtaatatgcagaccagaccgatttaaaaggaaaaatgaagaaatttcatttcaacaatgaaatttccaaatcaagggttcaatgaatgacaaagaaccaggaaaatttccagaaaccttgaatatgtaattttaaatagtttctagcaatataataagaaaaggctaaaaatttgagaacttaagatgccctaggcgtatgttaaagtcgagaatcgaaagccctaagtctacctaatctatgtcgacagagaacaacttcaagaatctaattttcacaaagtagttcataaattatagtagcacatgcatttaatgaaaataaaaagaagtaagaagacttactcacgactttgaagctttcaaatgtacttggacgactcttgcatcttaagtttagagcaatggggtgttcgaggatttcagaggaaaaacagttttatgctttgatatctttgagtgtgaaaatggctaaaagtgtataaaggaatttctaaccctttatataggcaattaaaagggtagttcagtaatacgaagtttaaattttggatttctcccctacaggtataatcatcacatgttggggagtacatacgactgcacgcagtgctcaataatcgtcaatgcaccaattgagatccgaattttgagaaaagacattaaatgccccagatattgaagagataatcgaatcttcacattttcatttaatcacatcgaaccaagaaagggttgacaatcttagtggctgaataagtctgcgtgtgagtaaaatattgccacatagacttggagagaaaatgttatttcaatttgtgcacatggtgacatgacatccatctgggttacacgcgaagaacatttcatagcctggatggatagtatgttctgtggtgtgtcgtctaaagtgatttattacttataaataattaatttaaagaagctgaaatattcgaacacgacatgagaggaatatatggtaaagtagtttaaagtactatagttttcatactaattggttatgagaagagtagttcatgaattttatttatgttattatctttttacatattagtattgtgagactctctaacatcaattttcaagatattgactattttttgctcaccaatattagacaacttgattacaagcattggctcactattttcgaatcacaagtgtatcttttagctctattttttggttcggtttttagaatttcggtagtatttttcggttcactatccccaaatcaaaaaatgactctttttggctcttctacttcttgattggttttcgaattttttgtagctctttttcttgattgtacttttttgtttctacattttgttttttaatcggatacttgttagaggtttttttattttttctctaatacaatgttataattgtaagatgtacgagacttcttctcaaaactaattagtaattagatgagtaatcatatctatgctattataattttaaaatttccatacttttataaattttcccatttggaaaataaatataaagaaaggccagcaggagggatatcttgtgttacttgattaattggttgctatagtgtgttctatctaatattcagtaaattggctatcaacccatagctttttgttgctacattagtgtctaaaattacatataattaagcttttcttttctcttggtgattttctggtttcgaatgtaaaaaaatattttaattttatgttaatattttcaaagacttttattcaaaatacacatgataaaaatgaaaagaacaagttgaatgttccttccaatttctagaccaggcccatgaggaatccatttaaacgaaaggatgaagctttcaaataagggttctaaaatgaggaaattgcacttagtatgggattttaaaagttcttatgataaatatggcacatttaagtttggccaatttatatggtatttttttatttttaggtttttttatagtat

SEQ ID NO: 302645 - DNA, 4540 bp, Cannabis indica
ggagtgtaataatttttttatatgatagagaatataaaaaaaatcgtataaatacatccaacaagaaagttaaaatatctttcaaatcaaagcacaatgatatgttcccaaaaaaaaaaaaacacaatgataccataggttaattctgcaggactataaagactattgtttttaaaagcaccatactttgtgaataattaactatgtttaaagattaattaagaatttttttccttaatctaaataatatttttgaaattttagactattaatttttattttaaattgttgatatggttgaattaagggatttttgttcaatttgtttaattttattaatgtgacgattattttcgtgttaaacagtaatttttgaattttgacaaatactaaatcatacactttcaactttgatatatactaaattgtttgatatattaaattgtatttcttaaattttaacatatatatagtaatatgtactattaatactttttagcatttcccaccaataaaaatgatatttttggtacatcttttaactatgtgaagcattaggagaaaagaattagcttttattttttatttttatttttgtgattgtgtgtgttataataagcaaaatttacaaaataagctaaaaattacaaaaaaaaaatattttaacattttttttttacaaaaatatattttagtaaaaataataaaccgtttgtttaattgtgttataatttatttatagttatatatagttgtcataagtttatttttttgattgttttatagtttatttataaatttaccgttgtcgtgaagttgatttcttttattaatttttttattttttgttaagcaaagtgtattcttgttaattcaaaacttcaaaagtgtaaagtcataaaaatgtaaataaaatataaaaaaagtatttttaaaaattttcttataataatttaggaccacttataagtttttaatgaattcttaaaagtttacaatgttaaatattttgtgcacacttgataatttttcttatacttatgaaaaataattatttaaactttattttagacactatgaattattttaaaattttaaaaactgtacatttagtcttaaataagtaaaatatgtgcaattattaaaaaaatggattaaaagttcttctagagataaagttgtactagagcattttaaaaaagaaaattatactagtcctcttactaaaaaaaaaaaaaacataatataaatgtcttatttattttgttatttttttaagaatcatactataaatgcttaaaacactttttttatgataagttttattatttatttgttattggcttaattttttagaacttgtaagaagaaaatatgaacacttccttcaagagctataaaaaatagaaaaagggcaaggtcatattattaattaaatggcctcacgcataatagtgtcttaaatacaatcaagataatcaggttttatatcttgctatcaactgacaaagcaaacttaccaagagtatgaacaacctcattaatggatctaggacaatgagaaagactagcaacatttaaactagcaaaattacaactaatatctcgaaaaactaagcctaaggacgtatccaaggagacttgattgttaatctttttcgtcacattaatgcagtttgactcaaactgaactttatccaaaccaagaagacgacattgaattccaacattacgtaaggccaatgcttctgcaatctctgaaagaaaatattccatcgaataccaaatatcaaaagcaacgactaaaccctgattatcacaaatcaccatgcccatgccacagaaaccaccatcaatatctaagctggcatcaacattgaccttagcaaaatccactggaggaggcacccaacaacgatcagtcaaggaaggagaagctaatgctgactgtctccatgcttttctatatctatccacgatactttgatccaaaatcttcgataatcgccttaaaaatttcaaacctaaataaccacaacctgaagagacatcaactgatttttatgcaccattttattcatctaatactaaattctttagaaaataactaaaataagctttacttgagaattaagtaaaaggttaagataaagtaaaactaaaaaaaatcagagcaagtagccaaaagatcaccaagttggaactcacagaatttgtgagaaggagaagagaagggcatccccacaatgcatggtgtgttgtttcctaataactatcacataaaggacacactccatctttaagtagtccatgcttgatcaaattacttttagtaggaatcaacctatgagaatttttccgaacaaacattttaacttttggaggaacattaagactcgacaacttcttccatcaacctgaaaaaccaatagaagaagaagctttgcctaaacctagctcaccaatagtgaaccaataaccctttttaatcgaatacaagcttgaattatcatgactccaaatcaacttatcacaagtagaaaacgagggccaagtagatggcaaccacttcatctggagcaaacaacccatagatcaattcctcatcccaaccacccagtttaaaacgcaactgagacatcacactaccaacactaaggagttggagattcagagaaagaaccttagaggtagccgacaaaggaatccaaaaatcttcaaaataaaaatattaatatctctgctagcacccactctctacaaagtccatacatcgtacgattatttttcccataaaatgttatttcacacaaaagattttttttaaaaaaaaaataaacaaaaccaaaaaatttatttctaccttttaaaactacaactctcctagaaacaaaagagaataatagagcttccaagcttactttgttaaccagaattgaagatgtacaaatcctcaaaatccatatattttctcgattcaccactatatacatcttaatatcttattcatattaaatcacaagataaattaaactttaagaaaagatgatgaaaatggagacattctctctctccatgtacataattctacaaaaagtcaacttcaaatatatatgtccatcaagagaaaaatcaaataatcttacttaatatatataggataaagagaatctccattgaaatttcactcatgttagaagagaaaggcatgatattatttttttgttttttgacttttttgtctaaagtcacaatatcgatcttccttgtgtattgtttgatcataaccaagaagcaactttaaaaatgtctaataaatctactaaacaaaattatatatatattttttttgtaacttgagggagccacccatcatcattttttgtgtgtggaatgaagttatataaataaatatatatatttatttagtatatcaatttttcattctataagatattttaaatttataacacacaagataaaaaaaaatgtttacattttaacaaagtaaaaaagtgcttagattagtgtttattctttcaataaccacttgggactagctcaagtggccataggtgggtgtgtgagtgttggaggtcctgggttcgagtcccaggtaaaacatgatgtaatatataaacgcttgaatcaaaaaaaaaaaaaagtgtttattctttcaaaatataacaaagtattgttattctttgtgatatgtttggttgaaccaaattgtcaacaacgaccgcatagcgcagtggattagcgcgtttgacttcggatcaaaaggtcgtgggttcgactcccactgtggtcgattagttttttaatttttgttatttcatttttatgtccaaaaaaaaaagctaatatacctaaaagaactaaaataatttataaattaaaagggcccaagcagcacaagaccaataccaatccaagtaattatccaaaggccaagttcatgcaaccaaccaaaacttatatatgagcttcaaacttttgtatgataatggaaattttcataaaaaggcaacataagataggtccaatttagaattttacaattataaaaaaacaagaacactaaatcaattatagaagcaacaatattcaaacataaataagtgggtaattaatttactcttatgaaaacctggtttcatatgatctttgtgtggtgtaattaaatttcattatacaaccaaaacttattggttggtgatttaaaaactgcatttttaaaaagtgttattctgaaatgaaaatcaaaattttgtattcatgttgaaatattttcgggtaaatactattttggaccttgtgttttgcaaaagttacagattagaccatgtgttttgttaaatgacaaaatagaccctgtaatttctaaaatagtaaaaataggaccctgaacttaatttttgacaattttttttttaatacaaccaacttgaagacagtgcttaatacgaacagatacaaaaaatgtaaacagttttgtcatagtactttaagatcggattataattaaactttattt

SEQ ID NO: 302646 - DNA, 2864 bp, Cannabis indica
aattttgtattgctcaaagctaatttttacaaataaatagcacccaatttgggcatataaaataaaataatagtgaatctatacaggtatatataatacccacccaaactccttacatacaaagtaaatgcttaattataaactttaaaaccacctactgttagctgccttgactttcttaggccaacatatactaactctttatgtgacatcctgttttagttcactaatgaaaacccctcaaacgagctttaaatcttcccaaattatggtatttcgagctctctataaagcatatactagacatgagagagcagttaaatacacctgttttttgaatttactcagcttggacttgccaatccaccttgtgagacttggcaatgtaatagttgctgcataccattgtaaccaggtcttaacatcctgtagacatgatgctgcaacaggacattcaaaaaatagatgagaatttgtctctttatgctaggaatagaggacacattctatctcttgtcttgagcttctgctatattgccaaccaagtgacaaagctgtattttggagtgttcaacctcccctctacatgctgacaccagaacactttgctttaatttgaacagagtagaaagtatcccttggatacattatatggctacaacattggtttctgccctgccattaagtctatgaactggccttttagagatacaagacttctccagtaccaactgccttgatctgggccttgtagctccaccagtcaccttccttgatgtatgcaaagtgtatccatcttagccacaagctatcttccttatttgctattgcccagatatactttcacacattttcttacttggtaaaattctccccaaattattttagaccatttgctggtacataattgtgccagaaaaaagttcatgaaccattggaaatggtttgtgccataacacaatttattccaacacttttgccggtaaaattcatgaattgtgttggtatagctaacttttaccggtacaatagtgcgccagcaaaagcatttgctgataattgttggccttggttgagccactttaggccaacgacttttgctaacacatttatctaaatgcatcgacaaaattcatatttcttttagtgaatgtcatccataaaaaagagatgagacatttcagggccacctctactaagagtgatacccctaattttcctttctgtacaggcagtattcaataatcttgacaaaacttttgcaacccaaataaatatgaaagggaagagtggatccccttatcttaagccacatcctggtttaatcttattaacaggtgcaccattcagacacacatttaaagaggtcgcggtcaagcacttagagataagttggaaaaatttataacggacttgaaaggttttcaagaccaaattcatgaatttccaacttattttgtcataagtctttaccagatcaatctttatagcgaagacaccttccctttcttttttctctttaaaagaatggatgacttcttgaagaagcacattatcctgtatgctccgtcctgaagcaaaagctgactaggtataaggtggataataagagggaggattggcgtaattctgttggcaataatcttgaatatgactttatatatcacattgcataagaacataggtctgaattgagataccttatgaggattctgcactttcgggatcaacataacactgaaagaattaaaacctctacgcattatccccaagacaaaaaattactaactccttgataaaattcctcacccacactatcccaatagtgtttgaagaacaaaccatatatttcatccaggcctggcacttttaggctactaattctaaatagtgtgttttttaatttactcccaatatagtaatattaacttggcctcctgctcctccctacttaactgattatgaatcaaacttgaaagatcaacactaggagcattaccatttccacaaaagatatcactcaaaaaattagaaaacccccttccaataagttctcttgaattgatccaagtaccatgttgatcaagaatgctttcaatagcgtttcttcttttcctaatggtggtagatacaaaaaagaatttagagcatttatccccctctttaactcacgaaactctagaccattatttctaatagatagatttatgccttaagcactcattaagagagctttgaagggtctgttcatggctccaatctcgagtactctcacagcttgcaaatcattcaatttcctttttagttgtttgatctgtaaatcaagttgagtcatgttgtatgtttatatatgtgaatatatgtttgtgtgtatatatttttatagaaaatttctatagtatgtactattgttttgcacgtatagaataaggacgttttttagatcgttgatgaagatgactttggaaggtatattttaactattatgttattgtttacattatattaaagccaattcttggaactataaaagtcttctctccattgacaaaggctgattttttttagaaaaaaattaattggcaggtttttatgacctatggttcctttcccattgtatcaacttcatggttactctttcttctacgcttgaacattggactcgatcatcgatttacctgaaatcccaacaaacctagaaactaaaatcacataaaaataaatatgtattgacgtaaagataaagaaacaacattaaaaatgaagaactagcacacatacgaggtatatctcaaggttcaaaggcggagaaatttattgtggccaagacagggtcgaggacatcattctttccctgatacttt

SEQ ID NO: 302647 - DNA, 1562 bp, Cannabis indica
gaaactagcatactttgccaatgttctggaaagaacataacactcatccaaggtgtaagtacacttcatcggtgattatcacatcagtgtaaatccagtgcactgatgaatcagggactttgtcttttgaagcatataatcacaatcacattccactgtgttgacatcactgtaagtgtgaatgactatatgttctagacttaccagattttgtatatattaaaccataaacatgaaaactacatgtaaacataaatgacttctaatctttcattgataacaaatcagattagattgaaatgggttttatttagggcataaaatcccaacatattctacttttcaactcaacatgtaaacagtcctagccttagcaagagcgagaaatttctatcctagacacaaaatgataaaagttcaaccacgggttagtgtacttacttgctgggttgagggaggatgagttgatgtcgaagagtcttatctaatattttttatcccaattgacgaggcggtcgcaactggtctaaaagtcaaatcctttgtttggtaggggttgagttggtcgatttataggggctcaatgtcaggaagaagcttcacatggtggttgagcagctactgaatcaaatttttgcactcttgttacatgcaataagagcaacaagagagaaagttatagggaaaaaattgaagtttggtgtggaaaaagtgaaaagaatgctattaatgttaatttacatttcaagaggacaaacagttttttcaaaatcaatggtccagatcttccaccatgatctaacaacaggggagttgaaagggccaaaatcatttattagtcatgatttaccttaggtccatcgagccataaagacaagtctttttgaattgtaccgctgtaatgaattaactagggcatttagtataccgcgtgatttccatgccagcaatttttgacattccatctacccttgacagattacaactcaccaaaaagacgcatttgtaaccccattagttagtgcgtgtaaacggtcagttcctagaagaagtggcaagctccaagaactcaaattgtccaaaaaacttgggggttaaatgttatccatattctaagatctttaatatgtggtaatcatagaaaggtgccaccttggcctatttgtaattagtgtgtacctttcgcctattagggtcatgaaagaagttatattctaagaatagtcagaggatcctcgtgatagcaaggacgagaaggattttgaaactcctacctttcatccactactgagaagggatgaagtcctccaaagctacatacattcaaagagagtaacaagttcatgtaatttgagaaggaagtggccaactggtttcaaaaccgccgtgactatatcccattcggagctcgaagcgaagattacatatcttttaacaccgaatgagatcttgttccctacgtcataccatggtagttcacgtacgtgcgtctatagcaccattttgtctaaggacttgtctaggaaacaacttttaaaggtgaaacctttgagtgacatgtg

SEQ ID NO: 302648 - DNA, 2431 bp, Cannabis indica
aactttacacttgtgtagagttggcttgatgacgtaaatcgatcccatttcgcttgaaactactagatgggtattagttttgatattcttaagcaattttatctgctcttcaagcattcctaattgaattaggaattttaactccttttctttgtcattgggaattttaaaaattaattatcaaagaaaaaaaggaaaacttatttttttttcttatcttttacttttttatttgaaaatttgatttttttttttgttatggcattaggattacttggattggaatcctaatcctatttgtaaattccattcaaaattagagaaaaaaaaagaagagaaaagacttttggtcttttgcttataatttaccattttcttttaattctctaattttttcttaatcataaatagtattaggatttcttaaattgggattcctattcctatttgtataggaatttcaaaatctagcttgaaaagcgaaagaaaaagataaaattacatctcttactttttatttacctattccttaaaagctttaaattgaaaagattcccatgaactttaggattaagagtttgagctaacataaaattaagtgagttgaaaaccaaaattttcatactccctcattcttattccactttcctatagcctttaaaaagcctttggaattcatcttcatcatgcccgtaagcattctccttttcaaggtaaaaaaaacatttttttttgtgggtgtcgctatttattttttgaatttttctcattctcctcctttgttggtcttactccaaggatttttatacttcccaaaaatctttgaaataattttccaagatctccaaaaaactccaaaacaccttcctattgccttgaataaattcttttaaaattgctttgactttttcaacccagttttgacttttcttagattgtaagcaacttatgctgctgaaattgtcatagctaggatgaagagaattagaagatttcttgataagtatgacccccatatgactcaattcattagagctaagataaatgtgcttaagtctaagaacttagacaaggcccgtggtggaaaggtgatggcaactgagcttctcaaaactgccattgagagtgatgatctaagagatcgagccttcgagctaaggcctcttatgtttagaactcttactgaacatcaagcttaattgatacagtatgattactgtctccctgaaactagaacacttgctgtagtgcctagtcaagattccacatgaatgcgggtgcttacttgcccttgcatatgcttggttcatatccgtagataatttctttggtgtctacccttaccagatatatccaaatggctataggattctagctaccttcttcatattttatcgccttacaaactaggctattccaactcctcatgaaataaacattctttgcgacttgaaaaggagtccaacccacaaataagaaggctgcttctaccacttccaccaatttagcctatacatcaagaacattacaaaaacaactgtggcctttaccattaggggtacttctatactcatattcttctgccaagacacattactttccaaaaagctagccctttcataagacttgctcctcttattgacacgaagagaagagctgatgccatgttgtttgaaattaaggcatgggagagagatgggcaatctttgttttgtactgaaaatcttcaaaaggttaggttgatcatgcatgcagtgtgtgtatgctcacacttgctttgccgacgaatcttggatagtgccactcgagcaagatgatgagatgctcaaagtgcaactgtcatcttatctcagacagtgacggaagaagtgtcttcagtttgaaaaaacacataatatttatggagaatatttgtgctcttaaaccaggaagatagataagctaataccactcgaactactccggagaaggatggggaatcagcaggtgatggatgctccatgctatgtagttcaccttgttatcttgtttttctttttaattttatactatcctcatgtctttgttttttgcagacaatatgagcttgcgactgttatggcatgttgttctaacttgaagaggacgattccgatgtcgaatgaaactgagcctctaataaggcaagtggtccaggtcatccctgctacttatgttgcttcgaagaagaaggttgggaagaggggtagatgctgatgtccctcttcctacttgttacaaaaaatataaaaaaatacgcccgtgcacgtaatcaagtagtaaactcacgcaggtgaggtcgaaccacaaggaattgaactgaataccactaaattagacttatgattctatttggtagaaaaataattttgatagattttaaaataaagaaaaaaactagaaaattaaagaa

SEQ ID NO: 302649 - DNA, 1878 bp, Cannabis indica
tgtagtagtgttttgttgccttgttatgttctctaggttgcataaaacaggtctagaaagtttagttcgaattagggttgatttggttgagttatagaattttttagcctttcttgcaccgaaccggaattccggttcagaggggcctgtaggaaccgaaattccggttggctcccaagaaacccccacagaaccgaaattctggttggggcaatttcaggaaccctagtttttcccatttttgtgttgtttagatgatagaaaatccacaataggctactatgtatactttggaaacaaccttgttagctggtgtttgaggaaataaaaattagtagcccggtcaagtacagaatcgaaaatacagaactttggctcaagcttgcatcgaaatagtctggctaaaatctcttctctctaaaattggaattgattgtaaagaacctactgtgatctggtgcgataactttggtgcacgaaaacttgcctccaaccctatttttcacttgagaaccaaacacatcgagatcgatgtgcatttcttcattgacaaagtgttgaacaaagaagttgaagttaggtacattccaacagaagaggaggtggatgatattcttactaaatcactcaacatatctcaattccattatcttaaaaacaagcttgctgtcacatacacaccacatcacatcttgagggggcgtgttgaaaataatggaattgcctcaaccgaatctggtgaggaccacaatgattaggatgatgaaagctaatcattagtctattaattatacaattctgttatttgattcctaaaattcagggatccttttgtactatgtatattccctaaaatattccttttctagaatcatcttctttgtactataaataggagcatattcaagagtgtattgtatccgttgagcatgtaatactgtcagtaaaaagaaagtttttatgtattgaatcattctctctttttatctaggaattactctcattaggttgatggtggaaaataggtgaaagttgccgagttaaatgtggtgttgaccctttgattttggggtacttcactttccaataattcttctattcgggtccttcagatggagttgatctcataactgatgagagacaattggatgtggcgctactcaaccaatggttttcttgattagatgttgattgtattttgacaatacatttgaatttttttaggaatgatgataccctcatctggcatcaccacacgtctggtatttattctattcaaatgggttatcattatgcagcgtcttttgaagacattgataacaactcaagctcttctttggcagatcattggttgaaattcttttggtcattttagttaccacaaaaaatcattatggattctacttgctctatttccaaccaagcatgggaatctattggccatgctctttttggctgtaagtacgcacaagcagtttggcgtcattcgaatcaagttcttgactggtccaatttgtcgcaatgcgcaagggagactatcattcatttgtctacaatttacatatacatgttgaaatggaacaaatattttgcactctttagttgatctggacagagagaaaccgagtgatacatggaaacaaagctaagccagccaaaaaactggccattttttgaagtaaattatctgcagaattttcggtctacacaagaaaaatactgcccaaaaattagagcaccagcacaactaccttgttcagttgttgaaccagttttgtggacacctccaatggttagaaaccctaagttaaatgtcgatgcagctaataagttactagtgtgggggctatagttcgtgatgttggatatattttacca

SEQ ID NO: 302650 - DNA, 3255 bp, Cannabis indica
tctcaatggtcaacttagtttttcatatgaagtttgtaataatgttttaacctaggccttcgatttcttcccttggtttcaccggctggtttgctcttgaaaggtaggaaggtcttccgcccataaatgcttgcaatgcttccggtacctcaacaccatcttccttctggtagttctcaagaatacagcacaaagtcctctctgttgctgtgagagtagagttcaacaaatgaacatattgctttgtctgctcattgctctgcaacatcgtgaagattacattaaaaggcaatgagagaaagaaatgtgcaatggaatatgacttagctcagatataagttgagtaccttttttgtccatatcgaatttctaattttctagactgatagtctgtacagttagaacaggatacaagctctctgtatgcctgagatgaaggaaaccatgcttccaagtcatacttctttgctgcagcatcatttagcgcgccggaaacaatggccacaacttgatagggaagatttagctacaattgagaatattaaattatattagttatctcataagcaaatactgagtatcatgcctttatcatccatagattgctcaactccctataatacatgtacaatcgaaatagatgagattcaacagcttaatacaatatactgtatgttggtttcaattactttgattagctcttccccactcccgttttagaataaaaaagaatggccatgaaattttcaacctaagaagcaaaaagcatgttcgcgggataaaaaaataccatcttgtagaagtcctcagagttcttaatcatttcctctatcatatcccaagagtcattggcatttggggttgtgagacaaaattgctccactttctcaaattgatggactcggaatattcccaaagtatctcgaccatgtgagccagcttctttacggaagcaagatgaatatccagcatatctagaaaagagattttgatatgacatacaaataacaaaaaaaaggatttattatattctagtgagaagctccaacatgttcaaaccttatgggtagctgtgaaggatggatccaatcatctatatgatacgaacaaagtggctgttctgctgtagcaatcagatatttgtcgtctccctcaccagtcacctattaaaagctctagaccaaagtgaggcttcaattgtaatttaccaatgtttaaaattcatttatcttatttagagggtgattttttcccctcagaggatcaactaaacgaactaactgtgtatattgaatcactgaaccttgaatacagaagaccaagcatggccaaagaaagaagacaaccaatttagtctcaacaaataaaaaatatatttgtaccaattcaaaattctaccttgtagagttcttcatcaaactgagctaattgagcacattttgccatgacatcttttctcataaaaaaaggagtctgcaatgctgtgtatccccttttctccaaaaagtcaagaccaaagttaatcagggcttgattcagacgcacaccatcacctttcagataataacctcttgctccagctatttcagaacctagatattccaaatttccgaacatattgcactcattttacaaactaatttgtcaacagataaaaactgaaataaattactagatatcctatcatgtaggtaggacatgtgatgacttaaaatggtcttaactattcatatttcgattccccaaaagtctgatttgagtgaaagattttgcaaaaaaattacctttctttgtgtccgcaatcccaagaagctcaacaagctcaacatgattcttcaatttgggttctgtccgtctctcaccccatgttctaatcacagcgttgtttgcctacaaaagatttttgaatctattgttaattagaaagagatagaaaaatcgcaaagtaaaaaagctgcaaagtgctaaaactttacctcatcattactaatgggaactgaatcatgaacaaggtttccaatagtttccaactttgaattcaactgagttaaagcttctcgaacttcaacttctttctctgcaatggacttcttattatcatcagtattcttgatcatctcagttgcatcctcacctttctattctccataagtaagaaacaaatcaagtgagaatacgcaaaatcaaacttaatgcaagcaagtcaaaagcatttaatagcacaaaatatatttgcccatagataattttcaatgcctgagattcacaataaaaaaaaatgatactggataggaagccgttaatcaggaaactaaactacacacacttcttatgcttacccaattatgaaattgaagataaacccaacattacaatgctattaaaattgaaatcactgcttagttttctacctaaatttcattatcctagtaaaattcccccaaaaaaacaccttttaattcaaatatgaaactacagaaaatatacataaagagaatcaaaaataaaagaaaaaacacatacaattctgagctgagcaactagcttgttgatcttattgaaatccttgcgaagactctcaagctcgaattgacctataagtacattaaaaaacaaatcaatatacaataatagtaataataataataatgaactaaaacaacaaattagtacagagagagagagagagagagagagacttacgttgacgccattctttgtcgagcttgataacctcatcgactatctcaacattggcgaaacgacgacgttgagattcacgaattatttcagggttgttccccttttcttctctgaaaagattgatgtccaacatcgtcgcctgggtatgtctaaagcgaaaaaacagaggttcaaactggaggagctgatggtgaagaagaaagaatttgtaccttccttcacccaaaaaccctaagcttaagctgtttggctgagggttattaatatccctaacaagaataatgtgtagtcttcccctttgtaatcgtgtattgggttttcaaatggagtgtactcttcaaagcgtgttcatcaaaccgctcaaatcttttgcaccgcatcacacagcaaaaaatatgtggtttgaaattctttgcagtgcagttacagtttgaatttttcttaaaccgcgcagtattgtacggttttcggttttgaattgttaatatgcggtttaaaccacatcgcaacgcacattataaaaaggatttttttttctataataaactaata

SEQ ID NO: 302651 - DNA, 1981 bp, Cannabis indica
aaaaaaaattaatcatttcattaagataaatcaactcaaaaattttgagtaagcattcgtttaaataaattttttcaatattagtaataaaagtaaacaataccattcgtagaatgcaaaacggcattacaagaactactacctacaacagatgttaaagaagtaatatctaaaataatagatttttaaactaacatttaaatgaggattatttactcagttcatatccacagttgaatcacaattaatactagcaagactaaattcaaaagggtatgtcaacattagtctcatcctcatagcaagaagctcgtccacattcacactaaaggcccttaagagtccaactgcccatgccaaccaaacaacaccatcatcaccacaaatcaccccaacccaacaaacccctattagtaatcatcatgcatccatgggcagccagaaacattcaacaagagacagtaaccaatagtccatcgttgttaaagagggatatcccaccaatagaccatgttgctagtgttcttgaaattttatgagttggttttttagcaaactctaatacaacatcaatttttgattgagcagtaccaaaaaaaattgaatttttatcgtaccacaaccactgcatcactatcattaccaactcaaagctcttctagaataactcttcaaagaggaaaatcaaaatctcctatagccaaccttgggcacatcagcgtagtagtggctaaacccctaagcaaaccgagatagaatgaagaatattgcaaaatagcattgcatgttttggagtttcagcaacttcttcacacatcgagcacaatgtcagaacttgaacctttcgggaaattagccgcgttgctgctggtaaggctaaataaaacattcgtcacacaaatacctgaaccttaggtggcgcactaaggttccaaatccctttcccacatcgtaccaatttagttgaatcaaccattcccttttccaaaatgtagtgatcatgccaatgaataaccacttttaacatttacaccccatctcaatcataatgtcagcaccaaccatcatctaccgcctctctagctaaagaaatagtaagaattacttacatcccatgtaccattatgaagaatgaaatcactaacctcattattgtcattaagtctataagtaatagccttaaaaaatgacggtctaggcagccacatgtcatgaaaattcataatttacgtgccatcaccaatggtttgttaaagaccctttttaagtagctctagtccctatacaagactggtccacatatgagatgagccatccttcccaccagcctctagaagagaacatcttgggaaatacttatacttcaaaactcttgctagtaacgaattgaaattttgcaagagccgccaaacttgtgttcaccaccagtgctaagttaaataattggaaatgacaaaatcaagacctctcaatgcctttggcacaaactgtatcccattttacctaaagtattttccttttgtcactattcgaaccttaccagaagtgcctaacaacaaatttcaactccttacatgtactcgcacggagttagaagacactcactaagtaaaattaattcaaactaacacaacacacacagatttataacactagtcaaactcactattgacaccatcattttcttttaacatttaaagtttaaataaaatattgagttaatgctaatctatagatttggaccttttttctgtctccttatctttttctcatttgtgccgaggggttcacttctctcattaagaagtttgaagttgagggtcttttgaaaggttataaggttgcgaatggggcactgttaatttcacatatgctatttgctgatgatagctatgtctattgtcgtgccaatgacagggaagcttctaatgttctgcgccttcttcatttgtttgaagctgctactggtcagcaggtgaat

SEQ ID NO: 302652 - DNA, 3624 bp, Cannabis indica
ctttttcatactcccaaaaaaaaaaaaaaaaactaacaatatgtactcggagctccggctccactgacggagccccagcccgaatttattagaaataattttaaaagaaaagaatttttattaattttttttttctcatttgagaattttgtctggaaaaagaactggtttttatatttttcatttttctttctcagaaatttttggagagtgtttcggttttcgattttcagatcgaaaaatgtcgaaaccatggggagggattggagcatgggccgccgaggccgagcgggaagaggcggaggagcgtgaggccaaggcggcagctgcggctaacccttctcccagtttccctagcctgaaggaagctgtagctacaaactctaagaccgctaagaagaagaagatgactcttaatgagttcatgactggttcaggagccggtgccggggacacggggttgacacatgacgagaaactccggcttccgactggtccaaaggaaaggtctgctgatgaaatgcagtacggtaggggattttcaacttatggaaggtctgggtcgatgcaagggggtaggggtcgtgaccgggaggatggggatgggtcttggggtggtggtggtaggagatcgtatggtggaggatttgatgaggaacgtaggggtccgccttctagggtttcggaattggatcaaccttcgagggctgatgaggttgataattggaaaactgaaaagaaatctcttccttcatttgattcaggtcgacaaaatcggtatgggtctctgggtagtggtggtggtggtggtggtttaggaggaggtgcgtctagggctgacgaggttgataattggacatttgggaaaaagcctcttcctgttagatcttctacatttggttctggtggtggagggttccgtgattctgagcctgatcgttggaataggggtggtggaggattccgtgatagcagcggtgacagggaacgaaccagattggttttggatccaccaaaggccgatactggcttgaatgaaccgttgccggtggtgaagaccaataagccaaatccatttggggcagcaagaccaagggaggagattttggccgagaagggtttggattggaaaaagctagactctgagattgaggctaagaaaacaagtaggcctacgagtgcccattccagcaggccttctagtgcgcaatccagtaggtccgagggtcctggtttgcatggaattgagaatgtggttaagccaaggcccaaggtgaatccttttggagatgccaagcctagggaggttttgctggaggagcgaggtaaggattggcggaagattgatcttgaattggaacacagaggcgttgacaggtcagtgtgcattgtttgtctatttggttcataaaatgtcttgggtttttgttaagaaagtttgtttctttttcttttgagctttaaacaatttgcaagtgcatgcatgcttttaaatatattcccatctcccttgaattatctaccaattaaccaatcattgatttcgagtagcatgtatgtgttcttttccattttttttaactttgtgatgtgtggtttagtcatgggactttatcaggctttttaattttattacttaaaatactttttatctgcctaattaattgagaattggcatgtttattctgaaaacttatatggtttgtggaacttgacttttctataatgttacatattattataccttgaatgctttctatttgtgggagaagtggttttagttcactagtccttaagaaccttacttgaagacaaaatttaatggttacattgatgtttgaaaccagtttctccttttatatcatttagttgggttaagcacaggttaatctccttccctcctgggaatatcagacaattcaagttagacacttgtgttttagaggttctaggttgaaataaactaggataatcactagtaccacaatcaacttgattagcattattattcctgaaatattagtattaattaaaagcatggttttgctcgcttatttctcttgaatcatttcattttctcgatgtttcattatgtatttgtttgattgttctgccatgctaaatgtcagtttggtctccgtggaggctttatgaacttgtactgttttcctttcatattattttagtgtggctaaaccaagaaagcttctgccgcgaaaataacatttgcttaggagcccttgccttttagatgattggttaacatgcaaccatctttcatgtttacctgtgacttgtggatgtatttctttacaaaatatctcatctattggtctcttaatgaagaaaaatatgcatccatatttgaatatttgttttttatttatgtttacttgtgcaggcccgagacagaagaggaaagattgttgaaggaggaaatagagaatctcaagaaggggctggaaaaagaatctcctgtaaccagggaatccgaagaagagcctgctgctaaggaacaacctagtttacaagatacaattcttcagaaagaaagagagttagaaaaactgatacgagatttgaatgacaaagtccgctttgggcagaaagctgctgaaaggcctgggtctggagcaggcagggttggtacttatctagagagaccaccttctcaatctggatcatttgatgagtccagaagtacggagttctcagaaaggcctcaatcgcgtggcaccggagatgtatggacaaggcctgtggatgatagaagagcatttcaaggtaacagggaaagaggatttctgggtagcagagacttggacaggtaggcttctattgcattttaacagttttcagcaaatgagattttgatgtttcgaagatgaggaatttgattctgaatgttttaacttctatcttgataggccaagatcgagggatagatggtgaaggaatgtctctggctccattgagtttacggtctacttcgacaaaccaaaacggaataatattttgtctcaccctttttgttttcttcattttgttttcggaattggagccagaattattgagtactggcgctgggggaactctagtgttaaatctattattaaatactttgcaactatgtaaaattggaaattttatcctttttccttgtgtaatcaaggaatctgtatttgtttttttaggactcggttgttggtggacaatggatttgaattcccttagtttatttttttatgacaagttctgagtgttatacatttactttgattctattgtccatcaaactcttttcttttctcttagtaatgtatttagtatgggagttcatttctctctcactgtacttcactattattttctttctttagacaatgtaaacagttttattttaattgcatgtatgactttggttgatgcaaggtggattggatttaactgttttaatacccaaaaaagaaaacgagtaaagggtcataaaatgataataataataataataaagaaggtaaaattgttgcaagtgccaagtggtcaaattatcttcagattttagctattttaatagtactattatctaatcatttgtctgggtccactactgggtgattatca

SEQ ID NO: 302653 - DNA, 1621 bp, Cannabis indica
attaggatcattattaaaagataatgttattttgctttctcattttcttaaggtgtccctagtccgccccggccctaaactaaggcccgcgcctagggccactcctattaaaagctcaaatgaaaaaaaaaaaataacagatatattttaaataatttttaaaaaatatcatttattgttatgaaaaaaaatattcatttttgggtccaaattaattcaggactggttatttccctagttcatgttggtaggtactcataaattagttgcgtatgcacttagagtagatattaaactctgattgttattaagaaaagtaaaaatcatttctagttctagtttgccgctcgtgtttaaaaaatttaaaatttattttcgacacaataaattatttaaaatttttcaaaaatctacaaaaataatcttataacaataacagactccgctgtaaatattattttataacaaaaaaaaatatatatttaatttaaaacatgtcaagtattctcttacccaaaagaaaatagctactagcaacacatcaatttaaaaataaataaatagtgagagtagaaaatagaatagtcaaaatatagtggccataataaattaattgccacatttaaatgtgtgactattcttatattaaatcatttaattaattattatgattaaaatatggaagtgtaaagaatagagactcggaccgttgataaggtcagctgtctagattagaaaggcgttttactcttccaagtcaatattgggagatgttcctgccttcctgccccggtcagctatctcaaaaagtccaaaaaagacaccaactttatgtaattttcttaaaaaagggaggggcatatttggtaattcaactcattattcctaacaaatgggttattccacgttccaaccctacgcggcgaccattttatgcatttttttctttctctttatgacgcgcacacctaattagttttcttttttctttaattgcatttaggtccctataatttaatttattttgtttcattcccattggaactctttatttctttttatgaattaattttgttcttgttttggttcatattcattcatctcatattttatactaggaataaaatgcttgttgtacatgaattgggaaaattatgttatttatttatttatttaaaaatgaaaaaaaaaaactcatattattgatgttattgtttgacaattgacatatagattgatgaaattctagtttatttctactattattaaatctcattagaactaaaaaaaaagtaaaagaaaatatttctagcattcctctagaagaaagataagtaaaacttcaagataattattttttctttaaggatatttaaaaaaaaaaaatgctcataatagttatttacatggtagagaaaattattttgtcaaaatagtattttatgatttgtgatatatttaataaaaaaaattagaaataataagaaataacataacgtgacttgtgattgtgtttaaattttaatgcaagactttctttctcttcaaggtttatttacttatatatataactaggtgattgttacgtgccaagtcacgtagtgttagttttatttaatat

SEQ ID NO: 302654 - DNA, 3704 bp, Cannabis indica
ggttcatgaagatcaactaggtctctagcatttaaggcaaatgttaagcttatgcaaaccttgtaggtggcctgatttctcttcttactttgtcttgatccaacagataatcttgcaaatcttcacctttggtttcatatatttcctctttagtatcacctggttgagtgtcatttagatctaggttttgacctccaccttaatcaagtacttgtgatgttgtttctaattctacccttgtaattttttgctcagcttgtttagatctggcttcattactagattttaggttagatttataaaaaactttctcattgaaaataatatctctactaataacacatttcttaccatcaattagccataatttgtaacctttaacaccactagtgtaaccaataaaaatatctttcacaaccctaggatttagtttttgttgattaatgtgaacataaccaatgcaaccaaatggcttcaagtgatgatatttaggttcataactagaccaaacatgctcaggaactttaaaattcaatgcagatgatgtagataaatttatgagataacatgcattagcagcaacttttgcccaaaaagacttaggcaaaccagaatcatatagcatgcacctaactttattcattatagttttattcattctttcagctaagccattctgttatggtttgttcttaacagttttgtgcctaatcattccaacttcagtatataaaccatcaaaattagagttacaaaactcaagaccattatttgtcattagatttttaaccatcctagaagtttgtttctcaatcactatcaaccattctttgaatttaccaaagcctcatttttagttttcagaagatagatctaaacttttctaaagaattcatttactacagaaaggaaatattaagcattattgagtgagagaagtacatgtggagattcccatagatctgagtgtacataatctaaagttcctttgaatgtatgtaatgaatttgtgaatttcaacttgtgtgccttaccaatcacacatgtttcataaaattacatatatgtgacttccttgttgagttttatgggtcccttgtgactcatatgtccaagccttctatgccacaattcaattgcatttgtaattttttgttgagacttggctagactagttacagtttctcctcgcagaatgtagagccttgcttgagttcacctctcaagaacaccatggaaccttttctcatcttcaagactctaccttcttccttgtagttgtaaccttttgaatctaacacaccaagagacaacaaatttattttagctcaggaataaatcttacattagtcaataccttaaaagtgccatctctcattttaatcttcattgaaccaattctttgaattctacaataattgttgtttcccatcataatttgtcaagatctttcttcttgaagatcaaagaacaactcttttcttggtgacatgtgacatgtgctacttgaatccataacccactcatcttgagaatttgtcatagaattagttagagcattagcacaattataggaaatatttaaaacatcaacattatcaaaataatcataaatatttgcagaatcaatattggagtttgcatttagtttctgtccattattttcctttaaggacaatcctttctaaagtgtccttgattgcaggtccatcatgctcttcctctagatttggatctaaactttcctcttcttttaccacttttactgttgttttctatcttttttgatcttcctctgacattgaatccttcaagtccaattccttggagtatgcagctccaatcacctcttccagagataatgtttctcaaccatacttgagtgtatccctcaagttctcataggctttaggaagagaattcagtaggaagattgtttgatcctcttcctcaatctttatctttatggattccaaatttgataccaattttgtaaactcatctatgtttttatctatggactttgattcatccatcttgaatccatagaatctttactttagataaatccaataaggcagagtctttgtcatgtacaattgtttgagtttgacccacatctcatgtgtagtctcttcattgatcaccttccttagtacttaatcacttaagctaagaataattgtattcttggccttcttgagtatctgatctttgttcttcagtttctctagaatcttgcttgattctttcagggcttcttcgagtccaagattccccatgtgtgccatcatctttacctcccatagacaatagtcattcttcccatctaacttctccacctcaaattttgaagttgccatgttgataagaacttgttcctagccagaaaacaggttcttgaaaattgttgaacttcaaaaattatcttcgagtcttcttggagattaaaccagttcaatcatggaacaaagatgaatctgtagttatatcttagctctgataccaatttgttaggatttaaactacacaaattgacagtcaaacaaagattaagcaatgcagtagcaaagattcaaagataaacaaaaacacaaacaaagtaagaaaaaaattagcaccaaaattatttagtttagatctgatctcaatgtgagatagtcttactccaagggtcgataaagcctgcaaatcaatccactaagttgtcgaacaaggttatacactcaaacacaaatgagacaatttggttttacctcactcaagcaacaactctacaattctctctactcaccaactctcagcatggtttcataaccaactttgtacatcaatttgtctaattctctaattgatcagtctaggtaagtttatataggcttatgagttagtagcatgggagagagaaggaagtagcaacaaaattaaccaattatattagctagagtcttgaatagttaaaatagttggcctaactgttttaacttcttaataccatgtcaacaatttgagaaagtgagattgatataggctgagaaatagggaccacactttacaattaagagccgaaaacaaataaattatccacaaatgaatataactagaaagaataaataaaaagctcatgtatttaacttttatttatttaattaattatctagaagaaagaggaacattgtataaattacatgctaatatgcatgctatatctaatacataactttactcgtaagtgaatttatatatatatttatttatttatatatataacttccttaataaataggcaatggagtaagaataattaaaataataataataagtcatttatgttatcatgatgctttttttgactctgttctcaacactttgtcatcatggcttggcttcaagaattcccaaaatacaaaggccacaaaaaccattattattatcattattattattaattgttactttccttcctcatcatccaataaatttgttataacttagcaaaatacaaattatctctaaaaagaaaaaatacaataaaataaattatgaaaaaaatagtatatacatatatataagtataattatatatagtgcatgtagatttgcgtacaaggatgttgtatggtatgggcaaaaagtacataatttaccaaaaagaaaaacgtactgaatctctctgtatctaaaaaccatacctgaagagttca

SEQ ID NO: 302655 - DNA, 3077 bp, Cannabis indica
gaattcatcaaaatttataatattttgtacagaaattatatattaaatacctgatcaactttaattcgcataaaactcttagaaacaaaagtatgcgccatattcacatgagatcgattatttatatttcttgaacttataaactataaaattatacttacaagttagaaaatatgattatggattatagttaagctagacaaacaacaattcagtatatagccatagaaaaaatctaattcttatacaaactagtaaaattaataccttaaaatcttctgaagaccaataagaaataagcgatttccattgttcttcgggaattgattttggttgactttgagtcatcttgttgtcaaagtatttgactttcagcttgtaccttctacttcggtacctctcacgacataaatccatgacaacttctttgtcttccttttttacttcaaatattttctgcaacaatgaaaattttcaattaagtaatgacttgtatcatgcaaatctaaaagagtgataagaagattttttgtaaaaagaagcattaaattatatatttttaaggactaaacgacttttcccatattggattgcaatagtattcaatattctttgaaacttttctttacaagctcccaaattttatctcttttggattgctcaatacaatcccaagtttgaacattcaaaagagaatttgaagtatttttcaaaagcactccaagttgagtaataaaatattgagcagttttctctacaggtcttcccatcttgaattgtacaggtactttcttatttttgaattcttctaacaccttaagattgtgagtttcagaataaatttcttcttgtctgcatctatttttcgaaatagcatatgttatttaatataaatgacctaacatgatgaacaaaggaaaattgaataattaactttcccataccgtcattttttccctgtgtgtttgttcgtctccatgtaaagttggtgaagatgtaatactctctcttgtagattgttctacatctgaagctccatctcttgttggaaagacttcacgtcatatgctttcttttagatttctttatcatgcttcctgtaatatacaaaaacatataaggtaaatgaaataaataataaactgaagtaaaaataataactttaataaattgtgttaaaacatgaataaatatatatacattaacaaacaaaaaattaatatgacaaataaacttaaaaagaataattcatcacatagcaatatatcattgtcattttctaatgtttgaaagtcatcatcaatcgtaaatcctgaaatatcatccctttcccatgtaacaggttgatctatgtcatcatctttgttttgcacattaaatattgcatgagctgatgatttattttgttggtatggctccatatcttcatatactttatcctcgttatcatcaacttctttgattggaatattatagaaatccctaggttcagtttttacaactacaagtcagtccaaattgttaacatctcttacatagtaaacttgttcacattgacattctaatacaaatggttcattagttttgaataaccgttttgtgttcacactcgcaaacccatgtgtatcaacaaaaattcctttatcacctttgacatcccaccaatcacacttaaacaatacaacccttaaatctccactgtaacagagtttgattatttctaccaaaataccataatagtcacgagaactagaattatgctctactttcacaacaacaccactatttcgagtagtccttttacttgaatagcttttggtatgatatctaaaactattgatgagatactcattataaaaattaactatattagaaggtccttgggcttgtgaaaacaattcataatcaactttttcagtacatcgcaactgcatcacctaatttatattatgagaaataattagcacttgtacaaaataaaatctaagttcaaaaataacttatgatagacatactctattctcaaaccattctggaaactttttattgaatgttttttctacattaaatttctctcatgtttttctctcctgcttaaaaacacaggttgacaaacattacttactttataatgataaatatctcataagaaatcaagaatatacatatgcttacttgatgaaaggatgaacttcttcacaatttttcaatacataaagacgaagttggagccaatcatttgatggaagaaaattcatatctgtaccacttctaataggacgaccaatatttttaaagactgataatttttttttactagcttttaaattcacaccctcatagtttctttcagctttggttaaacttagtatccacaccatgaaaatatcttgaataaaatgtaagacattcatcaattaagtattcttctgcaattgaaccttctggttgtgccttattacgaacatactcttttaatgtttgtatatacctatatataaaaacatatatatgagtatatattctcttctaaagagtagagaaattagagaaataatttaaagagaaaagaaaaagcataatgtttattgttatacacttaaaattaaatataattttattgtatgcataatatgaacgaatatcctcaatctgaatggaacaccatcattaatgtgtcccattttaattagcaattgatttgatatcatgaaaacatgagcgctaacgaaagtgattaaataaagaactagagacaggaaataggggtcatgcataaatataaatatttttgttttatgtaccggtttgatatattgaaaaaaatcaagaaaaataagaactttaattagttatattatatataatataaaaaataattatgtattatattatatatatggatcaatttatattaatagactcatagatagtgtttttggttggtttatttatgagaattgttaaaatatattactaatatattttttttgatatcatattatttttggtgtaattaaatatcgggtctcatataatttaagaaaataattttttagagaatatcgctaatcaat

SEQ ID NO: 302656 - DNA, 1976 bp, Cannabis indica
tcaaataagaaaaaaaaaagcataaaatttaatatacgtacctcgcaggtagcttttcgttaatatatatatgtatgtacatatcatcgatccatataactattatatattacaaaactttatttccaaaagttgataactacgttcaaaacttctatctcgatctatggtcataaaaaatatatgaagagttttaaagttttctcttcttaataaaaaaagttattttattatttattttttttttaaaaaaaaaagtaaaagagagaaaaacactaacaatatataataatctaaaatttacgtaagaaatcacacaccatgcattacaaagagcactacatattaatttatattgatgcctagctagctattgaaaaaagaataaaaacttttgaactaaaacttagtgcatatataatttcaactcattgtttgagtatacattataattatttataattaaataatgtaatcttaatattatattaaaagttgaattaatcccactaactttaatggcaagtggaggaatattgaagtatatatatataataataaatagtgtatatatatattgtgtgctagctattatagtgttgtccatcatatatatgtatccaatagagaagcacatttagattttagagatacttgtttattatatattggcaatacaactaaaaatagtaattaattttaatatagatatctttcttcttttcttacttgtatatataaaaaaacaaacaacaaaatatttgttctacaataattctacacatacatatatgatgaaacatatttggtgttggtgttttggagtctatattctaattattattggttgttaattatttgtgtattttgtactacaataatacctagcttattcatggaagcacttgggataaaatcataaaagtataaatttgtgtctatttcaattttacagcaatgagcaatgtgtccaactatttgtgtcaatagtttttaatttttattgaaatattatttgaacaaataaataattatctctcttattgaaaataaataaaaataatcataaattaaataaaaaaataaaaaaataacgccatccactttcaatcctgagtctgtcactagttataataattgtataaatattatgtctagtgtgatttaatttatataaaaaaaatagattaattaatactttatgtactaatttaatcattgtaattaacatgaattcaaaaaaaaaatctcattataaatatagaaaaattctacaatgcacaaaggagtgtatcgatgcacccttatttatttcagaatttagaaaaaaaattaatctaatttttatgattgtatatgttattgttattaaatatcctagtaaaatttagaaaaaattacaaaaaaaaaaaaaaaaaaggttcgtcaaagagtgtgttgtatgtatgtattttttttatttaatttatacgtgtgtaaaaacagacagtatgcatattaataattctatattataaattattttaaagctctcaaaatttttactaaatgtcttcaataaccatatataacgtacacaaataaaaaaaattagattaaaaaaattcttttagataccaaaatagttaggaatacagcaacagtgacagacctagcttaggaattatgggggttgtagggtccaccggaaaaaaatcacatataaaaccaaatatttttattataatttaataattatataccaaaattataaaatagtccccacaaataattttttataacaattaaaccttttaaaattaaataaacttattaggaaaaattttattttttattaaagtaaacacaaatatattttataataattaaactcctatagatcaaaatttttgaatccatcactgtgtatcaatatacttattttagtgggatgcattataaaaatacccttaaatatatacttaaaaaaaaataat

SEQ ID NO: 302657 - DNA, 1488 bp, Cannabis indica
gtaacactttattctcactactgtaatactaaagagagccatagtgcgcgaaaaattataagatctaagcttgtaatctgcatggttttatctcaagagtaaatacagctaaaaggggagtaggtcattacccgttcatcatgggggccgaacctctataaattcctatgtcacttttataatttattattattattatttacacgtgtgataatcaacaattaataaggcccctatcactgtactaaatttcaggacaacatgtttcttaaatattacaagctgcttattgaaaaaagaaatagaaaaataataaatgaaagacttaaacgatatgcatatcatggtggcctttaatgcaaacttgtgaagagttgacagagacatgcactccatctatatatacagattacatttgagggaaggtggataaaaatattaatgcaacaaaacaaatattactccttttttttttgcagcaattatattaagttgagaacgaatatattagagacatgttgtattaaaagaattggattattataccctaaattgcaaaaaatcaaattctccctgaagtgtgcgttgtggtgggaacttggggaggtgaccagcaatctcaacggcagtctttaaatacaactcaaacttagtgacaattccatcatgcttaggttcttttgcctctgcactattataattagttacaggcacaccatgatgttgatgtacattggaggcattattcttaatgaggcataaaagtgccttgtctttggcagtccagttccctgttctcaaatcaaagtgataaagagccagaaaccgttgtccataagtagctatgaattccaatgctgccaaaatgaactcaaattcttcattgggcatataatacggaaaactgattcttgtccatccaggtttcacgccagtgtagccctattaatcatataattaatttagttaagccctcttttctaagtctctacacagcagagattaataaatcaaacttaaatttaaatattgtaaagtcacctcttttataacagatctataggtatgagaattagcctcattaactccgagcagagtgtggccatagggtcccgcacaagcacaaccaccacgagcttggataccgaatagatcactgagaagagctgcaacgaaagctccatgaagaggcttaccactattgttgccagtctctccccacatgtaaagccttgattcttctctctcattatgagcacgtccgtctttaatagtgtggtctgttgataggtaagaatttgttgtggaataaatgagaaatgatagtatagcttgtcgtttcacacttgtgtttcctaaaatttgtatgttcttatttgggagaagcctctttagtgccttttctacatagaaatgctcatatttttcaatcacttcataaccaatgtattctttcacccaaaaggccaatgctgctcttattgtttg

SEQ ID NO: 302658 - DNA, 6042 bp, Cannabis indica
atgttatttctgatctatattaacaagtaaatctgattatattgaaatgagttttatttagggcataaaacccaacaatttcccccaaccaagagcaattattatccaatcgaagagcaaatttcgctagttcatgtgctgctttattagcatcacgctttacatgcgaaactgaaaatccaggaaacaaggataataaaagagaaatgtcatcaataaggtcataaaaaatacatgagtagtagaggaccctttgttaatagcatttgcaacaaggagagaatctgtctcaatgaaatgaatgtgcaaaccattattccttgcccaatgcaaactgtaaataatcccatagcttccatttcctttaccgagtagctgccacgcaatgattgagagaaagccccaacaacatcgccaaaatagtctcgaatcactgccccgagaccaataacagccccagtagcatcataagctgcatctacatttaatttgaaaaaaccagcatgcgagggagtccatttgacagtaccggattcacgggcagtcctcaaattgtcatccctactactaggacaatgctgaggcagagagtttgacacagaaggggattgctgaagtgacgaattggtgaattgttgaacatatgaatcagcaaaagagccaataagagaggcaggttttggtttagtgccatgaatctccttatttctttcagtccatatactccacatacgacacaaaattctctccaactcagagttcgaagtggcagcagcaagggaagaaaaaatttcaaaaccattcaggtgagatatgttcggagcagccttaaagaaaggtaactgagcccaaacatgtagggcgcgagtgcacatgaagagagcatgacctagagtctctcttgagcgattgcataatgaacaaacattggattgaagaactttcctatgcaaaagattaacagcagtaggcaatgcatcattaatcactctccaaacaaatttttttactttctttgggagtttaagagcccaaagccgcttccaccagttgccatttgaagaggatgtagatgactcgttgattttatcaatgctctcagccaagtgataaccagatttcacagtgtaagaaccggtttcagagtgatgccaaatcaatcgatcttctcttgggttaggactaatcgagataaagaggatacgatcgatatcaatttggccaaaatgctgttggagaagactcaaatcccatttacgatcatgggttatgtaatgttgaacagtgaagagaggatcagcttgataagtatatggcaggaacgtagtattacccggcaaccaaggatctaaagcgcattttactttgtttccaaacccaatcttccaacaaagtcctttaacaagaaggtctcgtcgatcacatatactttgccaagtaagagacgaaagagtaccttttgaagcgttgagaaaatctccattcttaaagtagcgagcttttaaaactcgagccaacaaagagtgagggtcctctaaaattctccaagcctgtttagctagtaaagcttgattaaagtgaagaaaagatcgaaaacccaagcctccctcatctttagattgacacaacatgctctatttcttccaatgaatttttgacttatttgtggtagagccccaccagaaatttgccatcatggcttcaagttgtttgcaaaacttcttaggtcaactgaaacaactcatcacataagtaggtatagattgcaccactgctttaagaagaacttccctactaccaatggagaagagttttgcatgccaagagtttaagagcttccaaattcggtctttaatgttactaaaaagttcggatttttctctaccggcataagacggaagaccaagatacttttcatgaagatcacaaatgggcatacccaacacgttgttaaaactagctttcaattccacattcacatttggagagaaagacataaccgttttgtcggtgttgagaagctgccctgaagcgcgatgatacacatccaatacacgcctaatagcgtgacaggaagagtcatgagcttgacaaaataacaaactatcatcggaaaacaaaagatgagtaaccgatggggcaccccgagatctagataagcctttaagattgcctaaattttcttccattgggagtaaagctgagagaccttcagaacaaatcagaaacaaataaggctataagggatccccctgacgtagacccctctggggggtaaccaaaccagtcacagcaccgttaatgttgaaagagagtgaagaagaggagacacaccgcattataagttccacccaattcatatccaaatccattttgagcatcacctcatgcaaaaagacccactccacccgatcgaaagctttgctcatatcgagctttaaagcagcatagctttgtcgtcctctttttttattcttaaggcaatggacaagttcgaaagctaaaagaacattatccgtgataagccttccgggtagaaaagcactctgattttgggagatagcagcaggtaaaactctcttaaaatgattgacaatggctttggagacaagcttataaaggactgaacacaaactgatcggtcgatagtcaccaatctgtagaggctgatcgactttcggaattagagtgataagtgctgagtttatatccgtgatatctgccccatgatttaaaattttgagaacacaatccgaaacttgggaaccatcaaaatcccaatgacgctgaaaaaaaatggcagacataccatcaattccaggtgatttatccggggccctcgaatggagtgcttcatctacatcagaacgagtaaaacctgccagcaacatcgtattcatttcctctataatagtaggattaatagctgagattgtagttgataaagcttcactgtctacaaccgaagtagtgaataaattagaaaagtaagatgccgcttctgtagcaaagtcagtttcagagtagagaactcgaccatcactggagattagagattgaatcttattatttttatatcttgccttagctctggagtggaaaaacttagtattagaatcaccacttttgatccaatcaactctagctctttggtgccaatataattcttctttttaccaataaatcatcaagaattttctctgcatcaagaacttgggctgtgtgatctggggaattttccatactattgtgcaaagaggcagctctagattgtgccgtattaatgtcctttttcatctgaccatatttaccattatgccaatgttgaagagccgaagaacaagcagaaatattctgcaataaatttgtcaaagtacctgtcccagaagaccaattatgtagaatgaccttgcgacattcgggatccgttaaccaaaactgttcgaagcgaaacctgctgtgatgatgtctagctggccgatcctgatgatgagaagtaaccaagaagtcgattgcacgatggtcaaagctaaaaaagtcaagatgcaatagatgattttttgaaaaaaaaaaaagtctttccatgttgcattaataaaaccacgatccagcctttctttaattagaaccccactaaaatgtctgttagtccaagtatacttatcccccgaataagccaatggagtcaaattgcagaaatcaacagtgcgcctaaactcttccataagagattctcttcgtaaaggacccccttccttatcatcattagataagagttcattaaaatcacccattattaaccgaggttaggaattagagttaggagcaaagctttttaaaagattccaagtaagagttctttgatgagattctggagatccataaaaaccagtaaagtgaaaccgagtgccacgatcatacgaaacataaacatcaaagtgattcattgaaaaagaattcagagttacatcaatatcatccttccataataacaataaaccccccttcaaaccaatcctaggaacctctaatccatggctaaacttaagagaggaacgaacccgatcaattgaattacaagaaagttttgattccataatgaaaagtaaatgaggacgctgcttatgaacaagcagtttcaggtgtctaaatgccgaagggttgcccaatcccctcgcattccagctaatgatattcatggctccatacggggttgctcagcaacctccgctgaaaaaaatgaattctcctcattggaatccgacagagcatcagaaacttgctgattgttgaattcattgacccccctgctactgccaatgttatttctgcatctctttaacacattgcaaaaattttcagggtcgacttgtcgcttgaaagccttactagcagctgtcccctcaagaatagtttcttcaactaacaccgctttacctttgtctcagacagaagtaattgtttaatcacagaaaagagcttgtaaaccttggcccgatagagaggaaaggtgatctgatggtggataagtggcatagatgtttgatgaaataccatggctggtttgaggtaggtgagtagaatttggtatggtatggctattagttggggtagtgagcatggtggccgagaggctttggaaaaaattgggaaaaggagaaggtaattcaggtatagtctctttctgaggaggcttttccttagcagtgttacttgtttcagcctctgtaagaggagacgggtaaggtttggtggtggtggaacgaatttggtaagtgttggtggttgggatagtagaagcaattgatttacgagccattctagtaaggaaagggtacacattagccttggagaaatcttgcctatatcggtcatatcccgagttgggaagcttatcccccatcatggaagggtcaaaaggaagatctggttcaaccccagtatccacaagctccaaaaaaccactacacttatcaaaggggtggccaattctaccacaatgaaagcaaaaaataggaaggttctcataccgaaattccaaccaatgttcatcacacactttcgggagagtaaccagtttgcccatcatgagaggaagagaaacatcaatccacactctaattcggataaaagacccccaaccttcatgaagagaatcctcatatacatcaatgtattcaccaatccattctcccaccttcatagctaaagctcgagacttgctgagaaaagggaggcgatggatttgaacccagaattgaaccttggtgaaatcattccttgagacattctgtaaatggataggtgaatgcagcaatataatgtgattaaggtaatgccagggctctccattctgaattctcattttgtcccctacacaaccaatagttagtaagaataaatcagaatgcatttcagatacctcaacaggaaaacgacatttattgctccagaattcgcccattttcttgataaaatttttgggattaaaggcattcgacagacagcacgccacaagaaagaattttggggcagaattttcagaagagagatctgcttcagtgaaagagtgaactgctctttccttctcagacaaaaccaattgagcattcatgtcgttaagaattgaatccataaagcaaaaagaggcagagtaatcaaacaaaaactggaggtataaggcatagatgctgtaacgccctaaataattaggcacgctacccaaaatgattatgaaaccctaatcccctaaccgggattactaattaaaaatagcgcagaatttaaacttttatattaaacagactgaaaataaacttgtaatatatttaaacttttcaaacatagttgggatcccaaaaatatttacaaaattattacaagttctttcttactagccgacctaagcggcaaaacagaatacaaaagtcaacactgttagacccataacccgcttggtctgaagtggcatgaacatgtacattcttcgccctgctcctgaaactcatggctgatcagctaatgccttaccctttcctgcac

SEQ ID NO: 302659 - DNA, 2239 bp, Cannabis indica
ggaattttttttataaaaaatcataccattgcagacattcctttactagtgagtatgtatcggacatgaataagaccataaagcatctccgctgctgattcaaccaactcattttgctcctcagtgaacatatcccctgagagatcaatagcagttatagaggcgtccacaatgcacccatggactaccacaggtgtagagatagacaaacacatgcaatataaaatacacaagatgtgcatcatctatagataaaagttcaatagcttcaaagtttatttaacggaaaagatagcaagtctactgtatcagcttaaaagttcagaaaagaataattagtatttttgctccctaaacttgttatacccctatgatatacgacttgtaaataatactcatcaaaatttaacttttacagcaacatagtccttccatcacactctatttaattttatcataaaatcaatgacgcaatggatagtagtgataaatggatgcaaattaaatacccttcactttttttttaatgttaatgaataatagaataaaagattatttctttttttaataataattttagttttagtttttaatcattaaagtaaaaaatatgaaaggtatttaatttgcatcaatttatcaactcttatttcagcaaaaaaaaagttattcactcatatcaaccgtgccactcatttttaataaaattgaatagaatgggatagaaagaccacgttatcatgagggccacaacttaatagtgtacaaaattcagggaaaaagttaattgttctttagaaaaagcaataatcgggagcctaaattttgcaaattagaattcaatttagcatttttctcaccatgagaagattccacgtccaaaatcagatcaagtgcatagtcataatatgggacttgactgctcaaaccacaaaggttgaaatcatcttgaatgtattcatcatcgacttcgcaaaagaactcatttcctcgcaaattgcaaaaccatgaaatccaagaagtgtcatctccatcagagccacttacatcggattcttcactatccgtctcagattcctctgcaaacaacgacacaacacgtcaataagcaagcttagagaatattcatgttaatatcatcaacaaacaaacaaacacaaaaatatattataaaaactaacacattttgaaaagcttgaaccgtaaaaactgaacagtctcattcaaattatgcagtattttgaaaagagtaaagatactagcttcaaagttgaaacacaaagagataacacgaattatcaaattaaacgataaaattaacacgaatcagattattatgtacctttaactacttgatatgaacaattaactaaaaataagcttcaaaaaccaaatgagaatactaaacacaaaactcactgaaccaagatcggcgaaaacacagttctaagcaataagaatcataaaaataataacaaaatttgaaattactgataaaaaggaaagacccagaaaatgaaattaatcacagttactaaaaccagctaaagaaaacaaggcaacgacagagaagaaagacaaaccatcagagcatttattcttagagagagaagctgcggcagagcgcgaatcacgatgatcgagctgcgatttaccggcggaggtggaaggaatggagagcctttccttgtccttactgctcaaggccctcgaagttgacggtgaagacttctctagatgcttgtctagggcatcgttgatgcgcttccgatcgagaggtccaacaatctccgatttggaagacccaccaccacgatccctatacatattattttcaactattcagctctcagattcaaacaaaaaggaattggaaagctcgtcaagctcggaagccgttcatttcgtcagaaaaatctgacgaaaaccctagattctgttttgaagaacagagcttaagtttcgggatcggaagtagcgacggaaagagatcgaagatggtgaagcgccgatttgagagatggagatagagagattgaggagtcggattggagagagagagagctagggtttggaggagagagagagtgctgctgtctaggcctaaggttccctctgtctctccgttcttttgtcgtccttcgtcttcttttttttcttcctctttattttgtctattttattatttttagttttttctttttgtaagtaaaactattttattatttttagttttttt

SEQ ID NO: 302660 - DNA, 2192 bp, Cannabis indica
aagttttattaaaaagattataaaaataaaaataaaagactttgttaaaatatttcccaaaaatgtacatataaataaaataaaaatattgcacatatttgattctgttctatatcggatttatttagttagttaataataaagcggttttggaattgatgaacttgaattgtcatgctattttttaattcaagcttaataattaattaataaaggtgataactgtacaaattaaaattggattcgatcaaatcatcgcttatttattcacctaaaaaccaacaattaatcccctcccaaaggaactcgaatcggaggcacatttagctgccgagaacgatggcggcggaggaggcgaagcaggcaacctcgaagagaaatccctgagatgaaactcatcgtcgtctcggctactatcatcctcgaaattgagtgcataactcgacaaatcgtagctaaaatcagaggattggtggtggtggtggtggtggtggtggtggtggtactgtggctggttgttatgcctccggctcatccaccgttggatcagattccagcatctgtagtgttggttccccaaaacttggtgagggattccggttccgccacacatggaggatttggcgtgttcttctcccatcaatattgtattgtatgaatagttagatctcgattcaaaagaagaatacagttgttctggaagtggtggttttagatgaaaatggagactgagaaagtagtagtttatatatgatttgatttggatttggtttgggttttggataaggattgaggaagaggagtttttgctgcgtaagcattaggtggctgtaaagtgtaaaccgtgggacatgcgtggtgtggtatggtactagtttagtggtaaatgccaaatggtcccatctcttacctaatttaatttaatataaaataaaatgaatacaactttagtcaacatcacttaattcttttatttactttcttcttaataacttttccaagataaaaacataaattacttaaatcaagtttaaggcacaacaagtgtttagcacaaatatcccatttggttcttctaatataattcaacaattaataatttttgtatagagtattattaattaattataaggtaccatatttaagtaatattaagtaccacttatacctaatagtaatattcaataatttatatcagtaatcaacaattatgattaagaatatcatgttagtgtatgtcttgggtcttgcaatttcgatcttttagttttattgtcctttcctcgtccattatactcaactcagcttatattttgaaaagtctccaaaattattgattgtattatgatgaaagtctttctcttgtctataattttaagttaaatattgaatgaaatgaaatcacaaattaaaggatgtaaagaataattttgaagaaaagaaaaaaaaagaaatagaagaaaaagagtattacaggttcaagagagtatgtatgggtcatgcccttcattgcggacaattttataaggtaggtctagttcaaaaatgagccaaattagaaaagttagataataaattaggtagaagaacttaaagtcactaattaaaaattacatcaattttctcaagaaaatttatatcaacttaaaattaaatggggctactttgctccatggcccattatataacctatgatagttcactgatagactattttcagtttatatgttataattaagaataataatcacgataatttaagattaaattgataatttatgttccaaatataaagaagataagaattattgcatgtgtctcaccgctagtatatatgaagatttctttacaatacccctaatttaataatagaatgagaaaataagatatgagatgttctacctccttctaaaaaagaaaaagtgaaagagctaaccaaatacaattaaaagagtgaagaatatcccaacttaggggctttgtcttaccttattgctaaattttggaattggtacttttcaaattaaaaaagaaaaacaaatcccatatgatggcccaccacgtaagcccaagtcgtaacacccaagctcagccatctgagagtccagtggacttcttgtggattggggatattttttaaattagggaaatttacatggtatactaacttttgtcatttttttacaaaaata

SEQ ID NO: 302661 - DNA, 2288 bp, Cannabis indica
agttgctttgagctttttcggcattttttctcttagactaaactaggtttgtgttgttgacagcacttttagtctttcttttggtattctcccattctttgtttggtgtttgaacatttgcttgctgcaatttcctttcattcccttcttctccttctgatttgttcttgtcttgctgtttgttgttgtttctcggtcttcgatttcataatttcatcgtgtctacaagttgctttggtgtgtccatattttgagtagtgagtacatttggccggcaaccattcgtactccacattctggtcttgaagcttcccaaactcattcaaaaaaggaatgaatcaaggtggagcgtctgtaacttccatttctaccaggattcgagcatattgcaacctagttcgatccttggtatgttggtccaccattataggttttccaattgtgctaaccaaagcaattagacttttagtgccccaatattgaagcccttggtcatgtaatctgatccccaatggaacagtgcgaaccagattcatagcgttcaaatccgcagaccaagggcggactataactggtttctgatcaaactgaaccactcctgcctccactacttgatcccgagttgcttcatcattaaaccgcaccatgattaatcccatggacaatttactaacctggataactccaagatgtccccagaccctttttacaaagccttcaaatattgtaatgggtggattagctcccagaactttacaaatcactgctgattttcagcaattctcctcttctcggacctcatctagatcgacctttgctattttgattccgtctcttatcaatggttctgtaaacaaaagcctctgatcacgattactcaccttctccttcatgaatgtctcacaggtcctcttagctgattctggtgagtggtggacatccgacgacgtcttttcgttatccacctcctcagcccaactctgcgttctattttttccagatcgattcgcttcctctgtttcgattaggtctggagcttcgactatctcagcaatcaattccaatccctccatcgagtgcagatcgtcacttccctccttctccccttcaaaacctacaaccgcatcgtcaatcgtgagccgggtgactggtttccgtccaaccttcttcttcctcaccacggagagagagagcaggggaaacggaaacaaaaatatgttcaacaaaatacttcttgatttagaaaacatcgatattaagatagaggatgaagatcaagccaccattgtccttaactcactcctcatggagagctacgaacatttcaattgaagagaaaatctaagttggaggaacaccctggaaaaccaaaggaaaacacaagaagaaatgttatatttaccataagacaactcactacaaaagggattgccccgaactaaaagaatctattttaccataagacaactcactacaaaagggactgccctgaactaaaagaatctgaatttgaaccaaacactatcatcacgagaaccatgggaatgttgatgtggttggtgattaggatggaagtgatggagatgaaagtgttaaagtgatggtagtcacaaatggagactcaagggtagattggattattgatcctagctattctttccatctttgtcccaaaaaaaatcaattatgtgattacagaaaaattgatggaggaacaatataattaagtgacaatagatcatgttctattgtgggaataagatcaataaagctacaattattaggagaaatttaaagtgagttgttacaggtgagacatataacagaaaataaaaaaaaatctcgtttcaatggccatgctaaacaaagagggtgcactgtcaaaggtggaaaatggaattctcaaagttcaaaaggggtcaagaattatcatgaaagactcaatgatgaatggtgtttacatctggcaaggtagcacttcaaacaactcaatctcagttgcttcaagagaaatgcagaattcatttactctttggcacaaaagacttcaaggggttagaaatactaaacaatagaggcttgcttagaaagaatgtaattaaggatctagacttttgtgaacagtgtgtctatggaaagtctacaaaagtcaaatttggaactggtctatataataccagatcaaccttggattgcataaactcaaacaaatgaggacccttaaagataatgtctcgaggtggagctaaatatttcttgacctttattgatgatcattcaagatatgt

SEQ ID NO: 302662 - DNA, 1418 bp, Cannabis indica
gcacaaaacccaacaagaacatcaaaaggtatgaagttatctttgttttgtaaaatatagttctccaaattaattggtttattgttaggtggagggaaaaagtgtccatcccagtttcctctcttacaattcaaattgtctcgaagatcattcctgaccccatccttcggaagatagagtcgcttagagctcttctattaggttggctcgtagaccataccagcccaagaggattagcattgttcgaaggattttcttgatttttttatgggtacaaaaattatcacgatgacggttgttatgttgtccactatcagctccatcaattctttctcatgtacgactgtccactgtgagaccttgttcaaccttgatgaggttgctggctggtatactaattagacttctccagctagtcgagaaggtgcatcatcctttctccttttaggttggagatgaaaattgtgctgatcatctcttttgaggtagtgattgggtagaacttggtcatctatcgggttgccaacagtttgattctggggccaagaattagaaggtttgtcatgtcggggtgattgcacataattaaatgggtgctcctccgggtcatactcttattctccagaggggatgtaaagtgcctttcccaagttaagatctcttctgagcggtgggttctccaatacctgtcccttgtctattaatgaaatcttctaatcaggtcggtagcctttcttaattgacggttaatctcttcttattttacacgcatggattcagcttgtctatccgtccattcttggaattcacgcctctactatttgaatacacgattaactacaacatgtgtttcttcttgattatggtggagggcattggtgtgagtcttgatttgtcccagtgcctccctcagattctccatatcaatgtttcacccatattaacttggggctccccccagatggatgttcggtgcctgacccaatttctccagcacactcatggctggtatttctagcctcttagacatcgggcgtgaccccagtgagggggttgtaatcccagtagtcctagagttaacattggcaagagccgtgggaaggtttccccgaggtggcagtcaagcgttggggttgtcaactcctatatttgtgggagcttggaaattaggatccttcgccattggatcacgtagctcgattgatgagaaccttcttgtcaaaaacattattagaccatctccaatggaagatattaaaattgtgctgtatttggcacaaaaagtagttttgtggtagatttacaccaaattttaggattgtgctccaatgcacaattgtaaaactttgatgtaaaatttaatatataattaatatttttattaaaaaaaaataaactaataactttattatcaattt

SEQ ID NO: 302663 - DNA, 830 bp, Cannabis indica
atgcacgtgtcctaccactagtaactaaataagactcgttggggcggccatttattttgaagaaaatgacgacaaatgaaatcccattccatttatttattgtatcagtttattaatcaaaatctataaaggatgttaggtcctttcgcagttattattatagaatggaacaagagtccacctatacctatccaacgaaaaatagcttctttcttataaaataatgtaaatatatatttgtttaacttccagcagataagtaaatttatttgaatacaatgcaaatacgtattgttataactcaaaagagaaaatagatttccctaacaaaaaaaaaagaaaagaaacctagctagaggataaattcaccggtaacaatgggcattatcaatacggcaccgcttcgtccacaacgtgtcgttctcaaatttaatttacatcaatacattacaattacatagccgcccaaaacaccgaaaatgtaaattttatatgattatttattcaaaagaaaaaacaaaaagaaactatgaggtggagagattgcaacacgtgtcgattagtagtgatgaatgatagtgtgagtgggacccaggagtcacgaaatcctcaaaagagcattttgacgaggccaagccaaccctggcggcgtagctttctgtcgtctcctttggacatgtcacagtctttttcgtggcctcactgcgccgtacgcacacacccccacgtgctatgatgcttctttctttgttcgtcactcgcgccaccggccttgaaacaaagtgggtcataggaaaaaaaaaaatttgggcccttatattaaaaaaaat

SEQ ID NO: 302664 - DNA, 1343 bp, Cannabis indica
caagaatatcatatagcaactatgggaaaatcgttaacaagaacccaaaagatgaaatttttgggctttaggatactctatttttacaatgtttttctataattcaaaacaaaattcgatgtgattcaaaagaaagcatgttgtaaatggtgactaaatcataaaagaaaaaaaaagtaatgtcaaagactcaacaaataggctgctaaggcaaaatcgacaaggaacaagttgttatttgatggaagacttactcacataaataattcattgagcaacaaaggataactcaactcccaaaatggaacattgaataaataaataaataagcaaaacaaaatcagtttaatgcattttaagtagaaaaattgacaaattgtagaaagaatagaatacactacagcagagaacaatagcaatagttaacttaaactattagattttaaataatgagatataataatcaaagagttcctaccaaagtttcagtatttggggctgaatgatattctacaaggcagtcaccaaccaatgacatttttccttcttgtatataaaaataaaactttactttcttacattgttatttacgtagataaaaacatatgcatagaacttcaaagtgagcactgcaaactccaaattgaatcaactgcaaaataattatttttaaatcaaactcccatttctatttttcaatgtcaaacatttgaagtatatacagagcatgttgtctatccctagttatatatatattatatttaaaaatacaattgaataaataaatgtataagagtgatacaacaacaacaataaagataatacatattcttatagaagaatatcagcatggctatcaaaggcattattattattatgactagtgttattgttagtattattagtattgatattgggaggagaatgatgatgctggtggtgaatatcgacagaggccatgacattggcagcatcatcaggctgagactcagctcttttgtgcttgtacatgggagaatgtggaggtgaatctccagggcttcctcccaacacccttgtgggagatctcactttttcatccttctttttcactgcctttttgtgccactgctttagtgcctttgatgtttgttcatcgaatattgacctcttcattgttgatcccatctacacacatttcattgcttagtttgtttgttataggaaaattttacaacacaccactctaaaaagaatgtactgatacactttttcatttcggtattcgagaaatttctttagtaattctttttttatagtcgtgtacgttgtaattatgtaagacattttgtaaaattttaaaa

SEQ ID NO: 302665 - DNA, 2723 bp, Cannabis indica
tttttttaaaaaaataatcttcatccaactattgaaataattataaattttctcataatttattgatgtgaccacaaatcatatatataattatgatacgagagttcatttaactaacttaatttaattgtttatttttttcgcaaatcgaataaaaatataaattaagttgaagaagataaaattaagaaataaataagatgatattttttatgtagttgagacgtcaataagtcttaatctacaagtcaatattatactatttggctatggagtttttgttgtatttactattgtcttcttacacaaaattctcaatcctttgcatgaaaggataatgtcatatttatagacaatttggctaataagtcagacagacccgaacccattagggttttgtttggtgaaaaaagtctatcgatagggtaactacaatactatattgattattgggctgcgtagatgaggcttaagttgtaggtagtcatcttccgtacacggatgtgtgtgtgtgtgtgtacgtgtgtgtgcgtgcgtgcgtgtgtgtgcgtgcgtgtgtgtgatgtcacttgtgaaaaaaaatatcagagtagtgagtgttggtaaaaatgtaactttcttttactgtgacactttttatggtttgacacaggggaaaaaccacctgattttaggaatcgtatcagaatcctaccacgtgggtcagctttcgagaatataagtgttccagatgccctatcacattctgtcctcgaatggcccgtgaaagcatcttcctttagtttacacttgtctgctcgtcgagctttaattctagatccaaaattaggatgttcgaattcgttcttgagtagtgacctcgatggaaccggacgcctgaagcctaggtattgttctacccatccttgacaggcgggtcgtaggattgatccttatggacccaataaatgggcctcgtttccttattgaacatttgttgtggctcacttatcagtaatctgggtacacaaataataaaagtgaaaccagctatattaatggtattaaatatttcaatattaactctaaaattaggcatacacaatcttaaattttatagtattatttatacaattatttatttacatgtgcattaacaacatatataaattagattaattaaaaccatcatctaatctaagataacttaaaatagattttaaagacatgtcacccactttataaaaaaagaaatgcttaaggtattattggttgtgtttagtatcatcctaattcttaaagtgatatattgtttttttgtgtaataaatagtaagtcttgtatattttaattaaataattattataaaaaattattaaaaattttatctcgtaatcaagatcggctcttaaattatttggacattatatttttgaaaattatatataaaaaattgtatatattttttaattttttttttgtttcagggggtgagagaggcgctcgggctaagtaagccctaaacataggtctgaccagtcttaacccagaaccaactttatttataatagtattaagtattattagtgcctaataataattttcttataaatattaaaatatctcatattcttcatgttgctcttctttggggttcactataaaattgcctccttattatacttaacagcttcatgaaaggccttgtgaagctttggtaaagtaatttaaaaactcttaatgcaccacacacagtccactccttgaagatttattttatttttattatgaacattttatgaatgattggtaggtgtttttggaataggatttttaatatctgtaaaaaacaaacaattaaccaataatatatacacattttttttttgttggattccttgtatttcataattttaactttttcaaatcatattcacaattagagtaaatttttctcctaataatacacccactaaatccaaaaatagctactcaatttagaagtttgagtactttaaaactttatatttgactacaaattacaatgaatactaaacaatttacactttttatttgtttatataaaatatattttttagacttatgggttatgatccttcctagttcctacatatatataaggaatgtagcttaaagtttggtgagtgttggttcaagttggacaagaaatcttcttatttcttccttctttattattattattattattattattattattattattattattattattattatagatgtgttataatttcttctttgactaacaataaataaaaaaactaaagaaaaagtttgtaataattgatgttaaaaaaccaatgtagaaaaatctttaattaatcaattatataataagttataggatatttatacatactttatttatttatatcatataataagttataggatatagaactttgttgttatcatttttaagaaggaaataaaaagagttagtcaacaacaacagcaatagtttcttgtaagatatttttgtataaaaaataataagataaatggttagatagtaaaatggaccaaaagaaaaagatatagggactcaattgtagaaattgctaaactttggggtctagaagaaaaaaataaattaaaaattgcccaatttaattaaaacataaaatctagtgttggagagagagagagagagagagagagagagagagagagagagagagagagagagagagaga

SEQ ID NO: 302666 - DNA, 3783 bp, Cannabis indica
actttcaagatagcatgtagggacatgatcactttgatgcattgatggatcggatggctttaaacagatcgttttgtttcaacggtttgcttagacaagcatccatcccagcttctgttgtcttgtcagtttcttcagaacccgctgtatgagcagtcagaccgaatattggtatatgagcaccgtatagtttctcctcttttcttatctccttagttgcttcatatccattcattactgacatctgcattaaaaccagtatatgtacattagtataatccaaactttgagtacaatctattaatctgttaatgaaaattgcatccaaactagtatagttacctcacaatccatcaatatacaatagtaaggaagagtcatagattctccatgtttcatctgattggctagttctttggaaacaagttgaaaagcttctttgccatttgaacatagatcagtagttgcaccttgctgtttgactattctactagccaattctcgagccaataagttgtcatctacaaccagaatcttcttcccacttaatggtagcttctcacttggattgcttgtcttggtcgattccccaggttcttgtatttcacttagaaattgagtcttagacatatgataagatgagtacctgtaattatgttcatggattgaaagggtcttgttcaaaagcatcttgaactcactgcttgtactaccaacttcttcgatttcatgcttgacccttctagaaggaactgtagttgaagatgaagcctcaaattctggaagaagtctcaccacttggaacaaacgagtcccatggaatggcttgtacataatagtgtcagttgtgtcaaagagagagttgtcgatggtacgagtcagtggattcattagccaaaaaactcggcaagtagtgttttcgaggctgtttttgaactcattcaccacctctaacagctgcgaaattggtccagcagttgtatccactaccattactactaacccacccgatgttccccgaggtagatgatcaatagtagtactccttttgaagagggaaagcgcgtagttttcgccatttgtttcaatggctttgtaaggactctggcatgctgaagagtctgtgcttgagttgtcaccactgttgttcccttgcttcatgcacttcacttggttgagaatactaggaagttgttcccactgttccaccaacaaaacatttatcccaagtctcttcatgaaattcagtgaaactcttctcctttcatcgttttgaatcattaggataacataagaactatctaccttaggacttggactacagttcgggttgagtgtgcttatttggctaacaccttcttcttcttgcttaccaatgttacttggtaccagctcattagtttccaattcatggtcttccttattagtagcagtactactattattagtagcattagtttccaattcattttggtcttctttagtagtacagctattattattgtcaaaggcatcctcacacacagagagaagaatattgaacctgaagcaagctcccttttctccaatgttcttgtccacgacagagatttctccatgcatcaattctacctgaaagcagtcaaaatacaaaatgagtttagagctgtttgacaaaatagatgtttgttttgaaaattctttgtaaaatagtctttctagcaagagtgttgagtgtgtgtcaactatgtccgataatactactttgggtataattacttaccaaagacttgacaataccaagtcctaagccagtgcctcctttaattacagtagtatctttgtcttggacatagttttggaaaagcgcctttcgtttttccttcgggattcctttccctgtgtcatccacttcaaacacaaagtccataacatgcggatcgttcttgaccatattcatggattgatcatcatcagcagcagcaacagcatcatggtcatggtcgttctcatgagcttttttcttttgagacaagcatggaaatagtttctttataactccttcatttggtggggtgtcattgattgagctatttgtgaagcatggttttctagcccaagctctaagaaccacttgaccatgatttggtgtacatttgacagcattgcttaacaagttgcatagtatctgtttaagcttgattctatcacctttgacatgtgaaaactttatcacagaggcatcacaagggtccaaaatcatatcaatttctctactagctccaacagggtggtacaaatcagctacttcttccaaaagaggagccatttcaaactcttcctcttctagcctcatcattccagcctcaattttgcttgtgtcaagaatggtgttcaatataccttcaagtcacataaaattgtcacatattaaaacaaaaaaggagaaaagcaaaatcaagatatggattatgaattatgagtgttattacctaaaaggtccttggtacaagcatccatttgtcttaaattagtttcaagctcagtgccaggagtaacctccttataagacaactctatgagaccactaattccagccaaaggagctctgatatcatggctggctcttgcaaaagctaggcttctgttttgagtcctctcctcagctagtttggttgcctccctttgctccatcagtgcatctctcagataattctctattattgagtctctgaaatttatgaacacaaagctgaatattggaagaatggttgtcaccattattgatactagaaggatgagctgcactgtactttgcttgtgcacaaagttcaccatttcactttgtggcactgccaatgcatacacctgaaaacccacatacaaaaatgatgaagaagtcaattgaggaagaccattctatgcagcgaattcaaaagaaataaataggtagaaattgttgtaggaaaagtagtacataccgattgcaccccaatcacatcaagttgagaacaatagaagtcataattggttccttcaatattcacaactgtagtacttatcactggtgatggtgaagatctcccactgttataagaataacatttaacacttgcattatgatcaccactaccattgggttcaatcaattcaaatgagactgaaacatgattactatgatcctctacatcaacgaccatcctagtccctttgagcccatgattaacaaccatttctccacctttggtagccaagtacaacaagctactactactactactactactcacatcaccatataactcatcacttaggtctttgaccaaataccctagaacaatgagacctttgccacggttaacagtggctgagttttggagtaagagatcatgaccattgtcccatttggttcctagaaaagcataggagccattcatgctgttcaaggctaagtctgtgaaggagcttgcattaatggtggtgaatggtttgaatgtggtgacatctccaagtgtctttccagtgtcatgatcaactctttgtttgtaccaattggtgtttttcatgggggtggaataatagtgaggagagtagatcataaatatttgattgagttggtccatggagtaggatataacttgaccatcttttccaatgtatgagatttgaccaaggtgtggggtcattagtagcgattggaataaaagtggcgccacctataaaataattagcaaattttaatattacatagtttttattcttcaataaacctcataattatttatttatatttaattatatatt

SEQ ID NO: 302667 - DNA, 3014 bp, Cannabis indica
agttttggctttgtgatcaaattattcctattcctattcttgctaatcatatatattacttttaactcattttattattattatctatttgcatcatcaatattcaggggattgttgtgttgtattttatcttaattagaaaattaaaatgacctaatcaaagtctctgcctacaatacaaatattggatgatttattcattgtttttcatcatatccattttattatttacgttaaaacaacacttcacctcacttcacattattcaaatgtaatactaacaaaaattggaattttttagcagaaagttttgttttagcaccaacaccaaacccttgttttgatatgttccaatgaaattttgggctatcatgatgaactcaatcttgaattttctataatttcaactcttatgtcttggatgcaactttactcaaaattgttgaggcatctctcttcactataaaacctcattaaacacacatgcactttcatacaacaaagctatgtttgttcaatgcacgccttttcctcggattagcgctgatcatgtaagagaacgcattcacgatctccaaatcttcttcattcacaagtatgtttgctgcacttggatcggcaagaaggagctttgccacaagatatccagcgatcgaccaagtttgaaataggcgcgcctgctttccaacaaatcgcgcttgcttggtgtcataatattcaggccacttgtcactagcgatacgtttttcagcgaccttaatggcttttctggcaatttcaagtctattcatctttatagatgccacagtaagctgagtcaatccaaaataatagtatctattagtttcatgagaagataacaaatagagaacttggtgatgagaatttattaagtttatgattagaaaatctacaatcaaaccaatatcaaaatggttagaaaccttattcaaatttctcttttgctttaaaagtgaaaagtctttatttgtttgaagaactagatgaaggttaagagcctgaatcttaaaaggtgtttaacttcacaacttaaaaattgttttcactttttaaaaatagaaaattactttttaaaaaccaatagggtattcgaccaaatttttttaaaagcatttttcaaaaaatctgagttagaaaaaataaaaaatcaaaaaatagttttttatttcaaaaataatttttatccttttgtttaatgtatatatttttttttatatattttctctcacatacccaggtttggaatgcggaccccggcctcagcctcagaccccagacccgaagtccgagtcgaacccctgccttggccttgaactcgaactcctgccttggactcagcctcgaacccagaccgtgccttggtctggggcttggtctggggccagggtctgaggtcgaagtccaaaattcgtgttgtggttgtggtgggagtgagttcgtgttaaagtgtggaatattgaagattttttattagagtttttgaaaacattagccaaacacgtcttgtattttaaaaactactgttctcaattctaaaaaaaacaattttaaaaacaaaaaaccgcttttaaatttttcagttagcttaactacttgaaaatcttagagaacaatctaacaaaagatatatgaggtacttcaatcatcatcatcatctcaagttagtttttacctgccaaagtaatgttggccaagagcctccattgtggtaagaccaagggctgcaacaaaaaaccaagttagagcatgaagaattgacaagggcggatcggttgtagcgaagagagacaatgcgcacgtacgtgttcttgggatcgcttcctgttatgattcgccattcctgtccttcaagagcaggataacatatcttgagaggcatgtctgcaactagttcacaccattttgattcaatgagatccaatatggcatttgattgatcaagtgttgcaatactactcacaatagaccataagttccaagagaaaagaacgaaagtccatgtgagccggctgcaggtttccgatgaaatagcctcctttactcggcataaactccaccaaccaggagggaatctgatcaggatagatgttgaacttgttgacagcctcataggaatactcctctgtattgtatctgtagatttcattcagtttcctcaaatcaatccaatagtattctctgatatggaacgatagagcaagtagacggttgttaagagcctctaagaggtcagctgatgatgcatcctcttgtgtaagcatttcccgagcacccaacaaagccgagtaaaacaatgcctgtacagcgcagacatgccaattaattttaagatgaaacctcatacatcttaccatacaatgcataaaacagttaagttagttacctgaatctccaaagggtggccgtgaattcccatacgacgatctatcatgcaagagccgtccgtgaccaacaatgtcgggaacatatcgaaaccatcagcaagacacagcttcaaaatcatttttattcctgtttggacatcaactctctcttgcactgacaggtccccagagctttttccatatgctcttagtagtataatccaccacaatcctaaattgtaaccgaaagatcattctcaactgtgtttgtgcttgtactctataatagtgtttgggggtgttgaattagaatttttaaaagcgaaagaaataaagtatgatgttgatggttgaaattgacacaaccttacagaaaatgttcgacattttaagtatgatttgaaattggaggtttgtatgatgtacatgaaaggaaacttgattcccgcccgagattataaagaaagaccgttaactaaggtggcgtttggttggaggtaatgaaatggaatggagtggaaaggaaataattttcattccattcctttgtttggttgcattttaaagtattggaatggcattccaatggaatgctctttccaccattttggtggaatggctattccattt

SEQ ID NO: 302668 - DNA, 6602 bp, Cannabis indica
ttcgaacatataattaagattatattccattgtgctgacaacactataatctttaacaaattgatatgttctggacttaaatagaattcatacatcatgtaaataatcatgaaataaatcatgtgaaccatgcaacactaaatgttatttatgatctttattaataagtaaatctgattatattgaaatgagttttatttagggcataaaacacaacagatatgtagttatcttgccctgttagaggctgagaaacaagaatattaccggggttgtcgctgtggtgaaggtaataaggattggatggatcctcaagaggatttcttggattcacaacctggttgcattgagttgcagaaatagcagaacttggaactccaatttcagctctagtttcttgattgtcagtagacatattcgactagagaagaacactggaaacaacttccaggagaaagaatcgggatggagaaaagagagacagatcagtacaccaccattgccggagaagaaggaggcgctgcctggtagggaagaagcggaagcggataagatcagtggagaagcttgcttctccgctctgataccatattgcgatatgaacaattgaaagaatgaaaaatgagagaaacagaaattgaattcattaattggaaaaggaaagatacaaccgggtatatatacaggggaaataaaaggaaagcaggacaagaaaacaaccaaggaaagagaactaactaacataactaaaacacctaaaataacgaacacaaccaactgaaataactgacaacaataactacattaacagccttaacagcctaaagtgaagtaaatctgatacataataacaacaccatttgaatttcgagcaattaaacaagtaccgtacgcattcttggcttcaaaagttgctccatccacattaatcttgataatcccttcatcatatttagtccaaaagtccttattgccaacacaatttgagttatgtaacagcagctcaaaacaattaagtttgagcatatttccataaaccaaaaatgttatgtgctagaaagactacgtcagttgccgaacgagtacgattactccataaaagctcattacgtgccttccaaattaccttgaaacctagcgcacaacgttgagttctattcgaagtggatcacaggctggagcggagagaggaggatggaacttcttcttctgtgcgaaagaaaagcaacctgaagctagcatcccgtgccgtaaggttgagcccgctttcgcttactgtgccggggacatattgatgaaaatccaatgaaaggggtttagcaacaaccaaccaaccattaagacttcttcaacaacatcgcctttatgccgagaccagaaatcaacaaaccaatcctgaaaattaacaattgtcaaagaaggcagagcaatagcaaacctggtccagcaatattgggaaaaaaggcattcaacaagaaggcggtgcgctgttttagcagctccattacataatagacaatgtaagtcaacaaagacatgcttaatttgtaattgaacacgagtcgccaagcaacctgtaagagctctccaagcaaaattaagaacttttggtagaatcttcaacttccaaatatgcttccacattttcgatcccgagtttatagaccaactgcccttccaaatttggagatactgatagacacttttaactgtgtagaatcctgacacttccttgtttcaataccaattatcactatcaaggttctagcttagaggagtacctaaaatgagaggaatatccctatggtaattaattagttttttttatcaataatactattaatgatcaaaaaattatttttaaaaatagagaaaaataattaaaaatatcaaaaaaagtcagaagcattaaatttaactttattattataaattagatacaaaatgtataaatttgtaaatttcccatttttttttttttttgaaaaaaaccattttctttgttgaaacataaaaaagagtaggcttgatccaggagtgagggatggacctttatggtaggtcaagaagcccatatacatacggagaaggaggagagagaagagagagaagtcgtaggttccttcttctgcctgagatcctgggaaggaagacagaaagggctctaaacaagaatacaattcattgagctatgggtcgccaagccgtagccaagctaatcggctcgatcgcctcgcgccgcccttcttccctactttcttcaccagccaaagctcacagtcttcgccattatgcggcggctcctcccccaccccctgctgtcttcgtcgacaagaacactcgcgtcatatgccaaggtattactggcaagaatggaactttccacaccgagcaagccatcgaatacggaaccaaaatggtatcaaatcatttccaatctttttacttttatataaaagtatttgaagttctactgcaattagtgtatcgggatctgtggtaaactgaaatttgaattggtgtagaaatgagaatggaagctgtagaattcaaacataggtccgttttgatagcttgaaaaaaaaaaacctttggtcttggatcttagcgaaaaggaggggaatatagggaaattttggaatagttttgtaggatttaaaatcctcacaatgagtagggttaggtcaagtagccatgctcgtctcttaaagattctagagttcgggggaggtcaaggaattattacaaaatggctggatgtttaggtggaatagaaatgtgatcagaattttggttatatctgcagatgatttgacttctacagaaagttgtagtgatcttggattttaaatgggagactttatggatttttaacatatgggatttaaagtttttgttttttcatgctacttcatgattggtcaatactcagtatggttttaagtcaataataagctattctttcttaataagatggtagtagcttcccttctatggttgtaaattggagtgcatcttattaatcataacctttatttcttacaaaataaaaaggagtagtgatgttgaagctcttaaagagtaatttaaataaactagaagaagatgcgatgtggatgacattgaaggctgttaagtctctaggagttgccacttaaatatgcatatgttttcaaaaagtgattgagatgtggtgttagagacgcgtttgaatttcttttcatgcttttatacactcttatatctgattagtgctttggttttgctcaattaggtgggtggtgtaacaccaaagaagggtggaacagaacatttgggacttcctgttttcaacagtgttgcagaagcaaaagccgaaacaaaggctaatgcctcagttatttatgttcccccaccatttgctgccgcagctattatggaggcattggaagctgagttagatcttgttgtgtgcatcactgaagggatcccacaacatgatatggtaatgtgcattacataattctgatttaaatttaattatgaattcatttcatgtcactgtttttaaggatgttgtgtctaattctagtgcagtagttattttgcctctcgttttatttaatagtgtgaagtgattattattaactttgaactcatttaaaaaatcattgatgtcctattagttttaaaatttccttttcaagtaaatgtagcctggaagctaatattacaatatacaaatatcaggtacgagtaaaggctgctattaacaggcaatctaagactcggttgattgggccaaattgccctggtatcatcaagcccggtgaatgcaaaattggaattatgcccggttatattcataaacctggacgcattggaattgtctctcgatctgggaccttgacttatgaagcggtgagtcctaactttttttttccatgaaatcaaagggtttagaccttttttttttccttatatctctctatgtcttataggttttccaaactactgctgttggccttggacaatccacttgtgttggaattggtggggatccttttaatgggacaaactttgttgattgccttgagaaatttcttgaagatccccaaacagagggtaagtcaatgttttctttcgatttctgtactagaacaacacatatttgctctggtatcaagtattatacggaaacaattattttttattaatcaagtatctgtgttcattttaggtattgttcttattggagagataggtgggactgctgaagaggatgccgctgcattgataaaggtatgcagcatatttatcaagttttgactttactgatttttttaaagggttaagtatactattttaaataagtaacgttcttgccacaaaaaaaaatgtaacttcctttcctagacattctagtacaatagtcagggcctggggcttggttctaatgtctgcactttaagttttatttgtggttaaacagaaggttaggatgagttgagccaaaaagatttctgaaggattggttttggacataaagctcatatgggtcattgagtaatgcacacacaaagattgcagactattaacacacaatgatgtgcaattaattttaacaattaatatttttaagtgggatcacatcattttaaattcttttctaggggacatgctttctttttttcttgttattttgttaggtgactttgtagcttcctggaaacagtgattttgtactacagaacccacaaacccctaaccccaaccctacaccacttaatattattcctaattacccttaatattattggaactttcaataaaagccaatctgccattctaccactgagctttgttgcctcagcgacccctgcgtcaaatggtaaacactcattaattttcatattttcttattttaccaaaaacttctgcaattctagttcttaggaacccaagtatattcttatatgttgttgaaacacacagtcaatgtattagagtaatttccttacctcaaatcacatcattattgattctcaaaggtatctttttcttagacaattaggtcgttctcaattggagtttaatttttttttttctcaagaaatatgagggattgtgagcaatgagcattaagggtctgatcagaattagatattgttttatcttagtgaatgttaaaggaatgtatggattattggtccttccactttgattttgattaaggattgtgatgctccttcaagggaaactagttctcttttatttggcagtgcagtaagattttcattgtctgaaacgagctaaagtaatgctgtatttagcttaaatagttatatctataatgaaatctttatggtgatttatcatagcttacataactaataaatgtaatttcgtagactttttctccccttaaaacttcacatgcaagaaagacaagaagtaattgattggtattaacttagactgtcttagttgattggtattcattttggtgaacgagatatgttttttcttgtatgataaaatggatactattatttaactttcaatagtgaaaatattattttgtgcccttgccccataatttttaaatttttttagagttatgtcctaaatcctaagtttactgctgcactgtgttgttcatttaatatattttaagcttctacactaaacacatatatctcatgactttaaacaggaaagtggaactgagaagcctattgttgcatttattgctggactaactgctcctcccggtcgacgtatgggtcatgctggaggtaatattttgatttatgacaacttgcaccaaaatggactaataaatcattatagtaatattattactagggcattttttcatcgattgttatttgccaacgtgttaatcatcatgcatatgatttcaaccccaagagaggtagtctagcggtaaaagatgagcaatagaattcgctggtaggcactaggcgctgttccagagttcgaatacccttagactcataaacttgggggccactgggaggtgtttaacatatgtttgtttgcgttagtgtcactagtttcacataaagtgaattatggtagccccgggtgaggccataagaatgtaatctagcagcattgtttcgaaacttcattcataaaaatatagggaagtgatttacaatgtggcttctttctggtcatgcagctattgtctctggtggaaaaggcacagcacaagacaaaatcaagacactcagggaagctggagttacagtggtggagtcacctgcgaaaatcggaactgcaatgcttgaggttttcaagcagagaggccttgtgaattaaaattagcatttaaagttgatcgatggataatcccatctttaattctttcttttccaaaacaaaattcagaaacaaagcgcacatgcatactccaatcttgaattttcttacaatgatttatcatcgcggaacagcgtttgaaaattttctcaaccttttgagctataatatattgctgttgttaatctaataaagttatagaaagttgtctagatctttccctaggtcagactcaaatggcattcaattcatcgtgtttcttttttcttttt

SEQ ID NO: 302669 - DNA, 895 bp, Cannabis indica
aatggtggttgcagaacattagtcttcgaattttacatgcagataaattatccacgtccaatgtctaaaccctattaagtaaaagactcgaatataattaaaagatgaagaagaaaagcgcaccatcctgtcatgaacttttttgacgcccagcttctaacgactttgctaaaagtctacaagtgacataacaaagttgagcaagagttagatatacaagacagatacacaaatgcatgtataatcagaaaaaatcaggttacaaagagatttaagaaaacaggacatgcataaatgatgtgtcatggacttatttaaacatgtatgcatcatatttctcaaaatcgatcacttgaatcgaccaaaatgcaataaaagaaaaatagaatcagtgatcgttcaccgggcataattttgtttaacccttattattacacttaactttctaaacaacgctaaaatccagttgaattaagttttaaagcaacacacaccaattaaaatgataaataacaataaaccctttatttccttatataaatctttctactagagtctagtgtgaaatccgaatgacccttctaattccagcacgctttaaatttcaatcctcatcaaaagtaaatacaactacaaaacaagctgcaaaccaagcgaatctaagttttgcatatcaattcactacaaaaatgagaatgaaatgtactaggtcaagtcaaacacagctaaaaactatgactcggacacagacaatcaaagaagctttcccattaccaaatccacgatcaaaaaaaaaaaactacagaactctaatcttccctgcaattctacaaaattcggcaatccaaacagaactaaaaaaataaatcaaatcaaatcgatcaatcgtgcaact

SEQ ID NO: 302670 - DNA, 1096 bp, Cannabis indica
tagaggtatatatggtgttggtttttcaaaaccatttagcgtcgctttgatcagcgtcggtagcaaattttaccaaaacttacgctgaaagggtttaaaaactgcctctaaatggggtttttggagcgagagagaggcaaagagattgaaagcaagagcgacaaatagatattgaaagtgagagcaagagagagaatgaaaccgacgaaaatggttgggtttgtagccgtttgggggtcgacagtttgggttcggtggggagagaaccaatggagaagaaagaaaggcagagagaggataattaaatgtaaatggtaatttggatagattgaaaaaatactagcattaattgataaaaaaatatgttaggatgtaaatattagtagggggtgttttttaagtggaaaatgaaattttccttagaaaaactgatttggtatatcaatgtgccacatccaggcatgtcgccatcaatttataatagctcgagttagcgattagtattgattgtgtattaatttcaaagatcctacaaatcatgttttaattaatctcacaaaatttctatatgatgatgtcagcattaactgaatgaataaattttattattatttatttttcatttgtggagaaacatctaatattaatgagaaaagctagcttgtgtgatgatctaactatcctacaagagattagcatttgacactttcctcttttctcaaaagttcttatgcaaagatagactaagacgctagcttctttatattatatactaatagcaccatttaatgcatatttgcttaattttatttataaacttgattattattatttttttttcaaaaagtttaattcactaaacatatataggtatcaatccaaataattaattgatctccacgggtcaatcaatgtctaaagaaaattaaacattactaatttaaaataatttaaatgatatttaaatcaaacataataaaaatttgagtaatgctaattaaacctcttattacaaccttttagtcaatttccacgtccgatattacatgctgaaatatttttttcaaatttttttcatagcggtattcattatagt

SEQ ID NO: 302671 - DNA, 4518 bp, Cannabis indica
atgatatacttagtaactataacgaataccgctaataaaaagaattttgaaaaaaattatttcgatatataatttcaaacgtggaagttcgactaagaaattgtaataggagtattgtaattagacactacatcttttacaaaaaaatctaccatatttattcttttctactataccttcacacacagttatgcgccatatccttcacaaattatttgtggggagttttatttttttaatttttataccaaagactcttaaaatcatttttaattcacaaattttgagtacataatgtaaaacgaatattcatgtaaaacactaatttgtccattttgaatatatatgtatatatattaaagtaaaaaaaaaaaattggtttagagtggtttatataagttttaagaaagaattaaatcttgaacttgagaaaatattcatgtaaaatacaaattcgtagatttctaatatatatgtaagagacttttggtttttttacattatttttactccaaatctcgatctttgaaaattgtagatttttttttatattaaagaatactctaacgatagtttcatgaaaactttaagttttttagctaaaaaaataatgtctaacgatggcgctataaaaatttaattttaggcagaaaatgattctttggcagtattgcaatgaaaactttatttttcaagaaaataaacaatgataaattgatatttagcgttgttctaacgataatcacataataatttttgagataaaaacgatagtttgcgacaaaaattgatcaatttgagagggttgtattcatggtaccattactagaccatccttatagtaaatttttttaatatgaaccgtcgttatagtattaattttaattgaaaatcttaaatctatccaaaaaaaaaaaattaattaaaatttacaatttccacttgcaaaaatatgtggaagaagaaaaaaacgcaaacacaaccaaaaaaaattatacatgagtacttgaaatctatgaagtaataattgaaatgaacgtttttacaggtttacattatagattgaattttgaatcctaaaatcttgatagacaaaatttgacaaaaactggctggaacacatttttctgtaataataattaaagttggaaaaaaaaaaaaaaaaaaaatcaaatttccctattggttttgtgtgtttgtcaaagttgtgtgattcgagtaatgctgatattagtttgttcgttgttatttaatagtttattatttcaaccaaatattgttgtttcggtataattttgataatttggtcttctttcccataattcaataaaatttatcgagaaaaatacaagcgttaaaaaagaaaaatataaaatgcttacagaatacataaaataaaaaggggtattagatttatttgtgaaagctgaggttacagaagcagccagtgtgacttcaaatgacagcacaacaatgccaaatgaatcattttaaaaagaagaagaagaaaaaaaatatatcaaaataacttaaactgcttaactaaaacaaaagtttggtacagttgatcacacaaagttagttgctatcatccacaccttgattgtttacgaacaaactttctcttctcttaggaaaacctgttgaatctatacccgggcttctatatttcagctctgaacttctgaagttaggatcaacagaagttggcctattgttatggtcaacagaagctggcctaaaggaactggtggcaccaccaccggaatatctaggcggagaaacgtaccttctcgtcggccccctaaggccactccctctaagctccatcatatcgttatttcttgaagaagagtctataaaagatctgtctactctgtctccagagctagttgttcctaaaggagcaccagttgtggcacctgcagcagtggaagtagaactaaaaggatcatctggtccccatgaggtaagtgcttccttcttcttagcaaagaattgccacgctccaaagagaaaaagtacaaagaagagcacagggcttgtccaaaatatggtattgaattcccctttatatactggaaggttggagcgatacatgcccacatagccaccaccaagcccaacaacaataaacttttcacggtcactggctatcaaggggattaccctattcctctcctcatctgattcaatgttctgataattcaggaaagatgatcttaattcgtcaagaccagcagagaaaataatccgaggagctccaactctaacataatgctgagatgaaacattatgaacaaaaattttatcctcactcacaataagcaaataaccctttattgcctgaagtgcaagaggatcattcatgtcgaacttcttcttagatctaaccctgcatttgaagttcattatatcacctaacagcaaaacatggataagatcaccttctgatgtaaaaccatatgctttagaccgctccatcacatcaaagacgtaattccgagcaagagaatggttcaaaccttcacactcagattccctgaccttcatacttctcaaatctaaagaccctgctccactctccgtcaggaacagaagccgctgcttcaagaaagctagtggcctactgttgggtgtagttgaaccataaagtgtcccattctctctgaaaacccatatcttccccctaacatcagtggccaaaatgtacttcattcttccagcatgatgaacctccaagattgttatggatgctccatctcctccatcataatcaggggatacaaacttaccaacgttttcaataagaagcgagctccaatcctctccacttgatccctcccaaatccgatgaatcaagattataccatctttatgccctgtgaccacataactctcgttcttataaatcgataaataagaaaccatggctgtgatgggggattcagagagagtatgatgctgaaccaaaacatccccatttctcaaaaacacataaacagtccctctctcatcaccaacagcaacatacttacttaaaccctcgtaatccctaaatggcaacacatttatacaagtcgcctgagaatccaatttcacagctgatacaaactggaacctctcagaccaaaaaggactgtacttcgtgaccgatacagctcctgatctcgactcatcttggatttttcccttcgctccttcttcttccatttctgtaatggactttttgacctcgtactttctctttcttaaatcgttttttcccttttccagctttaaagcttctatgacaagattgtcatcctcccttagtaccctttcagaggaatcaggtagcttagattctaatctagcaactatttcactaaggtttctcactatttcatccagtctttgcaacagagcaagttgtggatccaatacaaaactactcccggttttgtcatcagattcgtcttggatcaggaccgtgttacaactcacaaaagcccgattaagaagtggaggggaagctaaaacgaaaagaaaatagatgaaaaagagcttgcctttgagtgaattcgccattgaagaagctaataataactatggcatcatatcagtgcatctccattgtagcaaaaaggtagaattttgtggatctgggagtacagtatctatgtcctcaagtccattgtagattcaataattccacaggattgatcttatttttggagtgagaactcaacattagtagtgtgactgactgtgttgtgtacggatcacaaattagattcagtagtttagggcaactaattttctgctctaatctaatttacacgagcgagaatatctagggtggggtggccggtagtgtaatagaaaaaatggaaaatgttgcagtaaagacaattctatacttagatatatgtgctcacctacagtgttgtgacacgtggtggattgggacataaatcgcacctattataaacaaaacaaaaatgttttacatccgaagccgatttaacctaccagttcatgctacgtggctgaatgagattggttggacacttataaaaggaaaattagtcgtcccaccaatctcattcagacacttattgcttagcaggctttgtatgtgttgatctacgtgaaaaattgttaaaatataattaatatattttaattttatatataaaataaataattaataatttttacaaaatatctattatttatctattatatatatctgttctttggtaggtaaagaatcatctttatgtatagattctttttaattttttactctcattttacactttaaaattttgctatatttatttgctcttataattatgggataaattaaaaaatacttttatttttggctaattaatattttttcctctgaattttgatatgtaacaaattatgtcccctgaacttttttggccgttaaaaattctctctgaactattgagattgttagatttaaagacttttgtctaattttatttaattttactgtttcag

SEQ ID NO: 302672 - DNA, 3942 bp, Cannabis indica
tttttatatatcattaattttttaatatatttgtgattataatgaactaggttataatattatcataattataatagaatcttaataactcacagctactttaaaatttataatttatcaaatacttagttaagtgttttttccatagtacaactacaactgtttttccccacagtacaactgtgccaaattggcccttaatgtaaacttttccattcaagtaaagttgcaacctttttttttttttaaacttctagattactattagctaatgaattggcgacgaaattgcaattttacagttcattgcgttcaaattacattttttggggttgggagttgctgacagcagataagagaagtttgagttttttttttttcttataattctcatttatctgaagaatacttgaggagaagttttgtaatctatgtttgatattttatagaccttaaaatagagattttttttttccccttctcttaactgtgaaatggtagtttgatctctttgttccacattatttggtttgtgtacaatctatttctttgaactttttaagagtttttatcttccacttcttatttcttgatttgtcgagcacaagacactagtctttgtgtcattgaaaactaaatttttgtaatggcagttcatataattctgctgtggctactttgttcaagcttggttgaaaactctttgatccctttatggtaatgaagtgggcttgaaacccacatgtttgatacctatttatattatgtttgctcactagtctgtgtcattggaaactaaacttttgtaatggaatgtatataattctgttgtggctagttctttgttcaagcttgattgaaaactcttttactcattcatggcaataaagtgggctggagatgtatgtttgagggttttaaataacttttaaacttctgcaggttggatgtacacagcctcgacgagttgctgctatgagtgttgctgccagggttgctcaagaaatgggtgttaaacttggacatgaggtatgctgtgtttgttgatatagtttcgtcctttatgttaacgaggctaataaatttaaggtagtgaaaactgcatactttgggtggtggtactaatggttttccttttatgaagttttgagttattatgggtacttatgatttattctttttaagttttgagttataatataggtaatcataaattgatttttcttggcaataataactacatttatgtcatgtgcaggttggttattccattcgttttgaagattgcacatctgacaagacagttctaaaatatatgacagatggaatgctgttgagggaatttcttggagaaccagatctggcaagctacaggtaagcatagatactatgtcagattatgtctatggctagtcgtcttgtttttaacatatcccttgctatgccttataaaatttcagcgtggtgatggtggatgaggcccatgaaaggacactctcaactgatattctttttggtttagtaaaagtaagctcaaaatctcagtaataaactccaattttgttttttttttgggttaagttactcgaattctcatgatcttgttatgagtttaattgcaagatccattgaaaaacatatcattttcaagaatactctgtgtgtgtgcgccttgtgaatatgtagaactattggtgttaaacacttttggccacctctgctttgtcctagatgaagtacttgtaggaaaattataagtatatgtttttaaggctgtctaaccgtccccctcttttcatttgtgtgtaaaataggatattgctcgtttcagaccagatttaaagctactcatttcaagtgcgaccctggatgcagagaagttcagtgattattttgattctgctccaatttttaaaattccaggtagaaggtatcctgtagagatccattatacaaaagcaccagaagctgattacttagatgctgcaatagtgactgcacttcaaatccatgtgacgcaatcaccgggggatatattggtgtttcttacgggtcaagaagaaattgagacagcagaagaaattatgaagcatagaatacggggtcttggtacaaagattgctgagttgatcatctgccccatatatgccaacctaccaacagagctacaatctaaaatattcgaaccaacacctgaaggggcaaggaaggttgtccttgccacaaatatagctgagacatcattaacaattgatgggattaaatatgtcattgacccaggtttttgcaagatgaagtcttacaatccaaggactggaatggaatcgttgctaatcagtccaatatccaaggcatcagcaaatcagagggcaggtcgatctggtcgaacaggcccaggaaagtgcttccgattatatactgcttacaactattataatgatttagatgacaatactgtaccagaaattcaacgaactaatcttgcaaatgttgtgctaatgctcaagagtcttggtattcatgacctgttacattttgatttcatggatccaccaccttctgaagcactactaaaagcattagaactgctttttgccttgagtgctttaacaaagtgggtgagctgactaaagtgggcagacggatggcagaatttcctcttgatcccatgctgtcaaaagcaattgttgcttcagagaagtacaagtgctcagacgatattatttccattgctgccatgctttctattggcaattcaatattttacagaccaaaagacaaacaagtccatgctgacaatgcacgtttgaattttcatactgggaatgttggagatcaccttgcactgcttaaggtatgtatgtattctgatgaattcctgttgttcatttagatttataattggttttggttgtaaacactaactagtatatgggttggtctaatggttaagtttttaatacggcaagagtaataatcggaagggggttaatatccctttctaaaaatgaacaaatttgagcacagctgcaacttttttatttaagaaagtctattcgccttgttttatttttaattattttttttaggtttacagttcgtggaaagaaacaaattactcaacgcaatggtgttatgaaaattacatacaggtacattcatttctcagaattgcacctttttgaatctctctctttaaaaaataaactaggcttcccctgcctaacccctacaatatttgaggaccaaaaaactatagcactgctatttaggtactcagcagggacttaaaactcagatcttgtgacctttttgaattttgttattcctatcttcattgcacttgtgtctctcttttgggtataagaaaacatttctgctgtgatatttgattctttatctttctgagctgttttctcttgtagaagtttaattaaatttctggaatcttagttgaatggtttttctggtacactgcctcgtcagtagaattattttttctagtggtagtggccaggactaagggaagggactagacagttttgtccagtctcatgtttggatgctttttggggacaggactattttgtctacttcccaaaatagtccccctagataatagatacccaattagaaggtgggttaaaatagctacaagcttgaggttttttttactgtgtaatttttcaactttgttaaccaaatatatatatatacaccccagctcagggctttgcccaggtaaacattaaaaacagtccatatactccccaggtaaacattctgataggcattgggatataataaaaagggcataagtgtaattgtaataggggtattgttattatatataggactcaatagtgaaggaaaaggtgtgaagaatttggttttagtttgtaactttgggagagaaccaggctctcgaaatcctgggtttta

SEQ ID NO: 302673 - DNA, 895 bp, Cannabis indica
ttatacgttgttgtggctaacatatgcctatgtgcgatttctggttcgtcctaataataatttacatgcaaagaaggaaagtctagatatttctatacataaatacatgtttacatcaaaatactcatctctatgactaatcttagacttagatacacattcaaattactcaaagcaacttaattatttggatggcttttttatattattattattttgaaaggtgagaatctgatgatttaatggtgggacatatattattatattatgatcacatacctttttatgatatggacctgccctggcctatctgagtagttagctacttgaaatggtaacacaaaataattacggtcacaagcatattattattattattattattattattattatgcatataacgctgtcgagcaagtaaataagccacgcctatatatatggttatatatattttggtcctcaatttgatccatagggctgctccacacttatatataccaattgttgttattcctttggcaagtaccttaaacatgtatatacaaatatatcgaatgagaatttttagagaagaaaaaaaattaaaataataattaatatatacaagtacgtacattatttacatgtactgatgtacagttttacagagtaattataatgttgtatttatatataataaaaattaagataatcaaatgaactcaattaatcccagcattattattcaaatatatatattggatgtcacgaagtctgatctatttatgtatactttacttgaataaaaatatatatatatatatgatagatatggctgatcatcatcttcatcgagtattgttggaaattatggggttctatctcaaaaccaattagcaatgagtggagtagc

SEQ ID NO: 302674 - DNA, 1535 bp, Cannabis indica
ttgttgtgatcaaaagtaaaattttttgtactgatctgttgatttttgttttcaataatacatattaattagaaggtagtcctttttcaaaataaaaataaaaattagaaggtagtgatcagttgagaaataatatatagtatcgtttaataaacctccaaaattgaactaacacaaggcgttaaagtaggtcattttgtctccacttaatttgtgttgtgatcaatatataagagaactatatttataacatatagttatacttatataccacctaaacccacccacagttaagagacccaacacatcaaaactatagatatagcagtcaaagggtcatcatcttcacaatcacatgaacccaccctagttaaataatatgtattacaaacatctatgtatgtctataaatacgacatgtgttttgcaacaaaataacctttttatttttattttatttttttgaggggacataaaattccatctttcggttaatcatcttttggcaatgttatgtcacatcattattaatattcgagtatgatcatactttcacattgggtactattagatatatatagtttttctttgtatattttcatagtgaattaattcagcaaagaaaaaaaaaaacttcaattgtgttagtgacattataacatttgtcaaaccttggggatgcatatggggaagaaatggaatatttgagttttagcaagtgacaaagtaatgggagtttttcgaagttttcattaattccccataaaggaccaaagtgaactcacatgcattataatgtcagaatatcttcaatgtcatgtttatctagatctatgtaatatatatagctaataaatataagggacttagctgttatatataggtctttgaaggactgatttgcaattttggtgatattaatattttagggtaagtgttgaccacagtactatctatatacaataattaaattaattttctctcaattattattgggtccaacttgtatgaaaatctggccatgcatggtttctcattaggtaaaaagacccatgtgaacttggcttttcgccatctcttcttttgtgcttgcctccaatttttattttcaacagtacatcacaataaggaaatttgactaattatacattaaggagaaatgggtttctaaaccaatattatgcaatattaagaaaataggccaacattatatattattctcataatactcctctagcttaactcacatatcttctctcttctcttctctcttcactcatttacactaacccactcacaaatttcattctcttcacttatttcctaaaagtgtgtttagaagaaactgtgtaattactaagtagggtaattactgtggtaattacacagtttagtaattatactatattttaaaatgcaaagtatgtttggatatgaattagtaattacatatgaattcttaatatcttgtttggcaaaagagttagcaattacatgggaaaataatatttttttagtagctaatgtttaatatg

SEQ ID NO: 302675 - DNA, 687 bp, Cannabis indica
taaaccatgatgctaacactgcaaatgcaaattaatgcaaattctaattagttattaattaattaggaacattatatattaaaaataattaattaattaattaattattgtacgtaataaagaagttaattaatgaattaattacttccgccgtaggatgcaccgatgacgatgatgggagaatattgagctttgtaagttttcttaatatgaagaagaatgtgagcatagtcagctaaggcttgagctgagttaaaataacccaaactacttccattctttaatgcttcttctcttgatccaaatggaactgattttccataatatcgatgctataatatatatatataataacacaacaaaaagtactcttatcaattaattaaaacatctttaataatcttataaccatttgtgttattaaaagctattacaacgcttttttttttcttttaagccatattgatatttgatataatagcaaaatgtctatttatatcatatatattcatgaaataattaatattatgtataattcatatatagtgagttgccttgtaattagagattttcctcccaataagtagttgctttagagatttgccttgtaaggtccaaacaaaatctaatagatacatagccaaatttacataaaatatttaaaattaatcaatttttttttttttt

SEQ ID NO: 302676 - DNA, 1651 bp, Cannabis indica
taaattatattttaaatattacgaacaaaaaaataaaataacaaaatatattcatgatacaagaaaaaaaaataaatcaaatcaaataactattaaaattaacatgatgtgaagaaatttttttaaaaattctttaagaataatttttaaaaattatttaaagttttattatttttaataataaggtgtacttatcattttatgagatgcaaatagaactccccttaattatattgtgaatacattattatgtctcatattgtaaatttcagcaacaaattataaattcaaaataaaatcttcaaatgttaatatcaaaaaattgccaatttatgaaattctcgaattttttcaagattaagtgaaagtttataatttcactatgataatggaattattattgataagtgtttacccaaattttgacaagggtgacatatgtggcacaatactacaagagactaaagtgatgaagaatatgtaaaatcacttgaaacaacaatacaaccctcataaaagaaagatatacatagaccctcagattgagatacatatggggtaaatgaggcatctacacccctgagttaggttggtcgaccccccacacccccagggtggattaggtagccacctacccaatagtgggttagacggtcaccccctcccccttgagggtaggtcatccaccctagggtgggtgggttcgtctgaatggctaattctttaccctctacatttttgtagtcctagtatcataccttatctttgtttggacatgaatagtgcaatgctttgctccaagtatcaaagtttgtctcatgtgctctatgtttgtctacggtcatcactcaaacctgtacatctacaagtatcaaggtgcaacaatactaagactatatgctaccaagctttaagaacaacataagaagcaaaggggaacgtcccaaggatacaatcccagagtaggtgtatcccaccctagggtcggtcgaccataatgtaccataggggtgcacccttaaacaacttgtcacatccaacactcttccagcgtcgttcaatcctgcacgaagctcaaaagttgttatgaacccacaaaaataacaggatataatcgcaaaaatcgaatgtcaacaactcccaaaactcaagagaatgattgagatattttagcaccaagatcgtgtctcctgaagtgagacgtaccaaccattcccctatgtaaggggtcacacctaacctgggaaggagattcaaaattcattactcaaagagtagaaacactgctacttttatttcttccactcaagattatgttcttgacctgcaacaaagatcaataaaacacaacaggagtagactatcaccaatacttggggtcgaacttctttaaaatctagtgttttttattaatatttattataattttggtttaatttctcatttattacgactttacgtcgattggctaaaaaccagtcaacaataagtgataaagttaccgaaataacatgttagtaattatattattattagtgttaatggtaatatggtcttttgatttatgggaaattatagtaaatgaccccaaattatatgactatgttagtttatgtcctcattttaaaaaaaatatagcaaatgaccctaa

SEQ ID NO: 302677 - DNA, 1806 bp, Cannabis indica
atttagggcataaaacccaacggcagaaaactgctggcaaaaaagtatgaaatgtcccccattgattgcataatgttttacgacatttatctcaaaaaaagctcaaggcgacatgttgcttgtagtacaccaaagaacccttcgagatactttgctacatgttgacaaacaccctgaacatatattatgtgacatgttgctcaataagaggcgacatgtcgcccagtaaggtgggacatgtcgcctgagacttttttcagaacaaattacgaatttttaaatttcttctccgagccatcttccaaatattccaaaacacattcaagtaatataaaaatattttgtaacagtttttaacagttagaaacttcccacttgattctataactctcacgtgtaatcactcttttaattacacattaccaagtaagatataaaagttacaaaacttgttttagattttgtaaccttccaaatgttacaaattttatttttattacactttatcatacacaaattgttgacataattttttgtcaacttaatctaagaagataattaattagagaatgaatttaagaaatgaagagatgaaagtaataaatttacaccagcttttttgtaatgaccgcttagctttattacgaacattagtagatatttaaagcttattttcataagtagactttttaaattattatttttacaattatagagatatatttgaattttagatgtattaattataatatatgtgaattttgtaatttttatatcttatgcccggttatagtggaaggcgacgtataacctgtgtagtcacttagatgtagtttggtactttaagaaaagtgggacagtatagttagacatttgaaatatcgtattatttcaagattataattttggaccatattactcttagattttaagttatttaatgatgaaggaaaagggcaattggtaattttaccatagctttgtctttagttaaagttagtggatttgttattaatcctttagtttttattaattaataagttgaataataaataaagagattagatcttatctcttaggtgatacttagccaaatcacaaaaactacaatgaaccaaagtcaatctctctcttcaagtctctctctcttggcctctcttggaacccaacaagagcaggctttagtccatcaatttcttgatgatttgacaagaattttgtaggaatttcaagtatcaactgaaggtaagctcatcacccaccttcttctctttgatttgcttaagaactagattaggttttcatggttgttttgtgaatttagcttatgtatgttttggggtttcttggatatattttatgaggatgttttgattcaaacttaagtctttaataaatttttttgattcaagggcttattataactatttttattgcttgaaatatgtttgttattgtttaattaggtgatttggagagtttggtatgatttggggtaaaattgagttgatggtgaagtttttagggttttttgtagagaaccgattaattggttctggcagtcttgtaaaaccggttaacatttccctatgtagaaccctatgaaatggttttccattttgggaagccagtttaccagttttggccgttttagaaccctagttttttgtattttagtgatatttagggtattaccacgctatccatcgatagggaaacttttagttttaactttaagtctccgagaagtgatttagcgtatcacttattagttttacgaatattgtgacttaggggcctataaat

SEQ ID NO: 302678 - DNA, 2950 bp, Cannabis indica
acaagatggcagcagcattgtacggtcaacaagttaatcagactagacaggcagcaaaaagtcctaagtttagtactcatgttcaagattaagaactacttatattgaaaaaattcacaatattttaaagcattctagaagcttggattacacaatgtttgtatttcatgattattgatatgcctaattgaaaattattattctactctttctccgcaatccctaatgttcctattagttcattttttttctgtggagagcatagctttatttgaacttcatacacacagaaccagcataaattatgtttacatagatataatctatgttggaatcatacttttataacaatgtaacataaaaagaaaaatactatcttgagcaattaaaaaaaaaatagtaccaagacaatattattaaaaagaaagaaacaaattgttctgtagatgtagtgatggtcccttactaagaatttgtaatagaattcttcaaagaatggaacatgttaagtatatactaaatatatcttatctgatctttaagttataatctctaaatcacttcaataaggcttgacatattctacgagtcctgaactaaaaattgtatttagaaattatggaatatgatcatcctttccattattcttaatttgaaaaatgatcatatagtctttgataagtgtataacataaattgaaacatagaggagcattgtttacacataagttttcagccttaaattttctcttaagtagtatgaattcatcttatttgtcactctcttatttttcttgttctaatttctacaaaatcaaaaacataaatgtaagacattcagcactaaaaattgtagtttctggtgcgatttgtagaaaccataaacaccactactttggtcaaagaacattgctccaaaccactcctaaagtaaaaattttgatattcttaaaccaaatatacatggcaggaaattgactagaatcacactgattggcacaagtcaattatccatcaaaactaggaaaatttttccagaagagtctatggatggattatatatttaaagcataaggcctcttatatcatgtcttaaacatacatgtattgtaggccaactttcatgcattcatgttgcctataatctctatcatcttaaacctactcactaggtactggggccagcctaagattagtagttcttggtgtaattaacttcttcacatgaattggtgtgggggaccatgaaacacacccccattggtgttacatgactcatttcatgtgttgcaggctcgtaagtggtttagaccttgttacatccatctgtggcaagaactaaagtcacagaaagagaggagctcgcttgtgtcagccaaggaataagatcgagagtgggattgacaatgactctttgacattctttgcaagagattcagaaagaaatcagaatacagttttccttgattttcacatgtgttaaaattgaaagagaaattatagaaaggaaatgaacacaaacacgggcaggttattcttggtttagtgattagtacttttgtaagtctaaacttacaattcttattctctacataattgttacttgtgcgagtgagaaaatttgaaaaatattcacaaattaatagtttcttttactgttacttgctacctgcttgtttttgtttgcattattgtctagtcccattacatgaactggtcaaagaaaatctaaaatgattgaaaaagaaaaaagatgaatcaagttagaaaaattaaatgttggattagagtttagtgtaggtggcaccaagacaaggattctgagcttgaaatagagatggagatggattctttatctagctataaaaatctaattgaagacgtacaccacttgtgtacaatggccggaagagaatgggaccatttgaaatcaattcatgaagatttcgttttgggttagaatggatcatattaataatacccaacttaaaatatagctaggaatttctaatgctacaaatttcattctaaaatccaaaggcgtcataaatggtgaatagaatgctaacttaaaggccacctcacattatcaatagagttccagagaatagggttcccaaggaccattttagttctttgtcacaggctggaaattgtgggaataattgggggcatttaggagtgtaaatggattgggttgcatctgatccagcaatgatctaactcgatcgagatcagatgatgattcgccccgccccgttggactagtttttcgaattggatctgatccgaccttccgaccttccgacccaacttatcacggtcggatctaatcccatgcaattttttctttagtctaaaaagagacaaagggtcaaaagtggtgttgtttgggttcataacttagttttcagttttaaaaaacagaaagctgtttttaaaaactaataagggtcgtttagcaaaaatttttaaaaatagatttttaaaaactgagttttaaaaaactagaaaacagaaaacatcaaaatattagttcaattttcaaaaacaatttttgtttatctaacatattatattttatatttttactcacatactcggaaccgaacccgaacccggacccggatgggttcatctcatggtatggtgttaaaatattaatctttttttagtaaaaagaaataaaaaattattttaaaaaacttgtgccaaacaccattaaatttttaaaatgacaaaaaactgttttctattctcaattttaaaaacacaattctaaaaattgaaaactgaaaacacagccaaaaaggctcatattctctccttttttcaagctctaacttttcatttattatttaactagttaacgattaactagttaacgaagccgcacttcgtgcggtatgtataataattttaaaaaaatttacatcacaatataatttttt

SEQ ID NO: 302679 - DNA, 1808 bp, Cannabis indica
tcagtttgatgctagtggatgaggatggtaccgttgagaaagaaagtcgttattagtttagtcttattctacttattaaacttctaatgaaactaattttgtatttaaattggaatggatggtctgaatgacttaaattagctatgtgctagttagaaatgaggaataatggatgctagatattattttgatattttattgacttattaaatctatctattcggtgattacataactatgatgatattattattattttatattgatgagtggtcctgattttattactaatattttataattgatataggagttaatctattattattaaataattattttctgatataaaaattgaagaattattttttagcgttatcttcttacaagagtcaaattgtgaaatttgaccaccctagttatgatattacatatctgtcacgacctaggacttaggtaatgacatgttcttcttatgatgcacttcttttgtgggaaaatattttctacgtaagttttctatactgtcacgtttactttgtatgcatttatccacgaattaatttttgtcttactttttttagcgattaaagtgtttttaatatttaaaattcataatgttaatatatctaccttttaaattcaaggaggaagttgttttgtttcttgggttttttttttatttttttttattttgactttgtggtttgtttattaatggtattaaattataaaggaactaaagaagaaagaaccatgcatctagtactatatgattactagctaccttatcttatagagaaagcaatacatatgttgtacattagtgttaattttttaatagggatttttcattaatttcggccttttttttcttttaaattagcgtgttgtagtttatatccgatgcaaatgagatttaagggagattataattgatgaaattgagtcgaatgttttgtgttgggaaagtaaccgaaattgttgctttcttagtagcatcatttgaaaactggtactataattcttagtcaatcaattgcgttaaatttgggcattgatcgatgcaaaaaactcattttgtagtagtgagtagctaacgagatatgctatttatgggatgttactactttgatactgctagtccaatattaaaatttctcattttctaattgttttagtagctaattggcgattttgttttcatttcaaggagaagagtggtcaagatccaagtttttttttagcaacttttcctcttctaatgcacttattttgtgagggactgtaattgaaaatattttctatgtaagccttctatattgtcacgtttacttgctacgaaatctatccacgatttactttttgtttttttctaactcttgaatggtttttaatatttagaattatgtctaccttggaagttattttttttaacttagtgatttgtttattaatgctataaattaaaaaggaattgaagaagaatgaaccgtgaatcttagtactagatggttattagatgagcattgctattggataccagtactgcccaatacttttataagtgacattctatgattgatcagcgatatttcttaaaaattattttcttaagtaatatgagtcccatgtacttaatcacaccaataaatgtttaacatcgaggatggtactaagcaccaatgatactttttagcatttctcttattagataccttatcatatagaatgttgctatgattaactacataatgttagagtttgactcaaattatttatttctttttttatttatctatatttgt

SEQ ID NO: 302680 - DNA, 2406 bp, Cannabis indica
agggcataaaacctaacagacccttctcagaacaaggaagtcttccagggttggattcgtagtgaacaactttctaaaaatgacaattgtggagataaaaaactataccacaagaggtatttttgggatcagataaaaatgtggacatatttgagatgatatcaaaagttgttttatttaattttattgttaattatgcattaaaagctagatttcctagtaaaattagaaactagacaagtgagtcattttcttaagagcactttttgtttcttattatgacactgtctggattgccattaaatataaaaaaaaataataaacattttttttaaatggagatactacaacaaataatattataaattagttagcaagtgtatatatgataggtggcaagagcaaatcataagagtttcgaggggtaacataatccaattgtgtaagtcaataaaattgtagaaaatcaaaactttatcttccacatcattacatcaggtcatctttcaactaactatgatatctttatcattgttatggttgttctaatgatattgatgtataatataatttatatatatctcacttggaagtatcattaacatcaaaccaaatggagttgtacttataataacatggtcggatatacctataaatattttgtgcttactctggaaagctttgagcataaatttaaatttgaggctttaagggattgtattagctggtgccacatgtatccataatgtgaaaaggaacaaaattagtataattatatatattatgcaccagattctccttctttttatggctaaacaattgtatcattcttttgttctggcaataattatgtgcaaaatcctatctattaatattactatacaataaggatttatttaaggatggatcataataataatctatgaagaacttatgtcatccttggttggcacttggaatccagaataagcttttcattcttgacctgtctctgtgaagtgaaccaaccaattagtatgtctgttagtatattagagtcaagttttatattattgtgagatattggcttttatctctttctttaatatgaattagctttgcatttagttacaccataggaaaattacatgcttttgtgtttttaaagttgtaaaccactaggattaatattgtcctcatgccctttatgcagtgctatttatttatttttattgaaattataggtaatttggaaaggaatctgtgtcaagcattgactaccaacatttttagctacttcaatattaagaaacacagacctaataaagaagaagcaagccactatataccaccaccgcaaccacctgtggttttaaatcactttattgtaaataagtaaatataagatcatttactaatacaaacacgaaacgagcattatctcattttacccattgagggaaagttggtccataaaacaaaatttaatgcatgcatatttgcatacacaaaggtgaggatgtctttttcgagccaaagaagaccaaatatttggtaatttggggggacttttattgggcatgttggatggccaagaaaagaggtatgtactatgtgacccaatgaaaaagaataacatgggccagctttacttaatagtcaaacccttcatttcattggatggcattatttcatttttcttgccatacaattggatcaaacacttattaacacccccacaaatttgccattcattttgtcattttgaatgaactcaattataaaggctttgtccatttgccatgtcttgtcttgttagcccttatcacaatatcataactcaatagctttagactttattgttgttgttcttattcattttagtgtcaaattaaaaatcaaaacaccttcatcacctaccattatcattcaaccaaagccaacggtcgctttccaaattagaaaccaattatttgacatgatttttcaactttttattaatttcatagttttattgatcgactaattaaagcctcttgtgaattaagaacttgtctaaaataaataaaaacaaatccaagtagtattcaactcttaattgtttatacaaatttgtgatatttataaataaataaaaaattgaaaagactggtataccatttgaatttgttaatttaacagtaaatttaataatattgttattgggtattctaaagtgttcaacaccatatggatgtggtgtattgtaagtgattccttatattatttattaagtcataatatctagggttcaatattgaatataatagtaggactgagatgtaaaatgaccctaaatttagaaactaagttagtaaatgttctctttttaaaaaagattaagaaaatgatcgaatgtaataaataagctaataaaaattataaaaa

SEQ ID NO: 302681 - DNA, 2293 bp, Cannabis indica
gaatctgatttttcattgcttcacacgtagttagatacttgctttcagtaaaccatatctaattactagaataataataataataaaagataatctagatatatatgtaaaatatttattaaaacaatagaacaaaacttgcccatcataacataagccttcaacagctcccatttcaacatcaagtgagtgtcatttcccattaaaatttgcacaatatttggataaatttgaaccaagtcctttcagtttctataataataatttcctcaggagaaagacaaaagagattttgcaactagtaccagtttctattaaaatatacaacctttttgtaccaactatatgtgctttttattagatcaaaaaccatatcatataattaatattggtagattagattcttgcaactattttttgttattagtcatttttaataacttgtgtcatacattccaaacatttatccaattggatccttttatggggtatccatgtgagtagagcatggtcaccaccacatacgacacaaaaatgagaaagaaagccttataaggaatctctttttaagacatcttacctaacttttggaatttagtctcttacttgttgtatattatgtatgagttttaatgattctaatctgtctctaatataatttaatgcccttaacttaatggctatgaatattttctacaatttcaattaggttgggtgctataggtagtggctataagtagcattttaccatccaaataataccaaatctgaaattagtgtgtatctaccattggctccttttgacaaactttccctaaagacaatttgtctgtttataaacaatgatttatttaagaataaactaactggtctcttgttttacatgctgcaatccaccaattattgttgagttcattaaatatataattttaaagaatgaatgccatgttacatggtcaaactaggcataggatatatcctaactaatttaaaaagaaaacctattgtaattaataaggatctaacaaggcctgcaagtgcattatacctttataagatttcttagagatcttgcttgaccacactttgtttataataaggtgactgtgttttacaattatacatataagatatattttatataaaaagttttaattgttaaaaaattgcagatgggttgctgaggaggatacaatagtcaacttccccactgtaagaatgaagagaaggttgcccatttgggttaaaagaaaagagggtcgtttataagccttttgtggccattaaagaaaaagacttctaagtaacttcatacaatgatactaaaaaaaaaagagctgcccacatgaaaagacaaggaaaaaaaatattcccatggtgcacacgtgtgggtggcacccacagaagctaaacacacgtgtcatccaatttggacttttataatgattactgcatcatatagtcatattagacaactttgtacaactcttatgggacctttcaattaaaatccctatgttcactctggccttagttaattcttttttgtccttcctttaatttactttgcttgtacaaatgtaataaaaggcaccaaaggagctactttttgaattattattgttatatattattaaatttatattcttaagtaacaacttttgattagtttagtggacatttacaatgatttgcattcatttgagccccatctaatgatgacatttttcaagaattctttcttaatgagaaactaaaaaagtcccattcgatttatcaatttaacttgctggaagaaaaaaattgcgtgatcccatattctttttgagagtaaaaatattcatacattacccttttaataagtttctgttttgtagtgattttataaaattaatattaaaaaattaactaaattatttgtaaactattacaatcatatagaaattaatttaaaagtatgaactatatttatactttttcagttatcatcaacttgagtgttgaaaacgaagcttggaaacacagtggtaatatctctgtaacacatgaagttggaatcaaaataagtcgtgctaaaacagtgatgaaactacattcataatcattatagctatgtatttgtatataagaatatacttactttaattgatatagtgtcatgttattgaggagttttggttgactaataacaaatgcttgccattcatccttgtttattttaccatcattatcaatatcaacatctgcaaatgtctgtgcagcacagaatacagctaatttaaataaatccaca

SEQ ID NO: 302682 - DNA, 3201 bp, Cannabis indica
gaataataatttataatatagtcacaactttttttatttttaatcagaaattttattgtgactaaaaataaaatttgttgtagtggtattattaagatgtgattttttataattggctaacaatattctataataattactaaattaaattatttcactaatgatataacacctttagatactactagacagatactaatatttaatttttcttaattatattagtgtttcaaatcttaagtaattaccatgccaccaatatagagggtataatggtaatttaggtatcatagtagcatctataaatagaagtattagtttactcccggacggcatgtatagtatatctaagaactttttgtacaataataataataatattgtacaataataataataataataataataataataataataattaataataatgagtaaaaataataatatgggagttggagctggtacaactaccattctaagtattgatggaggaggagttagagggatcatccctggagtcatgcttgattttcttgaatcaaaacttcaggttataataataattaacttaattattaatacatattttgcagttatataatactatacatatgtacacatacatatctatatattttataatataaataaccataaaatatgtaaagatatgtttgattaataattagaaagcgtagtgaagtgtagtctaaaaaatatatggtttcttcatttgagaacaaattaacaataagtgaagtaactcatattttataaatgatattaaaactttctatctattataaatgtagaacatgtaacatccggctcatcacaagtgattcttatatataaagatattttatatatgtttgattaataattagaaatcatggggaagtgtagtctaagaaatatggtttcatcatttgagaacaaattaacaatgaatgaagtcatattttataataatggtattaaaactttctgtctattacaaatgtggaccccttaagtacggtccgatcacaagtaattctttttaactcgctattcttgaattacaatttggctctctacttttgaattttaatcatatactcgtaagattagttttctttagttcaaatatcttgttaaaatattattaaaatatggtttaaaaagtaggattaatatcattttgatatctgtgtttagtaatagtaatctctatttcgtaatataataaattagaccatatattttttaaaataggacaaaatagaacactgagcttagttaacaacttcagatgcaggttattattaatttttaatttgaaaaaaaaaatcaaggatattattatgtaccattttaaaaaatacaaggttcaatttgtcatttaacaaaataggaaatcaaagtggtaactttttgcaaaacaggatctaaaatagtatttaccctaaaaaagtataaaaaagtgtatgatcataagaaaaagggaaaatttatttttatggtttttaaggcataagtttgaaaaaagaatatgtacttttttttttttcaaaaagttattttatgggaaaatttgaggaagaaattaaaaaatatgaaaaacagtataaggtaattaattatccccttattatgataacttgttacccttatttggttttttcatatttttcaacttcttcttataaataatttttttgaaaaagaaaaacccatatttttttttgcacatataatataaaaaatcataaaatttataatttctgctaagaaaaataattttatctgaaggctaattgtgaattagtagaaaatagtgtgtaattttataaaaagtattacaataatgtgagactctctaacacattaatttatatgttggtttaggaattcgataagaatgcaagacttgcagactatttcgatgtgatatcaggaacaagcactggtggtcttattgccacaatgatatcaacacccaacgataagggtcgtcctttatatgctgccaaagatattgtccctttctacaaaaaggaatgcccacaaatcttcaagaagtcagcctgccctttgtgagtaattaaataatctctctaatattctacatttcattgcatttgaagtattgatggtattgtatatgttgtttatactagggtaaatgtactttatatatattttacaaatattatctgatcgaagtttttattctgttaaataataaaacagatcctatacttttaaaatagcacgaaataatactatgatcaagtttttagaatgaatacgttagattattattaagttttaatttaaaaataatataattgagctcataaattttatactattttatcatttaacaaaataaaaagttaaatttaatatgcagtcgtaatcttttgtcccatcaaaaagagtctggtgttgctgtggaaatgaagatgagctaccactccgaaaactgtcatgatgaaatgcacctgaaaattccacatccaactacaactacttcctatggagttggaaaggataattatagtaagaatgaaagtttattactaaagtctatttatgatggtaattaccttcaccgtttggtcagaggtattcttgggaaaaaggttttaagggatactctcacaaaagtggttattcctgcatacgacatcaacaaactctcacctgttatcttctcttcttatgaggtactactactataccacttatggtgcagctcaaggtactattttgtagaattttgaaaaatacacaatctaatttatcggtaacttttgtaaaagacgacaaaattcaaaatggtattagtccttttatatatgttacatatacaaaatcgtatatgccctctacacattggtggattcagaaataaaattaattaatagttcttaaccaattatgttgtctaactattacaagtatacattagcaacaattttatatatatagcatattttgaagggtaaatattattttagatcctgtattttgcaaaagttattaattggaccctctgttttgttaaatgacaaaatggaccttgtattttcgaaaacggtacaaataggatcctcaattgattttttgtcaaaataaaatttaattataatccgatctaaaaagtattatgaccaaattatttacattttttgtatctgttcgtat

SEQ ID NO: 302683 - DNA, 777 bp, Cannabis indica
taatatataaaaaagaaaaaaagttcaatatcttaattcaatatggaagcttttgaggaaatgttaagtgcggcttggtttgtgataatttggtttaaaaagaaaaaaacaatatggtgaagagtcaagcttcaaaaggaattctaggagggacacaataaatacagttagggagaagtggaattgtttctgttgagaattatgaaattccaagtgaactctaccatttatttcatgtgggacaatatccactatagtttccaactcatggttggacttggattggatagagtagctattttcttctcacataaccatgtttcgaatattcctatctaaactattacaaggttttttatatttgttaataattaagtttttaactataactccaatttaataaatgtagagttacagttctgattagtatttcttaattaaactgaaatattaattaattaggattgataaattttttcaatgaatggttttgtgtaacaaatttattgagtcttcacacaaaagctttggctcttttggtaggattaaaatgggtacaagatgttgttggattacctatcatcacatgatcttcttagattcgttgcccttaattttggaattggagtagccactatattagaagggaattttgattttttatacttacaaaattaaaaaattttattattatactaaaaacttaaaccataaaaaaactatacaatttttttcaaaccccaaaataccccctcacattctctctctctctgcatc

SEQ ID NO: 302684 - DNA, 2336 bp, Cannabis indica
acaattgtatgagaacacaatttcgcaaaaaaaaaattcaaaggtaaagaaaatagaaatgacccaattatagaaactagtaacagaatcagaacgccacaacttaatatagaatagtaacagtgatattaatggcattaccaccaagttttacttcagcaacgactatattttacacgcagttttgaagcttgatttaagcctactaaacacaagacaattcttggtagaatcattctaaaattatagaaccctcaatataaagaagcacagcaccttcacaatcctcccagcaaagttctgaaagtaacataattgttcatttcttcagatgaggaaaacaagtaccaacatcagacttgggatgctttgcctctgcatgttcccggcacttcacctctgacgtggtacacataaatgtttgcatacacactttgcactgtgtccaatatatcaaagtattatcagtcaaagaaaacattattgctcaatgagttgttttgaattgaattgtatctacatgttatcgaattactaatgccaatgcctttaaaattaatgttgatttacgaagacatgcttggtaatacttctagttttcgtttaataagctaaaatacagtgtgaagatcttctctcaatgacaattaatgaaattagacatgttagcaagtaaaacccaaaggtatgaaaataccacaaaaagatgttacatgctatataagcaatatgcttcaaccaattaaatacacatacgagaatacaaacaatttataaagtactgcaatttacagtttttgattttgagcgagacaatttatcaaacaatctaattctcacatatatgagtgtgtgcatgcatagatgaacagacaatccttagatacatgcttaaagggtggttacacaaactccaaacgacactaaattcatcttttcctcccattctcaaatggaaacaaaagaaaactacagaatattggcttaagtagatgaattgaaattacatggataataatccatgtataaacagttcaaccaaattattagttatacagtgtgtccttgcaaaatatagatatatacctggattgacattgctttcttgtttgcttcgagttggcttcctgcataataaatcaaacgaatttataagaaaaagtaaatggttcaagagacacaactagatctacctcaaatgacccatgattactattttcaattacttttcatacaataactaaataaataaacaaaagccacggcttttggatattgagaaagaaaggggaaaaaaaatcgaatctcttatgatcggggacgataatatttcaagatccctctacaagtttgattttgatttggattttgaaaaataaagcaagaaaaaagaagttacccttggagccagcttttgccttctctatgttcttctcacgagccattttggccttctgtccattgcctcctcccatggcttgaagacggaacgaagaagatgagaacctccgaaccctaatttgaagatgagcaatatacacctgcgaagcaccagagtaaacaaattgttcgaaaggggttcatttatagctaagaagagagcctagagagaatccgagaccgatcaaaagaaaagggccatatgtcgcttcccagactttattgtcgttttactgttatctccttctcaaaagttgtcgtttggtatcaaagctttgcaattgcaaatgaattgtacatacaaaaaaaaaaaaaaattacactatattatacataccttatttaatttgatgtttttaatttttaccctcttttaaagtctattatatttatttattttttaattattctaccaattttattcctatcacttcacttcacgataatttttattattctctaatcaagattttgcctcaacttttttagaaacttacacatccatctacaaaaaatacaaatctattatgtttgaaattatatcttagttatgtgattgtgtgaagataatttaggtacaatatttatgaaaagaagtatatttgaattaaaatttatttggaggtaaatttagttaatatatataaaaaaatgagtattcttcaacttcttcccaacaacaaaaaaaatgaattgtttcacaaatatataaaaaataacaaaaaaattataaaaatactgttgtacgaaattttaaatatttttacgatttttatgattttatttacaaaaaatacggtcttgtatgttgtaattttgttaattttttgtttattgtatgtaattatttttattgttgttttgatattgtttggatgttattttcttgttacttt

SEQ ID NO: 302685 - DNA, 1620 bp, Cannabis indica
ttctctttgtttgattttaaatcctgtatttatttatataaaatatattagtcttaacctgactattgtaatatctgaaatgaacaaagaatatataaataaaagtttttttggatggacaaaagtggaagttgaatcaagtagaattttatttggttttttttgtttattaaatcatataatatttaaaatcatatgaactattttaatgaggagtaatctagtcatactagaaatttaagtctattaaattcaaagtgatggtaccaaatgtgtaggaattataaataaagggtaccaaatgatcattattagaaaaacataaggtactaagtttatatttaaaaaaaatacagggtaccaaatagttaattacggcttaacaaattgattttagaagaggtagaagtttactttttgtaaaaaaaaaatgagattttattgtaaatattataatcaaataatttgaatattaaaaaaaaattataatagggatttaaatgtaaaaataaaaccatttataaatactaattacaaaaaaatattattaaatatagtaattttaatttttttaagtatatagttaatcataattaatttttttaagtatatttatttattagtaaactattattaaaagtaagagaaaatataattatatattaaaaatgtaacaattgaatagtatccataaatatttgttctaaatgtacatagaaaagaactgaacgaattccacttaaaatattctttttctgtacagtagttaaattaatgatctttaaggaaaaataaaattagataacgatgttatgactggtaagaattaatagaagaaaaggcatgtctccacgtgaataataatatgaaatgtctactgatggctccattgctcactccactgtaattttgaaattttgtaagtttaagaaagtaattgactaattggtaatgagtgaagtagcctatgttcttatatatgactcaatattcttacatttgatccatgtgagacaatattgtccaatattaacttagggatgataattgaaaatctgtccccaatcccatagccaagatcataatttactcaacccaataactcatttccatggagattgtaggaaaggaatctccccactcgtgtctaataatgcatcaaacttttgtgttcactcacactaatttcatgctcattgttgtcgaacaacatcgcctacatcatggattgatacaatcatattttcaagctccgcatgaaaaaagcttcatttactcaaagtctagtagtctcgccttcattgttgtcaacagtgtgtttatataggggtctttttaatattataccaaaaactgattttatttataaaaataccttcaacaaatttttttgcgcaaataccgatgtgccacgtcagcttaaataccgaaattcaaaattattaccgaaaataggaaaaacttgaaaattctcgcttccagaattttcagtgttttgcaagttttaaaaaaaaagcaacgttttggtagcttttgatgtaaataatatatcaattagtacttttttaaaaaaattatttcatgaataatttttttatcatacacatttagttgcttatt

SEQ ID NO: 302686 - DNA, 979 bp, Cannabis indica
aatcaacttgagacttgactatataaaaaggctctcttcctcttcaatgtaacagatttttttaccatcaatataaaatcatttctctctttctgttatggtattggaagtgaactaactccttatactctctctattcgtggcgcatacaagatttactagtccctcatcttccactgacccatctccacctacaactttggtggatggtccgatcgaaactccactagaagccttgcctcaaccacaagatccaattgagcaacgtcctgctctgattacttctccttcgcaagactctgttttcaacaacaatagctaaaacgctagttcacaacctgttcatcgacccacatcaggattcgatgcaaataattcaaattacactcgcattgagcgatctcaacccgttgatcacaaaagcccctattatctcaataatggtgatcaccctaggtatcttcttgttccaactcctctcactggccaagaaaacttcatttcttggaagtgtgttgcctcaatctccattgtagcaaagaacaagactcagttcatcgatggtgcgttacctcacccttctctttctgatccaaatcttagttattggattacttacaataacatgtgttgatctcataattaggccaaccaacaacagagtcatatttaatgttgatgcttgccacatgttacacaataagaataatgaagtaaaagatacaccaaattttataaaggttcggccccctgaattagcgggtaatgatctactccccttttagttgtattaatgccaagagataatactactcagatcactatagtgatgggatttgaagtagccctcttaaaattacaatgtatgattcagtagacaaatctccaatgagaaagagagagagccttggaggtgtgtgtgtgtgtgtgtgtgtgtgtgtgtgtgtgaggagagagagagagagaggagagagagaga

SEQ ID NO: 302687 - DNA, 3271 bp, Cannabis indica
agctaaaatttagataaaaaatagagagcaccaaattggagatgctctcatttatcacaggtggccaaaccccacgatgacagcctcagacatttcgggtctattcagtttttgccatctccttaggtgagcaacttctaaatatatttcatttggaatttggcatttggcattaggaataaagagagacttgcttatgctttgttctcaagttgttctaacacatcaccttctcattatgtgatttagtaagaacattaaaacatgatttgatttcaagaatcctatttcacagcttaccggtggaatatctaagtaaccttcgctcgcatcacacaaatccagtgacacttgtctaagtaacggcatctgtaatcataacaaaatgctataagattagtttgtgttacttcataaacattattcatttaattgaaaccaaaaaaaaagggtaatgatatctattatattattacttttgaagcagcatccagaatgaagctgctttgtatcccatgaccctgtataaaacaggaaaattcagcccattaaaaatgagaatctataatttcattcaagaaatgataaagctacctccatcttcacaaatgttaattctacaatcaaaatatgctgatggtgaaaataaaatgttgcacaatcatgctgtaattgttatcaacaagtccataaaagagatgaataaaacatgtacttgagaatataagtacatgttgcacaatcaagctgtaattttccgcaagtaaattaatttgattgagaatataattgggtgcgaactgaaccatgtacttgagacagcaacttgctcatagaaaacatgtcttaaattttttttgaccatgttgtaactaccagatactgggatttaagtatttactataaatacccaagaaaaaaaaagaaaaaaaattaaggaaggaaagtctcacattatgtcgcaacaacagatcttcaagagctacacactcaagaagagaagaaactccgttttctgtaatcgatccacattcctgaatgagaaatgaatatgtgaccattgtatcaacagtttgcactaccacacctgaagacttcatatcaactagttatgacttattaatacgaggaaggggaaaacaggaagagggaaggatatcagaccaagtacaggagacagaatcacttgttctaatttcctgcagtgcttatcaaaatataaacttgcataactgacaagcaggccacacttcaaacaatgtcaaaaaccaagaatttactttgattccaattgggggtagaaatctagtttgagtcataataagatataaatgcttggaaagataaaagcataaacaaagttagcacatatgcgtattttttgagaaaaagttaaaagcatattacaattagaataaataattttttgtaaaataaatcactaaacacatacaacaaaataaacatggctctgccattgatttcatagacaactatttttaatttaaatatattatataaatatatatatgtatataaaagaaataaccccagactctgccattgatttcaatacccctcggaaacattaaaaattgtcataaaattcctcacagtatatacaagatagggaaaagatgaagaataagacaactgacctcaactacaagttgcttgtttactttagtcatttttagttattttcttttctttttgtgctatttagtgttttgggttctcttaggtaatttagagctgatgataggaagttaatgaattttggttgagctatgttcaaggtaagaatttaaaagagaaaacttagatttttgctaaagttttgcagaaatattactgagaattctcagcagaatgaaaagtgtgtaaccaactttatggagaggatgcaacacttcattaaataatgtggtagaaaaattgatgagatggctaagaggcaagtagaatatggctgattttttaggagagtttctagaaggctccatagagtcatatgggcctcatttagagagggtatttgttgaatgtgcaagaggggtattgtaccctagttgaagaaaagaagagggagctttactttccattatcagccattttagagaaaaatagagcagtaagtacagaagataaaaagagagtacaaagagggaaatagaagcaaaaagaagaagggcaagcggagactttgcatcatctattttgggctaattttcttctttgtttgttattttctttcttattttctctctatttttagtatttcaagtctcatggacagatctaagttggtaatttttgttcttaacttagctatgaactaaatactttgaggcttgaattattacaactctgtcttaattctacattctagtacttaagtttagcaatttacccatacttcattcaaatatgcttattgatgagattttgttgttgtttggccatcgatggaaagatgctaaactatatttgtgttggaaagtttgaatagtggatagatttgaatgacacaaattaataatcaatttttagaatagcatagtaatgtgttatttgcctagtgtaacaactaggaattggtgcttggatttgaattcttgaacttgatttacatagaaatatgcttaattaagtgaaaaagttagcatcataggatttagaaaagttctatattaattgtgctaaattctagtaaactctgggaatttaaatgaaatcttgctgcggcgagtacaggtttttctaggcatagagggatttaataaatcaagcctatttcaatcaaattgctttcagcccacttttacattatatttgcagtttattttcaagtattttaattaatctcaagtagtgttagtttaaaaaattcaaaacaatttaatttagtttttgttgcaaatatttggtaattaatttgtgcatttagttttaatttgcaattcccacaaagacgatctcaaatatttatcactgcagtacttgcttcatgagtgctcacttgtacatatcaattttcacaatagcctaccaagtaagaaatgaaaaatattgacaataacgtagcaatgagttctataaatgagatatcctttttagtttttatgaatacatttacactttcagtaaatgtaactgtcatgtttcttgaaaattttcaagtcacgataaaaatatattggacaatcattttcaatttatttaggtggcgtttggtaacacttttttaatcagctttttgtttttaaaa

SEQ ID NO: 302688 - DNA, 5757 bp, Cannabis indica
tttttttttttgtatgaatcaaagaattatattgcacaaaaccaatttacaacctaagagcactcctaaaatagaagcctctagtttaaatctatacatactttgtatttacatcattacaaatcataaaaccactctctatctttacaactaattttcttgggcaaaaacatgatgattcgacttttgagtctccatttcaggttctctatcagcctgctgcactctggttgctctccttgccaaataagcttgttccgagcctcccatatgttgtacattaagtctgcaactactgcagcaagtacattcttcctaaatttgctcacctgtgctctacctatccatctaataatctgtggcaagtccgaagctgatgttctccaaaccagccaactcttggctacttgtaaacattggacagcaaaagaacacttgaaaaacaagtgttgtttgttctccttttgtatgttacacaacatgcaacaatcctccaattgtattccaatttcactagcctttcctttgtctttatcctattcaacattgccaaccatagaataacactatgctttggaatgttcaatcttgcccatacttcatggctccaagacacacggttaggactaggcttgaacaaagaatatcctgctgaaatgtgatatttctattcttggaatatagcagggtcttgtatggttttgagattgtctttaagagctacaagcttcttccaataccagctggaatggatagaagccaagtagccccaccaatcatctctcttgatgtacacagtatgaacccatctcaaccataggctttcttatttgtttgtaatagcccatatgtatttacacatagcagccttattccactcctctagtcttttcattcccagacctccatcttcttttgttggcatacatcatcccaagccactgcaccagccccatgaaaagcagcctgccccatccaaaggaagcctctacatatagcctctatgctcttcaattaaaatcttcttaggcataatcgtcatttgactctaataagcttgaatagctatgagcaccgagtttataagagttattcttcctgcaaatgacagatttctcgagctccagctcttaattctagcagtcatcttttcagccaacaattcacaatccttcccgaatattttcttcgaagaaattggaattccaaggtaggtgaaaggtagtactcgttgttggaaaccagacttttccagcagccattggacctccctttgtgacatgttactacagtagcaagcagttttggtagcattcgagtataaacctgatgtacctgagaaaagcttcagcgcttgtagcatgtactttatactcctcatatccccattgcaaaataagagtacatcatccgcaaacgctagatgattaagctttaacttcgagcagccattattaagctttgttgcaatcctataaataacattgcaacaagcaattggcctaaaatccttgactgtttttgggcattttaccttaggaaccgaggtaattattttagaattaatctcttttaaaatgtcacctcttcagaaatgacaacactgctttggaaacctcctccccaataatctcccaattatcttgaaaaaaataagtcgagaatccatctggctcaggagatttagctccaggaatactaaagacaggtgccctcacatcatctttagtaaaattctgaagcagcatgttactttgctcttgtgataagcaaggccctttagtaagcactccaagatgagtctttcttctattatccaacctggtaccaagcaattctttatagaaatcaagaaaagctgccgtgattaggttaggatcatgagttctactcccatccttctattcaatataaagtattcgattatgtctcattttttgcttgatactagaatgaaagaaagcagtatggcaattctcatcctgtaaccaagcaattttggccttctgctgaagaaatgaagcataatttttctgtgctgaaattagatttcctcgagtctctttttcctgttcaatcagtgctgaattcaatggctattgatgtacttttgtctgcaattcatcgagttccagctggtactttgcaacaatatgctgcagattatgaaatccttccttgttaatctccttcaacttgatcttgaaatgcttcagctttgtaacagcttggaacataggagaacctgctattttttgtccaacattcacttagatagccatcatattttgaatgtgatttccacattcgaaaatacttgaaaggcttcttgccagaagcactagcaggatgaagtgtaagaacacctggagaatatatggtcaaataatccttcattcaagtacaccacttcaacatgatcatatttatttatccaagactgattggctaacatcctatcaatcttagaaaaaattctatcctctccttgctgcttgttagaccatatgaagtagttcccactagttttaatatcttccaattgacattgattcacacaattcaaaaatgctgaattaggataatacttcaccttattcccaattctctcatctttagctagtatgtcattaaaatcccccatgaggcaccaattttcattagtatttacttcacataaactcttccaaagtaaccccctttcattttggttgtttgaggcatacatcacagttatgaaacttgagaagaatccatctattgttgaaacttttagatgcataatttgacttgtgcatctaataatatcaacaacaaatctcaaaggattccaagcaataacaatcttcccctgcatgccaagcaatattagacgaaaaacaccatccttcaaaaatatttgagtacaagaccccaagttttgagaccttgactcttgtctcgagaagcccaacaaaatcaaccttctgtacatgaataaattgctttattaagtactgtttttgctgattgttggctcctcagacattccaacgtagcatcttatccatttagaaaagagggttctcccccctcttctgtattgccaatgttcaccctactatttccatctgtattttgctctacttccagaacttggaatgaataactaaccatagttcccggtccttttttcactgtgatctcaagctttcgagcttttataacctttgtaaaaccatcctcatccacctaatcctttttcctatgatctgcctttacaatccattcttttttctccccattattctttccgcactttgcaacaacatgccccaaaccagagcagtgagtataaataaattattttttattgttatttaagagctttaaatttttaaaaaaatgttaaattataatcgttatgtttctgaaattttaacaaaaatgggataaaattatttgatataagtttctcttaaactttgttaagatttttttgttaattttcgttataaataaattatcgtgaggagcgctggttattatatagttagtaatttagagtaaaattagttacaaattatatttagtatacttagttagttactaactagtaatttagtaggttttgcgatatattatactgcgatcggatcgatcgataaatttgaataatatgcatattagataaatttaaatatcttaaatatttatccgtagtgaagtaggttctgcgaatacatgtactgcagtcggatgggtggtaaatacaaacccataatactattgtatatttcaacatacactctgtgtacagatgtccactcttcttaccttagattattgcttccaattgatcaccactcgaagagtataatcgagttcctattacaaaatgtatgacaaaataataagttgataaattctacgcacataatacgttcttaatgttctatgcatcctaataattcatgagacctataccatttcaaatatatttttagattaatttctactataaaataatatcatataatgtgatcaaagcatgccacaatattttcaatatatacatatattatgcatgtgtgtgctatagtgtgccgaaccaccctaccccccccccccccccccctccccttacttttcattctcccacttatagaattttatataaccaatatcaccactataagcttgggcgagccctctaacagtaaatacaaatcatgattccaacaatatagtaaggagatctaaatctaacaacaaagccaacactatacttaagcaaacatacctattccaaatatatatataacatatgattcacacccactaatatacatccccacacatatatatgtacacttaatatacttcttcatctcataacatttttaagttctcaatataattactacagccacttatcacataaataatattcacatgctcatgtatacctaaaaaattgtattcattaaatcaattaaaacttaatcgtaaaaaaaatataatgaacttgatacttctcccttgaacaaatcagcagctagtcctacgaaaagaaagaaattctacgatatgtttcacttaccaagagagttgctataaactctttaaacaccgcctttctcttcagtcgtctcctatgtgcagcagccaaataatcaaagctagggatttcaaaccttgaatacttggctatcactttctttaaatactctaaacctaataaatcttttttttaccagtcgtatccctatagcagatattacaaaacctgtaggacccacatacagggctagccacttaagggtttaatttagctattattttatcttttttaattctgtataatttaaaacctttgaggaaatcctataaatagataatgataggctctaattttaagttgataacataaccttcatcaaactattttgtcagacaactgagaaaaataagagcctctcttagattttgaattcttctctctttcttcttcaaaattttcaaacccactagtgaagagtacttccccacacaattcaagtcaatacttgataatagtgtggaagattatgaaaaattctatcatctaaagagatccaagttcagatcttagtaatactgtgcgacaaaaagggacaagggttagaaatctgaacggaatgagccattatattttgctgccaccaatgtaaggttttctacaactttatatgtgtttattttgttgttttaggaaattcttgttcaggatgttatattatagattataatcaaacatatatgttagtaaatctagattttagtaaaataagttccaacatcgaaatcgggtcaggatttaggtatgagcctaggtctgtgtccgtgtctaggtttggggttcaaggtcaaaggtctacgtccaagtcttagtctattggaaaaatatgcttagtgagatcgatttgtgattcacgtaaattaatattttacataaattttaatttcctatttatctatattataaattgagtataaaatacttataaaggtgtagcacaacagaataagactccttccatctagtgatctaacccttgatcatttcagtcgcagagtacagtcaatcactaaatcttctacagaaatagaacagagctatcactcttcaattttttacatagtccttcacaaaaatctaagtgttgcaacaaaattaggtgggcaattgttacaaccactataagtggattttaaaaatgagagagagagagagag

SEQ ID NO: 302689 - DNA, 4142 bp, Cannabis indica
agtatttctcctctcctcacttgtaaaattcaaagtcagtgtcaggtttcttcacgttggttcgatatcccttctcaaaatctttaggaagaatcacataacgatttttgcgaactgcatgcattcctgcttcttgacatatagcagtaatctgtacaaatccattgaagagtgttaccaaattgcagtaataaaataatatacatttaggcaatggattttgtccccttttatgtaaaggggacattgcacaaactttgtttttatgtaagtttaacatgctccagacttaatatgatgtattttggattctaatgattaacaaccatccaaccatttattaatgcatggtggacaaaatctgctccctatatacatttaaagtcatgtgattttccttgttcacaggtacccagaaaactcccccaaaacattcttattagaaactataacaataacatggctgttgagttgagtcaaagtgaatgaattatatgaaaatgataagttgctaaatgcacataatttggtgaaatgttatctctttttagtagaaaaatacaacaaatccgctaataataataaaaaagaaagcatgttgactgacctcagcagcactaattttatctggccgagagacatagtcctctagatccacctcatcactcaaattcattttagcagtgcaaacctggcacattaaacaaatcagaatgaagacctttcaaatttcaacatccaattgcttgcactaggtctcccataatcagaacagagtaaaaaattgggttaaacttaagtaaacaataaccacactattatttcaaacattggcctgcagatatttatgcccgaattcaacatacaaagatttcaatcgatggatatggattgagagagaaagggagagccaaaaaaaaaccattatagcaggaattatcagcagaagtattaccaatactaagctagagacttacgttccatgtaaaaaagatcaaatatgacttctattgtcaaacaaaaaggtcagggaaaaattagccagaccacataatgcagagtgtgaaggtataaggatcaaggtatgttatgtagaacaagaattttagaagccaaaggtgaaggtgaaattaattgtttaacgatcaagaaataaacatcaaaatattacattttcgtcatttattgtagtcatatgctcaaaactcacctgaaaaacaagtctcttttgcctcctatcaggcaaaggaaattcaatcttccggtcaagtcgtccaggacgcagaagtgcaggatccaatgtatcagctctgtttgtagccatgataaccttcacattcactgtttgatcaaatccatccatctgaaaataacttagttgttaataagagttgagaggcagggttcgaagtaaaagaagttgtttcaactccaaaattagatcctaaaatacgaaaaaagtatagccttgcctttgcacattacaagactagagatgacaaatttagtgatcgaaattaatacttttcaacaaatagatatatcttccagtctacctgattgagaagctccatgagtatacgctgaacttctctatcagctccagtttgagcatcaaacctagcagtcgcttagcatctacttcatcaataaaaataattgctggagcattctctttggcaagacggaagattggcaagacggaagacatcacgaaccatgcgaggaccctggaacaaaaaatacgggaaagtagtacctttattagtacagtatctgtaatttacgatgaaaaatatgaagataaagcagtagtacagtactagcaatctaatcctagtgtattattattccctaatcctaatttctaagtacccaatcctgcaacaacaaaaagattaaaaaacctataaaaattcatgaggttttatatttaatacccatatccatttctaacaccactgtcataactcaaacaatacgtatgaccaacacatttatttctttgaaaataatgataaaaacatgttctcgaacattaaaaaggtaatgaagaggcaactcaaaaatgttgaaaacaagatccaagtatatacaccatacctcacccaaatacttctggacaaactctgaaccaacaactctgatgaaggcagcagtggtgtgattagcaacagccttggccaacatagttttacccgtaccaggggggccgtagagcaaaacaccacggggaggatctataccaatttgtttgtagagctcatggtgagtaagcggtagttccactgcttcacggatttcttgcttctgaatatcacatccaccaatatcctagcgcacccaacaaaaaaaaacctcagcatcattcaaacagtaatgagaccaaatgtcttaagggaaggtagcaaaagataaataaatgatacgtagaaataaaatggcactcataaaatgaaagtaaaatgcaatggagatatatccttcatcaataacaaattcaattagaaataaactcatcactaattcatgaatgtgccttttcataatcaattatcatataacaatcagttcactgcatatcccatctgagcagaaataatagtaataacatcatacaaggtgcacaatcgaacaaaaagaacatcccaagaaatgcccgaaataatgaattttggtctagaaatcaaattttggattcctaaaaactaagtgagaataagaatctttgaactaatttagaaatccaaaattcagatcaccgctgatttcaacaagctaggggctcactaggacatgaccttttttctttctaaatccatattacaactaaatcatgaggagctcgggagaaagagcttggtgataaatatatatatacacatatatatatatatgccttgaaatccattgtaataaaatggaattcaatttgccccaacttggattgccactaacatcaaaaataaaatctttaaactaattgtactttagaaatgatattgtcgttaaaacgcttgaaacaaatgatagcaaaattatggtacggtgcacgaatttgaaaaccctaaatttgaatatctttcagatcaaagatgttaggtagatcgcttgaaagacaacccctaaattcgattttctgcaaagcctagtagaatcaatgtcaacaaaaaaggaatcgggcttacagaataggtgacatcgggcttctctgactggctgagaagggaaatactggagtcggcctcaggaggaagaacgtcgacaagggcattcgagtggcgatgcaaagcaacagaggcagagggcttgagaagctcccgattgatggtgctgagaatcctgacgtagtaattggagccggtggttgagcccactatcccattattctgatcaaccatttccatgaactgaccaatgacgaggggaaccgactggatcctctttacctcttcttgggcccgaaggagttctcgcttgagattcttctgttcgtccttgacgtactcctcctggatgtcgatgaactcgagctggcgttgcagtgatttctggcgactgtagagatcgtcctcgtcggaggactggtactgttcggagagacgtgggtcagctctcgtcgacgggaaagatgccggtggctccaaaggcttggggtccattagtagagcagaggccgccatagccgagagctttttgaatactactgcgtataatatgaagggagaaagaatcacttttacactacgttcgaaattttgtttgctaaacagaacagaagtgtagttatgagataagagaaaggcatcacgtgcctaacacccttataaatgtataagggcattttttttttacacaaagagcatctcttgattgggcaatatttataattgtcaaaatgtacaatcatttactttaaaaaaaaaaaatgtacattttttatcaattattaacttaaaatattggagacgagtatccgcccagtgctttgtggcggatacctttttttttctttattttttatggtttttctaggttttcatccccactaattaacctcttacatgatctctatccattttcccatctactctatctggtcattgttatattattttataatataataaagtatagattaa

SEQ ID NO: 302690 - DNA, 1140 bp, Cannabis indica
gatgttaatgaaacatacttgttagtaaatctagattctattaaaatattcccaacactaccttcccttatgccttttcaacacttagagaatatttactaagtgtttaagtcatgagatgtggaaaggtcatgctttttgtcttctttagtcctactttcccttatacattttcaacacttatatttactaattgtttaggccatgaggctagggaaagccatagcgagtcgaggcttgacatgaaatgaagaggtgacctcttgggtgtgtggcggccagtttaggtgagatatgacactcttgggcaagatgggacacccttggatgaggtggtgactctttgggcgagatggtgacattttaggattttcctgtcatgtattctatctgtattttgagcataacttgctcaatattgccctaattcggacgattcaagatgttttggaactaagaacaagatttacaacttttatgtttattaccaaatctattttttttttaaatgtaacaacgtctacgttcaccaacaagttctgtatcataacctgatctctccaaccgtactagtttccactaatatctattataaacacttcaaatgattccaaatacgtgattggccttccaaaacccccgtcaagtggtgtcttcctggtttggaaccactccgcttgggataacttcgatagtacaccttgtgaaatttcaaagttacatgattataatttcctacttataatattagtaacaagttgtaaagttttacaggaaaacgttgaatatccctatttttaagtcaaaaaaatgttaaaaagaacgagttaaatacacatatttttgcaaaatgttgatattaaagttttaaaaaggctaattaggatttttgccccctgaactttgacatgtaccaaatcatgccccctgaacttttaaggtcattaaaaatgtcccctgaactattgagattgttggatttaaggacttttttctaattttagtaaaaaagtctaacatagatgaaagttcaggaagcataatttagtgcatgtcaaagttcgaagggcatgatttgatagatttcaaagtctggggaacatggtttagtacataaacaatcattgaaatagtaaaatt

SEQ ID NO: 302691 - DNA, 2519 bp, Cannabis indica
caagttatatttctgtaactttcatctgtacctgtcaaataagtgtcaagtcaatctcttcttttatcgatatatttaaattaatttttataaaaaaataaatatataattgacttgacatttaaaggtgaggtaagttataaaaatatagtttatgttgcaaattactttaattaataatattaaatattacttaattttataataatatttgaattattattaataataatttaatttataggaggggaacataagtttatcgatgtggtagaagagaataaaaatataaatcaagatgttcgagtaataatagaggtgaatttgaggagcgagttcgaattgggtactaaagtgagtagtgaagaatacaaggaacttgtacaacttattccagaattatatattggcaaagcagagagattaaaaatggttataaacgtaatgtgttttgcagctgagaagtgtatagaacagaaaaagatgcacttggccccgtggaggacgtactcttacatgtgcgacaagtggctcgggccctacaagagagacacctcatcctcattcttgcctgatatcaatgctctattactttcaaaaaataataatattaaaacgaacaacaacacgaggattcgtcaaaggatgatctccatgcttactatggaattgctcgagttgcaactcaacaataataaaaacattaattgtagtaatgataaaccacttgcattagattgataaatttcgtacataattattatttcttagttactctttagcctatcttcttagcaagataggatagatgtacttttctcttatagattaacttctttttccctaattaatattctttgatttagattttttttttaattttcttatatttatttttattaattttgtaaaatttttagttttattttggaatttgtaacgagaggtaacttatacattaacgaaaaatattttattttttttaaacaagatttatttattatatttattttttcgcggtagaagaaaatagtgcaatttttaagactgataagatctctctctttcttttttcagaatttatgatatttttttttttagaaatatatatgtaagcatctaaatataaaaataattataatatttagtttggtgataacatttacaaaaaatttggtataaaattatgtagttttatttattgtagttaattattatgtaaaaaaatttaataatagtaaaatatttaagtagttaattttattacaattaactatttattaaaaatattcataattatattaaattttcatttacattaattttacagaaattaaaaaaaaccacccaaattagagtaaatattggctatcaaatatcaataggccaaattgcagaatgaagattgcctatcaaagccgaataggtccgaatgatagactgaaaattatgctaaaatttataatcaatcgaaaataatcgcatacagacacggagaacttatagaacaaaaaagaaaataatcgaaaaatcttggaacactataatggtgtcggccgaagggctccaacggtcaaatcagtaaatttgtgaacaatgtaataatgtgaagaatattgaatgactggactaaattatcacctattttaagtgcgaaataagtataatttcatagacaataaattgtaagtgagaaggattgtgatgactgagattaaatcattgagagcttaaaatattaacgtatgacttgactatattgttttgggcttattgaatttacttttatcttttatgatcgtatcattagattttttttttttgaataaatcaaaagaaaaattattaataacaactaactataataataacttacaatctaattagaacatctcttccattaaatacacaatgattagaattataaaaataaaccaaatattcagtcacttaattcctgtttgataaaaaaaaattaaaaaaattcagattgggcctgagcccaattttgacctctacagctatcaaagcccaataggcccaaatcagatggctaaaccccttccttccatcttcttcactgtctatcaaaaaccctaactcgagctcggatcacgcgctgccatgaccaacagacggtgtctccacactctggcccgccactcttcagctttcttctccaaaaaccattcttcccttcattacctcaccattcccacacagcaaccgcttcaaaccatctccaccaaattctcattgctttcatccaatccatgctctgctcggcgcgatcaatggtctcagacttgccatttctcatcgaaaaccggcaatgaagacaccgaagacgaaaacgatgatgacgatgaagaagattacgagagtaccgatgacgaaggagtctcggggccgagcactggtgtgaaaagagagtatacgccagaagagaaggaagctgaggctgctgctattggttacaaggtcgttggaccgcttgagaggtccgatcgagttttcaa

SEQ ID NO: 302692 - DNA, 2050 bp, Cannabis indica
tgcctttcctccaaaggctataggtgcctacacccaagtggaagagtctatgtggcaagaagtgtcacattcaatgaaaccgaattcccttaccaagaattgttttctaaagcctccaacaatagtgcaaaccatactcctagagtcatagaccatattgcctttcaagtccccactattgttcccataaatcgtgccaatactccaaccactcccactgacagcatcactgcctcaaactaatcaactataccacctcagttgtctcaatctcctcctatcccatatccaataatcactctaattctagtgctattcaacaagaaaactcaccttagaatagtgtgtttgtccaatctaactcgaatattcagaatctacccccaactcataaccatcaccctatacttactcgatccaaacatggcatatttaaatcaaagtcgtacatggccatcatttttcaagatactgaacctaaatgtctcaaagaagccttggcttatcctaagtggaataaagccatgaatattgaaatccatgccttaaaaaaataagacttggacaattgttcctccttcctctaaaatgacaattttccacaacaagtgggtttacaaaataaaattacatgctaacggctcagtggagagttttaaagctcgtttggttgccaaaagttttcaacaggtacctggagtggatttctttgaaacatatagtcctattgccaagccttgtaccatcagacttatatttactatgactgtcacttatggctggaaaattcaacaacttgacatcaataatgttttcttaaatggagaattaaaagaggcagtatacatgtaccaaccacaaggctttgttgatcctcaatttcccaatcatgtatgcaaattaaacaaggcaatataaggtctaaagcaagctcctagagcatggtttgataaacttaaacactctttattggattagggattctctaacagcaaggctaattctagtttgtttttcagcaacaaaaatgacaagttactgttgatactcatgtatgtggatgaaattttaatagctggttaggatgcaactcaagttcaacatgttatttctacactccaagctacttttgctcttaaagttctaggacatgtcagttatttcctaggctttgaggtcattcgtgatgtcagtaacttatatcttagtcaacacaaatataccaaagacttgttgaactccgcaaaaatgcatgactccaaatcacagcctacacttatgtgcacaaccacaaaattgtctcaacacactagtactccaatgaagaatcccacaatgtatcgaagtgtgttaagagcacttcaatatctcaccatgaccagaccgatatttcctttgtagtaaattgattaagccaatttcagtaggctcctaccccaaatcactggagtgcttgcaaaagaattttgaggtatctctcgggcattcttgatcgaggattacatttcacaccagccatgacacttgatctacaaggattctagatgcagactgggatggatgctatgatgatcgaaagtacatcagggtactgcatttactttggtagaaacttggtgagttggtactccaagaaacaagcagtagtggctagaagtacaactgaatctgagtaccgtacccttgctctagccacatttgaactggtatggatccaatccctgctcaaagaaattggtctccaaactcaacactgtcccatattctgttgtgataacttaggagctggatctcttgcctccaatcctgtgtttcatgcccctactaaacatatcgaagtggatctacattttgtacaagacaaagttatagctcaagaattagatatcagatatgtgggcaccacacaccagcttgttgatatttttcacaaaaccacttgctgcaactccttttcttcacttcaggaacaagttaacacatggtctttgttgggttttatgccctaaataaaactcattacaatctgattagttatcaatttagaagt

SEQ ID NO: 302693 - DNA, 2128 bp, Cannabis indica
gaattttgtttatacattagtttttgttattattattattttgtttcatcaattaatcaaaccttatcttttatttcttggtccatgtccttaaaataacaattcagtatggtggttaataacatacgattttttccttttgttctttattttgtgaattttttaaattattgcagtgtagaattcattccgaaatcatcttctttcttgtttttactttacatttgcaggcttccatgtagatgattctgaagttaccttgaatgtttgtttgggtaagcaattttctggtggagaattgttttttcgaggtgtccgatgtgaacaacatgtcaactcagagacccaaccagaggtaacctaatgtatttgtttgttgaagtataataaattagtcgattaaaagatatgatatttgtttcctgttatgttaatgaatcatgatgtgaaatgtcatcttgatattgatatcctgagtttttgtattttgatattttataatcaatacaagttaatcggtttctttccaatttcctgtccgtattttcatcttaccaaacattgtcttaatattggcttcggctggttgctaattaggctttaaaaattcatgaaacatgacaatttttgcttctttttcttttttgcttataggaaagcttcgactattctcatgttcctggccgtgcagttcttcatcgtggtcgtcatcgacatggtgctagagcaacaacatcaggaaatcggattaacttgattttatggtgtagaaggtgcttttctttctcacattttcttgcaatgtttctccttgtaagagaaataagtggcgtaggaaacaagaaataatgaaaacaaagaatttggttttggagcgtgtatcgacatttcttttgtttttttttctttggccttaacttctcaaactttgttgcaaagttttatatggcaatttactcccaggatacaacaaaactcgtggtcaattgcttaaaaaggcatattgaggtttaagccttaaaacttaaatttaaaatctatactcttttttaattgttatcttctaatcactgacaatcaaaactattaaaacaaatcataacacaaaattctaaagaaaaagcacataaattaaatgtttgaactttgaactagcagcctcaagtgatttcatgtggtattttctaagaaatgctaggatgctacgagtagtaaatcattattttaactttaagcacacctctcttttcttctcttccctaaggcataagcctctcttctgtcttttccctaaggcatgaaccctacgttgtctcacctctaactcttttcaaacattgcctcacctctaactctttccaaacattgcctatagtgaatatccaacaaaaattttaaaacacctaaacaagatatgaaatgtgattttttttaagtatttataaatgttttaatacctacttgaactatcatcctgtttcatgaatttatgttatgattcatgaataggtatcaagatggttcatgaagccatgtgatagttcaagaataagtgttaaagaatcatcacattggcttcatgaaccaacctattcaccaatcatcacattgcttcatgaaatcttgcattgtttcataaccactagagctttggagaaatattacaatctctccaacaatccccctattaaaaattgcattttaaacacttatcaccattacaaccttgtggtccatgttggactcataaacatttacaagatttaaaccatgttcatataacaataaacttgcttttacccatttaactatgagtggcagtagaattactacatagttggttaccatctttagtggctctctcattataaggttttagtcccattccactagatgtttccttaataagtctcttgaaagaccttaagtcaaaggatccactaggttcttattaagcctaacatacatgttaacatactcatgtctcaaactaatatgtctattctatcccttgtacactttattgtaagctctagacaatctacctttgctttcacagtacaaaaagatagatgttaacggttgcagccacaactctctctctctctctctctccatatatatatat

SEQ ID NO: 302694 - DNA, 1144 bp, Cannabis indica
gttataaaattgtaaaaacggaccataaccgagcgattttcacccctactaggccaagttcacagactacattagaaaaaaaaaagtgttaatggagtaataaatgggactagcatggttagagacttactgaggtcaaagtggtgctcacgtcctggacctggtaaactgggttggaggaagcataagtgccaaatctcttggttagaagctgaatcaagttagaagcaaactgactcatcatctcagaagcgaaaggagccaaggaagaccttaggaagcttgaaaactagtctttcatcggatccatgttgaggtcatggaccgggcaactatattccccccagaacaaaccgtcttggttctccatcaaccacttagtcaagagcaccgccttggaatttcctttggtccattcatctataacatagttgttcttagcaatcctaagctattggtgagcctcatcttgatgaacgggagttaaaggaatgaacgggatgcttgggaaagcctaagcattggaagggattcctaagtccccgatactatgcaaaggagttttggctaccttaaatttctttgaagatgtggagtcgccagcctcattcttcctttctggctctagtggcagtaactcatcctcatcatctacacctatgacctctgagtctgaggctcctgccacattcggacctccttaagtcactatgaccctcaaaaaattagcatgaggagtggtgttaccttctgtgggactcaaagcatccatagaggcaaagagaacatccattgatctagctagaaaaagaaatgaaagaaaagtaagacatattcacaaaggaatcataaagataagacatgtaggaaaaactaatacccaaatggcctaattcttccctagcaaactcataaataatgttgttggtatcgtcatctcctaagaaactatctgaaggaaggaagcagcttgaggtgaggtaatatgagtggtccaggagtatcggtactggaggactagatcccctccgggacctacccaaaaggtctctaatgatggagaagtaccactctattgttggaaatattttaccaggatctagatttactaacaagtatgcttcattaacatcctaatatgaat

SEQ ID NO: 302695 - DNA, 1409 bp, Cannabis indica
gcatcacagggttgaactatttccttaaaaaatagattagcacagtaatctgctttaatcatattatgttccgataaagaaaactgtattgactttgtacacctgttccttcttacccagataaaatcatggaaccctactgttcttggtaatccatccacgaagtctatggttgcctcttcccatttccactcaagtattttaaatgttgaaatattcttactggttcctgatgctctaccttgatttgctgacaggttggacatttgacatatactccacaatgtcacctttcattcttagaagagggcttaaacatcatgatatatcttagtttctcctgggtgtaaagagtatggtacaatataagactaatttagaactttctgttcattatccttattgactggtacacgtaccctatcctatatcataaaatcccttcagacgaaatcgaaaagtcctttgcggatctggttcctagtctttccttgtacccttgaaattcagagtcaccctgctggcccattttaattctttccaatagatcaaactacaatgtgatactaataagttctccaatcacgaactcaatccctactctggttatatttccatcaaactttggtgaaatctctcttcttcttcttctttttacaagcttgtcccagacctcttcgacctagagcatccactatcaatttgcttgaatagggtgctagagaatcttacagttatcatctttatctaattctaaccatcatattaaatccttacaaatgaagaagtacttgaggcacttgtgattcgtataaacttcactcttttcaccatacaggtgatagcgctaaactttcagtgcaagaataactgctgccaattcaatatcatgactggaacaccattgttcacactccttcaattgtctaggtgcacatgcaataaccttcatggattgtatcaatacacaatctaatccttgtttagaagtgtcacaataactcacaaatttctccttactgactggccacgttaacactaaagcaatagttagcttttgttgcaattcttttgaattaatttccactaaaggcatttcttcgataaatattccataacatcttgttaattcttgaaaccactaatctcagttacagacctgggttgaagccaactctaaattgcttaatcattactaaatctatcaaaatactatctatgtccacctcatgctctaagaaacttatttagggctggaaaaattcatatttcttgtatttagcacgaagctttggctcccaaagacattacaagaccatccaaaataggcctctcatatgcctcctttgaattgcaagaataccattaataaagacattcacaaacttattgggattttatgccctaaa

SEQ ID NO: 302696 - DNA, 1746 bp, Cannabis indica
aatatgttatttataacctatagtataaccactatatatacggttggaaaccaatgtcggaccttaccaaaacaaaattattaagaagtcatatgattcaacatgcacaaaattaagaaaacacaaatttactaaaatcctaataaaatagataaatagccaaaaaataattatagaatgacacttcatctcatttgtgttttcctttatattaatatatagattatcggtagtttcagtcttaattcattggtgcattatttgcatattagtcccaatatatgtagttctcttaaatttgtccctcttctaattttgttgttgtacaccattgaagtcaatttccttcattcaccaagttaagaatttcccaatatttaaataaataacatcctccatacaaaatgaataaatgaataaatatcatcctaaaactagaaaaaactttttgtccaaagaaaggatacagagagagatttccccaaataatagtaaccccaaaaaaacccaagataacataccaaagacccctagaaagctcattattagaaaattaaaagaaataatattgaataaagaagcaaaatatagaggaaataaccccacaaaaggaaaataaaatggtcaagaatcaccaaaaaaaatatatagaaaacacatttacatatgatgtatgaaaaaaaaaaagacacaaatgtgatatgagaagtaaaaattaaaagtttatttgttgtaaatatttgattgagagaaaagaaaaaataaaatcgggctggggcttgggcaacacgattctattataatgggctttttcttttctttggtttgattgggcttgatgagaatcaatatccatcaaaatatcacagttaggtaaaaggaacattattattgataatttcatactaagctatatataaaaaataaataaataaacttggttgacattacttactacatgaatgtgttaaaattaaataatatctatcagtggtgtatgtatggttctctttatttatttttaatttttttgaaatagaaatactatcatttatataaaaataaatattaaataaatgtgggagttaggtgtaattttgaactatgtatgtcaatatgtcatgtgtaatgtctacgttatacaattactcatcccatgtgatgctacccgatatatagtgaataattgtactcaccattctaagtttagtatactatagtactataccatcactaataatattgaacaatattattaaatcaatctaaaataattgaaaaataaatatatattttttttctaaaaagataaataatttgatcaattaataagttttgtcgattctgtgtttagtcatagtaattgggtaaataatgtgtataatattgtgatttgatttatacgtataaatgtctattctaaaatcactaaagaattaggaaaaaaaatatatataatttttttaagcatatgtgaactttaagcatgctaaaaaaaaagcaagtctaacatgatttatgtagaattattgtccaattttcgcaaatgaattcaaatgatgattacattaaaatataaacaaaatccaacatgagtaaatgataggtgtaagaaaagaaaatggcttaattcttcctcccaaatgatgattatttatttatttatttatttttaattaaaaaagaataacttcattttgctattatactttttccttactttacgttaataacaataataataat

SEQ ID NO: 302697 - DNA, 2648 bp, Cannabis indica
atttttttttttattttcttatgatggtatttattataataatagttagcttcatatttgattttaaaaattttcaagtaatttatagtaacgaaaacaaagttcaaataatttattttattcgtattttttttatatgcgtgtaaaaataattattttgaattttattttgggcatggcaaactattcataattcttgaaaattgacaatgaggatcttgtgaccaatgtgaacatagtcatggaaaatattttcagcataaaaatatgttgtatcggtataattttcaaagaaaatttaggtttccatgcttaaatgagatatatggattaaaattaaccccttcctccattcaaaaaataaataaaaaaaaaacacattgaaaatgtgtattactctttcaccccatacaaaaatagaagaatagagaatctagtcccattaggtatcctccagaaaggtctgccacgaagaaaaatcctacgattgtgcctgaaaagaataagaaggcctaggatccacgtaaagttcgttctaatctcccaaagtggaagggtcttgagggtgtagatttcccaaaagaaaaactagtctccaggaccgtggagatcgaaggagcgtactccatgcatcaaagccaggaaaacaaaaggggtctttcaagaaagatccccctaatgatcttcgacacaatctcaatgccaaacacagggacctaagggcacgtcttgaccaaagaaagaaagcttcgtcagaaatatactagaagctgagctcccaaagaactttaagatgccttaaatgactatgtacacaggtgacatggatcccagtgatcacttatctagattcaacagagtcatgacggtcatgaggttcagtaatggcactaaatgcctgtgtttcccatggacattgggaggatctgtataatagtggttcaaaaagttagaatcaggatctatggattgttggaataaattgcaaactaattttagaagacaatttgttgtagctagaaagataaaccttgaagttagtgccttgaataacatcaaataattaccaatggaaaccttgaacaacttcatcaagaagttcaaagaggaggcttccaaagccaagaatgtaaatgacggacaaaatttggttttattgtaagatagaatccggaggggaactcccttcgagaatgagttgcaataagaaggtgcagctagcgttaaagatttccaaaagagagcctagaagtatattaacttggaagaagcccaaataatagttttcaggggatattatcatgctggaggccctaggtatgcttctgaagtgcaatttccaagtatcacgcttcttgccactccccaaacgagtggcatgcctagtgtgcaattccaagcaacactgggtactcaccaaattctattatggcaccagcccattctgattatgggctgccgacaggtgatcccactcccaaagcaagcacgcaatatcttactcaatctacttcacttgtagtgagtgcaaccgcagctcccaaagcttcctggagtaaacggtcatccaatggaagcacccagagtgaaagcaagaagccaaaaaggaccgagtataatccctagtatactcagtatactaacatggtggatacacaagaacgcatatatttggccacaaggaaaaatattcactaccaaaggccactgcctctataccgagataactcgcagaaggaccccaacagaagatgtgagtaccataatgacattcgacatacaaccaattaatgtaagattctataggatgaaattgagaacctgatacagctaggccatttgtacgtgtggataaggaatcgtttgccgcatatgagggaaggaaaagtaggagctcaagtactttggggtgtagtgcaagccccatatctagaggcccctaagggagctctttcccaaaatcaaggggctctaccaggacagcaacctagaccaaaagggagagtggttatgatttccgaaggctctcatatagggggttcaacccacaagaagtatgggaagtaggccagctattagcttagagacattgtctcatggactagccaataacatttagtgaggaagatgcccagacggtgcattttccacaccattaccactgtaattgaaactcccattaccaacaagatagtggcttaaatttttatggataacaagagtttagtaaacatcctattcaaagaagccttcctcaccattggccttaagaacaaagatttatcacaagtgattctcagcttacgagattaaatgggaattctcttatatggggaaaattaggcttccaatgactctgtgccctgacacttcttaaagcacatttaactactgcaccattgtcatggtagattgtttgataatatacaagactataatggttgcctgacattggtggattttggagctgttgttggaatatattttgccaggttctagatttactaacaagtatgtttttaacatcctaaatataaatttttgaaacaatgaaacttaaacacatatagagtatgagaaaccttacattagttgcagcggaattaaatgactccttccacccagatctctaacccttgttccattct

SEQ ID NO: 302698 - DNA, 1459 bp, Cannabis indica
agagagagagagagaatgaacatcaaaacaaaattttagcaaggctacttagttgtacagcaacagagagatttggatgtttaattgaactctgatatcagtaaaatacttcagtattgtgacacttatactagcacgatactagattacatgatttttacacaatgttacctttctatcagccctggcatatccaaaatatggaatcactgcagtgatatttttagccgacgcccttcgacaagcatcgatcattatcagaagctccataagattttcatttgctggagggcatgtgggttgcacaaggaatacatcacaccctcgaacactctcttgcagctgaacataaatctctccatcggcaaaacgctttattttgatctttccaagttccagacccatgtagcatgcaatttcctaacatatagaacaattgaaggcagttcaaacaattgcagagtgataaaataagactctcaaaagaacaataaagttgaaaactttacatgtctatctatcatcctatccctattagtattaggaatccactctcttctcttctgaccacaacactaacatcctaaaaacctcaatccatatagagcttaagataattgaataaacttcacttgaaatgaaaagcaaagtaaagaaaaaaagaaacctgagaaagtgcaggattggccgtgccggagaagattctaagtctagtatcattcttgttcatggcattctccaaattcattctgggtgccaacatattcggcaacaccattccggggccgctgagaagaggcattccaggccttccgttctcgaatttcaacggttccaccacattacacctctggaatagaaaagaaaatgaaaattaaacaaatggaagcactattcgattatattgcatgcatatagacaacaaaaacgcagaattcacagtgaaagataaaaatcgaagaacgcgagaaatgaagtaacgaaggcggtagtgaagcttacgacggcgttttgatgtcgggaaggagaggcgaagcgataacgagagctggaggggttgattgggaagaaagatgtaggagaaggagtagggtgaagaagagacgccattagagaggggaagagtagtctcagctgagcttgtaactattcttttttaatattagggtatttcaactctcctcgttttaaataagattgttattttatctttttaatgttttttttttcttcttattgttttctttttaaggccatttaaaaaaaaaatgtaaatcttccttgaaaaaaaagatgagaaattacagtaaacgttctcacatatttttatttcaaaacttataataaaatgaatacttttttaaaattatttattatttatattatcttttactatataaaaaaaatatatattttttttaaagttagaaataaaatacttaaaaattatagtatattt

SEQ ID NO: 302699 - DNA, 1813 bp, Cannabis indica
ccatcacatataaagtccactccttccttcttcttgaacattaccttctctttcgccttcttaaagtccgcgtgtgtcacctgaaacacataattcaatcatggaaaactattgttagcaactcccacagtaaagaaaccaaccgaatttgatataataattataaatgtttcaagctcaagctcagtaatgtgtaatgctgatttttaacattaaagtatacaatggctcacctctttgtaccgacttcctcaatctcatctttatctttaactaataaaaataagataggtttgttagagagatacgtgctaacataaaagattatttaattttttgggtttaattattggatttatttgttaacgggagattaaacctaatcgttaaatttaacagaatattcttttatttttaagtatattctgttaaaccaagaaatgacgttagataggcacttttaatatataaagatataaaatattaatattattcttagtaggaataatattaatttggacttcatattttataaaaattattgattagaccagaccctctaatttaataaataataattaaattttgtatttttttaaataatacaaaataatattctgacttgaagataatttattacacgaaaaaatataaaaaatgtaattagacttatgatatcacctctctattaggtaattattaagctcccgttactattttgtgtcattttaaaaatataaattctaatttgttatttaacaaaaaaaaaataggtccaatccaatcaattgttaaatacaagaggtagatttagtttcttatttgtattatttttaatttaatactttggtttttttgagaagaagaagattaaacttatattaatcaaagttaataaaccaaggatatacaacgggaaacaaaaggcctagtcagtcatgccaaaacacatgaaggtaactccggccactaaacctttccttagcctatagccaagatgagcatgagttttggggctttggctaaagagtgagcaatagtattagtggtccaactgcaatgagtaaaagaaatagcatcaaattcacacaacacatgaatctcatgcaaaacataacaaaactaagaaacataggaaatatcattattaagcgcttgacacaccctgatcacagttagagtcaacttgaatcgccttatacttcagtcttataaaaaaaaaaaaaaaaaaaaaagaatggccttgtaaaaggcagtagcttagcaatatgaggctacttgaaacaatagacatagctgagaaacctaagcaagctcaataacaccgtaccaactctcacaccttcatattcagcacattgatgccagcatccacattcagcttcacagctcccacttccggtggacacaaacccacccactcccacacaacaacagttggcttgatatcgtttaagatagtctaatccccgtgagcgttttccttaatatttattttctccaataataattactttcctttttctagtttctttccttgcatacttctttcaaattcaccacactgatgagaccagatatttaataaaggagcatagctatttgacaatttaataaggtgcctaacaccgatgtgtcaccctataattgattagctatttctcatattatttattaaattttaatttttttctgtaaaacatatcatttattaaattaaaatatgtgagactcgatattgaaatgcactaataacgtatgctactgttggaatttattttaccaggatcttagatctactcacaagtatgtt

SEQ ID NO: 302700 - DNA, 879 bp, Cannabis indica
aaaaaaaacaaaacaaacaaacttttcctatatttttatttacaaaatttaagaaaatataatatttggtgccacaccaaggtacgactttttggctacaaatgaatctagtaatcagtttttaataatatatacttaatatataattcaaaatctagttcttttcattgtagagcttatattaatagtggctgagtcaagttccactcttcaatatttgactcaaaatattgacaatattattcaattaattatctgcattaaaaacagctgatgaagatgatgaagaaagaatatacatatagtcatgatattactgtaatgacgtttgcctgttttttcattctttgaattatcaaacgtttgactataacataacaaagtctctttcaccaattgagaattgggatttcacaactgcaagagccacatatagttttttatgttgttgttaaacaattttaaggcgcgtccaaaataatattaggcgtcgtaatatctaataacaatatgacacttattttataaatcaccgcattatgtaatttagtcgtggaaatttataatttgtaatatgtgaggttgagggaattcgaactaactcggagtaattattatattttattatatttgtaccttattttaatattgttcttatatattttgtgctttgtttttgtgtctctcattgtgaagaggtttgattctcttttcttaccataagtgtatattgaatttaagattgtgaatagatttgagaattgttacaatattcaatgatactaatcattgtaaacatctattaatgagttaagaaaactatatgtaacgtccccgctttaaatttttattgggcccttatacccacggactaatggc

SEQ ID NO: 302701 - DNA, 4767 bp, Cannabis indica
ctccggaattgagaaattataactctaatgcccatttctaaaaatgggacccacaacaatataaaattataaatatttataaatatgtcaataattaatgctaattgtctttactaatccaaaatctaacatgcggttattataagaatcctcaaaatctgaatgtcccttatttccagccttaatttataaacctctaatccagaaactccaaactttacttcaaattaatgatgcaaaaatccatagtcaccttataaagtttagccaagaagaaacttcaaaccgttataggcgattcttgcaagaggttattgagggtaaacgtcatttcttacgagaagcagcttggttagaaccaccgtgtttagctgatattcccctagcaaaactaatgtttttacctccagtcactgttgctttttcaccaggtgacttggactttgaaattatggctcaaaaagctcgcaaatccaagaccccacgaaacccttatatcacctttgaggcaaaactaatcgagtcaagggttagatctataggcccttatgttggagacattttaagatcatgcggcgttaggaacgaaaaaggatgttgaatttggtcagttgcccagggagagttcatttgttaccctcctgaacgtttgactcaagatgaaggctgtagcaccagcgagacatctagaattgttgcatggagtgttaaacagataaaggctggagtagttcttccccttaaggattatttcaaggaattctgcaactatcccgatattacaccatttcagctcgccctaaattcttacaggattctcgctgtataaaatccctctaccacatcttgaagtgggagtgtcgaacacccctagaaattttatatttttactctgtcaagacctgtcctgcgagaaagcatggagcaggaggcttttattacctcaggacccatactaatgattgtaagatcatcgtgaggttgcccaacaaaaaatggttcaaggatgacttcttttggaccactggtctatatccaatcaacaccaacaaatttcgaatcatacgtaagtaccaatttttctcaaaatccttggttttgagtttttctttgaattttcttttgtacttaactaattatgctcttttgtcacttttccagcgatcattaggagacccaatcctactccagaaatcaaggaaaacatgagatcttactcaatcttccttatggactacgagcggctgacttcctgttgcatgacaataatttgaaggcatgtggccttctcgatagagactagtaaatgactttaaacccccttctaaactggcaacaagtccctatgcccgaggatgaagaagaccaagactacgtcgcttgcatccattattttaaaacgtgaccactcgggaagctaaagatgaggcctccaaaggtaataatcttggtgcttatggatggtctcctaccgttcttatggataattgaacaacgttagttcaatttaaggataatcagtataatttcttcatttggaactacgtcgaattaataacccatagatttgatagttggtaccctaaacaccatatccaattaagttgcaatagtttctactttgggattgctgaacagtatggaactaacttcgatagggttggttgtttaaactgggacatgtctcctcttaatccctttgacctttatatgattactccttctagggagtttaataattattatagcagttcctcctcgtctgatgattatggtaatgttctaagtgggagatttagcctcgccacatttgcactatttgtttatgcaagtcttaatgttttatcttctgtctcgcaaatatgtattttgaagacattctgtgcaatccgactggtcctactaactgaggtaagaggagaacatcctccgtggaagccacttttgggtcaaacctagaagtttctaagaaaataaagaagactgtcagtaacaaatctgactcgaccggaatctccattgagcataaaaagactacaacttctactgtaccagcaaccgcgagcactggtggacaagccttggggtctgtccatcaggttaaattctccaagtctcaacctgagatggctctcttggagccatcctgcccctgcctacttttggaggtgttgatggctcgcaggcctggtcgtaatacgctacctagagttggtttcaagactttctaataggaggactgagatttgattaacaaaggcaatttttaaagccttatgacgaggagtgttgatcttatgcagccggttagtccaaacttcataaaactttgtatatcttcttattctttgatctcttcttctgacctcgttctctgtaggtttctttcttatccttcatggctcagtagaggggcttctaatgtgtcagccatcttagcactgaacttcgcaagtctaatgaccaatgcgaggtcttgactaagcagtggaatgacgctcaaacggagatctctaggttgaaaaagaatgctaaaaaccaagagaaatttgagaaggcccttaagactaagctcgaggccgttcaaaccaaaattaaggaacttctcgaggctaactagttggcccaaaaaccatcatcgaagccaacaaaaggcttgaagaggccaaatcagacgctaaggtgcgagtcaatttgattgccaagcgttccatcttagagtttggaaagaaaatcttgagatgaatttgagcttcttgggtactagagccgatgagatgcgagtttattgtgagtagaccaagaagggtgaggttggcgatgctaaagaaggcaaggttgaagaagaagacgatccctctaagtctccaactatgtagacttagtttttattattttaatttttcaacaatggtcatttggtcgagacaatgttttgccccttgtggcatttattatgtaatattaattttcatttgctttattggatgaccaacattgctatatttacatttttttatgttactttaccttactttgcttgagttatgaatgttatttgaatattgtatttttattcacaagtaaacaaaacacctttctcaatttagcttaggctatattgcgaacttaaatgttcttacataattaaatattttggagcattctttgattgcttatgtatgagcagtttaagattctactactttaattatgcggttggtattctaccataaaaatttttaagagcacgctttaaatattttgaatagtatttaaaactgctttaaatatttcttgattgctcgcatgaatagttaatcctctattcatactttaacttgtaaataattttttaaaggtactttgtaaataaaaacatttttaaacataatattgaaataacccctataacattagttaaaagagataattatggaactaatgtgaattaggtttcgagtaattttgccggaatttttaaaatttgaatatttatgaacaataaattaaataaaataagtaattatgtggtaaaattccaaatatttttaccatttatttatttttataagtaccatcgatattgccaaaagtaagaaatgaaaatttaataagtaatttttaatattttctacgtattttcaaccaattcttaccaaattagtgaaaatgagataagtttgtttagtgtaaattataagtatgatcattattttatttaggagtgttatcaaactgctcataccatacaaatcgcctacactgcaccattaggggcaaagttaggattagataattggggggggccaatattagcaggtgcatacaaaaagtataaattttaattgaaaaaaatattgtagggttttatttttataaatattttgtacaatatttaaaaattatgaatcaagtaattaaattgaaaataaaatgtgagttctagggtacgttaggaaggccaagagaaaattgcaattggtaattgaaggtaactataaagttttgtgtgtttgtctaaccacacaattacactataattgtgtaatgagaggcaatggagagatttctattacactatctaattctcatactcctatgaaaattgagtgtaattataccgtgtaatttctaaaacttttttttttaatattaagtactaagaattattattttcttctgtaattactagttatttttccaaagaagatattagaaatttataaataattattacctcatatccagatacatcttgtaattgtattttaaggactcagtttatacttgtaatttctcaaagaaaaaaaaaactcatattaaattaaaaatagtgtaattttttaatttcactaatattaattaaagaagcgctaagttggataaagagtaaagacttgtcagaggtggtggttgaattggatgctttagtcgtggttcaagctatcaatagcttggttcccatgaccttacagtttgaattttcggttcaagattgtcgtttattactctcttctctaaatcatgttcccgcttgttgttaaacgatctgcaaataggatcgctcattgtgttactagaggatcttgttttatgttagattgtacttttaatgagcttaccgctcctgcttccttaatggacattgtaatggttgaacgctattgaataatatatattgtgtttacttgtagttaataagtataagacacacatagtttgtaaacaatgtgagactcttacaaaatatatatattacttaga

SEQ ID NO: 302702 - DNA, 865 bp, Cannabis indica
actggcacatgtttttatttgagctgagtctgtgtacggagctagccagataacgccttccacaagagctaatggggtagaagcagtagattgtttttgagtttgcaacaattgatacgcactcttaaccgagtaaaaaccagtgttctccaaagaccaatactagcagtcaacaccaatcgaagcactcagagggatgctaagaataaactcttgatctctctcagaaaacaagtcttttacaacctccacatcccattccctcctaccaatttgtataagactattaacaataaagctgtcaatcccaggaacctcagatgtgacaaaaggatgagtaccatatggaagccaagggtcacccataatacgcactaaagtacccacccatatactaatctgtgccccccagtgatcaaatccttagtctcatatatgctacgccaaatgaagctcgggttattacccaggttagcagacaagaaattgccatgagaaaaatatcgagctttatacactcgactgacaagagaagaatcgttcatcaacaacctccacccatgtttaccgagaagagcactaatataatcatgaaggtcccaaaacccgagactcttggaatatattttatcaagatctagatttactaacaagtatatttttaacatcctaaacatgaacttctaaaacgaaataaaataaacacataaaaggtatgagaaaccttacagtggttgtagcggaattaaatgactccttccgctaagatctctaacccttgtatcctttctgtagcagagtatcaccaagatctaagcccgaaactccttccttgtgtttggattcttcacagtcttacacacta

SEQ ID NO: 302703 - DNA, 1029 bp, Cannabis indica
ctctctagccatcgagtgggtattgtcctcttctccggacagggctctcgttggttctttagagaggttgggtgtggctctgttcgggggttctgattctccacgtatagactctttggttcgaccttgggtttggtctctagttttttttaggtttacttttatgcattttttatagtccaatttatggtgtgttttaatatttttattatttttgtttgtttttttttttctctaggaaaaatatttggagatcttcaattcggttaattttattgttctgcaagcctttttgagaaaaaaatgagaaaaatataatgaagaaagaatttttttttttttttagcttggattgatttcttatttattaaaatgggtcaaagatgaaatttttagctcttaatttcatgctcaagggttaataatgggcactttcaaagttttaagtagaaaatcaagaaaaagggaaaacttgccataaagactgcatctttgtaaggatggccgccaccacctccgccatactgatgtggtgtgtatctcagataagttctcttcctttgttcttatagtttcacattgaagacaatgtgcatatttaatttgggaaggggaacttacaaacttttaatttttagctagttctttagttttgttgtttgtgttagtgtttatttgtaagtcattttttgtctacattctattgctttttctctaagaaaattatcaataactgtatgcttggttaattgtgttagattttaatttaaaagttctccatgaaatttttaattagcgttacaaatgtaatatatattttgaattttcatatatatacttattaactaggatttgtgctatgatagtttgaatttgatagaacttttgacatttgagacaaaatctttaatgacttatgctttcactactacaatgttagcctttagaggcagttttttcaaccccatttataaaaagggaagctaaagggtgtgaaaatacctgctatgttcgaaattgacatttaga

SEQ ID NO: 302704 - DNA, 2030 bp, Cannabis indica
aaggaagacaatgagcctacaattgaagatcaagatccttgtgaagaagaactcattgaatatgaaatcacaagcaagggtatggatagccaagtggagagtgagcaacaagaagaaaggttgttagatgaaagtgtagatactgtgacattggaggatgaggaagcacatgacatcattgattcgacttcatcaatgatattgactaataaaccaccaatgaatccatatatttcatcaacaccatattatatcctctgcaagctacaaaaggcttctccccaagctcatcatccaaagtcttatgttgttggtgctgacttttgttcaaactcatcgcttgccaagcttgaaggcaagtacaataacaattttcaagttgtcttgcatgacgcttattacgggcgtcaaccgcttattgatgtggcacccaggtaagtttcctttcctttttctttaatgtcacattggggacaatgtgtcactttagtttggggggaggagtgacttaatttttatttttgagttttttttttttataaaaaaaaaaagaaagaaaatataaatagtgatagaaataaaaataggtttaattaaaataagatgaatgtacccggtagaaacaaaaataacaatcttatactatatgaatattgtttcttatatttagtattgctatttgggtgctatcaccataaagatattatacaatgtatccaatataagaatgcacctaataatatgttatcctttaaattaatacttttctaagatatatatatagctagcccctatacatacatgtatataaacacaaaaagacaattaattataactataatagctatatagaagtagataataagtacgtgctccactaccaatgaaatatgatgagtgctatactataaatatatatatatatatatatatactaattaataataatcaattaagaaaatgatcgaacatatatagagtattaatatatatcaaaacaaaaatgaaaattaagaaattaattaacaaattaacctgtggcataggcagagagtgagaatgagaacaatagcaacagccgtgaaatccaacttatcatagcccttcataaattcctctacaccaattctccaactatctggcttttctccaaatgtaatacacaaatactcagtgaaacttcttgcaacagcagcgtttgataatacatactccatcagtatattcgccccggcaaaataccccatatattctcctatatcatatattttaatttaataattattataaaaaattgtctgaacagaataataaagagcgaatcaatcttaccaaaggtgagtcttaaataactgaaggcaccaccagcaacagggatttggacagagaattcggagtaacacaaggaagaaagaagagccgctacgccggcaatgatgtaagaaatgaagacggcggggccagaatagttcttggtgacttggccggtggtgacgaagactccaaccccgagcattccgcctacaccaagagccattagatcataccatttgagctttcttttcatgtcagctcctgatctttggcgcacttggtttagctcttggtctggagtccaagtagctagcattctctttcttagtctgtgtggtgtttgtaaaaaagacttgaaatagtatgagaagaagaagatgttagtactactagtagtagtggtagtagtagtagtactagtttctaaattggtagtagccatagcatgagagaattgtgataggtgaaatggggtttgagggagatggtttaaatatgcattttggatggatagagaaaaagagaaagaatgaaagtgatatagagagagagagagcactatattacttgattctcttatgaaaggattgattatgagagaacccaaatggggttttttcctttagctttattcaaaagtacttatcattacaattatatgtgacattatttgagtattcttttcccttttttgtttttttttcttttcaattttt

SEQ ID NO: 302705 - DNA, 1051 bp, Cannabis indica
tggtattgacttttatgggcacataaatatataacattttagtataaattaaaatttaatataatattatataaaaatatgatatataattcaattcaatacaatacaacttaatacaacataccaaacgagccttacgttattttatttaaacatagtgttatttattatttaatacaatatggttcttatacaatctactaatcgagcttaaataacaagtgtttacgatgcattcccattaagcctacttctgtgttccttttctttactattgcagcataaacgtatttaaatttttctgcaacaaacaaaattctttggaatccattatagacatgcgaataatagtagggattataaagttgagatagttaatgaaggtttattaaaactttgaatccttttcaaatatattttttatgtatgtaaattgataaaataaaactggtcatatttacaaaaacaataacttataatgtgaattaaaagccaaatgctgttaatagatcatctgaatataaatacaaaatggtgaaatctattcgggtcactattaaaaaaacactttaaggtgaaagaaacataaaaaaaataccatgatactctttataataatctagttataaatactgatgataagtagttatatgcatcatgcatgtaatggtataaagaaaagctattctcaaaaaacttgtatagaatgacgttggcttgccaaagtcattaaatttttcaagataaaccaactatagtcgtataaccaaccaagtatatgcatcttgtacaccttcataacctaagatcgttggaacttgcggccattctacaattctctgaacaacaacctttaagcccatccttcattccaaattcaaagataggaagttcctcagagaaactgtaatagcaccagcacgttattcagaatcgaaataaaataataaagaaatgtaatggaattaatgaaaaataatttgaatcaatatttgtaatatgttatttactaaaattgcttggaaatagaatgatagtgatttattttgtt

SEQ ID NO: 302706 - DNA, 913 bp, Cannabis indica
tgtggcagtccaaacaattcacagtgagccttaattacaacattttacataaaaatattacataaaatacaatttaatataataagtagaataccatatagtaataccttatataccaaactaactctaggtgtgttttaataaaatcatgcattgtctctctttgttaattggcgtgttttcaatgttgaccattatcgacacgtggataagtgactcggatccacgttggagttggctatactcgtttctttgcttaatattgtacacgcctcactagttgttggtgctaattgttaattaatattctttctttaatgcatggttgatccacatttttcccataataatatactcaaataaaataatttcaaaattcaatattgaagattcctgaccatcaattcatggtgtgaaacaaactaactaattaatataaatttagtatatagctagtgatggttggtatggattggatttcatgatcaaatataattaataatatttattattacaacgaatcatacatgtgtcactattattgcaagaatcctcttcatttgatcatgtttttaattagttcgtaaattacattgtagatatattaatataatgttaattagagataacttcaattaagatgatatgcatatatgtatggtcgatgctataacaaaagtatatttagcatgaatatgtcctaattggattggtgggacggcatatatgttcaagagtgacaatagtgatatacacaaatcaaaatatataaattaatttcacgtgtaatgaaattcaagtattaacgaaggtgtgtccctggagaatatatacgagtaaattctaatttaaaaaaatatcatcaataatattgtttataaaaaccgaaaaaccgaaaccgaccatcaaaccg

SEQ ID NO: 302707 - DNA, 4433 bp, Cannabis indica
atgagattaatcatgagtgactcaagatttgagaatgttatcactatatcgatcgatcgaacaaggaagaaagaactaaacctgaaagagtagcatgtaaactgtcaaatatgacagatagacaaactagaggagccatgttcattgcataatccacaacttccttgtcattgctaaagaagtaaccgaatgcttttcggccagcaaacagagctgagcttacgataatggattctgagacggaaagaaacatgacagcaccaactgcaagacgagctgctcttggtttgcctgcacctaattcattcgaaactctagtgctattttgtcccagaaaaagaaaaaaagaaaccagttaccaacaaaaatgttaagaattctttcagtaattaggtaaatgttgtgtttggtgtgatttatctattgagaaaaagaaatttgtatgtgttttgtaccacatcgctgatgtgtgagtgacttgtgggagctttattatacttagtagctaccaaaccttaatcccacgataggattttggttttcgggtaagaaaatgttaagaattgttattcaaattaatgcataaagtttttttattatagtacaaattaccttccagctgaaccaagtccttctggtattgtatagagtgttgcaatagtagacatactgttattaaaacaacaaaactttcacttaatgtaagttttcaaattcaaaaaatgtaaaatacacataccgaaacagcggttatagagacataccatacagataaaacagaagtttcaagctgaggattcggaagaagaccagacaacaaagttattatctcaaaagaccaccactcgaggcttgaatcgtgacataaaacgaagaaaagttagacataattaaaagctttgttcagaaatgaaacaaaataaatatgaagaaagtttttaccaactcatagcagcagaaggaatagcaaaccgaaagaactctccaaatccttgaaaaagctcgggagaaattggaactcgagtacttttacatgaagaagaaaatgtcatgtacaaaacgagtaaaatcacattcgaccaatatgatataccgatagaaattgcagctccacaatgttgtaatccacatttgaatactaaggtccaacaaagaggtacatgacaacaaatcgaaacacatgagctcactagcaagggtttgatcaagctttgtgattgaaaataccgaatgagtggttgaagtgttgcataagcgaaaagtgcagggataagccataacaagaattggcctgcttctcttgaaatatgggggtcttggccaatgagtatgagaatattttccatgtagaaccatactagagatagagggatacatactaaaatgaggcagagaattgcagtgttggtttgagtcccgagtttacgatattgcttgctccatatgcttgtccagagagagtttccaatgcaccagacattccaaactgctcaaccatgaaaattcacacatattattgtatgtaaactaatgcaatttctatattctgttttctctattgaaacataagaaataaactacatcataatattatgaataaatgagaagagaaaattacattattgtgaagggatttcttctatcgaattaaattcattgtctatcctgaaggtatagtaagtcaattcatgactgacccgagtatctcaaaattgagggattttttctatcgaactaaatttattgtctatgttaagggcatactaaatcaattcataaacactactagaaaaagatacatttggaaaattaaacaataaaacttcttcaacaaagtatctcaaaattacaacagtgtaaagggatttcttcaatcgaactaaattcattgtctatcctaaaggcatactaagtcgattcacgaccaacataaaacatgtgaaacaccatcttcaacaaagcatcacaaaattacatcattgtgtatggatttcttatatccaactaaactcgtcctctatcctaatggccatgtctattcaattcatgactaaaaacatataaagcttgtaacatctttttgtggcacttataaaaaaaactaataatcattaaattgctttagtagctaatctaaactaatgaaaatcatatcctctatttggttacaagttatgaaaaatctaaaaaaaaaaaacagactaaaatcaccaacatttcccataaatttgagataccaaactagtgaaatcattatcaattgtgtgtaataagatataacttatgataattacaatgatttaagtatctaacctaaacaataatatcatcaattaggtccaacccaaatcatgaaaaatccccaaaattacaatgaagaaaaattcagatgacttacaaggaaactgaagccagaaacagcaccaatggagatggctatggcagtacttgaaagataaagcttaccaagatgaccaaccatcataagagaaattatttgtagaaaataaagtgataaattcacagccaccataggacctgcaatgtaacctaacagcttcaattcttcaataaaatccctaaagaactcaactttctcctctcttttctcattttctaacaaacccttttccaaattttgttcttcttcttgttttctcatcaagctttctcccatggctatggcttccctctttttttctttatgtaaatatttcaaaagtttagatatatattatatttatttgaatgatgggccaggtcttgatagtttgatgattcgccctatttattcaatttataagaatctaatttcgatattgatatcaaaattgttgatttcttcattagattaattttcatatctttgtctttttttgtacttggcatcttacatcacatgatcttggattttctcttaaaaataaattaattaataaataaaaatgttatacatacacatatctagaatatgtgactttcagcggattatttcgagtcatgtggcactatagaattagttggaagattgttgttcaatagctttatagtcatgacgactaattcagcggtatggttatcggttcaaggactaaaggtgctcctacttttttagggtaagacgggtagaacaaatgtctcgagtaccaaggtactatggtattgaagacccatgcctaccaacattgctcgagagatgcttgtattgatatgagagattgcaaagttgttgattgattgctttgtaaagttgttgttcgatagtttgtagtcctctcgactaattcaacaatatggatgtcggttcaaggacaaaaagtgctcttattttttcacagttagaaggggtagagataatgtctcgggtaccaaggcgctacggcactgaagtaacccatgcctaccacattgctcgagagatgcttttgttgatatgggagagctgcaaagttgatgatcgatagctttgcagctctctcgaccaatcttacagtacaatatcacttaagaaggcatttttattgatatgcattttttaagaaatgataaatgatacattttaaagggcctattgggcaaattttatgtttttcccttatacctaaaagatgtagagcctagtagtactatttctttcaaaaagaaagttcaatttttttttgacttttctgttaaaaataaatatataaaaatgctatatatatatatatatatttaaaagataacttttatgggactattacgaaccacgtggcactgtgaaattggttggaacgaatgtagagctgatgttcaataattttgtagtcctcctcaccatttcaatagtatgattattggttgaaagacgcaaggtgttcctacttgttttttcaggataagaaaaaataggaaaaatacatcgggccaatgttcgagcatgaagatgctacgaagttaaagtaactcatgctactacattgctagagagatgcttgtattgatatgggagagctgcaaagttgttgatcgatagctttacaactctctcgaccaatcttatggtattaaatcactcagaaggatttatatatttaaattttattttggcattataaactaatcaatatcttaaataattataacatacatgaccatgagaaataaaaatagactaataagtaggagtgtttgcggtgcgggtggtgcggtttttaactattttttcaaaccaacccgctgttatattatttataataatataatatatagattaaatatgtgtaataaactaataatatgtaacatatgacaatgtatattagttgtcatctttttgtaacatttgggagttacttgttactatgagtaacctccaccatcatcaccaacattaagagtgtaaaaagatgttacacctcttaatttgaaattcttaatgctataggagttat

SEQ ID NO: 302708 - DNA, 5402 bp, Cannabis indica
aactggagttttatttagggcataaaacccaacaaaaagttaggctcaaagtaatactggaagctccctcaggcctaaagattgaagaatacatcccaatagttgacacatgtaccaataatgaagctgaatacaaagcatttatttacgacttagaattagctctcgcaatgggaattaagagaattcaaatgcacacagacacatgttggttgtccattagatgggaggaaagtttgatgctaaaggctctgtaatgagaaaatacattgagcttgctacagatttgcaagacaaatttttggagtaaaatacaaggggtgccaagagagatgaatcaaagggcagatgaaagcttcactcgtatacactgaaaggatggtgggtatacatacgaaggtctcaagggaccttaaaaagaagttgcaaccttatcaagcttttcaaataaaagaaccaaaacctttatggataaatccaatatttgcttaccttcataaaagagagctcccaaaggataaagaaaaatccaggaagctaaggattaaagcatgcagatatgtaattttggctgggaaattatattgcctgttgattgatatcaatgaagaaatgtgtggtaataattcaagaaagatgactgaaagcattaacaacaaggtattattggtcgtacatggtggcaaatgctactttcaatgaaaacgatgtgataagagtcaaaggcatgctccagccatccacagactagctcaaaccctaaacaccattatagttcaatggtcttttgctaaatggggaatggatattgtaggagagctttcccgagctgcaggggcaaaagatacgtgctcttagccacttcacaaactggcttgtgggggaagcatatgttacagttacgatggcaaagacagtagcctttatcgtttctagtacaatccattttctatatgagaatagttattttgtattttgtactatagcccaattatatttatttttccatgtgaaaattgtatgttttggttttttttcctcttttcttatatattaagaagcattatatgtattgctaaaaaacttcgtaaaattaaagaaaatattatacacttgaatcaagttaattgtgttttttatattctattcgtgtaatttttttggacattgaaaaaatattgccataattttttacagataattattgatgttcgaattaagtggcatcttctactaatatgtaactattgaaataattttcatatatttgtatatatatatgatatatcatgtaggtaatattagattaatataattattttatatttttctttcacttataacataattattaaaaaagtaagcaatgtatattatttttaatagttaatatttacatagaaacataccatgttgtttaataattagtattaattaatacactattaactttctaaccatcataaaactaaaaaatattaaaataaaaattattgacaatatacttaaattcatttaatacatgtactataaattagtcaaactagaattgagaaataaaaagttaattattctttaaattgttgattgtattttttttttttttccaaatttaattgtgctatatatttcatactaatttaaagtaatttaaccttagaggttgagggtcttaaaattgaaaattaatgtgtatgaagaatatgtaatgcaagactctcatcataaaattacttacttttgaggtaaattcttttactcactcttggcacgataatattttgagaattgagatgctttatattactacttttccatttatcgttattattctttttatattaatattattactaatagtttaatacaaattatattataaacaatagtgtcatatgaataaaataaaatgtttcatttgaaaattttagtttcaactacagaccatgaattttcttttatatatatacattattagtttttgatcttttcattatatatacgtatatattattgtatatacatacatctgattatataatgctatttaaatatgttaatgtatctaaatactgaaactatttactaattttcatagttgtattaaaaaaatttaatatttcttttttttttttggaaagctttctttttgctatttgatatatttttttggttttttttttctattttttataaaaaaaaatataaaaaatacctaaacaacggctaaaaaggcagttttatttttacaaatggaattgtcacacattgaggcttggttgacactttacagaagtgaaaaggaagactttgctgaggcacatacatgaggatggtggcggaattaaaactttgtgaaagattctctttttagagtaacataatgaaaaataatagtaaaataaaaaaaatatttcattttgaagtgtttatttttcaaatatgaggaaaataatatattgtatgatgaaatttttatatttttatcataataagacaagaagagaattaaaaacgtttaaaagacattaataatttttaaatatatgtataattagaaaattattagaaaacgtaatcttgcaatctttacctatacaatacattttttatatcaacatacgagagactcaactaatgaaggatgggattcttttttgcgtgttcgtgtcaaactttctgttgctaaaccactaccttgaggacaaatgattcgtttaccaaaagtaatgggtgaattttagattgagtatcgctatgaaggacttcttgaattttgctttgaatgtgggtgtcttgggcatccatttgaacaatgcatctcttttatggacagcattgacaaacggaatgatgacgatctttcttatggcccatggctcaaaggtgctaggcttcctacaaataattatgatcgttaccgaacggatttcagtaagggaaatgcttggtcttttatcacaaggatggcttggaagactttaacaactagtttgccactgttgtcttcaagaatttctgccaatcccgacccgctctttaaaggtgaacattcaactcctcatcaaactttaaccagaacaaatcaccaccataccaagctgaacaacataccatttttacatacttccaacaacagtcacacatttgcaccatcttcatctcctatgccatatctacatagtgatccttcaaatattaccatcgccaacaaccttgccacacaatcactgcccgtcgcccttattacctgctttaattcatttgttttagcatcactaacaacgactaatgcccctcccaacatcgcaacacaaccacatataacccctgcccaacacttactaacacctacgagtgctttttccaccataacagatctcacacacatctacataccaaatgtagggacttcatcaccatcttcaaactgctttgcaacctatcctccaaatgctaaatcccttcctatgaccccacccacaaaatctcttatttctcacattccctcatgtccccaaagaacttacacaccagcaaaaatgtttatctctactggtttttcccaatgctcagtcactgtccttgatggtaacaaggagaacgccccaccaaacctcactcctaaaaggccaaatgacacttattctatgaggaagatgcttaagaggtgtcgtggtttcaatggatcaacctcttcccctcagtcaacagaagatggttcggagagtcaagtttctactggaatggattttattctctcaaatgactcaactgcggaggttgctttgcaaccccacacctcatcatgaaaatcttaagctagaatgcacggggtttagggaacccgagtgcattcagacatctatgattgcttgttcaacaataatctccctatgttttgtttctcatggaaacaaaacttgctattaatttaattactcgtattcgtcaattactacatttctctaatgggcttgaatctcctcgggtaggatttagttgtggtctcatgctcttgtggacagaagatgttgatgttaccttactgaatttcagcccaaattttttcgattgctatatgatatttaatggcagcccaagttttcatttcattggtttttacggggctccggatattgccaataggtctgcctcttggactctttttcaacgttttggtgatgttgctccactctaatcttggcttgctattggagacttcaatgaaatcctttctaacaatggcaaatcgagtggaggacttcaatgtgagtcccaaatggaagcctttagaacaacattgattaaatgtttcatgcaagagggaccttataatggtgatcatttcacatggattaaaaattgtacgactttgcacacaatcaaagaatgcttagattggtgtttttcaacaaccaatgggagtctcattttcacatgccaacagttgaacatttagactactaccactcaaaccatcgtaccatttctgcaactttttcttgtaacttaattgccgatacaccaacaaaaaggaggagcatattcaaatttgaaaagctctggttggttgactctgaaagtaacccaatacaaccgaaaaaaaatctaactaaaagagaaccaccattaattccggtaacttcaccttagaagacgaccagaatcaatcaaaatgacaattgttttgaatttataaaaactactacaaaactaaaattcaaccataaatctagtttaatgaaatgcagatctcaaaatgttgaactggagttcctaaaaaatctaactcaagtataatctaaaacaaaaaattgcatcaatattatagttaaatatttattccgatgtattttcgttgttttctagatttctaatggtgaatttgttcatactaaatcgcgaatagggtagtaaattcacatgtagataaagtcacgtacgtgtaaatactgttctgattttttatgtttcataatagttacattatagttgcataaatattttgctaactctctgaaacttgacacgtcaattattacaaattgacaacgatacaatggattttatcatatttgtaagtgtttcatatcatcaataaaatacaaagctcttaaaaaagcttatataacatatttatttttactgatgtactaaattagttgatataaagttggtttacagaggtctaacagttatttttacacatattactattaaggtacaataaattatcgatcagtgacaaaaaaaaatactaacaaataatttcttatagattcacattcacatttaacatttctagttggaatttttctttttttttttgtatttaagtcgttattatattacatcagcataacctgggtacgtctaacccacggacctccaatacacac

SEQ ID NO: 302709 - DNA, 4566 bp, Cannabis indica
ttattattattattattattattattattattattattattattattattattattttcaattaaattattttaattttaattttctgtgtaaatcggcgtctctgcttgtgtgttcccttaccactgtctctgctagggttacacagtcgccaacccatttcttcttcttcttcttctctttcctgttacactttttctctctctctgacttggattcatcactcgctctattacccgagtcaactcgttcgaagtaagtatttgattgtatttgagtttggtgtttttttttggttcatatgctatctaacagttaaatctaatttgattatggatctgtgtgttttgatccgaactctgtgaatcttttcgaggttttgatttttactgtttggttggttgattggaaaattgtgaaatatggagagtgtttgattaaggattgttcgttatttggtttgtgtgaaaatctgattcggtaatggtttttttggttttgctttcggaggataggtttttgtgtttttgacagtttttggaaagcgcgagaaaattatatgattagggttgttcgttttcttactcgttttggtaattttttttattaaatgttttgtttttggagcaatgggagtatattgtgaactaaattatgctactaatatcttagattgaatcgattgggtagtattttcttttcagtacagatctttaggttctgtttggattgttaagcgagaggaaaatcaattgtgggaggatttgctaaagtagaagaagaaaataaccgagaaatatattattctgtgataatttatctttattgtgataattcttcccatcataaattaagttttggttacttcaataaatatgtgtatgtattaagtttctgctctaaaagatatagggttaaaaagttcatgggcaaagattctgacttgttgatttcgatatctgttttttttctcaattatttggtgagaagagaatttagtgtcttactgtcatatatcgttgtcatcatttgattcctttgacaattcaatctttgggttagttttctaattggttagaacttgggagcagagttctttatttttctacaacttggatcctacttttataagattttcttaagaaactaccattattaggtcgtaacccatggtatggaaaaggctacaactttttagtagacaaccctacttttctgttttctaatgttacttttatattaagttaaagtcttccacatgtgctttgggtgttattgtttgtatctcagcttgggtgtgtctgtgattgatttctttctgcaagtggaatcttactagttactataggttgctgtttcgctgttgttattttcataatttcatctagttattaactctaaaatcctattttacaggtctcctgattgtaaattgtaagaattgtagatgttttatagtctaatctgacaataatatgcccttttaaaaatatttatatatcaggttcaaatggcgatggaggtgacacaaatccttttaaatgcacaagccgtggatagtggtgtccgtaatcatgcagaagaaaaccttaaacaattccaggagcaaaatcttccaagctttttgctttctcttgctggcgagttagctaatgatgagaagcctgctgagagtcgtaaattagctggtttgatcctcaagaatgctttggatgccaaagaacacaacaggaagctcgaacttgtacaaagatggttgtcattggaccaacctgtgaagtcccatgttaaagcttgcttgttaaagacccttacctctcctgcccttgatgctcggtcaactgcatcgcaagtcattgcaaaggttgctagtattgagttgccacataaacaatggcctgaactgattgaagctttgttgtcaaatactcaccagcttccggctcacacaaggcaagcaactttggaaactcttgggtacatatgcgaggaagtttctcctgatgcgatagagcaggcccaggtgaataagattcttacagctgttgttcagggcatgaatgcatctgagagtaacaatgatgtcaggcttgctgctactcgtgctttgtataatgctttgggttttgctcaagcaaatttttccaacgacatggaacgagattatattatgagagttgtttgtgaggccacactttctcctgaattgaggattcgacaggcagcctttgagtgtttagttgctatatcttcaacgtactatgagaggttggcttcttatattcaggacatttttaacattacagcaaaggccatcaaggaagatgaagaaccggttgcactacaagctgttgaattttggagttcaatttgtgacgaagagatagatatcttagaagagtatggaggagaatttagcggggattctgacattccatgcttttattttgtaaagcaggctctcccggcccttgtgccattgttgttggaaactttgcttaagcaagaagaagatcaggatcaggatgaaggagcttggaatattgcaatggctggaggcacatgcttgggtttggtggcacgtactgttggtgatgacattgtcccattggtaatgccattcattgaggagaacatagcgaaaccagattggagacaaagggaagcagccacatatgcatttggctctattctagaaggtccatcaccagaaaagctcatgcctcttgttaatgtagctctgacctttatgctcaatgctctgatgaatgatccaaataatcatgtgaaagataccacagcgtggacacttggaagaatttttgagtttatgcacgggtcaactcttgagacaccgataattacccaagcgaattgccaacagattatgacagttcttcttcagagcatgaatgatgtacctaatgttgctgagaaagcttgcggcgctctgtatttcttagcccagggttatgaggatgtggaacaatcatcctcaccattgactccatttttccaagatattattcaagctcttcttaatgtgactcatcgtgctgatgctggagaatcacgccttcgaacagcagcctatgagaccttaaatgaagttgtgaggtgttctacggatgatacagctccgatagtgatacatttggttcctgccattattacggagctggaccagacttttacggcactatgtagttcatctgaagagagagagaagcgcaatgaacttcagggtcttctctgtggttgcttgcaggtcatgattcagaaactaggttcatctgaaccaacgaagagtagctttttgcagtttgccgaccagatgatgaccctgtttctgagagtattcggtagtaaaagtgccacagcccatgaggaggctatgcttgccatcggagctcttgcctattgtacaggctctgacttcgcaaagtacatgcaagagttttacaagtatttggaaatgggtcttcaagatttcgaggactaccaggtctgtgccattacagttggtgtggtgggagatatttgccgggcattagaaggtagtatattaccttattgtgacggtataatgactcaactcctcaagaatctgtcaagcaaccagttgcaccgttccgtgaagcctcccatcttttcatgctttggcgacattgccttggcaattggagagaatttcgagaagtacttggtctatgcaatgcccatgcttcagggcgctgcagagctatctgtcaacacatccggtgctgacgatgacatgatagaatacaccaatactttaagaaatggaattttggaggcctactccgggatttttcagggattcaaaggctcagcgaagatacaactactgatgccttttgcacctcatgtcctacagttcttggatagtctatttatggagaaggacatgtatgctcaaatagaatttgtttactttttgactcttaactgtactcttttttataatcgattcgttactcatgatttatcttacttcttttcagggacgatgtggtgaccaagacagccattggggtccttggagacctagctgatacactgggtagtaatgctggtatcttgattcagcaatcactttcaagcaagactttctaaatgaatgtttgtcgtcggatgatcatttgattaaggaatccgctgaatgggccaagttggccatcagtcgagcaatttccttttgaggctgctgatactcgggatatttttctttctttgcatgcattgggtgtctagagttggagtctgggattgcataccatgagtcaggtcatcacatttttgggaaaatgacatttggggggtgttggtgggcgagcgcagaaattttttcgatcaacagctcggggttttattttatagttttctccgctatgtttgtcgtggcattgcccggtgggtggcatggcaatgaccgtgttgtgttttttctgccaccttggcagaaaaaaatgaaaacacaatcgacaaacatagaacaggagaaaacgatttggagaacgagatggaaaatattaaaccaccttg

SEQ ID NO: 302710 - DNA, 1456 bp, Cannabis indica
agagagagagagaggaagagaagagtaaagaggttgatattgattattacgaaaaaaaaaaaaacttaattaataaaccctaacttatctatttcagccttaattactagaaacctacgaaaagacaatatcccataaactaaataaatgaccatagcacccaaaacttagctcttaagtaaactataaggttaggagaagtttggtcataaccaattaccttgacaacgagaagaaccactaaaaacattttggtacgaccaaacttcattctattgccatcgtgatattcttagccaatcgatcgagtttttatggtcgtcgaacccaaaaatattttatttcaaaaatgacatatataatacttatatatcctaataaaatttccacaattaataaattacgtttatttaattattttcttaaaggtcgctaattatttaataattagatttagtaagattataatcttaccttaattaaccatcacgtatttaataaagtatgcctaattaaacataattactaggaatattgcaaataacatatttttgttatgtatttaatgagtgaattaatttggaagtccaaatttcactttaataaaataaaaaaaaataaaaaaaactattaaccactacttcaatgtggtgttgagcattaggtgcctagcactcttgtaatgtgtaacattattattggtgcaatttaatattaagtctcacttattttactttaataaagattatataaaaccactaatcaattataaggtgatcacctcatagagttgctagacactttggtactccttaaaaatacttaattattatagaaacactacattagtcatattgtatgcattaccccaaaatagaacatgttcagcccatgtgagagactacatcggctctataaatatgtataaatataaaatataaagagaaaattgttaaaaagtattatttgtgtctaatacttttttcaatatcatactgctatcggtgtaattgagtcatataacttaagaaaataatttttaaaaagtgttaaaaacactactgatcgtgaataacaaaactcatatatgcatgtgcaagatatacatatgaaactaaatagtgatgattgagagcggctaggtcgatttgcacgcttcatcactactcaaaataaattctaaaattcaatatactaattcagtggtaatatatattgatatgatatcacttttcacttgcgcgtaagtgtgaagggccaacgagtagtgtgacccacccaccttagcccctcaatagaaaatctctataaataaaaacattagaaatttttttggttagagcttgagttttactgtacagtatttcttgtttttgttatataaaacaaaggaattaatacatagaaaatataaattgatattttatttacaaaaatacttctataaggtaaagac

SEQ ID NO: 302711 - DNA, 1126 bp, Cannabis indica
tggtgcaattaagtatcgggtcccatatagtttaatataataatttttatagagtatcgctagccaattgcaagtcgacacatttagaaggtgctaggcaccactggtgcccaatagcaatgctctttctgaaagtatgtatatcaatagattcgcatttaaattgtttaatttttgttgttacttggaacttataccatcatgtttttttcgttgcatattagaaaatttgttcctaatatagcatttaatacttcaccaaacacagatcctccattaaaaatgaatatgtcaatatatacgacttgtaaaaaattaaaatttatatatctagtagagttgaaacttgaaatcacctctgaataagcaagaatataattatctcgctctcttaagatgttataaaattgaatttgcaattgtgagagggtgaaataataatgcctatgttattctattctcacgctcgtttagtacataagattggattagattggtttggattagacaagttaatttgtttaatgcagtgtttagacatgttaaaagtctacataattaatccaactaatcctatctgtctggaattatttatcccaactagtaaggtgagataaataatctcatacatatatttaaatttaataagaatattaatgaaagatgctatacccgaaattcagaaatactccaaaagctgacacgtgtcctacagaaggaaaatgaaacaactctaatgatataataatgttatatcattaaatgcagaataaataactcgttattattaaataaaagtttgatcgataacattcaaaaactcgttgactatatagtcttaagcgagacaagaataataattattaaactgagattgacgagacatatgtctgcctcgaaatatacagacaagaatgggatattcatatccactcgagcagaataaatgtaataacatacaacagcctcgcgttacacatagcgagacagccacctcgcaataatgattcgaatgaaggagtgcgacaaggtgaactacctcccaatagttagcattttttcttattaagatggacaaggaggataaatcatatgaagcgagatacaaccttccaagtcagcagct

SEQ ID NO: 302712 - DNA, 7404 bp, Cannabis indica
tttttttttttttaaatgtgattgatcattcatatggatttcttctattaggatttacttgtgagtccttgttatgcattatcttttttgccaatgaaatatttctgctatatgaggacatcttctcatctcatgttaccttgaactctttcatatattatttttagtaacgtttctcgtttcttctactcaaactatgtgaataagtaaacgacaaacttagggaagatttaggaattcacatttcaatgggaatgctgtagaggtagtttcaaaagactattgttgttttgtcgaaaactttgtgaatttgaaagtttaagaacaaatgagtaccgtagctcatggtacgttgtaatttgaacaaatgtaaaaaatatcccataattgtaagggaaggagtaactgtgaaagaaattaaacaaataagtgattgacttcagacttctgtagagtgcataaaaatggggttagtagataagggttggtggcttagacaaattttaggtgtttgtgatgatcatgattccctagatatgttgaagtctgctgtaaaaataagatttttgtattccacatgggtttcccaccttgtttgagtactgcgagtgtcattttatactttcaatcaattaatctcctatttttactatgttgtataacttattctctctgggtcgtatgaattttgactatatttttataatatagatggaacttgaggctgttagaaatgaatatacaaatgcacaactagaatgtaatgccgctgatgaacgctctaagttactggcttcagaagtaatcagcttagaggagaaggtatggttctctagttttcttctgacttctttaagaaaattatcggcatggattgctgtaaaggaatttggtttctacctgataatattgttgtggttggaaattatattactatttagaaacacatttaattttgatttctatctcactgattagtttatgttctgtaatcttcgattagttgcattttatacctacaaggctattacgtgcatggttgtggaagtacatatgtgacgctgaaagctttcatacttaatgttttttaacacgactatgctctcaattgtttgtgtaggcacttagattgagatctagtgagctaaagcttgagaggcaattggagaactcacaagctgaaatctcttcgtacaagtatgattttttttctcttttttattgcggatgagattttatgatttgtgacttgtttatgttttttatctggtccgtttgctggcaagatacatctttgtactggataaacctttctacagtcaattatttttatttaacacaatcttttcatgaagtaactgttgaatttgaaatgttacaggaagaaaattgtctaccatagagagggatcgtatggacttgcagtcaactattgaggctcttcaagaaggttagtgttataatattatgaattaaggtgccacttttgtcactttatatgctaggttgtgctactaatttatgccaaatgagagtggaaaaagcaagggttaattgaaactgctataacagttatgacaaggttttagaactttacaaatttgcatttgtattaagggaatgcaatgtgttcatttaaatacttgaaatttagtttgatgatattcttatatgtcgcttcttgttatttgggcagagaaaaagctgttgcagtctaagttacgcaaagcttccactagtggaaaatccgttgatattacccaaagtactcataaaaaagatgaatctacttctaccgaagatttaggtaataattcttacattgagaagtctcattgggatattgctgtttacatacatttcagaatattaattgtgcttaaaactaattttatcatgaaaaaatcttagtttgctatttcttgtctgtgataacagcagcttgttgtccatgtgataaatatgctgttttgttattaagaataactgtagattactggttcacattatttttactcttttcccttgtttgggtgtaagcttactagtttgaatccacacagaaaatgaagataccaataccaatacctcgggtccggaagtgcaggatacacctttcattggaattgatgcctccagttcttcgatgttgcctgacaatggttattcaaatataccttctgatcagatgagaatgattcaaaacattaatgcattaattgcagaggtactgtttgtctagtattttctaaaacggttaatttcttgcatgatatgttatttttctgctcagattatattaaagctcagacattcgatgatgtttgattcatagttttgctaactaaataactaaatttgtctcttgcagttagctatggagaaggaagagttggttcaaactttgttgtccgagtcgtctcaatgttcgcagttgaaggtaatgcagatatgatttttctctttctttattggttaaagctttgttggattaacatatttgctgcttatgatttttcgatgagtgaaggagttgaactatgagttgacccgaaaacttgaagcacagactcaaagattagagtttttaactgctcgaagtatggctaatgagaatatacctgcaaaacaacctaattctcaggatgttcgcgagaacattcaatacgccgatgaaggtgacgaggtaagcaatctggtgaatcacttgaaaacataaattgggcattttcgaaaaactattttcagtttgttctttttgtactaggtggtagagagagtgttgggatggattatgaagctgtttccgggaggaccgtcgaaacgaagaaccagcaagctcatttgagtgtcaaacagtcaaagtagtacagcaattgagagatagtaaaatgaaatatgtgtatattgtgatcccattcttttttccaatagaaagaaagaaagaaagaaaatgaggttgtttttttgagagagagacatattattattccccttttgttggttaatctcacgtgtcatttgtttttaactatgaacaataaagaaattgctttattgacatttactactacaacaactactattagtctattatatctttagaagtaatggtatattggtatacactatattcaatataatatatatatgggatgagaaattgtattattcaattgttattaattagtataacaattagtacttattttgttacttattgtacttctatataaactattcttcattcaatcaatcaaatatagatctttattcctataatagttgatttatctctctttctctatctaaaaacaatttcacaaaagagtagtattctagatttgagataatttcatacttatgccagcaacaaattgttatgaattatttttaattttatttactttaaatattttatgaattttattgttatattgtttgaaatatttaatttttttttttaattgtttattaagattacttagtatacattttcttatacataaatttaaatatatatttaaaaaatatataattgaattgtattaaaattaatttttatttttattatttaatttaataattaagtaatagcaactctaatgcaagtataagtaaatattgcattgcaatttgcatgttattaatacttagtatatattatggttactatctgtggtgatcgcgttccacctacagaagcggtctcattccgtcttaattgagtcatcagtatatatctcaaaaattctcattccattaaaaattacactagtctcccaaaaatcaaaacataaattctctaagctacccaacccatagtaaataattagtgattttaatttagatttttaaacaaaaataattttacaataaataaataaataaaaattattacttttaagagagtaaaactactcaaactgtcataactgtcataaataaaacaaataaaataataataataatccccaaataatgtgtggtggtggtgattggtgaagtcctttttgctctgcttcttcttcttcttcttcgtccatggcttccttcatctccaacctctcttctcctttctcattctccattgtttcttcttcttcttcccctaaaggtaacacttttcactcttctcttctctcttttctatgtactgattttgtatgtggaactttccagatgggaagccaaactcagtgaagcttagagatgattggaggcaacgctccaaacccattccttctggagggacttacccagctaaagaccattgcaggttctgtttcaagatcacttttttagccatacccatttctccatttttgtttatttttcttctgattatggcattttatttttccgtttttttgggcagtcgttgtgggttgtgtgatacttattatattgcccatgtcaaggatgcttgtgctttcttaggtgatggcatgtctcgaattgaagtaagtaggaactcaaatttatactacttttttcttcttgttaatcacacttattatactcaaatttaggaatgtttatgtagagtaccatgttagagagtctcatatcgataaataatgtgtgggaacttaggttgcatttggctggaaggaatgaaaaaagataggaataggaatagaatgaaatgaaatttaagatgtataaaaaaattgataaaaaaataatgaaattttattcattttatattggaatgatgtttttttttattttaaaagagttgtcattctaccaaaatggtagaaaagttattctattgaaatgacatttcgattctttaaaatgtaacaaaacaaaggaattgaataaaaattgattcatttccattccattacgttttataacctccaaccaacaaccttaataccatatataagatacattggctactctactatagctgattggttttgagataaaattccatacatcttaccgtacactaaaccttatgatattcaactttctcaaccatactctgaaaccgtatataaatagcatattattaatatctgagacatgtttatgtagagtacccaatactatgatttttgttttgttttttgtttttggtttatgacttagaaactaaactagcattgtttgttacattggtctaaatcagctaaaaatgtttttgtttgactcccaagttatacactctatttcaagtgtggttgttagaataatactaatttcttttcatgctttcttctaacttagagtttggaacccattgtacatgggaggggaaggaacatggattccttagatgagacttacttcggtgtctatgatgagctgctatatgctcggaaaactaagcctgtagaaggtaagttcttctatacattttacataatgatcacaagttttttgtgtttctgacttttgattctgtctactgcattactgtgttcgaatcacaaagtcaacttatgttgttcaagtttaatcccttaattgtaggtgctcaatggactggtatagtaacaacaatagctatagaaatgcttaaatcaggcatggtagaagctgtaatttgcgtacaaaggtgctgacacagaagtattctagcttgaaaaataccgaaattaacagttttttgtgccatttgtctgagtgtttgtcattatttttttgattgtcacagtgatccagatgacaggttcaccccaaggcccgtcttagcaaggtttgcgttattggttttaaaattcgttgtctacacatttggtttagtttcattaagtacatatatactcttatgtattacccttatccttttttgttctttcctaggacaccagaggaagttctagctgctaaaggtgttaaaccaacattgtctcccaatctgaatacccttgccttagttgaggtgtctgtgttcttgtttctttatcggtatcattgaagtgatataaatgcttatctctgcatatcttcatcttctgttcagttataaattcagtgaaaattatgatttggagaaaacaaaaatattgtatatggaatataaatttttaggctgcaaatgaagtgatcttattttatgtgaaacaggctgcaaatgttaagctccttcttttctgtggtgtcggttgccaagtgcaaggtatgctttgtatttcgaataaaagtgtgttgttttacttcttctctgttgtgacttgtaccattgtaatgcagagtaatttcttaaactgcagcattaagagctgtggagcaccacttaaatttggaaaagctctatgtgctgggaactaattgtggtagttatcttcagctgagatccttaattcagttactctgtaagaaatgtgttatgtggtgttgattggataagctaaactaattgctgaagatttaagtgtcgatgttgaagaaaagtacatactcgaaaactattgcatgcatgctcttaatcagaatatttttgcctgtaaaatgagatgaatcttctttggttcatacttaacagttgacaatggtactcgacaaggacttgataagtttctggaggctgcaagtagtgaacccgaaacagttttgcattatgaatttatgcaagattataaggtttgtattacaccatcctttctgtacttatgaccatttaatatttcttaaatactgaaaaactgttcttgtactttaaaaggttcatttgaagcatctcgacggtcacattgaagaggtaacaaacacaatcctagtaagtttaatttggtctttagtctcccattatactgcttcatccaatttcaaaatgttaatcgagcaggtcccttatttctgtctacccgcaaatgacttagttgacgttattgcaccatcttgctataggtaatttcttgttatgtattttgcaatgcccttggtgccattttgatactactaagcagaaatcaaagtgttaactctcatatcagtttgtgtcaattatattagccaaaagtgtctacacaacagctcttagttgttattcaatttaccataagataaagaatcaacagaaaaagaagctttttttattggatagttccttagtgcctacttcacaaacagtggcattttattgttagaataaataggatttatcttccgaactattcattctacttagttatgccctttctgttagttttaatcctacatggctaacgaaatgcttatctgacattttgttagtgccaatatggcatgtcacgtcaacgccacatgtataaattcaataaaaggataaataccattttggaccctctgttttacaaaagttaccaattggaccctgtgttttgttaaatgacaaaatgaaccctgtattttctaaaatagtacaaataggaccctgaattgattttttgtcaaaataaagtt

SEQ ID NO: 302713 - DNA, 4114 bp, Cannabis indica
ggctagagatctgaatgaaaggagtcataatattccgctgcacccactgtaaggttctctaaactttatatgtgtttatttttattgttttagaattcatatgagggtgttaatcaaacatacttgttagtaaatctagatcctggtaaaataatttccaacaccttctcaccaagtacactcccatccattcatgcaaatttacaacaaatacttctgatggcaattcagccgtgccatgaacgctacctgggccttccatcttactcaggcagacacaaaaaatttatttcgggggattaaagaaaacttttgaatcatctttctgcttggcaagagcaattattctcagttggtggcaaggaaattctacttaaagttgttgcccaatctattccaacttacgcaatgagttgcttctgtctctctaaatcccttaccaaataaaattaaagttttgatgaatatgttttggtggggttcaaaatcttcaggcttaagaattaattggaaaacttgatttgctctctgccattctaaagtcgaaagaggattgggttttaagagttttgctcactttaatcaggccttattggccaagaaagcttggcgtattttctctaatcttacttcgctactgagtcgaatactcaagccaatatatttcaagaacaactctttcttagatgttggtcctagatcgtatccttctctaacatggcaagaaattatttgaaaagagttacttgctaagggtttaagatggcgagttggtgatggtcatagcattttatgtggatcagattcgtggctgcctggattctcaaattttaatccattaatctacagaggtattgatactaccatgaaggtctctagtttgactacggatagtcgtcaatggaatctaccaatattgcagactcttttccttgattcagatgttcaaaaaattcagagtattcctttgacattaacatcctctcatgaccaacaaatctggcattatgaatctaatggcacatatacaattaaaatacgctactatttggctactcatgtaaaggaacaacaaccatcagttagtggattacaaaatcaacaatggtggaagaaatttttggtgctaaatatcccatcaaaggtcaaaatttttctatggagagtcatccaagagtgcttgcttgtggctgatattttacatacaagacacattgtggattcccctattccttctttatggcaccgtgataaagaaacgattccacatgctctatttttttgtacccgtcccaaacatctttggaaagactctgactttgctcttagtaatcacataacttggcatatgaatcttaacaagttgtcgcaataagtttctgcatcatgaactctcttatatatagagcaatttgtaacaatactattgaatatttggagtgagaggaataaagaaaagcataacaagaaacaaaagccacgtgatagtccatgaaatcaacactgctagttcctcttcatcactacatgttgtcaacaaagatttaccttggatgaattcaccctcaggaggctgaaattgaacactgatgctacggttaacatcatgaataacttctctggtttttgtgtggttcttcgtaacagcagtggaaatattgttgcagctatgtcgatgccttttctaggtacctttaaaccgaaagttatagaagcaatggttctaatgtatggcctgcaatggcttatagatcttcatttaccaattctctatattgagaccaactctcttttggtggttaaaggattacagtcttctcacgctttcaattctgaattccattgcctgttggcgaatatttctctctcagtgtccaacttctctagagtgcagatttctcatgtgtttagatctgctaaaactgctgctcttttattagcaaagtatgctctttcggtggactctatttgtacttggttggaggcaatacctccacctataaatgcttgttgtgatcaactctgaatttaatataatatgcatttttatctaaaaaaatatagttgtttttttatataatgaatacaattaatatgtaacacattatatattacaaattatactgaattaattgcctatactagctaaatttatatatggtataaattataattataatttctgataataataaaatatatagaattataatagactacatcactatcttaattttggtatatgaatctttgtttgtattataatacttaaataattatatcatgttttaaattttatatactcaattaaattggttacttaatcgatcttaaactatacaatacattttaaaacaatctttgacactaaaagaagatgaataacaactaagaagaatataaaatgaaaaatttctatctttatataaagaaatagaaaaatctaagcccttaataggattgaaatattttccaaaaaagaaaagaaaataataataatagaatttaaagactgttacatttagaagaattaatcaagcaattccctaaaattagatataattagtgttgacatatctaaatgtaaattggttcattaaattataatcaagaagaataaattttcataattaacaactcaataaactaccatacaagtatatatacaaataatttttagatatgaaagtttggtatatctctcctctaaagtaactactattttaatgattatatttaatagagtgctatagatatagtgtatatacattttgtaacctatatacataaaattaaactctaatgagtatataacattgtctaaatttaacaaatactaaaatttacaataaatttgttacaaaatataacatagactaaaatttaggtcataataaatattccttttattttgttttttttattacacataaactaattaataactttttatatttttatttatatatttagtataattttttattagaaataagaagccttttctcttggcccaataccgacccattaggccttacttttactatgtatatatatacactttgctgtgaaaataaaccctacaactattatttccaacaaccacataatttcggctaatactaatgaaaataatgagtcttttctctctaaaatggtatcagtgatgtaccttatcttcataaaaccctagccgcccccttcttcattaccacttctctctcttctcccatggctccaagaaccaaaattttcaccattgtcgtcgcctccatcagtgaagctccttcccttccacttccatcttcgaccgtccaccatggacaacctccatcgtcgacagctgcaactccaacgttgctccgcccgtcacttctcctcttgaaaactcaatgtcggatctgcatggtgctccctccttcatgttcgatccatcccctactggtgtaatcggctctgatcccgtctctgatctccccagtttgggaccggttgaacaacattccactgtaccatttggttcctcctctactccggcattgacctccataacctcacaaattcacactacaatgcttcccccattttccttctccacatcaacctcggttcaaacggtcccttcactggcatcatttttttttcggcaccaccacggcttcgacccaaccacagcccacaccgttctttaatggtaacaatccctttcttagaactccaagctatgtggcttacactgacaactctagatttcttgctaatcaaggcctatctcgcgccttttatgatcgaccttctcaagatgatcgttatcacttgggaactggatatcaaccaaatatcatttcctcgttccttttgactggtcaagataattttcagtcttggaaatgagcggcttcgattaatatcgctgccaaaaataaaactcctttctttaaaggcactttattccatccaccactcaatgatccttctctatccgcttgggatcgatgcaacaacaccgtaatgtcatggatccttcaatctgtgtctcgagaaattggtggaagcatctgttggaaatattttaccaggatctagatttactaccaagtatgtttcattaaca

SEQ ID NO: 302714 - DNA, 2385 bp, Cannabis indica
ttttttgttgtttttgtgtatcggtgaagtaatcccttaataattagctaaactcagaaacactggaagaattaaagggctcgtttagtaaatcatattatatagtattgtattggactatattgtattatttaatataatattatatttggtgttgactttattaaaagattgtgtaaaatataatatctttaccataaactcgacctcaacctcgaccttggggccgagtccgaggtcggggtttgtagggggagggggttccagggtccagcgtcaggaggtggggtctgggtttcgagactgggtccgtggttggggttcggggttatgtttggggccgggtccagggctagggtacgaggctaggtccggggtttgggaccaggtttgtaacacccctgcttcaagcctccattaggccttcctccacggatgtatggttcttatacatgggtacgtaactttttggttgcttcctggtgtgacgattaaccctacaaactaacatgagtattttcagcatactttgtcctcacttgctcgtttcctagttcccaagaaaaatcatgctagatgttttgatgatttttggcatataataagtctttgtaatgtgagttataagattgtgtctaagattttagctaatcatattcgtaaaatggcgcctaagattatatctctttttcaattgaccttttttcaagggtggtggatcattgaaaactctattattgtctaggaaattatctttgatatgggtcgaaggcaaggcaaggatgctttccttaggattaaatgtgatatatccaaggtttacaatttcctagagtggagtttccttaatcaggttttgttggcttttggatttgataattgaattcatgagctaattgctaactgtatttctacagtaaggtttcaagttttgttgaataagggtctcacgaaatcttttgctccccatagggggttcaggcaaggtgaccccttttccacctacttatttatcttatgtttcgaggtgctatctcgattgatcatggagaagaaaaggtagaatttgattcaagggtatagactctcttgtgctagcctttcggtgtgccatttgatgtacgcaaatggcattatgttttttgtgagagatgattttatgaatgttgaaaacttggaggctcttgcaaggtattatttttggtatggccaagaaattaatcaaagaaaattgaagattatgatttcttaaaattatgatgtttatctgggccttgctttttccgagtctcttaattttgaagtgatgaatggtgagaaaatctttttagaaagcccgatgtttcttaggggaaatcaggcaaaagacttttagtttatcattgaaaaagtctaaagtagaatggagggttggatggctcgtctcttatcccaagcaactaatatttttggtggattgggaagactaatggtgatgattacctctctcttttgagttgggatgcagtgtgtaaacataagggtattccaatcatgattctctctgtgttagaattgatgttgggtaaatattttcttaacacaagtttctgggataagtctatctcgagacaagcttttacggtggcaaagggcattcagagtactagagattttatcagaaacaatattgtgtggattattggaaaacactctaagattgatttttggaatttctcctggtcttgtgttgattctatctcttttgttaatgctagtattaacttgagagtcaaggaactattagttgtggggtcttgatggctgaagatagtttggatagggacctttcggtggttgatgatctctttaggcctgagacttctagtttagtctcatcttgttctattcctatgctccttgaggaagatttattgatgtggaattcttcacctaattctctctcaagacattaaattgggatcttaacaaatgcaggcttgataaaaatgatgagattttctctaaactcttgtcttttcgaattcatgatcatttagaactatttctgtggaagatatgcaaagaatgcctcccttttggctcttgtttgtctggtgttatctgatttttttacacattgacgtggtgaggggaccgagcgacacgtgtcctatatttctagtacttgggcgaaggcaaatgtccctagcagattgcatataattcgttagcatctattattgttaattaccagagtagagcggtggataaaatatctgaccaggtagaagtccattatgtcgagctacttacaagagataattacttcaaaatgatcttgttatgtccagacacgaagacgatccctataattatgagattgagtcagagaaatatgacaac

SEQ ID NO: 302715 - DNA, 2559 bp, Cannabis indica
aaatatatttggttgggtatcagtctctcacacactcaacttaaccatagagaaacctctttgaagaccggaacaagcatctccttgttcgagttctggcggcatcttcttctcaaaggtgacattttcaggtacccatctgctccattagcttccttatcgtcttggtcataatagggtttcattgcatcaattacactgaagtcttgtcataatatgttactgtaattagttttcgaaagattcattttcaggtgtttatttctgctctagaatggtttcgtgatcgtaatttactattttcgtaaatggtgctccgattttgaatgtgaacaagtatcttatttatttattttcttgctttgctgatcttttagggaagtgggtttggtatggttctaggttttgttttggggatttgctttgaattcggttgttgtacaaacgttggataccttagttttcttgatcccatgaactttccagttatgagaatttttatttttggagctttttcattttttttttcttgtgattttaatgctaagataactttggataatattttgttgggctgatagaaccaattggttagattttatgaaaattttgatacaaaagtctctttgattttgatgaaaacttcaggaaacattgcacttggttcactataagttgtaatgaggttaaactttagaattgcacgaatggtttatgtatttcttatttttcatttttgtttcttatttgcttgaatttatactactgttgttttttttcttttttcgagtggctggaatgatattctttgttttggaatgaaggcgagagtgattgaaggtgagggataagaatagaaacttcaggattatatcatgttgaagcggttgccaagtagaaatcaaagaaccaaaggttttagggcgaagcatgccttgcagatttgtctgcttcttggggtctgcttttggctaatttatcaggtcaagcattcccatgataagaagaaagaatttgatgaaaatgatgcgaaaaccgcaattagggtaagtgacggtgagattcccaagcttggaaggaaggatctacatcctcgagaggatataactaaagttgagaagcatgaggaagaagaggaagaagaaatagcagtagaggaagaagaacaacatggagaagagcgggaagaagaagaaaacaagaatgagtctcaagaacaggaggaggaggaggaggaaaacaagaatgaagatgcggaagataacaagaatgaggaggcagaagatggtggaagaggaggtggggatgatgagatagatgaaagtgaccaagagagaaaagaggaagaaggaaatcatgatgaggagtttgtagatgaagagaaggagcgagaagaggagggtggtgatgataccaaaaaaatgacaatgaagagattgaggatcaagtggacaaagaacactcatctgaggatcaggatagtgatggaggtgaccaaactgatcacgaggcacgagaggaacattacattagggatgatgcatccagtgaagttgctcatgatacacaagttataaacactggaactgagaaaataagttcagaaagtacaaatgagaacacagaagcaaaaaatctagaacaggatgacaaatcgaacaacccagaggatgttaaaaagattgaaagcaatgcaggatcaaaggtggcagaaggtgaaactggtgggaatcatacttccttggatacggtttctcttgcacagaaggttgattatgataatttgccaaattcttccgataaccaagtttcaataactatgcaatctaataatcgtccggaagcaggcaattactctgagatgggaactgaaaagtctggctcttttgagcagataaaaattgaaacaaatgactcttcccagcagaacataacagagtctgtaactgattcagttcctgctcaaattaccaaggatgttgcaaccacaagagggagtgaaatagaagaaatttcatcgctggcgcagacagataactccaccattggttctttggagaataaaattgaatttaattctacaaattcaacaaaaactgacaaaacggatggagcctctgaagaattatctgattcgtctaaaaatccagtgtctaatgctttggaacaggtagtaagacctgaacaaacacttcaagtagaggatggtaccacttcaacaacgaagcagaatgccgatgctactgagaatggaaaatcagacaacaaaattgattctgatgcagaagaggacagttcagactctactggtgggacagaggaggcagttcaacatgatccaatagattcttctgatacccaaatagcccaagaaatgaatgaagttcgaatggatctcagtacattaccagacatggattcccaaagggttgacagtgaagagattgctgcagaatgatgattatgattacaaggcttttggctctttacatgtccatccaaggtctctcacacttgtgttattttttattcctatgtccaaagcatgataaatttagc

SEQ ID NO: 302716 - DNA, 1998 bp, Cannabis indica
gattcttgtcttcttgatttagaatactgaaagatgatgagttggaaatagcttggcgagatccaaacacccattttggagttcctagagtcaacatggtcgtagggctagggacccctcctagatcgactgcttaactccaggatattttttttttcttgccacgtgtcaagcattgatgtccacatcacttgaaaccttattctggtaaacatttgcccccaagtcaactttgcacttgtgtggtgttgacttgatgacgtgaattaagctcatttctctcaaaattaggtgggcgttaattttggcaatcttagcaactattttctattcttcaatgacttcttgtggggctaggaattttgaaatcctattacttttttgattggtgaattcgaaatttaaagataaaaaggaaggaagatataagggaaaagatagtagatctttctctctccgtatctttctttttaaatttaaatttaaatgcattccttgttggcttagtaatagatgagatcaattactataaatagagaactcctccattcacttttcccactacttcacatggaaaaattcagagcctgaaaaattttgctctcatcaattcttcaagtgttcttcaaaatcaagtaaatttttttttttcgattttttctgttctcctcttgtaaagctttgtttaagggttctaaatcttgttgtaaatccttaaaactccatttgtaagccctctaaaaatcaaaaataagattttcatgagagttgttagggtagaaattcttcattcctacaaggtgcattttgtctgaatttacttggaaaaagttgttttgggttgaattaagttgatatttatctagtcaaagttgatgagaactgagttgaaagcaaatatgcctcgcgtgagaagaacttgtagaaaacctgaagaatatgactgacacacgacccaattcatccgtgcaaagcttacagtgccaaagtctaaggatttagacaaggccgtggtggaaaagttatggccattgagctactcactactgttattgaaagtgaggatcgaagagaccgagcctttgaactaagatctcttatctttagttccatgactcagcaccaggttgaattggtttgagatgagtattcactacctgagactattgtcaaaaaacctagagttggatgtcctagtggttctcaatatccttcctgtagtgcttagtcaagattccatatgaacgtaagtgcattctcgcctctatacccgtagtttatgtcgattgctgattacttcgaggtctgcccatatcagataaatccaaatggttatcaaattttgcccacatttttcatgttttaccgtttgtgggactggcctatcccaacttctcatgagatcaactttttgtctgatctaaaaagaattcccacttgtaagaagaatagcttctaccatttctatcaatataatgtgtacattggcaacatcactaaaagtaactacaatctttatcataaagagtacttctatactcatgtcatcccttcgagacatgttacctttcaaaaagctgaccctttcaaatgacgtgctccattgatagacatgaagcgtagagcggatgctatgttgaatgatattaacatacaagaaagagatggaaagatgttgtttacagatgacatttttcgtcgtgtaggtctgatagcaacttgtcaacgagtgtagattaatgctcactttttgttgatgactcttggaaaatgcctattgaagatgaagagagtagccatagtggcactattattggattcgatgtggcatcaaaagatgatggtgttggttttggtgatgaggccaaaactgaacctttgggtcaaattgaagctagtgtgcttgggggagttagggatcagcaagtcgctgatgcagcatagtcatcattaacttgagtatttgttttctgtatttttcttacgtactaaccactt

SEQ ID NO: 302717 - DNA, 1335 bp, Cannabis indica
attgatggtgtgtgactatgactatagagacaaaggaggtggaggcgcctaatagttatataaatatattgcctactaataatatgacattattaactaaattgtcaaaattaagattttttttatcagctagagctagagtattgttattaggcacgcgtggtacttaacactttttaggttgcatcttatgattagttagtaaatatttattaaaaattatttttttaagctatataatacctgatacttaatatatgacaccgaggatgatactaggtactaataatactttttaacatttctcattttatatatataccataaatttgattgcatatttacatgtgtttcgcgtgcaattcacgtgcatattgcacgtgaggttgcggctagtataatatatatatataatatataattttttacaaaaaatattttataaataacaaaaatagttacaaaagatatgaaactacagtatttttaacatttgtatggattttgattttgtattttttttcaaaaaaaaatagggacagtagttttactgtttccatattgctgttaaataaaagcagccattattttttaaaaaaatacaagaaaaaacctgtaaaaaaaatccccccaaaaaaaagtgcgactcttgagtacatgtgaaaatcattttaaaaaatatgaatttattaatggatgattattggttgtaaattcatattgcagacttattagttcaatttgaacctgttacttacggattacaattaagatttatttattcgaacctttgaataatacgattaacatatatatcttattcaagtatattttcacacacatatatgagtataagtactactactagcagcagcgaaggcaataatgaccatcaccatgatgaggaagggcttcatagtaatgggaaacttgctctagggttatgtactggatctaatggtcccacagatgatcatcttatgaagaagaagtcgactagttgtgatgatgatgatgatgatgatggtatcttagaggaaattaataagcataaggaggaggaaaaggcaataaccgccgaacccactgagatcatgtggccacccagtaaagtgcttattaagactgtgcgaagtgaattaggagaagatcgtaataatgaggatggggcttcacatgtctcctaccccttgaagaaagttagggtttcggtcagagcaagatgtgatacacaaacagtaagtcctatctatatgtaaataatatttatacgtacgtgaggcagtgtacataatataagaatatttttatattaaaggaaatatatttctattt

SEQ ID NO: 302718 - DNA, 2155 bp, Cannabis indica
ccataatttcatctttagtacccgaagctaagaacctgacaataaagatgcccgattttagcaagccgaccttatccactcctctttccttccataccctcctaggaaaaccttcaaaagctcctattagtggattttaccttaatacataacagaccgtagctgattgtcattattcaacttcatcatatatgtcatctagtttagttttaatctttggtttcttagcagcagttgcactaaatttatcacacaaattctgggtaataggtttgaaaattggaggcttagaagactttccaagtttcaccatatctttggttctgtttgatccctctaggaatctgttaaaatcctccctaattccctgctcctttgtcaaatgcagaatggtagaccttggcaaaataacttcggtttcctcctccaccgcctggttcatcttcctcgcatctgctggttcctccttgtcggtgtgtggatcaaagacagataaggcatctacccccaaatagtgtttttattatatgttcttgtttgatttgtatctgtatttgaagggtatgtatctatattgtctatgttcttgtttgattaattaattactatagagtaaatactattttggaccctgtgtttgtaaaaattatcaattggaccctttgttttgttaaatgccaaaatagaccctatagtttctaaaatggtaaaaataggaccctaaggtcaattttttaacaattttatttttaatataaccaattttaagactatttctaacacaaacagatacagaaaatgtaacttattttgtcacaacatctctagatcagattaatattaagttttattttgacaaaaaataagttcagggtcccatttgtacaattttgaaaaatactggatccaattaataatttttgtaaaccacagggtccaaaatattatttacccattagtatatttatatagctcactatttcattattattattattatttaaaaaagaaacatttcattcaaagaaccaaatcaactgttattacagacgaatttgaaaaactaggacaagtatctatgcaaatattctttcctacaccattagtaatagaggtagctagtgcgtggacacaacattcacaaaatacaaaatagcattgcaagcacctccaccaacaattgcttataaagaactaacataaaaaagaatagactgataaacaacatttatatttaggttattaacccagccaacgacaatcatcaaatcacagtcaacacgagaaataataaaaccaaattgatgagccacttccaccccaaattgtactgctagtaactctaccacagggaccaagaactccccaataaccctaaccgcccacgaagcccacaccaacccaaaaccatcccaaataactccacttaaccaacgaaacctctacctggaatttcaatattatcatttggaagggtaaattattcagaattttaaaaaagtagatagaactcttactttaactacagtgtattattagaaggctaaattattaagaatttcagtattattagcgtcacatgtgttgggtttagaatcttaattttaacgggaaaaatatgtctgatatttgaaatataggaattaggcggggttgtagtatttgaccattttaccttaagtcctaaggttacttaaggagtaagttagggccttttggtaaattatgcttaagaattaataatcttattttggtagtgagaattctagaaaagaagctaagtatggatttattaggttaatattatcttaagaattaagttgataaatacaaaattgaattgaaactctctttctctctctcaacctctcttagaatcaaagatactcaatccttttcttacaaatttcttcatcatccagtagagaattcagctagagtttgagtaggaattgagggattcttcaaaggtaaacctaactccttatttctctttaatttttggaagtttttaattggtttgtgttgggttttatgccttaaataaaactccatttcaatggaaaccttaaccctttaaatatcaataaagaaacagaagtatttttcatcactttgtgtgtcatttggttcatgttatcatttacttgtttat

SEQ ID NO: 302719 - DNA, 1864 bp, Cannabis indica
tatatgtatacaatatatatataaatctcctcaaaatacaaccacctttaccttgcctcgattgtgttacacatcaaattcttctgtgtgtaaatgaaacgctttgagattttcatttttgtgactaatcatacacatgggctacacaaggattgatgaaggtgcagctacgttttataatgtgaaactaatactataattttggcttccaaaattttaatattggaaagtgaaaaagttacaccttggaatccaaactagtccctagttttgacttggactatagcactctaggatacatgcatatatgtttgttccaacctacctacctgtatatatatatttgacctatatataagagcaacattctcctttcttttacttttctctgcaaaaaaagacagcaaatataccccaaaaagaaggttgttttatatggctgctgttatgaacaacttctctactgccgtattactaatcgtgtttttctgtttttcttccttatgtctctcctctgcactaccactccttcaaggtacataactgccaaaactttgtctatatatttttatacatatatatatataaatgattaaattatacttctatcataagatgacatctatgaattttcttctttatgtcttacaagataatgagaatgctatttcagaacttaccaccatttccaagactgatcatgatccaaaggtaagattataatcttaattatatatataaatcaagcctctcaagctaataattatatgaattctgctttttcttattattattatgtcagggctttagtgcaagacgagtgggaggaagaaaagtttctttacacaaggtggtgagcctagcaaaggttattaaaccagaaaaacaaggtggctctgaccaagttgaaggaaaattaggcagcagcaagcaaaacataacaaatggggttcagaagttgaactccaagcaagctaaagtagtgttgctggtcattattctgccaagattaatgaggctgctggttttgttgccttcaacgccgactaccgcgcaccgagacaccatcctcccaagaataaccgatgaaagatcttactgataacaaagttatatttttctgtttaccttggcttacttttcttattttagtaccatcttatgctattgatggttatgtttattgtgttttgagtgtgtatactacttggaaaagatagtgagttgttgtactgttctaatataatataaattgtttgcttaacccacacagggaaatcaaaatcaaccctgctggtttaaatttttggtagttttgatcctttttaatcagttgtcaaagataagatttgagttggttggatttttcccttttactatgttcgttaagcattacaacatatatgtcttcagtttttgctgaatctgtcttggtatagactacggttggtttaattagttacaagaaaaaataatagagaagaagaagaaagaagatgggaaatgttaagttttctgtgcacactgtagatacaattaacccgtggtccaataacaataactggacttataataatcacttcattttaatgcagcaatatacgagaaactttcttggcataccttcaattaatatattaagaactaatttaatatttgctaagagagcatttgatcttcaattaatatattaagaactaatttaatatttgctaagagagcatttgatcactttgtacgaacatgatccgctataagataataaagggtaattgacctgaaatttagttccattttggtattgactattatgttagtttggttagagaaatgctaaaacgtactagtaataatgtctagcacc

SEQ ID NO: 302720 - DNA, 1038 bp, Cannabis indica
atgagcaagcacattacgtgaattaggaacccacagaacatccacctctgagagaagatccacagactccaacagcttctaaaaaagactcctccaggccccaatccaaagcttttcgatcacgaatacaattctccaagaattggaatttcaaggcaatcaccacctgggaccagccaccagcactacagagtttaactgcgtgacaaggcccaagtctttgcttctaacgggttacttgcatcgattttgacagcaagcgccttaatcaactcccctgacacctctgtaatcacaattccagctgtagaatggaagtccttgcaagctacatcaacaaagataaccaaactttcatagttcagccgttgttcatccacaaacttggccatcagtaggttggaactcggggactcccaagctgcaacaaaagagttacagggagcattaactctagctaaaataccagtacaaataggcctcaactggtcatggaaagcacgattccttgtattctagagatcgtcacacaaacatatactagaccttgtgaaagcacctctctcagccacgtgagccccccttaagaagtctggatcaagcagccatgtaaccaattccctaagactagaaaagctcagtgcttcaattctaatcgtccaaccactagcgaaccaagtggcattggccaacgagcaagaacagaacaaatgcaagaagaatcatcaaccgctccacacaaaatactaggggtgttcattggatcacatctaatagactttagcctaatcaatctaatctagttatttattggatattgaatttggtcgtccgatctaatccaatcgaattgagtcatccgatctgatctgatgtaatggatgtattggattggatcggttccaaccattagatgcattaactagtttcctattagataggattggatccatcctatccattttagctaccatttaagttgatttcattaaaagaaaaaatatatataaaaaagtataatttaaaacctaataatcc

SEQ ID NO: 302721 - DNA, 2761 bp, Cannabis indica
gatcagaggtgatccgtcgggtttgagctccaacccgctctaactaaataaatctttttaacatgcctaggctaaatttaaatttaaatacttaactgaaaaactaaaactccttaaaaataaactccttacaatatttaattatactaatatcaccgaactcctaaacatctgtttttatagcacttgtgaatttttgttgttattattatcaatgtttcttttcttttttctttttcttttaaagaaaaacataatttattatctatgttattgtttgttggggagttagtggacataagacaaccttcccactgacgaatcatttccaaggatgacgagacggttccaatagttgaaggacacgtggactgaaattcagtgagactttagtttccttggaaggaaatacttttcagaaagtagaaaacagaatatgagatttacaaccaaacaattatcaaagaaaattgtttcatcaaaaaaaaaaaattatcaaagaaaattgaacttataaataaattaattagttggtttctataacctaatggttctatgaaatttcattatataaattaaaattaaaattaaaatgaaaaaatattttattttctgagcctactttgttaaatttgtatgtacatataaatatttatttatcaaaataaactagattccaatttatcaactaatgttattttggtcatgttcttgagaatattttgattatgtgtaaaaatgttaatgttatgggtttcacccagtactgtaatagagttcataataccactgtccataatttagctaaattgtctttatatttggatagagctatgtggtggcataataatgagcatggtccttatatttggttcctttaataataataacaaaaaaaaaaaaaactaatattatattgtaaccaatttactcaataaaaaaaaaatatcatactctacatagttgatattttaactgcttgaaatttaatataagttcattttgttattgtcctttagatataggttaattatgatttttatctctaaactttgatatgtaccaaattatgttccttgaattttttacgccgttaaaaaatctcccgaactattgaaattattatatttgaggacttctgtctaatttcattcaattttactaatatgaagattgtccacatactaaattatgcctcttgaactttgatatctactaaattatgtcctccaaatctttcaaaaatataaaattgtggctcctaaattttcattcacatcagactttgtttagtaaaattggacaaaagtccttatatctaacaatctcaataattcagatagaatttttaacgacttgaaaaatttagaagacataaatttagtacatatcaaagttcacggaataaaaattcaaattagccacaaatatatgacaataagtattaataaacaaaaaagaaaattagtttgtgtggaccttaccaaatttattgcataaattttacagattccacgtgcaatattaataataataagtaaagtagatatgattttgtagtttatttgtttatttatttattttgagatgtaggaatttgggatgttattggatctatatgtcattatcaactcaacaacaactagtctcatcccaaacatatttaagccacaagcaatgggagacttttggcctatcaacctttgcaatctgcttggtttcgaaaaacaaaagaaatcctttgcaatgtgctgacaaattgatttcgaaagtatttggttatcccatttaaataagtcttgcttttgtaatataggaaacttagagtatttttttttatctcaaagaaataatgggaaagaaaggttaaacttaatatgaataaaggtttttaatagaatttaatggtatttttcaaaacaccacgcatcaaaataaatcaaaatttctgttaaaaattggtgtctcatattatgttaaacctatcaaattttgatacatcaactaatctaattaatttttttatagcaattatactggtagtgaggtatgggattctatctgtgctatgctgaaaatttatgaggcagataaaatggctattacctagctaggccttccttgtttggttgggaggaataagaatgctatctttgactttcttaaggataagcttcagaagagaattcaagggttgggaagggcgtattttgtctcgtgcaggaaaggatgtattgctgaaatctattactcaagcattgccgaattatgctatgaatatatttcttttgtatttagacacttgtaaggagttagagcggcttatggctaagttttggtgacattcggctttgagcagtggtaaaggtattaattggatgagttgggagcggttgtgttgttataaacatgcaggagaattgagttatcgaagcttgagagactttaatttggctcttttgaggaaacaatattggcagttgttggttaatgatgactctttggttagtaggctctataaggcaaaatattatgctcatgataacttattttttgttgaattgggagataatcctagtttcatttggcgaagtattcttgaagctaaagatctagtacattcttgtgcacaaagaacaatcgctgatggggaaaatgtatccattcttgcagatccttggctcccacatagttctaacaactatgtcgttacaaggcaccctgctcttgtgaacgaatcggtcaactgcctctttcaagt

SEQ ID NO: 302722 - DNA, 1438 bp, Cannabis indica
  modified_base (33)..(33): a, c, t, g, unknown or other
aaaacaaaataataaaaataaaaaaaaaaaaanaaaaaaaaaaaaaaactcacataagcaaatttttccataacatttacgaaacaattagaacaataaaaatactagaaaggaagaatatttaaaaagcaatcatcatacgattcaagttcttgtatttgatgaggagtgtgtctgtgatacttcttcttcctcgggggttggtcgtcgccggcgtcttgatcatcgccggaggcaccttccaaattatcactaccggacctgctctcatacccatcatcccttatccttccaatcataccaagatcaaaattctcccctagtagacccatctcaccatgagtatccatcttcctctgcatccaacaaaaaaaaaagaaaacccttttattgaaatgaaatttccactaaaagaaaaccaaaaccatgattgaatgagaagaagaaagttatgacgaggcatactattggcaaagaaataacagaggaacttttcaatgagttaggcataatagtgggagaaacaaagtatggtctagcaatggctctatgtggcatgtaaggcctttgtggagaaatatcagccacaactcaatcaacccaaatatcactgttaccaataccaagtactactgctaatcaaacccttcaaagttcgaagatgatacaaagaaaaatatcaaaaagataatagtgttttctttttctttataaatatatatatttatatatttcaaagtcctaattatttgtctttcttggtctatatgaacgaagaagtgtctccatcagttttcgaaaaagtgtaatatggacttatttttaaatatttgaccttacccagccactcccagattcagctaagactgaaaattgcattctcagtagaaacagaaagagagagagagttgttcacttgtcaacgcccatgcatgacactcgataccttttcttttttaaactctctatctctctgtctagaaactctccagagaaaatctgtttaggatatagagaaaaaggcaaaaagcaaaaaggaggaacaagacaagaaaagccctttttaaattaatcttccacagttcacacctccctaatttctctgtttcactctaaagaaaacgaatgaaaacaaaaggctttttggacaagtatatgagtaacaaatatgaatgtaagaagtaataggaaccctaaatttcaaagcttttctccatcagagtggcattgcttgactaatagtttggaagtatcgaaagaggcccggaattggtagaaagtcaggaaacgaaaaaagggtctcttaaacttcggctaagaaaagggaagaaaaacacaaaaaggctaaaaatctcatctcgtattcacacacgccatactacatgacttttcaataccaaatccaggcaaaaagacccagttgacctctctctttctc

SEQ ID NO: 302723 - DNA, 2135 bp, Cannabis indica
gctttgtttagctgcaaacatgccaaggcagtttggcgttcaactgaattccaatttgattaccaagctgctagccgaatgacagagggagattatataatgttgctatcacaaacttattccaaatctgacttagaaaagatattatgcactttgtggtacatttggtttgatagaaacaacattatacattgtaaggatccacaaaaaccagaggcaattgctgctaaagcttcggcacatttctgcaattttcagcaggcttcccgtgttcataaacctgtccagcaaccttcacatgttgcgagccatcagccatggaaagctcctcctcaaacaaagttgaaaatgaacgttgatgcggctgttgattcagccaacaatacaatggggtttggagcaattataagggactcttggggacatgttaaggctgctctatctaagccaatgcctggtaccttgcaacctcatgaaatggaggctaaagctctctattatggtctccaatgggctcactctttgcatgttaatctagattttgtggagtcggattgccttctgttagttactagtttgaaaagtttagcatctagaaatttaggtttctctaatcttatttcggatgttaaaaatcaattgtcctatttccctaatgtttgtgtgtctcatgttcgccgagatgcaaatcaagccgctcatggcttggctaagcaagcattagtgttggataatgattgttcgtggtatgaggattgccctcctactattttttctgttgttgtaaatgacgcttccaattaatgataacagaacttttctcaaaaaaaaaaataatgtataacttgtatataaacttaatatacagtatatatatacttaattgattagtcggtcggttatggtttctttggtcggttcaccactaaattaaaaaccgaccgtttaaggtcggtttgcaccattagcggttttctcgattttcggtttaaacggtttcggttttagcggtgtttggtaggtcggtttgaccggttttttcggttttctagatttcatgctcagccctactcaagattctcatttctagttgacaaacttggtgtgagatcctcaccctttcgtttgaggggaggtgttgagaaatgaggatctgactactggtgtactatatttcatcatttgtgtgttgcacctgattgtgtacacctcaagtttgacgggtgtccttgtggtccaagattgtcggagataatgattaggcattctgtcagattattccctctgggaaatctttattgggatttgtattctccacctgtattggagtcgttacactatactgtatctttgtgacaattactttgcattataaatatcagactctcaagctcaagttcagtgagttgaatattcattttgtcaaattcttctctaattttactctcgattaatcaaccaagaaaattccaaaatatactaacaaaccacaccacagattcaacatcaaaacaacaaataacagtaataataggaaaaaacattacttatccatttattttctttaaaaaatcaaacagtgctctttcgggtccttcaaattttatacgatgccaccgattttgatggcttcaaccgaagcaatgtctttattacaagattttagtgttaaaattgtgtacatttgatgtctagtttagaaagagaaaaaacatgttttgggcgtgggaatgaggaagaaaaaaagaaagaaaatagaaaatggtttttcttatatgggaggggcattttagacaatgtaaaaaaggttacattgcttgtttatactttcaatttggcctttgtatacaaaatcaaatttcctactttaaacatttgatcacattatccatgagttgatattatgcgagtttgtgaaattttttattttatattggaagagagaagacttgaattgggatctcctctgtgagttgtttgtgaatttttatttgaaagcatctttttctttccttgtgaatgttgaattctgagtatttttatgagtgttgtaagaaaagcaaaccagagtaaataactgttggatatattttaccaggatctagatttactaacaagtatgtttcattaacatc

SEQ ID NO: 302724 - DNA, 1105 bp, Cannabis indica
ctgaaacaagacataacataagaaggaatagtttggacaataaccttaagaaggacttcttttactcctctagaaaataacttgctactccaaacattactcttagacttgatattttgaagaagatagaatgaagatttcattgacctactaaagtatttagggacacctaaatatttgctaataaaaggcttattatcaagacctagattattattgaaaaaatcaacatcttgagaattagtattaggaaagagcagaacataagatttggcgagattaacatatgaacagtgaccttattataaagagtgagaatatccttgatagctacacacaattagggagtaacagtgataaacaaaagactatcatcaacaaagaataaatgagaaataacaggcgaagacctaaaaattggaatgccttttaactggttagcttgttccttaattctaatagtagtggaaaggcttttagccacaagaagaaaaatataaggagataaatgatcatcttgtctaattgttgggaatattttaccaggatctagatttactaacaagtatgttgaatgaacatcctaaatatgaatatctataaaacaatgaaattatacacatatgagtttagaaaaccttacattggttgcagcggaatataattattccttccgctgagatctctaacccttgttccttctgttgcagagtattatcaagatttgagcctggatctctttctctccttcgggttttgttaccaccgtcttactcactatgattgagtacttgacttgctatgtgtgggcatgacactcattcactaagggtttgaatatggtgaagaacaatgaaggaggtgaaatcactatggaaggaagtctctcatctactagttgtctgacatagaaaactgttgggaatattttaccacaatctagatttactaacaagtatgttaaattaacatcctaaatatgaattctctaaaacaatgaaataacacataagggttaagaaaaccatacattgattgtaacgaaatataatggctccttctgttcaagatctctagcccttgattcctttctgtcgcagagcat

SEQ ID NO: 302725 - DNA, 1398 bp, Cannabis indica
attattatatgatttattacttttacataacttatttattaactctattaccattatttaaataataaaaaataaaagttaaccatatttgtatatttttaatacaatattaaataatgatcaataaaaataatatttttttacattttttttttggacgtgcatcacattgtagcattgtaaatagtaaactaaatataacacacttaatttttgtgtgaaacttcgcacaaattttacattaagatgtgaatataatagtgcattatacattgcttgtggtataaaaaaacatgcttagcataaaggggtaggacttggtctttataatggctctctttgcgtagtcaatgttcgaaaaccaagttcccaagcaaatcaataataaatttcatgtcaaattctcttcttttgttaactgaacaaaacagcaattatcatcatactcatcaatacacagcatttaaaatccagagacacacaaaggcaaaacaaagcacaagctaaaacagcccttttgtatgtatctatatagatgttaattttctttcttttttttttatttaatttctcacaagggcatatcaaagcttgaaatttataccactggtaactctgaatgactgagtgggattcaccaaaaattgtgtgttcaatcgtagatgtacatgttctgaaagggcagcaaagaaaaagctctgatcaccatcatttttttcctcgtttgttgttgcgagaactcaagaataagaaacctttaccttcaccattatcctcctcagcttcctcctaaaattaataatacaagtatgatagataataagaacaacttcccgtatataaagcactttcctacatcataccattgttctaaattactatctactacatgaactttttagtattttaatacatacataaattgcaacttcattttttacatgtgtataatgtagttatataaaattccaaataaattaaaatgccgaaaacatgactgaaaaacttgttgtacgcatacttattttgatattgatattcatatgtttatatttatatgtacatgcaccgcatacttattttgatattcatatgtacatatctttatatttacatttacatgcaacagataccaattttgatatcttaaattatttgaaattaaactaccaaaataccaagataagtagtgataaaaaacaatccactactatagttctagaggtgcccatatatatatagtattaactaggggtgggcatcatccaatccaatccaatccaattgaaccgaaccgatccaatccaatccaattacaaaaagttggatatccaattacaattggattggattggatgttaaaagttggattctaattggattggatcggttattgga

SEQ ID NO: 302726 - DNA, 4593 bp, Cannabis indica
taaagtaggtgaggccgagggcagtagtagttttggacaaaaattggaaggaaattcgaggggaggctcttgaatcaactactaccccttaaactgtgtcgttctcaagattaacatttctttctactttatagtggaatttcagatctatttgtggttttcttgctgggttcttattggaatatattctcattaaacaaaggcgaacaatgaagagtaaagatcttgcaaatgggaaagatcatgttagcaaggaaagtacgaagggcgtagcagttaatcaatgtgggataatggttagaattaatcctttagatataatttgggtcaagaatcgtagaggctcgtggtggcctggacaggtttgtttggcgcactagttagttcatatgttattcttaatttgagtcgccattgaaaaatgttgtattatgtgcttatccaatgatttgtatattttaaccatggtaggttgttgatgaaaatctcataagtgaaactagtaaaccaggcagcagatcagcaggggaagttcttgttaggctttatggaacttatacttagtgagtaccttttccactttctctgatgggtgttttcttgtttactctataaatcaatattttcttgtgtcacttgcagtttgtatgttgatccaaccaaatatttttctgagttcgacgcagtaagtttttgttgcggcatactgtttctttacgctaatttggacttgttcacaattgactatttgtcttgacatcaaatctattgccttgttacatgttgaatccttgacttctcaggtacttaagcagaacaacaattctcatggaaaaatatttttgaaagctttggaactggtaaaatattatgtttcatttgtccatgtcactcatgtaggacggcacagttgcattatgctttccattgaacggttttgtatatattttatgtgtatacaggaggttgctggcttaaaagctggtgaatcaaagaagcgcaaagccaaatccgaaggttgattcttttgttttcatcatgtaggattgacatttttgtttgtcaatcaatttgtgttactgtctcctgagagataaatctttgttggcaatgatggcgtgcagataaatcaagaaccaaacactgtgatggagataattcaaggaaaaacctcacgcgaaattccaaaagctctacagaatctaaaaagaggaaccgtgaaaagcaaaacagtacaaggaaaaattctgagaaaagcctagagaaaacaagtaagagtatacctaagcccgatgagacgcttagcaagaaaaggaagctagctagatcaagccctgtgagtatatttcactttttatttccttttacacaccaagtgcctttttttcttgaaatttcaactcatgagaggacaatgttttctgctcaggatacaccacctgccaagtctcaagaattgagtgcccgaagaattaaagtgatgcaaagtcttggtctggctgcacctcctggctctccattttgcagacatggacaactttttacatgatgcttctgcttggtctggtggatttaaatttgagctattatttttaatgcatctaccaaaaacgatgtctattgagtaagacagcagagttgatattggaagggtcttcacattgtaaggccatcaaatatttgattcttagaaataatggatttgtgttttaatttttttatcttaaccttctttaatccctaattagtatatgtatttttttcatttatgttctctctctatatataattatacatatcaaagggtagaatctttgaaataggcttacttttgaggacacttatatagcactttcatacttgttttttaccgtaacaaatttaataatttttttttatcaatattactagtcggactcacaatgatttatcaatttattattcaaaaattagaactaataattaaaaagggaatttttaatataaagattaaataatatttattaaaaagtaaataaagataaataatgtgctattttttttttttgatgaattaagaaatttattacaaattatctataatttgtacaaactataagcaccataacaaacttgttatggcctgtaattttctatacaagatttacaaagaatgaaacccttcctcatctttttggctattttttctaggccacactaatacaattctttgcttcacatttttcttaattttactcaccaattgagccatgtttgtctcttttccttgccataatgcatcatttcttgtttttcagagattgcatactaggctaccaagacatgtagcaattactttctttttgaatttgcttgctttagttctttgaatccacctggttagtcgaggtagtgttgtatcagtgattctctattgcatccatgctgcaatttcataaaaataagctatagatttgctacatccaaaacaaatgatcatttgtttcctcatcattgctgcacagaacacattaaggatctccaacaatgccatatctgtatagtcttgctttggttctccgtctctcctgtatagcaatccataggataaaactatgtttaggagtattgaaccttccccatacctactcactccacctctttttgtcttgaacagaacagagcaggttgtaacctgctgaaatttgatatcactctgccaaaaactgttgagtatcaatgagaggccagatctggtttttcagagctactagttgtctccaataccagcttccttggcaagggatagagaagttctaccagttctcctctttgatgtaaacactgtgtatccacttgaccaacatgttttcttctttttttgtaattgcccacacatatttgatcattgcagcttgattccattctttaactctcttgaatccaatacatcatgctatttttgtttggcaaacagttttccaagcaataacacctgccccttggaacaaatgttgcctttccacaaaatgccctacaaattgcttcaatttctttgattactttcttgggaagcagcatcacctgaatccaataggcatgaatagttaataaaacagagttaatcaagacaactctgccagcaaatgataaatgtctagatctccaggttctaattcttgcagtcatattttctgctaatattgcacactctttgctcgagatcctctttgcacagattggcacccctaaatatgtgaatggtagctcatgctgagtgaaaccagaggctgctagaactcgagttacatcttgctttggcatgttactacaatatattgcagattagatgcattagggaagagccctgaagtgtgagaaaatagtttcaggccttgaagatatcacactcttgtaatccccattgcagaacaataacacatcatcaacgaagctgagatggtttagttgtaggtgttcacacctgccatggtagaagaaatcagatttcatacccactttcttcataattcttgtcaaatactccattctcaagacaaatagtaagggggacatgggatccccttgcttcaatcccctttttgaagcaaaaaaaccatgcattgaaccattaaacatgagggagaatttgagagttttaatacagttcattacaagatgaataaactgattaggaaacttatatgcaataaaaatttccccaatgaactcccattcaattgtatcataagctttatgcagatctaatttgatcatgcatctagctttattggatttcctctcaaaatgcctaatcagatcttgaaagatcataatattatggccaatgtatttgcctttaacaaatcccccttaattctgtgcaatcaaatcaggaaggatatgcttaagtcttgtgcagataagctttgttgctaccttatagattactttgtagcatgcaataggcttgaagtccttcactgtattagggcattttacctcagggactagagttatcatcatagagtttatctctttcagaattttccctatttccaaaaataaaatcacagcctcacgcactgcattttccacaatatcccagttgtcctgaaagaaataactagaatacccatcagctcctggggctttaatgcctagtatatcaaacatttcctgcttcacctcatcctttgtgaattttgctaataagacatccatatgttgtgaagtcaatgtaggccccatatccgtgacatttgccatagcctgtctcctattctacattttagaccccaatagctgaatgtaataagaaaggagggcatcaattatcttacttgaatcattcacccgtgtgccatcagcctgctcaagaagtccgtttatggactcaaacaagcttctcgctcttggaacaaaaggttttgaaagtgcaacttgtagattttaatgattcaaattaccaagttgtctatctttagattgattgatttcaagatatgaattatgaacaagaattgaaagtcaagctgtaaatcacacatcaatttacaagcttcgtttgcactgagaacacaactcagccgactagtgcttgggttccccgaa

SEQ ID NO: 302727 - DNA, 2082 bp, Cannabis indica
ttctaatatagactacacttcagagctgacgaaaacatttaaggtaagtaaaactagtttaaatattaaaaggaaaaaaacataggcaaatctaccaaagcgaatatttacatttagtaagatatcgtaattggatatttacaagctcgcagactcgcaggaactgtatgactaccccaaaaaaaaatcacaacctaattcgtttaaacgattattgaatacctaacaataatcatctaaatgcacagtccaatgatatattatctaatttgaactaatttaagagcataactaaacatttgagtcatttctaaatacctaaaccagacattaatcgtatatgaagagcataactaaacatttgattaagtttgtatgtcatttctgaatacataaaccagagttgaatcgtgtataaatgacttaacctagatattgttttattatatatcataattgcacaatccaaagaaaattcaataaccaggaagaagaaaattcatactttggtaacaaatgtgcctttaggtgccaaaaagtcggtagccagcttcacggaatcgataaccaaggcgttctggctggtggcttcctgagcccaagcaccaccaacgttgggagaaccatcgtgcaacaccaaatcaaaggccgtgcatcccttctcgttcattatgcgcttgatcttggccttacactcggacctggtgatgtcctgctggacggcaatggcgccacgaacgggagcgatgggaaccaaatcaataccgatgacaaggctgccaacggggacgcgctgaacaacgacctgcatccaaccacctggggcggcgcaaaggtcgaggacggcgtgggatgagcggaggaaagtgtacttggcatcgagctgaaccagcttccaagaggctcgagaacggtagccatgttctttggctaagtggtagaacttgtccaaacgatgttttcccttgactttacccatggctactgtagcttgcttgttggttctgaattagggttttaggaatgctttgctgttttggggatatagggttttgaattttgacaagtgttttccgtttcagaagcaaaggcttccctcagcaatgggccaagagaattgcagaaattcgactttatacctagggcaacgagggcaaaatggtccggctaaccctttaccctatgttctatgaattaattgatttaaaaaagaaaaataggatttttatagcaaattttgacatctaattttacaaattattgaaattgttgaatttaatgaattttgtctaattttattcacttttagtgatatgtaattgtctatttattaaattgtgtccaaagaattttaaaatgtatcaatcataccctcaaactttgacacgtattaaatcgtgtcccttaaactttcatcaacgtctcacgtccgttagtaaaattgaaatgaaatccttaaatccagaaatcttaataattcaggagaaattttttaatagcctgaaaaattcgagggacacaatttagtaaatgttaaagttaagcggcaaaaattctaattagcctttcaaaaataaaaaatttatgtatgtgtaaatggaatagtttggtcaaattttaacatatttttaccaattcagtgtaaataacgagttacaattatttaattgtaaataaccagtggtgtctagtactttcttacgtattaatatcgctattggtacaattaaatatcgagtctcttataacttaatgtaataattttaagggtatcgataatcaatcgcaaaataatatgtatagaaagtgttagacatcactggtgcctaataacaacactctaaatttaaataaaaaaaatttctcaaattaataaatgagacgtaacaaaagtcgaattcttctccacaaatgtgaatgtaggataacatttataaaatagaccacataacattttttacttttgaaaattgaaaatgagagattatataaaaatgttggtaattgaatattttaatataaatattagataaaaagattaatttgaacaaattatagggatgtgaaatatgtatcttaaat

SEQ ID NO: 302728 - DNA, 3480 bp, Cannabis indica
ttcacaatctccatactacaataagattcgtgcgcttgcgagttgataaatgtaaaacgtaccattttggtatacaacagtggactttggtgagacttttagtcccgtaattaaagcctttacagtacgcattgtccttactatagctacgacctacaactgggatgttcgccaactttacatcaataatgtgtttcttaatgggacccttgatgaggacatttatatggtccaaccactaggctttgaagatccttcacttcctcatcatgtctgcaagttgcagttttcgatatacggtctaaagcaagcaccaagggcttagttagatcgactcaagacaaccttgctgctgtggaaatttgaaaattcaaaaggctgacttatcattcttcatgttgaagcatcccaagtatgtgctcatggttcttatatacgtggatgacatcattgtcacaaggagctgctcaaaagaacttgaacgatttgtcactcaacttgataaggtcttctctcttaaagaccttggtccattacacttctttcttggaatcgaggtgtttcgtgatgaaacaggattttatttgtcacaaagcaaatacactgttgaactcttacaagaggttaccatgttgaatacaaagcctagtcctacaccaatggtgaccaacaaacaactctctatatataatggcacacctatgacagatccttcacactacaaaagtgtattaggtgcacttcaatacttaagtcacacccgtcttgacatttcgtttgtcgctaacaaactcagtcaattcttgaagaatcctactgatgtacattggaacgccaccaaaagagtgttaagatacttgaaagggtcaatccttcatgacctgcacatttcaccaagtgacagattgacactcacaagtttttcggatgcagattgagcctgctgccccgacgatcgcaggtccgtagatggctactgtgtgttcttaggagattctttagtctcatggtcatcaaagaagcaaaccgtggtagctcgctcaagtactgagtcagaatacagagccctcactcacttggcagcagaactttcatggattcaggaactgttaaaagaaatgaagttcaaaccatctgctactcctgttatatggtgcgacaacatgagcgctagtgcacttgctgcaaatccagtttaccacgctcggaccaaacacatcgaattggatgtgcactttgtaagagacaaagtgttagagaaacaattagaaattcgctatattccttcacataatcagatagtgaattgtctaaccaaagggttgtcacattctcgatttcaatttctcatggacaagctcagagatacagcttcaccctttcgcttgaggggtggtgtcacgagataaaattcacaggggcactttagtcattgtttctctacctccaattctgttggaatgcagcaatccctagaatgatttcctcaccagctgtcaaatcttttccgttagaatagaatcttttttattcccttttgattgtattttattgaccacgtgtcaatcattgactgtgtaatatcattgtaccctgtactgtacctggtgaatgaatcgttatatactattcatttcatcttaaataaaattaaaagagacatttgtatgaggtttctcgttttaaaaaagagaatgctaatatagaagatattgattggtttgggagtttaagtgcaacttattagttgcacttaattaggattttgttataaagttttcctttgtgacgataatattaatatgtagtaaaacttgatattaaattacatcaataataattataatatagtagcgattataaatattaaagtatgttgcaagaggagtcattgtagtaagaagagaaagtgatgatgtcgacgagctgacaatcggaacaacatatcgggagagggaggagcttttcaacgaccgggaccaccggaggcttagggggttggggttgtttgggaggtccgacgctgagaatatcgacaacttttcctgtattcttctttattttctttgctaacataattggatcaacttcaccaactaccgttagactatccttttcagcatccaccactatttcatctataccttttgtacataaatatatattcattaattaatcaactaataataatactagtacgtgtatatctatctaataattaattaattaaggggtcaacttattatatcattgaatatagttacatacatgcatatatatacattttcaaggaaaatgtattttagttatcacatcaagagaatatagctctaccgcgattaatttaaattactatcgatgaccttacaaaataaataaataaataaattactatctatgatataatttgttatgtatacagtcatatatagaagttatgtaataattagatataatatatatttatatatatatttttgtgataacatgacaaaattaaattttcaagaagataagtataaaaaacatttaaaaaggatattaattaatttattaatgggtataactaattaattaacgtatgtaaatttattaaattttttgaaagggtgtatatgggaatgggagacttcaccctcccggcagtcatttacatatataagtatagttaataaaattattattatatatatgaacagtcattaaagatttatttttttgtaatcaatttatggtattgataggttattataatttgattattaattaactaaagtatatacaaacacaatatcatatatattggaagaaagaaaaatgtatagggttggataaagtatacctgaaagtttagtgatggcttggagtatatccttcttgcatttctcgcaattaatgaccacttttaacactgttttctgtcaaataccaaaaaattaatgattaaagataaatttaggtggatcatatatgaagagataaaacaaataatgaatttcaaagacattatatataccagcttcatggtgctaacagtactatattgacaaagcaatttaattgagagatctttgacaattgggttgggtttcctaatttttggctattcgacttagctgaggcctggcctttatatatatatatgcatgtaatgttcatatctgcattagtgtcaccatcactatggattagattcggaggaataatatatatttatcaggtacgtacacaaattaattaagctaacaataagtcaatataacacatatatatatatatatatatatgtatgtattgtggctctatataatatacatgtagctggcgttcttgtcttctgggcagtgtatagctataccttttaatatttcaaatagggtaaataccattttggactctgtgttttacaaaagttacagattggaccttgtgttttgttaaatgacaaaatggaccctgtattttctaaaatagtaaaaa

SEQ ID NO: 302729 - DNA, 1705 bp, Cannabis indica
gtccccggcggcttgtacggattctcgatgaacctgacctttgagggagagctctcctccgtcaccgtcgcgtccagaagctccatcagctgatcactcatcgtctcactcgagtaatcatcctcaccagaaagccatgcaagaatgtcgtcgtctatgacataatccatgtctgcttccactcgtttcctcttctcagtcgccaccgcagaatcttgggccccgtcgcttacctcgatgacctccatttctctgagagtaacaatgtttcggagtgagaaagatgagagagaaagagtgtatacaatatgttgtgtgtgtgtatacgtgtatacgtttatatatatattgactattttgaggaggggcttgacccagggattggtacggtacagttggttaggttcgtcgtggggacaaaggggagaaaagaagaatctggacccagtacttggtgggtccctagcggtagcatcactttcgggattctcaaccgttagattaggatgctataggaatcgaggcaatcagacggtgagagttaaatatgtgttgctgatgaggcaaaggaaatttgccacgtcgatgatctcggtgacgtgtcggagtagagaaagagcgcggcaaatcgcgaaaggaaaagacaaaacgaaaattgccagcaaagttagtctgcacgcgcgtgtttcttacgcggatataaggacgtttgacatgattttgatttgtgttttttccttcattttccttttggtattattagactggattacctattatacccttgcccaggtgtaatagtaatacttattaataattgtgtgttgaatggaattgtttggggaagagaggaatgaaatctgtgtatgaataagttccttaattaagagtattattataagttacttaattaagtttattatgattaaagtcttaaattgaaattgggacttttttattttgaagggcctgttatagaaaggaaaaaggagaaagaaaatgacttgggaaaataaataaatgccatagatgaaggagaacacgtatgaatctcatattttctaaagtaattactaattagtgtttttcacgaggtacattaattttaattttattataatgaaaatactaaaaataaaaatgacatctgtaaatcatgtgaactttcaagatgcatatttttgttcccctctgttttctacatcgtccccatttatatacaattgtctcaattgcattttgtactattgtcttatatttattgcaacaactgtatgattataaaatccaccaaactcaaacaacacgggcacagcgcgctctactatttttgatggagtttaaaattttatattagtatttgtagcataaatatttaataaattattaaaaaaaaaacataaatatttaatatatagatatatattttaaaatttcatccattcaattgatactattttgtttataatacatttgatttgtactaatgtggatttcataatttgtattggattaattattttttaatattaaattatttaatatttaatatacatttttttacaaaattaacaacaaaataaaataaattattattattttgtctcggaagataaattaaaataataaataataaattcaaaaaaaagaaaaaaattgtatgtaaaagaaatatttaattttgttgtataaatatttgtatcat

SEQ ID NO: 302730 - DNA, 2622 bp, Cannabis indica
tttttattttaatttttttaaattaattatttatgtggatccataaaattgtgccacgtgtacactatattcacgtggacaatgcgtcatggcatttaacagtcaattttggataaaaattataaattgctaacgacataatgattttgagggttttaccgctaaaatttaagttttgggggttaattgctagagacgtgaaactacttgggctatgtcgcaattaactctaacaataattaaaatgttactatagaaaacttgcaataataatgttatagtgcgaattttttgcctaaaaatacgagtacaatctcacttgacacgtggatccaattcctagcgggaaaaagatggtgtgtcaataactgctctagtagagctatcctcacatgataagaacttgtgagaaggtgtgacttaggccaagtctagtcgcacactatgatcattataataaataaaagcaggatcaagttagcacaagtcacgtgtataacgattatatgtgatgaacaagtgtctttcttgtgcccgtgtaaagattgcgcctctacgagtgattggtccaaatgactaatgacgattcgttttgaaaccgtacagttcaatattttcagtacatgaatgttcaatatacgattggtataattacgggagttctatctcataaaaaactctgaagttatagtcttgagactttatatgcgagtaacatcaaaggactcgcaagtttgcatgttgctcaagaaagtgaacggtcaattgcgactcctaaagtcgcatacattcgagtattaattaagaacggttaattttttttctcatttattctataaacgttttttttatcttaattaaatgtaattaatgttgtaacgatcctatctgaccagttatgtagtacaaaggatcacttgctttctatataaaggaatgttccaatttgaataggatcgaatcacaaactcttgcaaaagtagactaagcatattaagctctaactaaaccactataattccctatctcttttatatttttgctatttttatttgtatactcattatttatatttgagtattcgccattctaggtggacactcacagttctacaaaatagtgttcttgtttcccttgaatactcgcactaatttggtattgactatttttcttcgataatatttagcgcaagaatccttttcagcaatattttgtgattttgaaggaagatcacaatagctacgaaccagaataacaacaaaaacatcaacgagaccatagtttttcccaaccatggtggaactcgggtgagaaccccattattgacaccatttttgaaggaattggacggactagcaccatcccccagaatttgttcttagaattagtcagagcctcaagagacacgataactcatatggcgactaatggtcatttcccaccaatgacacctactcacacttgatgagggtatggtgcaattaacaactgcacaatgtacaactatataagaacaaatgcgagtcctgccagctgaagtcgtaggaatgccacgtacctagaacattctcccactgcgtgaacctaccaatgtacgaaatactaataatgaagtacgtaatcatgctactagacatcatggtgaatgtgtttgcaagtattatgcaagagagcaattgaatgagcataatccatacgctcccgacttgaatcagccaccttgagttcccgcatgtggaaagcgacatgttgttctcgaggaagattagtgatgagatttaagattttgttcgccacaggatatttgcagaagtagaagggaagagaggtatcgcgaagaaaaagacaatgatcgtcgaatcctaaaagttgcattgatcgaaaaacccctgaggagtatgattttgagtcattttgatcttatagtcgcactcctagtgtgcataccagatcaatatcaatttttatgcatcttgaaggcagatgccacgtccaaggaggagatctacgagaccaactaaatgaggctttccttgtgtgatcactcgaagtagaaaattgcacaaacaacatacatcgacgggagccctatgattcccaagcaaaaaatcaagtcctccctctcgcaaaacaacctgaggtaataattaataatgttgttaatgctctagtcaatctagttaccacactagtcaatacacttggtgcatcagtcaacctagttattacacctgtcaatcttgtcaatgttcctatcaacaacatgaacattcctcccgatctcgcgataccaactaatatcacatctggaggagtagattaggaaagtttcctaagagctctgaggatggtcaaataataaaggaagctcttctataaactacatgagacgttttcattcaccgttgaagtgtgataagctcaaatccctaaggatttttgcctatccgagtcgctcaaatacaaaggtttgactagtcccatcgactatttagataaatttattactatcattgttgaatcgatttttattattgttattattaaaaataaaagtaataataatacataaaaagaatgagtcagaatgaatcaaaaagaaaaataaaatattatttttaa

SEQ ID NO: 302731 - DNA, 2358 bp, Cannabis indica
tttttttttctaaataagagttcaaaactatttttctatggtccattatatttcggccctgatcgctatgaaaaaaatatattttaccatgtgatttcgaacgtaaagattgattagaagatcgtaatagggggttgaataatagttattcacatactaatattctattggatcaagcctagaattgttggtaactatttggcctatggcctataatgtggccaggtgagcttatgttaactctattttcggtaaggtggatatgatgtccataacggtttctatcttttgtaatgaccgtgaggtctaatttttaatttataaaacgccttttttcaaaaaaaaaaaagcctagaattgctggttttggattggctaataagatttttcagatggagattggactcatttcttgctggcagacttgtctacacagctccaggtaagtattaagtttatattattgaattggtgattttttttattagtttttttaaatggtaatcaatttttactaattattctatattgggtgttaaaatatgatgtcattaataagtttttcaaattaaagagaagtgatgtttatggttctggagtagtgttaatggagttagtgactgaaaagaagcacagaagtttggagagaataataaggacatagtttatttggtttatagcatattcaagagccaagagaatgtgattattgatttggtttagaggctctaaattaagaaaatgcccttaaaatgttgaaaattgtagttcattgttcataatacataaattgtcatttgccttgtttttcttttttaggctcaactgtattattatatgaatgatttttggatgtaataataacactagcatagcattccctgaacttaattctatcaacacaacaagtaatatattgtccaagtgaatttgtggaccaaagggtctacaagagtttatgtattgtccatatgaatttaggacatttgtattcaagtctaactttattgttaaaataaaggacattttggaatccgaatcaaatgtatacttgcatggaacaatatatgccaatatagaggtcatgtacttttctattaaagagaacaataagtaaaagaggcacatttaattatgtatatatatatatattaaaattttatggagtgatgtgtgtgtggtgaaattaaggtaagggatgggaatagctagcttcaatgagattcttgagagccttgtcataagatataaaacccaagaaccaaaattcatggccatctttagtcacaatatgtatatatttttctgatgggttccatctatttgtgcagggattcactgttcttagctgctcattttgtatcacaacctatatatatatatacataacaaattgtcagatttttcccatcattcactattggattaattgggccatttatgtaacaaaaaacaaaaggcctaataaaataaggttgtagaaatagtacttactttgtaatgtaatgagtaggaattgggagtggtagtagataatgagtagtaatgggtgagagggaaatcactgcaaaaggcaagtcttttattggaaatataaagtgttccaattacaggtccagaagcagtggataagtaagatgcataggagtgtaagagcttctccccttctatgatctcaaatgcttctctgaataccttatcatatcctccatctgctacaacttttgttccttgtacaatccttgccattgctgcctctgacaaacttggacttgttttcactgcaaacaaaaatgacttagattcggatgtttattaagttgcgctcgaattaggttaaggcttgctttcaactactcacgtggtgctacgcgactcaagaaatacgaaggggcactttaaggtaccaagcactacaagaggtgacatataactattggtgtaatttaatatcaggtcccacacattttaatataagaaattactaaccactcacaacatgtcacatcaatatagtattggataccttaaaatacctaataacaatactctactccgcaattcctctacattattgtactctatagctaaaaaccccatatcatcaaaataaccctataagtacgcaattcatttggcatataacaaagaaacattagtgtagtgtgaaataatttctatttttatgataaatagaaagattttactatttataatgttatgatttacatgagacatgaggtcatgtttaagaatataatttatgtataaattaaacttattttacacttaaaacatcatgtgcaaaattatttgattaattatgtttagataataataataataaacaaaaaaaaa

SEQ ID NO: 302732 - DNA, 1504 bp, Cannabis indica
aaaaaatatggttcaatagtgtaccttaatttagaacaatattgttataatatcataaatatactattttttttatatttttattttcaatgttatttttataattttactaatatatttagctataataataaattatagataatttatattctttttttaattgttgtacataacaaaattattatttctaatattttaataaaaacattaaattttatatcatattttgtaactgtgtattagaacacataaagatttatataaatatatcataaaattattttttacattaattataacacaatttttatatcttcaatagagataatctgaaattttgatctatcttattattgagtctgtatttgtagtaaggtgattgtataattaattcatatttaatttggtgtgatgataattgtaatagaatttattacaattctacatttggtttgatttcaaaaaaattacaaatgtctttaaaatataatatagataaaattttattataatttaataagctaaaccttattttggggagtggattgtaatagttattgacggcttgacttaaccttgttgttgtgtaaagtatttaaaaattaaaaaaaccctaaaaaatgaataatcacctcattaagtcctattattggttcttaagtttcaaattctgtttgccaaaattttcaaaaaaagtttccataattaggaaaacaattataaaaacaaatcaaatgatgtacagtagcaaaccgacattttatcttctacgaagaatattttgaaaataatgtttaaaacattaaaacattttgttctttttagtttctttaacgttagtataataaatagtgtgtacggtcatttcactctctctttaaattattatattatttttattattattatattttttataattaattacactaaatactttttttaatacaagacttacttaattactaaaatacaattataaaatcaaaatagtatttaatattttattaaacaatttggtaaatttacaaagactacactagatgttgtaaagaatgataatggtgcatagcacaatttgagaaagagagaagaatgaagcaaaacattatcttgatcattcataggagattctgtaatagtaagagcatcaaaaattgacagaactttaccaacatattcaaagatagtgagacttgaacatttgagaattgtccattcagctatatatagtcgacgagcctttgtctataaagagtattcatgctcaagagcacaccacacagcagaggaggtattgtaattagccacagaggtaataacactctctgacatggaagattggagccaaaaaaagagaagttgatcttttcttcgccattgccaatactctgggttgagagcacctgtaaccaagagctctagaggagggataccagtaaagaggatctcatctaggtcgtgtctaatgactgtaggcaccacctgagacttccaagaa

SEQ ID NO: 302733 - DNA, 2117 bp, Cannabis indica
gaaaataaaatgtgctttgttgcattacacaactctatgagaatagcttcatagtacaatatatctatatatactcaatttaatcatttaatcaaaaagtcaatataattatgaacaataaccgtaacaaacaatttctttagttaagttggatttgattgtttgttttgattttttgtcttttcttttgtttcctatttaaaaaatcaaatgtgatatcatttaaaaaattacttactttctcatttttcaatttattttgcacctatttttatattattattaccaaactaacaagctttgtctcattgtacatatgttgttctcaataatatatatatataaattttgtcatcttttcttcaaattaatcacaaatttaatttcatatatcttccaaacatgtagtgttgataattgattaaatgaacttgtccaaaaataagatgttgattctagtagatcctttctccatgttttgaagttgtgtaataaagtccccacatattaatggagttgtatatttatatcaaaaacaatctgacacacacaagattataatttccattattatacattaattatattattgtcacaaacacatgtcatgggcacacatgtttcatgcatatttccattcccatatttatataatcactttttattttccagtacacacttaaaacaaaaacaagtagtacatatatatacacttacacatacatatatatacaaaacattatatatcatgatgaaccagtttgcattatatatttgtatatgtgtgaatatatttttcattaaacaacaaaatgtcccaaaaagggcaaaatacgttcttattatcatacaccactacactatatattattattattagtacaacaatatataaaagacaaatgcaagaacaaataagagtgtgtatgtgtattattaattaattaattagggtctttggttgtgaattggaggctttcggtgaggttgagcatagtccatcatatctatatcttcttcattactccttttgttttccttattattagcattaacatcttcttcatcatatcccagcattgaccttagactcttacccttctcattttctccctataaatatatatatataatatgttatttcatgcatgataaatttatacatgttgtatatcatatacatgaacattatgcattgactcatttttataagccaatatatatagtatggtcccccgtgagtatttatataaaaggattcaaataatttaaataaacatgatcataaatatgaatatagatatatatattaatttatgactacataccttaatattattattattagtaaattcaacacttgaacgtttgaacaactgatcagtatgtgatgataatgattttgttgtgagatcgtttcctcctgtacatatagataatatatatttacaatcagccaattaataattgtgtaaaccaaataattccataaagaaaaaagtaacaataattgctacgtaccaataattagtcatttgattattctaaattttaaatattgtatatatattatacgtacaataaattagtcttttggacattaatcttccttctaaaaatgtttttttacacgtttattatttatttggtgatctcaaaaaacaaaaaagaaccatatatatagaatataatattatatatattatgtaggataaataaatagttaattagtgtctcatgttgcattctttttattttttaaatattttattaattttttaattttttttttttttattatttggtagaagtaaatttgtaacttaaaatttttacttttatgcatattaaattactaaactaaatctataactacaacactttattaatttattgatgcggcttgatcagaattagccaggtataatagcaaattttgtagaatatatattatttattatattttagtagttgatgtttgtatttttagtctttatactaaattctatttttattataagtttagttagttaatttaattaaactcatccactacttaattagtgttgaggggagtttttgtataaatgttatcaaaagatatatattccattact

SEQ ID NO: 302734 - DNA, 7208 bp, Cannabis indica
tgtgttatataaatatatatatatatatatatatattatatatggggcctccaagcttccgagagagattattgagagtgatgatgttgatgaatgatgatgatatgaagaagaacagagtcgagattgggtcctccaagggtccatgtggggacctccaatgtgtgtgtgagtggagaaaatcagtcgctgggaagtggagactgaaacgtcaagcaaaaccaataccaacaccatcaatcaaacaacacatcactatcttccacccactctcccaaccaaaaccagagaaagagaaacgatgtaacatcatcacttatattattttctttctttcattcctacctactgtgtcataccaactcttgactttccaagaagcaatctatctcatttattcttccattgtaagtttttctcctcgttctttatcttaaatttgttttgttcataaaataatgattctgctttaatttattggtgcatctttggaaattttcttaacaacgttggaaaaacatagatttttagtaattgattagcgccatgtaggaaaaaaagagtgagatttttttcttcttctcctttatcttgagttttgctatgaaaaatggaaatgattttgtttttatttgattaattaatttgattggtcaacttttaaggtttttgtttaattgaaatacccacaggaggattttctccctttcttttttcccatggattcttttaatcacagaagtgggttccggtacaatctcaacgcagatactgtaagtgatgccaatggtgattctgagttttcagggattcttgaaatctatgttcataatgctaggaacattcacaacatttgtatctatgataaacaagatgtgtatgcaaaattttctcttacttacaatccagatgagatcatctctactagagtcatcaatggaggtggtaagaaccctgatttcaatgagaatttgaggatgaaagtcactcagcttgatgctgtactcaaatgtgaaatctggatgcttagcagggctaggaaccttatggaagatcagcttttgggttttgctctagtcccaatttcacaagtgattagaaaaggaaaattgtcccaagattatagcctatcttccactgatctctttcactcaccagctgggactgtccaattgactctttcacttaacacatctttgcctattagtccttcccttaatccgttatctgaatcttctgctaattcatctataacttcagaggttgttctgcttgatagaaaaatttcggaagtgatcttggacccaattgagtattgtagggttgagttccctgatatcaatgtagtgagggagaatcaacaaatggtgtctgagtattttgatttggcaaggcatggctgtggtatcaagcctggttctggtggagttgcctcatttcttcatcttggtgcatcacctcagcttggtgatgactatgaaatgactttaaattcatctgaggaaactatctcacctaatgggagcatccagaactctggcttctttagttctactgcaacaagtttgagtgatgataagaattcaagtgattcaatcgagaaaaggaatcgcatggttggggaatcatcaaattcaggtaatgcatctgtaactactacagaagcaggaaaccatggcccaagtgcttgtccagatactccaacttcgagaaaaggaagcgaagctagagatgagaaagagtcaaaattctcatgtaaggaagaggaggaggacaacaacaacaacaacaacaaaggagaaggaaattcgggttcttctcggtttggccaagtgttttcagctccacttgggaatatcaatctagaggctgagcagtctgcaatgcagcaacaaatagtggacatgtacatgagaagcatgcaacaattcactgagtctttggcaaatatgaagctaccaatggagcttgataaggcagaatgtcaagatcgtagtgaagctattcaaaaccataacaacaaattagaagttgacaaaaaaaaggatggatcaagggtgttctatggtagccgggcattcttctgaccactaattgatgctgcaaaatattgtgcaagtaagtttattttaggagtttataatagagttcaattatttaaaattgtttgttttcatcagctgtatagtatttactatttactaaatagttaatgtgaataattgcttcaattgattgacatgtatttgctccactgtcagtccctaccataactaccataacaacattttgtgttcctctgactcttcagagtcgtagaaatgtaatttttatatatataatatatttatataagtatttgggtgcttgaagttgaagtacttattaactacagaattttcagcaattcatctctttttatacttttacttttttgatttaacttcagactcaaagtatttacaattcacacacaaacttacattctcatgtccttgattccaaaattgaatgaaccatgcgaaggatttcgggctaataggcctttgtaatgtaattaccaacagtttcaggcctgttcttgctctgattattaatgacaaacaaagtgtgtttgttccagaaagattgataatatttttggttttgaggctatgcattgggttgagcatcataaacgaagcagaacgggtatattgcttctaaattaggagattggggaatgagtatttcttagagccatgatgaaaagattgggttttgtgaaatcatggattaacttcatcatgaattgtgtgggatcaatgtcatattctacaggttgatagtgggagatttaaagcctaccgtgggctttggaaagggaatcttttgttgccttatttgttgactgattttgttaagtcgcgattgtctaggggtgtttgtatagctcctagaagtccactaatatcatatttttcttttctttttgaatttgatagtaaataatggtgatgagaataattgacttatattcaattaagattatagtatatatttatacacaatttaggaaagttatactaggaaataaagagaataaaccaaatttagtagtttattttctagttcattttacaactaatatacatatctaatattctccctcaacttggagcatatatgttgatcatacctagactgttacaaaaataatcaactcgcactctattaagagtttttgtgaagatgtttcttagttgctctccagtcttcacatatccaatcgagatgaaaccttgttgaatcttctcacaaacaaaataacaatcaatttcgatgtgcttggtgcgctcatagaacacaagattagatgcaatatgaaaatcaacttgattatcacaccataatctcgttggtacttaaattttgagtcctactttagctaatagcggatatatacatatcacctcacacactctgcaatagctctattttgactctgtattggatcgtgacaaaacattttgcttcttacttccaagaaaccaaattccatccaacaaaaatacagtaacctgaagtgaatcttctatctaccttagaacatgccaaaactgcatttgagaaatacttaatatgagtgtgcccctggtctgtgtacacgatgtctcattcaggttctcttttcaaataacacaaaatttgctctaatgttgcccaatgatgaattgttggagatgatataaactgtctgaccacattaacatagaatgtaatatttggacgagtcacagtaagataattttattttccaaccaacttgcgatactttttagggtctttaaatgattccccatctcttgtaaggtgcacaacaagattcattagagtactacaagattttcttccaattttcctatctcgattaacaaaccgagtacacacttcttttgagatagaaaagtaccttgtttactctgagtgacttcaactcccaaaaaatactcgcggatcccaaaatctttcgtgtgaaactagtatgaaagaataatttaagggatgagatgcctctagtatcatgtctggtaataaccatatcatccacatacacaatcaataaaataatcctggcagttggtcttttatagaatacaaaatggtcggacttacttttcaacatacttgcctcaacagcttgactaaaaccaagcacaaagactttgttttaatccacacaaagattcgcaatgacgacagactttccttgactgcccttgagaaacagatgttgctccatatacacctcttctttaagatctccatgaaaaaaaattgatatcgagctcatgcaaaggccaatgatgagtagctgccatggaaatgaacattcgaaccgatgttagcttagtaataggagaaaaagtatcacaatagtctactctataggtttgaacataactcttagcaacaaaacgagcctttaagcaagcacttatgccatttggattcaccttaactgtgaatacccatttgcacccaatatcccattttcctgaaggtaaaacaaccaagtcccaagtaccattcacgtctatagcattcattttctattattgcagtaagccaaccaagatgatataagacttcacgatcattttaggtatcgatatagaatcaacaaaagcaacaaatgagcaagaagacgaggacaaatgattataagaaacaaaagaagaaataggataggtacatctgcgtttatcttcatgaagtgcaataggaagatcatcacttgggttcaaatctgatggcacagaagtaggtgcaggacatgaaacatgaggcagaggagtcggacgcctagagtacactttaataggaggctgatgagttgtaggcatgctgagttatgaccgttgcaggtggaggaacaagagactcgttagaacatgtgttaggtgcacataaaatataccaacaaagtatcatcctcccctaacgtgtaagagtaggtgaagatgaaaaataaggtgtattttttacaaaagtaacattgatagaaataagatttttattaagatcgggacaataacacatatatcctttctagacgaggataaccaaagaagacacacttcaatgacttaggatctaatttggtgacatgtggacgaacatctcaagcaaactaacattgccaaatattgtcgaggagcaaatggaaataatgacttaccaagaaaaagaattttaaatgggacctcaccattaagtataaaggatggcatgcagttgataagaaaacatgttgtggtaacaacatcgacccaataaggtttaagaacttgcatttggaacaagtgggcacacgtagtttcaagaagatgtctatttttacatttcgctactccattttgggatgtcgtatcaacacaggaagtttcaagaagcataccattagagatcatataagattaaaattgagcagatatatattccttgccattatcacttcgaaaagtatgagcaaacattaaattgattttgaatctccacacagaaaacacaaaatatagaaaataacttaaaataatttttcattaaatataaccaagttacacgagaataatcatccataaaagtaatccgaattcaggtttacacaaaataggagaaggacctaaaacatcaaaagaactaagtcaaaaggagtactagcacgtttatttactcgaggactcaaactaacacaatgatatttgacaaactgacatgactcacaatctaatgaagatacattactatatcggggacaaagtttcttgggcgaatgaagggatggatgatctaaacgagaatcaacctcaaaagtagaagcaacacttggacaagcaatagacattggtggaagtggatcaagaagatttaagctgtcagatccatgtcctttaccaataatctattttgtcataagatcctgaaataaattatgatcgggagagaatgagatgcaataatttagattatgagtgagttttctaacataatgcaagttaaatgatagattaggtaagtgtaagattgatgaaaatgtaagcagaggtgtacgagtaacggtgtttgatccaagaacaaaagaggaagatccattagttaaggtaatagtttaagtggaactatgagattgaaaagtaaaaaagagattagaattacctctcatgtgatatgtggcaccagaatcaatgacctattttgagaatttgaaaagaagacatgaattagatttacataaatcaacaataatagtgacataaggagatcaaaacttaagtgattcctggtaccttgagtacttggcaaattcatcagcagaaataacgattgatttgtcagatgcatcatcagtgcttgcaacattagcaaactttctttgctgatttttaaaatgcaactgtatacactcaattttggtgtgaccatactttttacaatagttgcaaaaaaatacctccaaaatctgaggttcaattgtcagacccttatggatatccccatttctgtttagttgaggtagtatatctcctagacacattactactattgcgacttactaaagtactagtaagcggagcaaatgaagtagttcagtattgcaaatatgagatgtcagacccaaaaagaacttgtatttttgcagaatcaaattccttttccgaagtacgaaaattccaaataatctattagttctctaacaaatttacagtgattgatcaaaccaatcacctcatttttaatagaattttgaatttgaagaaataagcaagcatcctccttaaagccatgtcagattgactatctccttggaatctgattttggaagatctctagtcaagtaatcatctttgtcaatactccataaatagagaaaaatagtcttgctccaaactaaatagtttgaatccttgagtttatgatcaataattttagacattattggcaccatgtctgtcacaatagttgacttattttctgccataatcgtaaaatatcgaatcatgactgtaaagtccttttttggcaagttagttgacaaaatagttttttcttttatggtaagattcttgtgcattcataaccgatttcttaccttgtttattccgtttgtagttgctcttttccttgttaggaaagttgcacttttcagctgaattttcctttgtttg

SEQ ID NO: 302735 - DNA, 2862 bp, Cannabis indica
acgaatttttttaattttttgacttttaccgtcggttgggtaattagtgagggatatataacggacgcaatttatttattttttgtgacattttacaaatgacgaatatattgaatatggtactattcacgtcggtcaacgcgatgaatagtcgcgttgtaccgacgtgaatagtgaattttgtagtagtgtgttattgttactactactattattattattattattattgttattattattattattatttttaaataaataaatttatatatatttggttaccttaaaaattatcagttaatttttaagttattttaaagagtattgctataatgcattagtatttaagttaagtgccctagtttggctctatagctattatgtgcttttaactatcatgtgtttccaccaagaaagccatcaacttcctatcaccctgtttttttaaatttctacttaaaaaactgatccttgactattctgtcgttctttaactgtaaccaccactgcctgcggtggtcttctcccccttccctattttttctacactcttccctgtcataccagatgcaatggaacccctctccatcaatttcaactccacactctcactaacagtggaagaatgctcaattttatcacctgacacatcccaagtttcccctctgcaccatgattcacccatgttctgccagcctgtgtccttactgaaagaacagtatatagaccagccttttatgatcaaatggcagggcattggaagggacgattccccgttaccataactggttacaaaaccgagatgttctacattgttttcggttgtgaaggagataaacgttgagtacttaataaagaaccatggcactttcagaatcatcttatcattttatactcgccaagtgctctacaaaatgtcacaaaggaagacatgattttcacaaccttttgggttcagatttatcgtttgcctttccttagtaagtctaaggctctggctgaagcgcttggcaacactattggtgaattcatagatgtgtttgaagactcaactaatgaaggaaggggtccttttttgcgtgttcgggtcaaactttttgttgctaaaccactccctcgaggacaaaatgatcattctaccaaaagtaaggaatgaattttggattgaatatcgctgtggaagattttgtgaatttttctttgagtgtgggtgtctcgggcatccatttgaacagtgcatctcttttatggagcttattgacagtgggaatgacgatgatcttccttatggcttgtggcttaaagttgctaggcttccctcaaataattatgatcgttacgaatggatatcagcaaaggtaatgcctggtctttcatcgcaagactggctcaaaggacttttgccacaagtttaccacattatcttcaagaacttttgccaatccaaacccaatctttgaaggtgaatcttcgaccgcccgacaaccattgctgagaacaaaccatcactctcctaacctgaacatcttaacacctttaaacacttccaataacagatttacatctataccaacttcatctcatacaccacctttacacccgaatcttcctactgttactaccaccaatagccttaccacaccaataccccatgtcgtccccattaactactctatttcatctactttggcaccaccaacatcagctgatacttctcccaccaacacaaaacatccacaaccaaccccaggccaacactcgctcaaacctataaatactacccccaccataacagatctaacacacatatacataccagatgttgggaccccatctcttactttaaattgttttgcaacatatcccccgagtgctagttcccttaatatgaccccacccacaaaacctcttatttcccaccttccctcttgtcctcaaaaaactttcacaccagcaaaaatggttatatctgttggttttccccaaaatttagtcgctactcttgatgttaacaaagaaaacacaccaccaaacctcacaccgaaacgaacaaatgacacttattctatgaggaagatacttaagagatgtcgtggcttcaatggatcaacctcttctactcagtcaatggaagatggttcggagattcaagtttctactgcaatggattctagtctctcatatgacttaattgcagagaatgctttgcaaccccataactcatcatgaaaattttaagttggaatgcacgggatttggggaacccgagtgcattcaaacatctctgattgcttgttcaacaacaatcaccccatgttttgtttctcatggaaacaaaactcactcttaattcaattactagaatccgtcaatcaatacatttctctaactgtcttgaagcctctcaggttggatttagtagtggtctaatgcttttgtggacaaaggatgttgaagttacattgttgaatatgggttcaactttctttgattgctatatgaaattcaatggcagcctaagttttcacttcactagattttatggggctccggagattgctaatagataaacctcttggactctcttccaaagttttggtgatgttgctccactccaaccttggcttgctattggggacttcaatgaaattttgtccaacaatgacaaatcgggtggagggcttagacgtgagtctcaaatagaagcttttagaacaacattggatgaatgtttcctggaagaggtgccttttaatggtgatcctttcaccttgattaaaaatcgaactgctatgcataaaatcacatttagccacaaaaaaaaattatgtggtatctaaaaagttgttactaaaagta

SEQ ID NO: 302736 - DNA, 1498 bp, Cannabis indica
aaaaaaaaaaaaaatagtttatagtgctaaaaataaggctcgaatattttattacacgcgtgatggttttatatatataataagcgtgtggtaagtaattatttgaaacttatttttggttcaaattttttgaaaatttataaaaggatggcgaaacagatatatagtgtatcaatacgatttacaataaattttcactaataattatttgtgttataaataaaaaatcaaattttataataataataaattttgatgaagtctagattttgtcttttattattagaatttccaaatatgtaacttcaacatatttgattaccaaacattagtcaaacttgggatgataatttttctatacatcatttgtattgatgggtaattgttctttagtcaagttagatttatgatcaaaggaacatttgctatagtagcttctaagtaaattttacaagtaacattttgttttaagttttttaattttttcaataaacatttgtacttaggatctagtgaattagtgtagaatattgagagagaaattgtcaaaaaatttaatttagaaggaaaaattattaataaccatgtatatattattatttttaaagtctaacaaatttaggctctattaaatttaatcgacacaatattaataacatgcttaacactcgtatattcgaacaagaaataagaaatgatatttttatttagaaattaattaataatttttttcttaattttattgaatttctacatatattgttcaagtttagaccaaacatcatttctcttaataaaataaaagtacaaaattgcactagataaataaagataaaagtgtgcatataaatggatccaatctaataataatcgaccgccagccattagatatcaaattatgatcggttcagattagatgttattttcagatcgaatgttaaatgggatgtctaagaatccaatacatcaaacattcaatcaaattaattcatatttttatttagtttgaacgattaattatattttatattgttatacgtagaaaaatatacgcatatataaaattaacatttgaattttatatatatatatatattttttttttggattcaatggattcaattcaatccaatagatattgggtttaaaatattagatagatctgatccaatccagtaaatactaggtctaaaatattcaataaatacgaattaaaccaatatatatacataaaatacattcaatagataaaaccgattcaatctaacatctattggatgttggatcgattagatgattgaaattaattggatcacgtcggatggtaaaatctagcatttaatatataattggatcggatctggataagcttaaaaacattatatgtgttccaatgaacacccctaaataaagagctaaatgagtgaaattagggcaaatactattttagactatgtcttttgtaaaagttatatattgaactctctattttgttaaa

SEQ ID NO: 302737 - DNA, 1533 bp, Cannabis indica
tgatgactatgtcataccaagatatacacgatgagctcagcaatggtttcgaggcttcttggatccgagttttgcaaaagaatgacaaagaaaaactttgctacattgataaaatatacaacgaggctttttgtgtttatggttattgcaaggcaataaaattggcgattacaacagtgtgcagtaagtagttctatgcttatatttgtttcttttttgattttcccaaattagtagcattttttttagttgaaaaaagagccttatataccttaaccttaggttacataacctgaaaattcaattccaggatccctaaacaccctaactgcaaatttaaccacttgggagcccaatcccaattggttaaattggtatttctaggctagcccacgtggctaaattggtatttctatgcttgtataagaattttgtgtactaactatatcaaatgtatttataaaaaagaaacgatgtatcaactgacaggatgatcttctgttggatttggatataaatacacacaactatatccatatgattaaacatatgtattagttgatacattattttgaacattttgtacaatgattatacattagagtaaactacataatatttcgtgcatatatatttataggaggtaattacagtgtattagttttgtttttatacataggaatagctatatatttttggtatcgagaaaattataatttaattcattttaaatgactgtctacatactactttgtattataacaataaccatcttacctgattctgaattctgaatataatatgatactataataagagtttaaaatagtcaattgccaaaaatatttatgtaattaatgtttgaacattctgtaaattattgtcataacaaccgatatctactataactataatttacataattatataaaaaaataaattattatatttgaaagtactaaattcaaagatataaggacaacaatagagtacagaatttttcaatatttataataataaaattacaaatagttagtaagatatattgttatactggatgcttcagggctctggcgccatatattcgacagacgtctaatgatgccatcggctcatgttactgttggtgagtgttgtagctaactacttacaaataaatttcttatttatatctttctttctaaatattttacatttagatcgacttttttttataaatttgttatttcttattaatattttgcagaatttgtttgtgtccagtggaaaaacattggtaagatctttttatttcaagtctatagtttataaattattttaccatacaaatctatgacaatatggataaagtactgttaggattttattaccattctattataaaataatacaaagattacaataagagattaattaaatatatgttacaatacatattatatattaattattataaagaaaagctagaagaaaaagattacaacaccatatataatacatatagtaagagaagaatatatatatataatatac

SEQ ID NO: 302738 - DNA, 1709 bp, Cannabis indica
ttttgtttacgtgtggatgtttctttcctaattttgcattttattattcgggagatcgaagattcagttattataattatttttagctcatatacgtataaaaaagattagctcataatataggaaagtatcataatatatatgaccaaattttaagcgaaaacttaattagtgtgtttataacggtataaaaaagcttataatgagtggtcttgaatcaagcggcatataggacaagggtatatatatggttgataaataagtatatgaaagaagcaaatcaacattagtgaaaggccaaaacattagtgaaaatataactacaaaaggtacattgactggtttctgtaatatatagtcatttttaaatttttaaaagattaatactgcaatttctttatatttccgtcgactaaaactaaaaatgaaatgttgaaatatccattattattggtgtggtcattggtcaaatgttaagttctatgctaattaattgttatcggacagcgctcagtaatggtggtcgattaccaaattcagggcaatgtgctaaaaggtttcgggggcagtttggacaatgtaatattgtaatgtacgatattaaagccaaaaaaaaaacagtttctataagataagttaaaatttaaccatccaaaatgctctgtttctttcttctaagcatacaaacacaaatcagaagaccacacaacaaaacaaaacaatctttacagccaaagccaataagatgagaaatttgagaacgcaaatatccctctttctctttcatgataatcctttcactcattctcacacttccgtggaaaactgctctttagttaaaagctcatgcaaggcatgagttcccgttataataataaaaaaataataggtttattaaaaaaaattcacgtggaattattaaaattgttaaatttaaaattttttgtctaattttaataagaataataatctaccatacataaaaattgagagtgcataatttaacacatcaacattcgaaagatatgatttgataaatattaaagtctgaaaaaatataatttagtacaccaaattagtaaattaaatgaaattaaacaaaaatcgatttaatacatattaaagttcagacacaaattttaattatcctaaataatatgtgtatatattatttaaataagcaaacaattatatcataaatttcaaattatatatatattaaaatatgtatacacaatgacaacattctttttcttcttacaataattaaaagtaaatacaatacggcaaatttatctataacactatgatgatttataaactataattataaatatagaaaaaacgaatagtgtatataaacaaagaacttaataattttaaaaatatatgcataaaattgtcacgtaatattctgcatagtaatctataactatataaaaaggagaatgtggctttgggcttcccaaagtaaattaccaaattctccttctttttttttttttctatctataacctttataaaaaaaaaaaaatgtttttgagttccactaagtaaacttaattaacttttattaaatattaaactacaaaaaataataaattgttcttttataactcaaaaaaaaaatctaagtcaaacaaccatacatattgtaatctttttttaaaaaaaaattatttttgaaatctttttatatcccacattt

SEQ ID NO: 302739 - DNA, 2160 bp, Cannabis indica
aaaaaaaaaaaaactactattttatagagttatcatcggacggtagatgtctcaaaattctttcccttatcattattcgttgacaatgaaggtagtgtttcatgccttcatgggcaggcaactagttaatttcaaaatagtaataaattttggttatttatgatttttctctcaaaatgtgacttatgtattattgtgcccttgaattttatagcagttaaaaatagtccttgaattattcatagtgttgtaaattgatccttctgttaaattttattacatgtgacaaataaataatgacttgattggttagctagttgccatattagcgctacttgtataatttaaaattaaaaaaaaataaaaaaatatgtatttttaaaagatcattaaactaaaaattaattaataattaaaaaaattacgtgaaactaaattaaaaaagttttaaattatttttaaaaattaattatacacgtggtgttgcataacaattgtctaaacaattatatcatcattttgtttgccacgtatgataaaacttgatagaatgaccgatttacaatattataatagttcgagactatttttaaaggactaaaaaattcaagagatagaatatacatacttacataagtcataattcgcggaaaaaaaattctaaatagccataaattgtttacactaaaatttcacacacactaatcatatttactttagacgaattctactaaaataaaataactttccacgacacatatatgtatgtgtaatgttgtcaatatttcactttcttgttgatactctcaattatatttttaaagattcgtgcacttgtgagtttatttttagtaccaacagtaaataggatcttgataaaataagatccaacatataccagccactaagttgtggacgccaccatcttctttgagagagagagagagatatgggatttttttttgagagatcgtggttttatggttatatccaaccatcgtggccaagatttggtcgttcgcctaggccgagagagagaaacaaagagagagagggaggtgtcgaagagaaagtgtgagttaaggatagagatcgtaattttatgatcatattcgatcaccgtagttaggatttaaccatgcgcctggtcttttgtttgaatcgagagagagtgggaggtggatgacatagaagaaatgagctacggttttttaaattataaatatttatttttgtaattttattatttattttttaaaattattttaattttaaaatgatgtagaccacttaaattttacaacgtataattttgtttacacatcagcaatatatgttagtatttaacaatattattttaacggaagtgaaaataacatagtaaaagtgaagtttgtacacaaattatttagttgaaataattttagtcaatatcctaaaaatatataatacaaaagtctttacacactcaattgtcgcaaggaagacatgaatggttgatttagtcaattgatttctctatattgtaaacctctcattttattgtgagtgtatttgacttataaaaagttttactaaacaaactgttaaaataaaaatttctattcatttaacaaatttgaaattatcatatctattgtgagacctagaaatggtatttattgccagaattgataacaaacttaacaccattcatctactaaattaagtctctgtacacattaaatgcaaaaccaaaaataatgttgttgtaagatgaattggttgagttatttaatggttgtcagttgtcattataatggatgagattaggtattaaaatttaataagtgacaaaaatccaacctcttagtctcaccattacccccaagaaaaagtattggaaaaaggatagtcgtcaatggaaataattttgggagaagtaagggagagtttcaaaagtggcaaaactcgaagtttagaatggagaaaaaaacaactcacagcactcattaatcttatccaagataatgaacaaaagctctctaaagctctctttcatgatcttggtaaacaccctgctgaagcttacagagatgaggtaactatatatgatataaaaatactttgattaattaattaattaatttctaataaaataaaaatgttttttttttgtta

SEQ ID NO: 302740 - DNA, 4715 bp, Cannabis indica
taacaagtgaaaaaaaaaaggttgaaaaagctccaaaataataggaactctctaaaaacataatgctactgtcaaccagttaaaaaaaaaacaaaaagaaaaacccttttaatgatacacttgtgctttccaattttctcctcctcttccttctgtctaaagttcccatctttttttttgttcttctttctgttttttcagttttttttttctctttttcgattttcgggtgtgaactaatcttcatttaacttccagtatacagatacaagaatgactatgatgacaatgatttcgtggccctttcggtgtgtcaaaaaaactcctataccttacactcatcccccccttttcctcgactctcatatcaaaactcgaagaagccctggttgtggctcggagtaatcaaggccttcttcttcgagaaggtatctttgtacagcaattggaagtctggctggtgtgcgggagcctctagtgtggtggcctgttccgacgcagatatatacctgcagtcgttgctcggttgctctagcagtgcttctaaggagagagagtttctgtttcaggacatgaatagcttcacttacgtgtagcccgtgtaaatctatcatcctctcgtttcctctaccgttgccttgcatctcgggagcaactgggttcctgtttacaatttggaaacacagcaaaagagcagagcaaaatgaaccaatcaatctactcattctttttttcacacaaattattggaacgaacgaatgtcaaactcgatctcatgttacactcggggcattattagaacaaacaaacctactttactttcattatatgcttgtgatatgccagatagacgcagcccgagcaggggacttgtggtgcttacaaagaaccattctgacatcgatacaaaaaaatgaaaaaggagagagagagacttgaatgaatttaaagggtcgaaagattaatgcccgagagaggtctaagagattaagctaatcaatcagcctataaagatctagataaacgggctgataacagataacagataacagacgatggtaaaagcaaacgaatctcattaaaaaagcaatcaacaacaagcgaaaggacagcaaatgattacagacctcatccgatatatcgattcttgagcttttccatgagcttccttcattcgcatgttgtgaagttgccctttcacactcaactcctttgcaagagccttattaccaacaaggtatgcttggcgtgcctgtttcccgaaaatataaacacaaaagtaactaaaccaacatggactaacttattgtaatttctatacaattctagtcaaagatagtctgcatgcaaccacaacaaacctgctcaaaatatgcattgcgtagtcgtgcatgatcacgagcttcctccctttgttcggaatacatatttgctgccatctcaacattgttaaactagatacatctataggcacataaatacaagtaaatttgattgattgaccaaaagaacattaccaacagcttctccagtttcgagccaaacaggagcagctcgagcagaaccccgtgactgtaacctatcaccgtaggtacctcttccatgcccgctgctgtaattacttgctaaagaatggccacttctacttgagccaatagcggcatctgtagaattattccgttcgtatttccacccaccagaatcctgggcagccaatttcctaacagctgtagcaaaatctacactgcctctcgatggaatggaagagctggacttgaataaaagcaagctctccttgtcagaagaccgataaggatagccactttgctggaattcatcgccagtgtactttcgagaaacgttctgaccatctgttggattaagtgcaggaaagtccattgcggtgagattaggagaagataaggtctttgggcttggatttggactgaaaccattatcaacttgatgctacaattcgaacaaagttacattgtcataaaccagagataatcagaacatggaaactacaatcaagtctcatcagatatgcatgtatatatacaaaatacacacacacaccaaacacatggctaagccaaagttcatagtcctacattaacaacgaaaaacattctcagaacacaaacagaaaaagaaaaatcatttaaaagccaaaagaaaaaatatagatgcaaacgatataaaatttctaagcccccatttcatgggggataggcaaaagaccatagttgcatttgagtaagctcgatactctatggcgagccagctcttccctgctaaaataaggcatatgaggtagtgttccccacagtcaaaatccaagttcaaccaatcctatgattttactataacccctaattctcagattaacaataatgcaggagatggatattataagatcgaaatctaacaaattatattcatttttgtacaaggatattaaccaacaattgattgagaaagacaagtctagctcagacaaatcaatcatacctctaactggattaacatttcaacagtcaagttcaggtcacagccattggcaaaatacacctctgcaaggctttcagctgcaaagccggggaactgtgatgccaaaaactctacaggattgatatcattatcttccacttgctcaccgaacatatcactcataaacgcgtgttgagaaaggccatcataaggattcgcatcctgaccaccattcccaacaagctgattattaccattcaaaatctgcttatcccaaggctgagctgacatatttaaataactcgccgaagaaagatcatcaccatagcccaaaccagaaagtctcaacttctcagtaaaagaaccattagtgtgagtctcattcaactgaaatccaccacctgtggtaggcgaaaacctgcttacttcactttcatcatgtaaagacaagccagacaaagtaagatttccaatggtttgggattcatcttctcccataaccttaaaatcgggggtgatatcatcggggagttggcgacgccaatactgatgagcctcttcatcagaattattcgacacagatgactctgttctatctaacactgcctttcctaaacttcccgacgaagaaaacaaagacgttgaattcgctgcactagtgctccccgaaaatgaagacctgaagccagaaggaacaaattcagctgcatttggattcaaccttgttatcttactagcagtgctctcagtcgaatagactcctttcttggataagctcattctttaccgaaatcgaaaaaattaataactaaaactaatgctagataattgaacacaactcaaattttcattcagcttcaaccaaatcctgcaaaaacataaaaatggcaaattagtctccactgaacagcaatttccctaaacaaaacattcaaaactgcaaattgggctcaaatgtagtcaataaccttatctcaattgcaacaaactacccaataattgagaaattcttttcaattcaattgaaaatttaaaagaaacaaaatccacagtccgattataagacaaactaatgataatcctttatagtccaactcgaaattgagtcaaaggttataaaagctcaatcaaaaatcacaacaagacaacaactttaatgagatttacccaattctgtcacacctcaaattatcaagaaatgatagaaatccacaaaagataagataagacatttcaaacccagaattgtagataagagaaaacaagtcaactcacaaaattctcaacgaataactgatatccaagcttgttaaaatgaaaccctaaacaagattaactattattaaacacaatcaagctaataaaacccgcaataaataaagaattaaacttttttttttcaaaagaaataaaaatatataatcaactcaaaattaacaacaaaacaaaattaatagatctaaaaacatactcaactccaagaaagaattcaagaaacacaaaaagccctaaaatttaaccacaattccacaaaatcttaaagatccagtgaaaaattacaaacctttacgaatcaaatcaaaaggatccatggactatgattaaaccccaattaagaaaagatcagaggaatctgataagagagagagagaaggaagaaaattaaaggttggggctttatagggtaaatgtgatatacaaagtctctcaactattatctttagcatttcagggcttctctctccactttctctctctataaattattttattttattttatttatttattattatttttgtgaaacccttgtaatggtagcaacaccacccaccacaaaaatatattttttattttatacaaaagacagcaaacccttcaccactagatttgacccctctctcttctttctctctctaaaactaaaagagaaatgttaatattattgatataattaaagttaattagtaatttttcccttaaattttgacatgtactaaatcgtaccatttaaatttttttttgttattaaaaattcttcctgaactattgagattgttaaatttaagaacttttgtctaattttagtaaaaaattctaacataaatgaaaatttaaggggtatgatttagtacatatcaaagtttgagggacatgatttagtagatatcaatgtctggggagcatggtctagtacataaacaatcactgaaacagtaaaa

SEQ ID NO: 302741 - DNA, 929 bp, Cannabis indica
tatttacctaaatttttattttgaaattaagctttgagatacactaaaaattcatatattaccccaaaataataataataataattaataataataataagattttagtctcaatggagaagaataatattgtgtaagaaaggtataaactttttataattgttaaaaaaagaaaaattatagcgatgtaatcaaaggaaaaaagttaattaatacaaaacatgtcacattctttcaattttattttatctataaataattttttgctccaaactacatgttcatgtcgtatttagttttttttttttgagaagaacaaaaaactttacttattatttagtgacttggaaataaaacaattttcagttttgtttgttagttgtctcaaaagaattatgtgaaactttatttatttaaatttgagtaatttgtgaatttccaaattattattattacttttgctatgttaaatcaactactttttcagtttttcaggagccaaagaaaaaaaagagaagcacttttcagtcaatgaagtatgaacaatagaatatttttcactgggttcaataattgatttgttttggtatttaaaataattttttattttaattttttttatattcatatatattataattatttaaataaaataatttaaaatataaaaaataatatttaaacaatttatttcacacatatataaaataaaataattatgcgtataacattatttgaactcttttttaccgttccaaatttaaataactattacgtatataatcatagcaaaaaaattaactaaagattagtttaaatactaaaataaatgtatacatttcttttaaataattattacaaaaaacacaaagtgtgtaaacggtaaagccaattcaaattttttagaagtctttatttttcattttttt

SEQ ID NO: 302742 - DNA, 1395 bp, Cannabis indica
ataaatattatatacatattatatctactagcgaagtaaaaattataataattcacttctacttataatatatgatctggccattcattattatattattgtactaatttgtactaatgattgatcgaaattgtacactactaataaatttgtatgttataaaaatgttatgacttttgagaacgaattacttcttaaaatatgtatatttgtaaaagaaaaataataatttttttaacctcagggctaggtgtgccctaagtgcaggaccaatctagactatgtggtagtactaaataggtcagaatcgctacaaagttgtgatcaacaacaactcttaaccaatctcgtgctgccacgaaactaggaatagaattatcaacattaaaatgttatgcttctcgagaatgagttttatcccaagctacatatagagtgattctgagattagataggtttttataagataaataaaaagttatggctttttttttatcaaaacacgtgtggtactaaaggaaaatatctttccaatctctcagagctaggtgagccctaaatacagacccgaacaatgtggtgatgtggtagtactaaattggtcactcttgaccaatcacgtggtgccacgtaattagggatataagtaaataatgagtatatatacagtacctgccggtgtagagtctttcccctaggacaaagtaagctaaaatggcaaccaatatagtaccaactggattgaacattgtcacaaaaactggtcctttttgttcagtgcaccatagttgaatgaatattattaaacctgaacaaactactccctgtgaaaattttaataattaaattaattaattagtgtttataatattaattaagtaaagtaattataaattaatatggaaattaattaatttactatatatatatacttactccatatagtatggaccacaagtcaatatcaaatccaatagtccaagcagaaggactatgctgtacaaacactgtgaacacagctgattgtgctccaccaatgaaactcatccacgtggtcaatgataattgtgctgggtatctttttaatgtgtatgcctatcattcaccaaattataaatggaaattcagataaatttgtgtcaacatatatcaattattagggtaaatactattttagattttatgttttgtaaaaattaccaattagattttttgttttgttaaatgataaaatggactctgtattttctaaaattgtatgaactgattttttgtcaaaataaaactgaatatgacaaaactgattacattttctgtatctattcgtattagaatctgtcttaaagttggttatattaaaaataaaattgttgaaaattgagctcagagtcttat

SEQ ID NO: 302743 - DNA, 2553 bp, Cannabis indica
gaggtctggggttcaaatcgctgcctgggctaatctaactatatgagtaaatcacttaacggttccttgggagcttgaatacattaggatttatttttttttgcttgcatccctttactaaataattaatcaaccttcccaaagaaagcaaccgatttattttcgtttgatgtttgattgccgtgagagaatggtgatgctgataatattgaataaaaatgaataatgacatgtctattcatgtgttttacaaaagttattttgttttgttaatgacattttagatcttgcattgttcaaaatagaacataataatatcttagacctaaattttagttaaaatacgacatagtaacaacctgatctgaaggtgttgtaactaggttggttattttttttgtatttgtttatattaaaaattgatttcaggtttgttacaaaaaaaaaattaaaaaaaaaaagacaaaaattgagattatggtattattttgtactattttgaaaaatataggattcgaatctggttagtaatttttgcaaaacacaaaattcaaaatagtattgttttttattttaacaaaatactcttttagttgatctaatatatagtcaagtggactttcattattgcagattttacaaatatattatatatttatatagttaagtctagaattgaggtaagacgtggaatggtaaagagttggaagaggggagggtagtggagataaagtgcagagaaaggagagctgtaagagaggggagataaataaagtatggagaaaggtgagaaatttatgtaagaagaaacccgagagagaatttttgagagacggtggaggctgcctagagtgtgttggatgaagtgtggtaagaaatcgtaagtagtgtgaaagggaatgacaaattcgggagagtgtagagagaggatggaaagtagagagagcaaagcggtagaggtggttgtagtggtgatggtgaaagtggtgagagaaaagatgatggaatggaattgtcatttctttaagctatgtttggaagttgaattttagtgggggaaagaaagaggtaatgaaaatgtaggaaaaagtaaagtgtgggaaataaataaaaaatcaagttactatgtttggaatggaaagaattgtattggaaaatagttgatttaacaaaaaaattcttattgttgaatatgaaaaattgaatttttattttaatttatttttctacattttctttacttttcttttttcttttttctgtccccatcaaaatccaacttcccacaacttacccttaaattccgtaattattttggcttttatcatggttctattttcttttgggaatctgtatgatgacttgtactagtaggcaaagcattttagtgattggactgttaataaagccaatgcaaatacctagctgcaaatcatgatgcactccatatatggagtgataaatcttgagaaagaaagctgacgtcatgttgttggtttgtttctttttgtgtttgcaggaagttatgagcaatcacaaagaatcactttcgagtagctatggtaggatagatactactggattgagatcttcgtactctcaattgagcagctcttcctaccctccgacttcattaccgtcacagccctacaatggtggatatgggtcttccaatcttggaggttacagtacattcaggctttgaaatggtaaatccacatactaattggcagtttctcccatgaggtatttattaccaccgaattaaactctgaataggaaaaaaaaaggaaggaaatttgatggtaagtctaaagcatctgtaaagtttccccatagtgagtccggcattttttttaagtggtgtatcttggtcgttcttccagtgctggtactctgttaggttggatagaagcttggaaaggaatacagaggaatgcaatgtagtagttttagcttcatgattctgtgcagtaaatcttagaagttgcatgtgggggagggcaaggggttttgtgaccagaacttgggaattctgcaagacttatttgtttgttaaatttatttatatagttcgattcgatgattatttattttgatttaaggattgttctatatcatgatgcaggtagaccaacattacgttttgcatcatgatattaaaaatttcttaataactaatgtacgatattcactagtgaattttatttgagtaattttttcaaatatcacttcaaatacgaactaagttacaaaacttctttaaaaaaatattttttttagttttgatacttttttttttttaaaagcatactttaacaaatcttaattacactactatattatcacgtcattaaaaaaattctagaattctaaattaatagggctatttacaaagagaaatttgattttctatatttgtatatacttaatattttatttctaaactaatacatattactattgaaaatgtatgaccactttatctaaaacccaaaaatatccctctcaaatttctcatacttttttcagtgcaaaaacataaaaaaaaaa

SEQ ID NO: 302744 - DNA, 3954 bp, Cannabis indica
ttgaatgaggaaaatctttctttttttgattaaaatatttagtatagactagtaggcagtagctatgattttcaacatttttcctcctccaactttatcagacatagtgattgttcttcccctacccacctcccataatgaaaaagtaagagtaataacgttgaccccatttctgaacacttatcaataataattaataaaaaaaccatgattagattctcaatttccacatcagccacaccaaaatcaaatcacatacacattagtccaactcagcaaatgacaaggcttttaggcatagtccacaggttttctccaaatttttctatttttgatggcaaacgataatgataccactttctaactataattggcttttggaaaccaagacatcatgtgttgcatcatcctcttccattaattaaaatgagatctttatgaaaagataaacgaggatatatactatgtggaaaacttttagctttcatagaagagaaagttgcatacccaataatggacaataatagtccatatttgtccacaaagcatatgatgttgacctctacgagttgtgtattttctttctatgttttttgttagatgtacaaacacaaacacaagcttaacttaaggacataaatactaaatcaacagttatagataagaagtcagtttcttctgcataattgttttaatgaatactcaattctcaaaatgatggcagttggttctgttaagctgggtttgatatgtcctctattaccccctttccatccatggcatcgaagaagaagaagttcttcatgggatctcctttgcctgatatagccttaataacttcctgtggagtttttaagttttaaaacttgcacttagttaaaattaagtgactatgccctatgtatgtagttcagcactagtgactatgtcaatatatttatagatgaaaataaaatagacgaaagatcccacacctgcccaagaatgccgcctacaatggcgctgactggaggaaattctcttccattagctactaatctttctagtagtgaatcagggatatgagattcattcaaagactgcatgttataccgaaaatcaagggtaagaagaagattaaagagataataacataagaaaagaaaacataaaaaagtttattaagagtgtcacacctgtgactcacacagctcctttttcaacttcttcacaccaggaagatcacgaattgagatttctccacactttcgtccctcggcctcttcaaatctttctaatactgaaaagtgtcgagagagtctaatgtgacaggcaatattaatgcaacccacagaaaactaagaaaaccacgaaagcacacctctcatggcaaagaaaacctttgacgctctccgtggaagtgttttccaaggtactgaaattgcttcctgcaattaaaggatgcaaacacaaaatggcatatagtcaatcagaactcagaaataaatgtctgaatataacaaaccaaaaaagttagagctgcttggtaaggatgggtgaaaaaggaaggtaatcatggcatgagaagcagagtgaaacaatcgattttaaaagaaaaaccattagaaaccaagtaataccttaaaactaggatacttcagttcacagtcaacagtttcctcgagttttttctgtaaagcaaaatcaatcaagataatcaaagagctatctaaagtaccttcataatgatcagatctgatgcatgttaagttattgatacgatatatcagatactaaataattacaaagtgacaatcacctttgaatatctatgaagttggagatcaacaaaaatttctccacaggaatccttacaatcaacagtatagaatgctacgcgttttgatagttttcggcacttgtcattgatcaatttctgccaaagggcaaaaccaaaatataggcagaaaagtatcataacctttagacaagagaattaccaaaacactgtaaaaaagaattgaaggataggatattactttcgttgaaagcgagctacagcagacgaccacaacatcgaacttactatagaaatccacatcgaagctcgacaagtcacctgtaagatcaaaattcaaaatctacttcacttagttttcattcacttgaacaagaaaatgtactaacaaacaaacaaacaaaattagttactcaataacaatgttcaactaaaaagcttggccactataggtacgaacctttttcagcagaaacccggaccattggattaaaatctttcaaagaatcacaacaaagctcggctaaagtttttccactacacacatcatcaggagtaatcaaaaagttggcatgaagagcctcttcagttactacccgatcatccaccaaggtcaagctaccaacacccgccagtacaatattcttgcaaaactatttacatataaaccaattaaaattaaccccaaaataagttcaaatgtaagaaaccattatacaataaaattaaattaatcgaaatttagcttaaaaggaaatcaatatgttttttttacctcagcaacaactcctttaatcccagaaaccaaaatatgagctttactcaatctaacaaaaaaaatcgaaaacccatttcaaatatcagataattcaaaagcccaagtgtgaaatgtagggtttacgcaccttctctgagcatcagcgccccaaaccctaatttggcgatcatacagggcagtctcttgctccgtcaactcctcgccgtccatttccaacgtcaacctacttccaataagtcgcaatttttagcttcttctcagtgaaaaaaaatataataaaaataatatagaaatcaactgtgattatacgcgtaagaaaaacctacaaaaactgtgaaattaaagctcgaacgaagaataggagaagaggaaaccctaacagatattggggcaaaacgcaagaagtttttactctcttcactgggccagaagaagaagcagctgaagaaaaagtggtaatgaattgtaaattcacaaagttgtgggttcaacgaataaatattggaccttttcataatttaaataaagtccagggacttaaaaaaattattttaattttatattttatccctactttaatatttttaatttttttaccccactggttgatttttaaattttttcgttaaattaattttaccttttccttttaccactttttcactagaaaaaaatctttacattaaacagaaaaaagaatgaatgtagaaaatttttgtcttcttgttcattcatttttttgtgtttattgtggcttgtttagtatatatcctatatggtacttcgttcttgatttatcttaagaataatttgatagtgagagcgatattttatctgcttcgcatatatcaaagataagttttgttttgtaaaataatatttcaaaatatgtttcaatatatagatgaaatttttcattttaatttaatattaagttgtgtattaattaaatttcatatatttacatttttattgaactcatttgataataaacaataaaagtgtgttttttaatgagttaggggtgaaaggatattacaattttattgtctaatttttaagagcaaatttctgcagctcataatttgacacagtatgtccttcgattaaacgataagttatcctagttcgagaaagtggggccgccagttataaattactacatctacattattaattatgtgctattttaatcatgtaaaaaaaaaaagtaagtatatatttgttgagactaatgctaattaaaattaattttctaataaattttccaataaaatagtggttgggttgattagtcattccatggaatggaccatacctatacctatatataggggtgaaaatcggtcggttatggtcggtttttaaattttataaccgaccggacggttacggtttt

SEQ ID NO: 302745 - DNA, 1097 bp, Cannabis indica
atttacttttatgtaccctactctcttatcacctttagatttttaatctaggtacaataaaatgtcctcacccatagggacaaaacaaggatccctaccataaaagtgtcctatatataatgagacaattcaatataatgacttgataattattatacatgttatatcattgtagaaatgtatcttttatattaatttttgctatatttagtcgtttaattgataacgtgacattctaggggaaaaattatcaaaaaaaaaagacattctagtggaagataaaaaaaggaattgacaataatttaggaggaaaaaataaatacaaattcttatatatagaaaaatgacactattgataagacaaataattacataaacaaataaacagagtatatgtttatctaatgaagaaaacacttttttataaaaatattaatctaaaaactcacaaaatccattaatcaataaaagaaaaaaataaaagagagactgtacaagaaaaagttgttttgccgacaactaaaatcgccggtaaaagtaaacgtaactcgtcggcatagttttgctggagacattttatcccggtaaaatatgctggcaatgattcgttgacataacaattttttccagcgacttcagtatatgcgccaacagaagtatttacaccggcgaattaagttgctggcataagttcatcattgaaaattttgtgctggatgaggtgtccatgacgacgttttgccagtaaattaatgcgtcgaaaaaactttgacgctaatttggtgcctcattttcattttgtccccaaagttttgctggcgcaataattcgccggcgaaagtatataatataaaaaaattatttagttttggcggtgacttaatgtgcgccgacacaagtatttttttaatatttatatttataatatataattaaaattataatggaaataataatacatatatataatgtcaactatattataaaattgaaatctatattgtaattacaaaactacataaaatgtcataaactaaataaaagtatttttagtttataaacattaatattatttacactgcaaactaaaaaaacta

SEQ ID NO: 302746 - DNA, 2573 bp, Cannabis indica
aaatattgattaagaaaaaaaagacagttagaaaaaatttatatttttgttttcaaaatttttaaaattttaattctcaattaaaatattaaaaagttaaaacagctttatatataaaacaaagctttgaaaaatatttttatttttctaattaaaaaaatataaaattaattgtaaaaatattaccaaacgcaaccttaaatttctaaattaatgatgtccgtatatgtttataatatgggtttggagaggaaaggagagcatataatatatattataagatgtataataatcgatctatttaattaatttcacatctattatattataagatgttaaatgattaatatataatataattaatgggtagtgtgtatcaaaagcaagtcttaaaatatttgcactaaataatatatacgtctatgcatgcatgcaaagctacgtacgtacataatacatgcatatacatataataatagattttttcatgacatgggattaatgtacttaattaattaatcatgattaatgttatagggtagtattaattgcattgtttcctataaaatattatgagattttttaatgaaaaaaaatgaaaattgagatatatatatataataaatggataatatacatataattattcagtactatatatatatatatgaatgagaccataatgttaatttgcaacctcaaccacaccttgtttgagtagacaaactttgttgtgtgcaaaggaaacattcaataatttaatcataaaacaaagggaacaatacaacacatctcttcatatttccatacacaattgctcctccatgtactctacttatatatactgctgtttatagtgacggacctaaaaattttactttgcgggaactaatgaagtcttacaaaaatatttataattaatttaaacaaaatttgtaatcagttttagaaaatttatacaggtttattattattattattattattattaaataaaactaaatattaaattttttaatgtaattattttatttattattattattttggataaggggatgcaaccccatacccatataaattaatagttgtggacctcatcaaaaattttgttagctgtttggggtaaagtaaataaaatattaaatatataaagatttgcattaaaaaaattgataaatacaaaaaattatactaggagcacaaatgcaaaaattacacaaatatgcaagtgataatataatatatgtgtagtgattaaaaaaccatatatatattatttatatgcatgtattgtacatatcaagttatccatatgcatatccctgtcagtagaccgatctaaccataaaaactgttccaatatataataatcttaattataatacagataacattttttatttatttatataaatctatatatatatatatataacaatacatatttgcttcaaacttgcattgcgccatccccacagatttatgactattatatatgatcagtatgaatatgatcattctagcaactttctaagaagtccggttttaaaatatatgagcttaaggcgaaatatttaatcattataaattattattttttttttttttgaaaaatattgtttataggaaaataaagaagttagatgtcgttacataatatatttttttgatatagaagatatcttgatcataccaataacatttttagcgaaagcccacctggctaaattatgtgccgcaaagtaacaaagtctaaaaataaaccaaaaattgcagctaaataaaaaattagagagcttttacattgttggatataatatatcaatacctcaattagaacaattttttttgcagggtattgataaccgtctctgagtcactctcaatcataacaaaaatgtgtttcattataactgtcgtctccaaagctaaccgacataccgcaacttctccaaaaagcgggtcaaagaaattaagcatgcatgttagtagtcatctacaaaacaatccccgtgtgatccctagctaaagccaccacacacacatggaacaactgctcactctaacatcacaattataattttgacccaatcatttgaaggaggggaccaaacgagagacacaacagccgatgtcgaagcaaataaacacaatttgtgtaacaattagagataaaatcaatgcagtgtatatgttatccagagaattattatctaatatattttaaaaaatttaaaagtttcaaggttcaattttccatacacttttttttaaaaaaaacaaatagaagtcgggaattaatctcttcacctctaaaataacattctccaccgctatgctaaataataatttttttcttcatgatttcaaagccccgagctttcgagggcttaaggcacacgccttgctatcacctcagggccagccatattttttggtgtgacagtcagtagtcccgtgatccgtaaggggaaataccaggtaagctgtgcaatcccacaccgcctggggaaggtcaagtgggatgattctaaggctgtgtaggtatgggactacacagttgaagagag

SEQ ID NO: 302747 - DNA, 1791 bp, Cannabis indica
aggaaattacagtctataccctttttatattgtccttttttatttttaccttcttttttaaaatctattatttttacctctttttttaaacattgtaccaattttgcccctgtcacttcaagatactcttcatgtgattctcttatgtaagggtattttaggtacaatacatataaaaagaggtatgtttcaaataaatataaaattagagataaatttgattaattgatgaataaaagaggcatttttcaacttaccccattttgtggcgtgcctcgtgtggggccgaatccaagttcgtgctagcccattttgcttatttggatctaaattgcgcgtgcctacttttaaacttatatttgagactattttattattgctaagagaaagttgggttgagttgagatttaaacttcatctcctttttaaggactcgccacttagttaaatatatttttagttttaattatttttatatgtttttcaacaatactttaaatatgattatattaaaaatattcatttattaatggaatttgaatacttataactaataaatatttgatattttaactcacaaattagagttgtatatatatatatgattgttattatattttaatataattgaaaaataaatgaatatttgtattataaatatcattttttttacgtatcttacatttaaactaatttatttatatgtctgtattatagaggaattaactactgtagtaagtgtatatttgaaaaccatcatttttctatattttttccttcaagcttattttgtttaaacgcttgttgtgatgtgccattttacagtattgtatctattttctcatgttgtatttttgctttctaaactctatatatgttgtttaataaaataagttgtgatattttataatagttattaaattaaattatatgaaatttaacacgtaattgcactaataataatactgcacttttagatagttctaagcattattagtgttttttaatatttctcaaaataaattatgtaattcatatactctctcaagaattttcagaaaaaaattagagaaaagatttatgagttaacttatgagtattgctttagcatcaattatggaagaacggtaaattttggtttgttattttggtcaaatatggaaaaataagatatagccacaaaaattaaataataaatcaagctcaagctctatgtattcaatctactcatagccaactatcaaagactagacataatttctagttgacttttgatttaatactataagccaatgtcatcaaaatgtttgttagacataaatccaaataaagttgaagtagaagactattaaagagtttcacattgttaatgagtagaaagataataaaatatataaaataaataaattaaataataaatatataagataaactactcctcttattatcaattaattttgagatagaatcttattcattttatcctaaattttaacaaagaaagaactaaatatattgacttacatatgtcaccatgccttctctttggtcaaggtgctaattgttttttagatgtcatgtaattcacaataattattagagtcaatatatttattaatgtttgccttcatttacttactaatatcaaggccggcccaagtattttgcgggctttgtgcgaaatttttaaattgggtcctctaaaaaaaacaccatgtacatcaaaactacaattctattagtagcttttttttttctttaaattgcttcataaattttcaattaattttt

SEQ ID NO: 302748 - DNA, 2494 bp, Cannabis indica
atctccataaaactcaatgttttatctaagttaaataaattgcatgtttcgtggatttactgcttaggtaaaaaagttaattattgagcacttcggcttgattacatacattaggatgattgggataattgattgctttagctttatttgcgggattattagtttgattggaaattgaaaattatattctttaatagaaattaggaatgattgttgagggtcgagaataataacctttaagtagtttctcatttcgtagtctctctttaaactttttattttattttattattgctattttattctaatcataaaaattccttcactaattctagttaccaattgtgaataattgaataaacatagtcctcgtggaattgaccctaatttacaattatactaaaataattagaggtattaaaattaaaaaaaaaaaataagtaaaatttcatacggcatacgacacgtatcataagtatttgtaaaacggttgtaactttaaagaaaaaaagggattcccaattatgtaaagtatttatgtattcaaatttaaagtttaattatgaaaattgaaattatacacgtttcaccatataaaatcttttgattagacaaggagtgcataatattaagaaaatcacgataacacgtctaaactaatagggtgttacatacccaacgtccaagttgatgtcagatttcaacttgagcactgggaggtcaacctgggcactgggtcatgaactaccttcagtaaaacgaccataactcactcaatactgatctgattgacgcgattcaacttgcattttgaagctattttaatgctctatcaagtcatatctcacactccaatcctaataataaagttatcagcgtcaaattttaccccaagacaattatgaaaataagcttcgggttacctgtagcgggacccactgggctgaaataaatggttatcaccaccagaagttgattctcattgttaaatcattttctacggtcataaatatataatttgtatttttctcttaattttgtgggcctccttcacctataaaaggagagccccttaaagtcatttgggactttcaaaaaactacccgtgagagattttttctctctatattctctcactacaatttcgagtttttgacacttagtctttttctgtaatatcttctcacgagaaataaaaactcaaagaagacataactttatttgtgtcgttatacatgaagtgaactattataaattttttgtgtttctctcataataacttaattaactacgtattttttcattctcaccaatctagctagcgagtgtaacttagaaatctaattcaagtttttttgagtcaacaataacaaagtaaatactcaaatttattttagagatgattgatacaatacgttataattaaattaataaacttgtttatggagaatttttttcgataagacgaaaattattaatattaagattaatagattcatcttctatatgtgagatattctcaatctacattgtcatcataatattggtgatgttatgaggatacaaacgtatcagacattgccagcttataatcttttttgtttttgtatataataacaattactattaagaagaagaaaaaattaaagaaaggaaataagtagttatctttaagcattcgaactttgagtacaaaattacaaagtaaacccattcatcctcacatccattcacatttcacacctgtaaaacatattagctcaaccactacagctttttcgttttatggacccacatattacagtctcgcccttaacgccgcaaatatatattaacgagcggtgattcaatttaatccaataaattcaatacaatcaaattataaaaatttataattgaatatttaattataattaaatttaattagattgaaggttaaaagttaaattttaatgggtttttttttttttttttaataaacttagcaattttattaactaacaatctttaaaaacaatggaacgcactttgttgaaacaattctccaattgaagcacacgacctgcagagaaacaagaatccctggctaacacatgagccagcttgtttgcaaattgattgacaaaatacagctcaacattatttatagataagagaagagtacgaatatcatgaactaatagactaaaagaggatgacaaagaaatttggctatcagctttcaaaataaactgtccccacaaatgatagtcaatcgagcttaaagcttcttttatgccaacaaattcatctatttcaggttgcacctgccatttcggcataaaaatctctgccattttctccgttgcctccattcgttgataactactcgaccccatggacacccgaacgaacgcagaaccaagaaccggtaactaacgccagaaaccaattgttgcccctgatttttcccaatatacgtggaccaaccaaacaaggacacgtggatcaagca

SEQ ID NO: 302749 - DNA, 1854 bp, Cannabis indica
gagagtatcactcttgaagttgaagtaatttccctctgagtgagatatattttacaattgttaattgtattgagttgtaatcttagacatatttaattgtgtcatacttactattcttatcaataaaaatttatgattcattcatttaaagttagttttgtctctcaatttgtggtttgtttcttttgattggttttagtcttggtttgtagttttttgaacactactattattctaatagtggtatttggagagtgatctttcaccacactatctttaatatttatttagtgtagtgttaccttggagatgagtacgtaagctttttctttcccctttgatggagttacgtcatcttttttcatgttgtactaatagctttaatgctaatgaattaactactttaaaaacaaatgaatgagttaacgagtctctataaaagagtttaattaatgtgaacgaaaattttcaaccaaaaaccaagtccaagttctcaaatacaaatacaatagcatcgaacaaaggaggcggcccttttaggctactcaccgcttaagtcctatgttgtgattggccaccaatagaggaatagacatctttggctaatacattccaactgccccctaacagttttacctaactgtcagttatgacagttaggatcgggtctttaacaaaggctataaatagccaattgctatagcattcgggttgaaaacagagtgggagtttttgagtgctagttcagtgtgtaatagagagagattcttggtgagatgagttattttgtaattaaagctttgcttcatgagtgaatgtgtcaagaacactttgtaaacagttttataatcctctcttctagcatcaataaagactgaagccattggggctgttctggctttggagtaggcaagtgattcatcatcacttgttcgaacctcgtaaacttgattgtgtttgatctttctctcctatttcttttgctcttaattacttatttatccttgttcaaattctggttcttgttactagcttattactggtttatttgcatttgttcattgctgtactattcaattttcatttgttttgcattgttcttgattaatcactttagtttgtgttgtttgcgaggtgagtgatcatgtactgatcacatcatcctatttaaaaaaaaaattaaaatatagttaataataaaataaaataaaactatactcataatactaaatgtatgttgcagttcagtaaaaatttaattagaataatatttaagaagttaagtattcaaatctcaacaactttacttttttattaggtcccattttttatttctgtttaaggtccaaattaatatgggactaaccctaaatagcatgtaacatgagatttttaacatgaacaattagaattattgtttgaattttagtatagtacagccattaaatcaaaatttctcttagttaggcttgttggaaacttggaagggtgtccttacagtgtattaatgtcatcctagctagtgtgttttgtgttagcagtgtttataaaatatttaatccaatctaattcgtatgatctgatccaatttaattcacaaagtgcaaatgtctatacttatgcggattggattagattggattagaagatttaaatctgcacttgtgtggattggatattgattgacatgcaaaagtaactgatcaaatctaatccacacatatttatacactaggttaaagttacgtgacaagtcacgtatgctagttttattttagtttttaattattttttaatattataattttaaaattaataatgttcaacacagtgataattgttaaaattttaaag

SEQ ID NO: 302750 - DNA, 5178 bp, Cannabis indica
taagtattttgggtagcgtgcctaattatttagggcgttacaccttccaactaggaaccaacaatcagagtcttcgaatcgtccctccatgacttaagcattaacaccatttaccatttgcaagataaaaatgacagcaaaaggcagatcattcttatgaccacaaacccgtcaacataaatccaaccaagctagcaacttaataaaaccaaaccatcaaaacaaattttaagtaagcaattaatcccagcctcatcttctttagccaacactgtgaaagaaagcaagcccaagagctcaaaacatgtttacctaatattctatcactgccattcaaatttcctttgaaacctactaacataggggctaaggttttggagcaagtatacaaggctgacagttacttgaggcgtcaccttactgacgaatgcaatgtcgtcaaactaggattgaccgactgtcagtagtgaaaagggccaaaataacaaaaggcatctgtaatctagggcacactgcacccatcatggatcttcctgccctcagtaaaaaactcatgacctgctggaggacataacagtcagtgtaggtgaattgaccacgaagaagttgtcagtaggcagcaacattcatcccatagtaattgctaattctacgaggcaacaagcgtctagggtattttaacctcttacctaacttctcttttttacttgatgtaagttattgctccttttctaacttttcttctcttatttcaaatggcagttcttgaggagcgtatgttgagagaagtaagctctatggcaatttcgcttgatctttcgttggccacttgacggacactagaggctcaaatcaagaaaattaaggaggaggccatgtaaaagattgataagaacatcaaagaagctgaacagtattgcgttgacgcagacgccaaggctgataagaagtatttgcagaagtttaatgattataaggaggatttcataagccaaatggaagaaaaattcaaggcccaacgtgatgagctagaatttgccaattttgctcttgctcaagaacttaaagaagccaaaggagccaatgaggcccttgagaactaaatgtccatcaaactttgagaactttaggacacgaacaacatcatttgttgacctcaaaaagttatcaatcgacagcggagtcgtacaaatctgatgcttgccacatgtttgcataaataagaataaaaacaataaacaataagatttgttatagaggttcgaccaccttttgatagtgagtaatgacctaatgcccttttagttgtatttataccgagggaaatactatccaaatcactataggtgggatctgctatagtatccttaggattacaaggtatgaatcaatactgacaaaactcaagtgttaagatgtgctaggataggcgtgtgagagagagagagagacgaagtgaggaagagagagagtttatctgacacttagagtttaggatcaggtttctggcttagacgaaacttatgtttctagcttaaggttatctcctttatataggaagcctcaaacccaaggtttacaattcaattcccttaacttgtgcataatttgttagatatttaaaaaagaccaaagtgcccttaattctagatattattcagccatattatttggctttagggcccaatcgcatcccatagcatgttgtccacatgtagaagtgtccaagaaagcttgcagtgcactccttggctggctggccatggtgcagtcctaaggctggccggctagctccaaagcgggagctggtctgtcacttgatgcccgtttgagtgttggggtccttgttggttcaagtgctaacttggccttccttttggtgagttgtaccactacgtggcactacttttggccatgtaagaatgtcacatcatgaggaaaaaaaattgggataacgtttctcccccccccccaagtccctttgcagacgtctatacggatagggactttaccagctatattgatgttgtctggactgttgtagcctttgctgaataaaagttattgcgctttttaaacactttttcttgactgtgtgatctcattgcagtagagaaataattgctttagttgcctttatgatgtataggtgaggtaagtgaggaaaaggggcccacatgtactacataagtgacttttggggggaaacccttttgtcacttctcatttttcactttttctttctctctctagaaattagctctagaaaacgctcctccttctctctaggtggctaagcccaccattcttctcagaatttttgcgctatttcaacaatctaagcatgccaccttcttctccatcgaaatcttgtagtgggtaagctttcttttcccattatttcacttggtttgattgatttttccatgaattcatgaacgtcatttctctttttgaacatgctttgattcttgtgttagattgtaatccattcagaattttgatccgcatggtagctttaggatagacaatgtatgatttttagatgaaaaagaactaaatttgaccttcgctgtgattcatggctctttgagtcacaaagaactcaaagtacacaaagaacatgtttgagttcttaaaaaaaaaatacgtgttcgaacccatgcaaatgctggccggccaaggaggctttgtttgatgccttaccggccataggtagtcttcatggggtctggtcggccatggggactatttccctaggatggccagcctatgcctggaactaaagttcctgcccagccactaggctaggtcttggggtgtagctagtttttctccctcttttgatctcagctagggtcttgtgacggccttagaggcatatacaactgtggtcttatgcgtggtttctcttggaaactctatataaggctaggtaatgagtccattatagtcaattgtacaacttaggacttaccgtaagtcttagtaaatatacttaagacggtacatggttgttggttgaccttttacactttgttttacttggaaggtaaccttggatgccgttgacttgaatatacttgtagctttgtcaggatgttaacctccccttatttcttcaatgcaagaagtgtccggtattgaattatggaggtgacaaatgtgtaggtctcttgtttaccttgtagttttgattgatacgaatagtgtaatgaccaagtgatcggcacgaccatcacacgcccagattggctgaacgggatcacatcaagattgtaaaaggggttaccctgcctcatttcgatgttagatccataacttattatgagaatgagagtctcggggctgagtttagtggtgagaaagttgtaccggctaggaggaagagacacatgccttgtttcatcctatctaattgacctttagatcattatgatagagatggtaatccaatgaacaggctcgatgagctttcggtactcgacctggaccatgtctaggacaattcccttgtgcctgaaattcttgatgcaagttcacaaggagagaagatgatttcccctgtttcatctctctcgagggacaattttgagagaaggtgagctaatgggctagtgggtgatatccattgtaagatacctccttcagacaaactagcgtgtagattaactcttaactggatggcatggtaagagtaccacattgatcaagctggaaatttagggaccatggacctataactcttagctgcaataaactaaattatttattaagtctcatcaaccaattaattatatttttgaattccatgattactccactataaataaagaatttaactcttagtaattatagaattatatttactgagtttactgcagtgtccattgatataatcaattctagtcattagccctccatgtgttggttggtaattagttttggtcaaattatcgttttacctttctttacttctttatcctttagtacccttaattcactagtggaagtataacttagaccccatctaaatttgagcacaacttactagtcccagaattaacacttcaagggaaccaacatttgatctgttaggaaagtcaggattctataattgtagatcatgttcctagtcatccacattattggactcccaacacaaaagttgtaagaatcgtgttttgtgagaaaatttaacaaataaattaaagaaactaataacatgattagaagtataagattacttaagatttaggctaatctactattaatcattgttatgatatgaattaggtctttatagtaaaggacatattagataaatatagctttattcatatcagtccttgtcatatataatctctattatacaacacttttactttgatgccatactacatcagtaatctgaactgagattacttgtaccaaaaaacaggcatcagtgaatcatagtagcaaccattaattaaagattctataacattaatgtattgctgactgttttattcatagctaagtgatcttagttctctgtataggtacaagtcacaacctcatatatgaataatgaatttttttataatcatcatgttcagctctttattaacagtcagaaatatctttataagctttctagggtataaaccttaacaatatcaactttcagcatcaatcaaccttttgctgacaaagtagacctaatgttgggcattatcatcttctctgatcagtacgatgcttacatcatcattactgcaaaaattatttttctcaacacttttaaacagtcgtttaaagtattcccgtcaatttatataaccgtcgcctatacgactgtcgtaaaacgggcaaaacaggcgacaattaaaaaaccgtcgctaatgtggacttcccgacggtttaaaatcatcgcctataacagggtataggtgacggttttaaatcgtgccctatactacaggcgatagtttaaaaccgtcacctatagtataggacacggtttaaaactgtcgcctgtacagtattataggcgacagtttttgtaataccctagaattaaggaatggattaacaaaaccctaattagataattatgaataattgagaaattatattattatataagtcagtatatgtgaattaatatgatttatttgattaattatatgttaa

SEQ ID NO: 302751 - DNA, 2225 bp, Cannabis indica
ttttttaaaaaaaaaatctcatgggtttgttttaatcaccttacacgtggttggttaggttagatcatctaaaacaatccgtgccgtttaatcatatgaaaaatttaagaaagttgttatccaatgatgttgactttcaataatgtgagggtaaaacgaaacgtggcataatctaaaccgttgaaataatatttaattatcaagaagaggagtaacgtaacacaaataaatgagtaggaaggagtagcttattatatcaaattttgaattctaaaaaattgtgattataagttaagtgttgattaacatgttcgttttccaatttattaaaattaattaatattatagtatttgaatttttatcaaagtaaaaattgcttagctaaccattgaaaaattcacattaaaagttagtattgaaaataataataataataataataataataataattaacagaggaggacaagtaaattgacttaattgtaaccaagattttctacaacggttcgctgcatatattttgaaatgacacgtgtaaaggagtaagcagatgttatcttggagttaaaagtagtaaaatagaaacggtcacagagtaacataactggcagccaagtcattaactggtgaaggtgatgtgcatagcgtgaacgcaaacgtgtcgccacatatactattaattacctttcttcaataatgagaaaaaaaaatatcgtcaatgcaaaaatctttcacatttaatttttatctatgataattactcattattaatttttttacttaactttctttttgtcaggttcaataaggtaactatttatttatttttaaagaataaggtaactactcgatataattcaaaataataaaataagtaattgtttggctaagttactgaaaataatttttaaaactcactggttacctttagtaacttagccaaacaaataatgtaaaagtaattttttacccaactagatgcaaaaaataataataataaaatctaaattcattattcaatgtgctaaaataatgttctttattcttatatattaataactttttttttttttttctgaaagtaattaataaaaattttattattaaaagtttaagacaaaattaaattttgttgaaaattaatttaaatttattaattctagttaaatttggataataagaacaagaaccagaattatgaccacgcgcggttaatttccatatatttataaaacagaacattattacttgaattttcaaaaaccgattaaatttaatatttgtttaaaatgatttattttttataaaattacactaaatataatatttattcaattatcaagattttatggggttaaaatgaaaattttcttataattataattaatccgtgaaatcaagaaatctaatctaataattaagtaaaacgcgcagcatttaatgataatgcgtagaatagctaatgctatattcacaatagcatggtagttatatgtataatttttttttaaaaaaaaaactaaactaaacaaaaaacaactcgtaatgtcattaattaaataggtagttagttgctcattataataataaggctcttctttcttcaggttgatcaattacgataagaaaaatttaatgtattgtacagttaatttcaatgtgactttataaaacagattttataaatgattaaattcaaatttggttcaaatgatattttttttggaactgatcatatagattgagttaacacatcagatgataaaattactcgatatttatataatgtctgcaaaattaatataaatatcttatttttcaaatagtttatttttgtaatatttaaatttattaaattataagacttagaatataataatgaaatatctaaatttaaaattcaagatattttattatattatcttattagaaattttaaataaacttgaaatttgaaaattggttagatattttttgattttttgttagaatttaggatatttaggacatttgttaggttttgaatttttttaaatattctctaacaacctaaatttaaattctagttaagatatttattttaaaatttattttttttttaaattttaaaattgagatattttagcttactttccagatattccagatcagttacttgttttggtttgtattgtttgattattttattatgtatattcaatttttttacaaacctattatt

SEQ ID NO: 302752 - DNA, 4165 bp, Cannabis indica
cttacccggtatccccttacagatcacgagactattgactgtcacagcatctgcttcaacttcatcatctaccagtggtgaaaatccttaagctctactctatgaaacaacctccacccttgatatctccacaacttagtatttggacagtggagcaactcaccacatgactaatgatgcaaataaccttgctattgctgctgattacaaagggaaagcaaagtttattgtaggtaatggttcttccatatctattcaccatttaggcacaagttctgttcccaccacacttccaaaccaatatttttattacaagatatctttcatgtacccaatgtcaccaaaaatttacttagcatctctaaattcagtaaagataataatgtcattcttgaatttgatgatctttgctatcttatatcaaggacaagaacaccaaccaagttcttttgcagggccatctcagtgaaggtctctacaaacttcaagtctcctctcccaattctcaagattctatcaagaatttctttgtctctctcagttcccagcctaaagcatacaaccacactactaccagcaaccctgtccatgacaagtcacaaattgccaaaatatggcactatcgacttagccacccatctcactccactttgaatgaaattttatttcaagttgtacctaatgtcaaatgtaaacagcttgatttttgtaatgcttgccaaattggcaagtttcatcagtttagtttcaaaactactaaaaattaaattgttcatcctttcaaattggttttaacagatgtttggggtccttctttttacccttctagtgatgacttcaagtactatgttagttttatggatgattacactaaatttgtttagatttttcctatgaaaaataaaaactgaggtcaacaacatctttcttcaatttaatacctttgttgaaagataatttcacactaaaattaaatatgtccaatctgaccttgaaaaagaatatgaacccttgtataatctatacaaaaccataagaattgtccaaagaaactcctgccctcacactcaccaacaacaaggtagagttacgaggaaacatggacatgttgttgatattggtctaacattacttgctcaagtaactatgcccttaacattttggtgggaagcttttgcttcataaatctatcttataaataggctacgtaccccagttcttgatcatgtctcaccctttgagacactatttcatcaaccaccagattacaatatgcttaaattgtttggatgctcctgttttcccctccttagaccatatgaacaacataaagttgcctttagatcctcaaaatgtgtcttcataggctacaacatcacatcaaaggggtttagatgtttgcactcattaggtcgagtctatatgtctagaaatgtaacatttaatgaataagaatttccatatcaatctttgtttactcccaggaacaccaccacatccacccccacactaataattgatccccatgccttccttgttccttctcatcgatctgctatgcccattccaacacctgcatttgaaccttccagtccgcctccaccccaacatcaagttcttacagaaacaacctctccctctataagcctcaattcacaaaattcctctcaaaattccgtggctcctcctcctcaagtcagttcccctcaatccataccccctatttttgtccaagtccaaaatcaacttcctatggtgactagattgaaaaatggtatctacaaaccaaaaacttatgttgccaacatcatggatgaagttgagcctacaacaatcaaagcaactcttgcaagtacaaaatggaatgctgctatgtaacatgaaatcactgctcttaagaataagaaaacacagactctagttccaagaacttcaaacattattatagttcaaaacaagtgggtttattgaatcaaatttaatgccaatggcacagtagaaagactcaaagcacgacttgttgccaaaggttttcaacagactactgaaattgatttcttcgaaacgtatagccctatcatcaagtcatgtaccatcagaatcatgttcactttgattgttacacaaggttgggaaatttaataaattgacatcaacaatgcattctcgagtggggaacttcaagaagatgtttatatggctcaaccacaaggctttgtgcactcttaatttccaaactatgtctacaagctttataagccatttatggtctaaaataggccccaagggcctaatttgacattttaaaaagcactttggtaagttggggttacaccaacagcaagtctaataccagtcttttcttcaccaatacaaatggaaatctactcctaatattagtgtatgttgatgatattctcatcaaaggagctaactcatctcaagtttaacatgtcatctctggcctacacaacacctttgctctcaaggttcttggccctgttaattatttcttgggatttgaggtccatagaactgcttccaccatttgctttaacttaacgaaaatacatcgaggacctattagctaaaactcagctgctggactcaaagcctcagtccacaccaatgtgctcctcaacaaaactactactagtggcattccaatgcaaaatccaacacagtatagaagcatcattggtgccttacaatacttaataatgaccacacccaatatctcatttgcagttagtagactcaaccaatttatgcagaacccaacttctgaacattcgggagcttgtaaaagaatcttaagatatctatctaacactcaagacatcagtttaacattcagactctcccctagactggatcttcaaggcttcactgatgctgattgggcagggtgtcatgatgataggaaatcaacattaggctattacatatttttaggaggaaattcaatcaattggtgctccaagaagcaaactgttgttgctagatttagcatagaatttgaataccgtgcattagcattagccacctcagaactgatttggattgaatatatacttgttgaactcaacattcatctaccttaatgtcccaatctctggcgtgacaacatgagagtaggctctctcgcatccaatccagttttttatgctcgaaccaagcacatcgaagtggaattgcattttgttcaagatagggttttagctcaaaaactggatgtcagatatgttgagtctgaacatcaaattgcagacctattcactaaacctctaccagctacgacttttcattatttgtttgataagttaacacttggtttacaccagtgttaatttgagggggcatgttagaatatacataacaattaattctgttactatttaaaaaggaaagtcaataagaaacagttagagttattagaggttgttagtatttgttaaggtcttttctcttcagatgtcattgtatccaaaacaatatagttaaagagcttctcaatcattcaagattgagcgttcattccatattcgctactctcatttttctctcctttttcttcagctcaaactctattttctgagttctttcaatatctaagtttaatttttgacggtaataatacataatttatatttctaaaactttcataagtacctgaccgttaagtgtcaaatcattattcatgtgctatttttttattggtgtaattaaattaattttttaaataaaaataaaaatttaattggaccaatctatgactcacacatgattattgaacaattaatatatttatctatgtattgactattaatagtttagcaatggtagttgagtaagtgttataacttgtaagacttatttttctagaattaagtactactttttctttgttttttttggtaataataaaatttaagtaaatatatgactaagtgttcatgtatttgtggacgggtgttgtttttgaatttccttacctatatatgagacctaatttaattagggctgcctatattgattggttcttaagggtaggtgtattaataaaagtggaataaattttcattaactagttataaataaggtgtgttaaatgtccaatttaattaaaccgcacaaattaaacccttttttttttaaaaaaaaa

SEQ ID NO: 302753 - DNA, 3297 bp, Cannabis indica
aagctatagattccatatttatgctcccactcaattgcactacgatgttcccaaaatgtacgtaccaccctgaccaaaaattaggcttaactaacaaatcaaagaacatagaggatcccctatgacaccttttcctttgtccatactaggatcaaaagtttcaaggtctttagggtcaattcttttcgcagtattattatcttgtgggatgggatcgttaggaatattggtgttagagtttcattttctggctcaaatatggcctcctgtctagcaaaagttgcttgcatctggcgagaaactttttcttgtgctgccagttttagcttagtttcagctagttcttcagccatttcaacgactacaggatccagttcgtaataatactcatcatcatctttttctttcccattcttcatgatcttcatcttcgggatcttcctctcaacccgcattgatgtgattttcatcaatgtgtttcttaggacgttgagtctttttagtagtgtgtggtttcctctgtttaatctccatcaactcctatctttgcctgagctacaagatctacattgtccataggagtacgtttccatcacgaccaccaattttgttttgaatgattaccatagttatgtggtatacaacctttgatggtatcactgctttttctagctctcaatgaaagcaccaaaatacttaccgagattttcgaaagtgatttattatatgtgaaagctaaagatattaatcaacaataatgaaaataacaataaggagttttacgtggttagggctttaatgagtcttagtccactagtcaatattattactttaaagctagaaaaatcttaaggtttacaagaatgtattaactctagattttgcctgaggaattgaagaattagtttctaaccctttgcatgaataatttttacgtggctgagggcattaacgagccttaggattcctacttattcgcctttatcaacgaatggggtgattacaagtaccatattgacttgggcttatatggtgaaatatgactcatgataggattggtatatgttgatgtggatgccacatcacgttgacagttgcctaaagtcgtgtcctatctttgtggagaataaaaacacatataaaatgtatgatttccaattaccatctttccatgtttagtaagatataatctgatggacgagatcaatcgtagtctattcctgatactgtgggattcgataataaataaataggaaatggtacttgacatttggatgctcactaattacttcttctggatgtgctgtctaatatcttctagacgtatgccatgctggaagggtatatcacctggacgaggcttctacttatctggtaggactaactgcttatgggtctgaccgagtatttcatttgggtccattgtttggcatgggatatttatattgtgtctgctggtagaattccacttgtctccatctagaaacacggataacacaattttttatgaaatgctttacaagattttcatgtaaatgttttttttaggaaattgataagataaaagaaagtaaagaaaattttactaccattgttttggtagcagagaaaatcttacaatttaaaagggatgtctatacgtctgaaagtggaagcctaatagagttggccaggtcagattttaccgataaagcatgccatgttcccatctttcactcatccacttatgaggattatacaattcgaggcccccttatcgtgaagctcgaccgcaaaatgatagagtaattaaggttagtagatattgctagccaaaggagaaaccatgagattttgtagctatgcgacccctgcaggctcatgccaaataaaatagagtgcacaagtttagggttccaaagtgataatagaaaagaattgtttataaagagcatgatcatgcatagtgtcatattctcataaatatacatacatatgcagaatattacttactgaattttagtgtgtaattgtcttgtattgaaggtaggtttatagataagtagattgatgagttagttgcaacatagtcctgaccctgatgatgtacatatatggcaatttttgccgtgtgggagggttgagccttatacttttgacatgtttatttgacttttcatgagggcatgttattaatctttgtgtgcatgcttttagtactaaagaatgatagcagatacttgtatgtatatgtatggatgtaataaatagtagtaggaactctatttgaagttgttattatgttttaattaaaagttcaaattagccataaattttataagtaattaatcattaattgagtaaacaagttacacctcaaattgtgagagtctaatacattactactattagtaacgcgaaactaagatgttatagatttcactaaagaattttctcatacattttcaatataaaaaggaacttatgaatcacaaacaagatacgcagatcgtgagcatataatacacttgaatgaaaactatttgggaggagctcccgaattataggcccaattatacatgtatcaattgtatatgtggaggagtcaagaaactcaaagaacatcgtcacatagagtacatcatagagattttcatgtggcttaatgttcatactatcaagttcgtggaaatattttttattggatcccctccttgaactaagcagtgcttttcacttggtaacttaagaagaaatcaaagggggtcttctacaactactacaacggattctacttaaattttttctcagtcgatccccaacactttgctatcttgcaagggttgcaagttgttatcaaataggttgactaacaagataccttaatatgattgtattatgctgtcgttaatttggtcaattgtcaggtagtgaactgtactaccttgaaatacataattcaaaatagtctgataagtttaccggttatgttcgtcatttgttagcaacaagaacttcagttaagctttcgggattcacatttcaattctttatacgtccataggtgtaaaaaaactaacatgtataagatagtaaaaatttaaagcttgttcaataacaaattaaaaaataaaattatataacaggtttttatttgtaaaatttaaaaacataattatttgcagaacacatctgttgagaattatggggtttcatctcaaaaccaattggcaatgagtggagtagcccatgttcttatatatatgactcaattctctaccatttattctatgtgggacaatgtccacaacaacattt

SEQ ID NO: 302754 - DNA, 939 bp, Cannabis indica
taaccttaaccttacaaaaaaaaaaaaaaaaaaaaaaaaaaaaaaaaaaaaaagagagaatatatatttagataatagaaaaaaaaaaacttctaaaaaatgaatggttgaacaaaacccacatgagaaacaattcaattatcgattataagttgataaagagcaaaaagatagaaacttttttacctccaaacccagaaaacaatacaaagcagttggccgacttggatgaatttagtgaaaatcaatgaatacccagaaacgaaatcagctccgaaatcaacaaaaaggtgaattgggataatgggattgttcttgtttttttgattgaggcgaaggaaaatcctaagaggttgggacaaaaaggagtagaggaggaggaggtggggtttggttgcgtggaagaaagaggaattttctcaaataaaaaatatatttttttttatcttgaaattgtaatcagacgaaagagaaacaatatatatatatatgtgtatgtatatgtgtatatgattaggcggattagaagaagacgtgaagttgagtaaatcctcttcgaactctcaataaattttctcactttctttgtaaagctttaacttttttttacaaaacaaaaagagaataaatttaaagaaatttcacagaagaaaacagaggaagcaacaagacgacgaacttttattttctactattaaattttgaatatagtaaataaatatcatctaattatttaaaaagttatacattcttcgggtagttttagtagaacccttaaaatttcttttaagtttaattttttttttatcgtgttataattatttaagactatttataaatttttagataattttaattagaaaatttacactatatttctcaatttatttcttttttttactgttacacggcaattattatatttttattgtgtatatt

SEQ ID NO: 302755 - DNA, 1515 bp, Cannabis indica
atttctttttcttgcatatatcgatcttgaatttgaagacatgctctttagtcccactctctcaactaagaagtccaagaagcgagcgacttcaacaaatgaggcctccggatctacaaggagacctcaaaaagaaccaaaactactgcaaataaaaaacgatcttcaaatcaacttactattgagcctactagccgtaatagcccacttctctcctccaagtcgatggtaagtgttgctggtttactctagaatgtctgcttcaagcggagccagatcactgccaacattggtttggagcctttctgaagccactagatggttagtgactggtttggattctttaggtcccaaaaccaaattagctagttcaactttgtgtttggtggcaatcacagtggcccgttgacaaaaatcatctatctcaacctcaaatttccttaaggagaattgacttgatgcttcaagttggacacatgcttcttgtagcatctctaattaatggacaaatagtcaaaagtaagttggatggaggtagagaagaaagagatacctttctagactggttctaaaggaatacaccaaaactaaggtttgtgtccgatgacatatatttgagacttccttcccagtatgggaacttctcctaggtttcggccccttattcattttctcattcccaaagaggccaaggataacagcctcttgcaccacagccgtaggtgctaattccttaattcctgtctgagaagatgtccagacttgcttttctcctttaatgatttgatagtctccttggcctctttggttcttctgttgatgttccccaaaaagttgttaagaagacccatttagataggctaggggtttttcacaaaagaaataaaaatgttagtaatatggaggcaataagtaataaaaagtatagtggttgacaaaagctcaagtttagttctaaccattaacacatttatactttggatccccacaagtaaataatgagatatcttccatgccaaagaagctaccatattggaaaaagcctagatgctccatcattatgaatggatcaactctaacacaccggtcaggaagaagaaaattagttgggctctcaactatctcatccatcctatcataaaaatcattcatggggcatctatcatgatctaattctaagaattgtgggccaaacaccctggtcaacttgatctatgaactccaaacacgaagcacaaattactagatgtgttggatccacgagtacctttgtccataataacagcctcaaaagagacttcgagttccgtctccacactcataggctctagatgaagttgatgttgggttttgtgcccaaaaaaaaacccatttcaatataatcagatttaataattaataaagatcagatatcgcattttatgttgcatggttcacatgatttatttcatgattatatttagtgtataaattctattaagtccaaaacatatataaatatgtatatatttgttc

SEQ ID NO: 302756 - DNA, 1299 bp, Cannabis indica
aaaatagtatttatcttaaaaaaaattaataaaaattaaacttaaggtattattttatactaatggagtccaaccaatatatagtctttgtgtttctaaaatagtatttacctatatttttttatcaaaaaattaacatcatagtttaaaatagctcatacggtcatgccccaactcaaatattacttaaattaattataatttctaattaatcattctcattactacttggttataactcactcaaggttataacttattgagttccacaaagtacttagttaacagaatatatatagatgagaatcgtatacaatagatagagaaatttattagtataaatgttgtcatgtatttgattataattataaacaaactttaattttgtgattataaatgcagaatgtgaagggtgtatttgatgctgcaatcaaattggctctacaccctccaaagtccaagaagcataaatcaaatcggaagggctgcaatgttttttgaatatttatatatttatatatatatttatttatttaccttttactctccatttaaatctttcttccattattcattcttttctttgtgagctgtctctcatataaatgtgtttttacagaaaatttgatgtattcatatgtgtttaatttgattctttttctctgcaatatgtattgtatatatagtatatacatttatatgtataagcgttctcagtttattagaactattaatcttatgtttattattagatgtggttggttataatgacttcaaattgttaattatagtttatatttctaattaattagaatgtgtaatttatttagtgttgtaaatacaggtggactcacgacatcagcacgagcctagaaagcagtacaatccaacacgaagaaatataagtttaaacacaatacgtgcgatacgatattataaatagacatgacatgacatgaaaaatatatacttaagcatgatacggtgttgtgaaatattaatcttcaatgaaaatataaaatcaacaagattacaattctatgctcaacaatacaagggttataataaaaattaaataatgttacaattctattacaaaattacatgtaaaatgaagaataagagatgaagaggggaatcacaattcattacaatatgcaacaagtaaataacacaatgcaaagtgcataaaataaaaatataaagaagatgtgagaacaatcttattaccaaaaccaaaagtgacaaggaatcactaaaattgaacaaagttttacacatttgtccaaaaacttattt

SEQ ID NO: 302757 - DNA, 5574 bp, Cannabis indica
caatatatcatcaaatacaacacatatttctcatttactaagtcacaaaagacaaactaataatggggcaaaatgaccattttgctcattcacactaaaatcacctaaatcacactaaaggggtatttttaggaaattctaaattttcggccattcccgacatttccaatgtctaataaactgtcccaaactactaacatactaagttgtgattttactgagccaaacaccgagttctatgataccgggcaccggaatgcaaaattatgagaactactacatgacataaaaatgcatctctgaattcaataataacagtacaataattatttaaatagctataaataatttcataattaaacgtgattaactgctaatttccaaattaaactaagcggtctttacaggttgatttgggaccaagtttactccggcgtattttaccaccagcaaaagatatttttccaatgcaaaggtgaattgccccagcaaaagtctttttaccgatcaagcttcactacagcctttactggcataattttgcgtcagtaaaagttttttgacgcgttgtaactatcacatttcttgtagtgtaacgggagtgggctgtaggaaatgatgtggtgttttggacttgcacaatttgtcatgtggatattctaccatgtgtgtaatcgtaggcctgacatgtggcaaaagagagaggatgacttagttatcacgagggttattttcgagatttgtcataggatgagcagtagtgggaattataatatttctttagcaattcgtaccaatcttcaccccacaatcattctgcaaaggggaattcgccttagccaccctaactgtactttttgtgcgagaggggaatcagccaatgggatcgttgggcaagtggtccccgcattagtgtcaccaaacatatttctcttcttttgctattctctgagaagatttttgaaatgagtcataagctcctcaagaacagttattatccgattaagtatcactgatgtccttgtgtcaaaaaatctcctaactatggaggagtgtttaatccaagagccataaagagggaaggctttacccataggaagaaaagcgaaggccttggattttttacaggaaccaaaatcatgaaaaagataaccacaattaaaatatataaaaggaggcttacaatatttaaattgtatccactcatttctatttctttcaatactcagatgaaatcctgctggaatttgttgcatcagaaagacctcgacaagaagttttaagaatccaattttagcaataacaagttgagatggtttatcaaacttgatgaagtttctcaccttagctcctataactggagcattttgccaagtaaaacacggtgtagggagaccatggtcctggacccatagtcttgctaatgacatatctaacccttgacacaaaccatctttgggccactaacaaaggttaagaatctgacccctaagcatccaagaacttccttctaatacctcctctttgtccttagagaaattgaagaaaataccccacaaacaaagccccaaaagtcttcataatccagttgcctttcagtttctagattttttagaggaatcgctttactctgccatgggacaagggtttcttgccaaagcatttagcaagaatactattttttttacaacatcggtgttgattttaaaatcaacttctagttccaaagtagtttctgtcaagaattggagtcgaagctactcaaaatattctttagtagcacccttttccaaaacctcaggaggagttttctttgttgagagaatcgttatccatgacagtcgcaacggaacgcacagaaatgataaaagtcaatgttggctcaccaactccaaagagaatcgttattgctactattgttcttaatgcatggtgaaagtgatattcccgctctaaatagtaacttggcaacatcacacttttttatgcctttaaatgtatcctttcttttttaccgaataataaacatatggtaaaagtatcacaatttcaaagaaactagaaaatattttgtgatatgagtattaggcctaaaaaatattatattgatctacatttagtttttaaactgccacaccgcactatactgcattgtatttttatggtgtggttcatgtagttcttagttcatgtagtgcggttgcggtttcgaaaattataaaaataacatatacttttggtttgaaaagaatagctaaaactcacatcacaacactgcaaacaaccctgtttaaatttgtttattgcattttttttgcttaattactattgaatcatcttaagaagcacattctacataaaaataatgtgttatgaatgtattaaaatttatgaaaataaaagtgtaaaaatttaaattgataaagtttttgtttattataaacataaacgttttttattattttattttttgacttttagtccccttttttatagggaaaccaagataaaataaatcttttatcccaattttcttttaaaaattgggataaaaataaaaaacacgatgaaaattaaaaaaaaaaataggggaatttttttttaatcccagttaagatatgaaaacttagataaaaagatcattttttatcccaaaatttttaataataagtgggattaagaggttactttttttatgtccaatttttataagatttttttatctcacatgcatagagcctgatttttattttaacaaaattgggataaaaagtccttaaaaattaagataaaaggctctgcttcgtttagtgagttttgacacatttaataattgtgttttgtgtttacgttaactgttgtgttaacgtatttaataatcttgtcgtgttataatcatgctgacacgataacatgagttaatttttgtagattccataatttcttttataacaattcatgtatatcgtgatcgtgtacatattcgtatttgacttttcatgtatatcgtgatcatgttgcatgttgtatcatgaacgtgtcaacacgaacaagatataataacatgaattgcgagccctaatttataatcatagcgatatttatgtaagaatgtaagatattaaacatatcaataaaatataagtagatcgatgctaagtggtgcctaactaatactaccacgtacgaaatgtcataacatacataatgtaagtatcgaatcaaacatatttttagtagaattaagaaggaaactcatatataatgccatatcatataaagattattatgaaaaatagttaaccaagcattaccttaagttagtattagatattagtacttaagagaactacttataaaaggcacaaatagtgcttaatatatttctacgtgttaatatcgctattaatgtaattgagtattaaatctcatataattcaatataataatttttaaaaattatcactaattaattataaaataatataattgatatctggtgtggaataactatactctagtagactagtacttaataataatcttaattattataaaatatatatcccccatttattgttgttgtggtttccaaacaaacacaagactaataatgatgtacatcataaatggatattttcatattcaactgccaagttagacttggccattggttgccaactcaattattctataaagcatcaagttcaaatagaactctcttaaaagggtttttccttttcaacttcttttacacaattaatgataagctccttttttcatagtgaaaaataacataaattaaacaaaatcaagtaataatcaagtataatttaacaaattcttctctgtaattatcattatcataacaaatattattaattatcttaataattattaaatacacaaaatttaatcatatcaggctgacatgacataacctttgatagcttagatagatacagccaacagctttcaacaaaattaattaaagttacaaaaattatttaattataagatttagtggatatatatgaaaacaaagtttatatatattttatatataattatgtaagagacttttttgtattatcaaatgaaaatttatataattgtatgtaataataattgttggtgataagtaactctcaagatatttgaactcaataattaagtcattttctttagagggcatttagtcatccactagctacttccctatctctccttatctatagctaagcaaaagagaaaacatctaagaatttgttcattatcatcaattacaattatttatatataaatatatatatatataaatataaataatactccttttcaatgaagcacaaagctagtagtgctagtttgattattattgataactacatcaaggaagataataaaaaggatctatgtttttgaaacaatatgctataagcttttcttatgatttgatcaaatggtcaatgataataatgacactttagttttatgattttgaatgcatggagaatcaataattaacttgtccactataaaattaagggttttatgttatttcgaaaataatatatatgattggaagattttgtgtcaaattttaaaataacataattacaatcagtatcagcattatgataattagtgattttattttattattttaaaaaaacattgcaaaagattttttttcgtaaaaaatgcattttacattaatttttacgcacaccttgcattgaaaatgacaaattatataaagttcatataaatattttttaatacaataattgcatcgatgtatctagttttctaaatctaaactgaatattatttggagaaaaaggaatccaatgccattaaagcagatcaatataaatttatataagaagcatatttaagtacaataaaagcataaataaaatgcatacataacaaaaaaaaaaaaattatatgataccctaatatttttattgtagaaaacaaaaaagaacaaaattaccagttaatttaagtgggtaataattgtcttttttaacgcgttttaaagaactaccaaaaatgtgtaagcaatcagcttcattatcgaataaaataaccagattggaacactatctcgaatgtgcacacatacacttgtgtagtatgtgagccattgaaattttctcctcactctacaaaagtgggtgcctcgaaaagtgagtgtctctcgaggcacaccaaaagagtatatccttatataaacatctaaaaagtgtttaaaaactatatgaaattctgaaaacactgataatgaaagtatactttcctaagtttaattttaataattcacataataaacttcttaattttgtcaaaatgaaagctggtatggttttgtaaacagttatattatagggtaacataatgtatgtaagtgacgcaaaatgtgttatttatttttcttttgtgagtatgtaatatatcatgttttgcatcatttcgttttcattattttatatatgttaaaaatttattccaaaaaaaaaaacaaaacaaaaaaaaatgagggttaaatattatatatactctttt

SEQ ID NO: 302758 - DNA, 1274 bp, Cannabis indica
ggcaatagatagttaaagaaaatcataactattagaattaaattacaaattgaattactgaccaaaaattaaatcacaaattgaagttgtttatgtaataaacaagaggcgttaagtttttttctaattattattttgattaatatccttgacatatgcaatttttttaaaataatatttttgacatatgcaattttgcatctttattcacactagcttagtctttttatttttataatttgttcttatatttttgtgagaagcttagtcttttattattaatgcgtagcaagtcttttttatcacaaataattaaataaggagcgtattagtagtattaataaattaaaagtagtcacaagcagagcgtgagtgataaagaagaatgactacatatacctaatccatgttgtcattatttttttaatttacatttatgaccctgcagtcagctcgaattgtaaccttagttgacttggtataggggtattatagacaaaccaatgtagtccaaaatccgatatataaattattcaattttaaataattatataataaaacctctcagctactcaaccgttaaaatctgtctatgtggaccaacaatccctatctctcttttggcgccgaaaccatttgaaatagaaaagttatccactacaattgcggcccacaaacatgaaatggactctctcctataaaccactagatcaaacctcccaacaaaatcttaaccgtttatcggtacatacaatggaagacaactgtacacctcaaccacacacaatcatttccctgtctccttgattcctcaaatgcaaggcaggtatcgacactatagacattacatagtttgttggcccaattgcgtcaaagtgttgaacagtggcaaagcggtggggcccacaaaaacaatcgacatcgaatgttgagtcaacatgacacgtgtacgatcagatgaagccctcatcataaacataaacccaaaaacattgatgtcacattttcttggatggtagccacaattaagagactcatgccctttgttaggatagtagtaggctgcaaaaaccactatttgtaaccttttattactttaccaaatataaataataatgggtgtccctcattaaaacgagtggtcctactaaaagaaatgtaaagacttaggccagtgtcacatgactccttaaaccctaccccaccaaccaaactctagtatggtaatgagctttattttattttattttgcatttttggcaaaaaaaaaaaaa

SEQ ID NO: 302759 - DNA, 3865 bp, Cannabis indica
ttcatatttaggatgttaattcaacatatatacttgttagtaaatctagatcctggtaaaatattcccaacaccaatatcatcaacaaatgtcagtagtataacccaaactccttaaatatttgctctggctattgttcctccagggggcacactcacaactccacaatgtatggacctattacctctagacaagcaatcacacatacaagtttctctagctttgggatggcataaactgaatataatgttgcccttggacaaccgagccaacaaatggaagtttcataatcaaacataagtcattccaagaacaaaagaagtgcaaaggctcgagtcagggtgaagttccaaagaaggagaggagtcatgaaccaaaatattttgagtatactagtttggttgatactcgggaaaatatttatagagcaacttacaatatagtccattacaagaaacctatgcctatgtataaaggtggaagacacaagagggatcacaaaaagaatgtgaataccacaacgatgttggggacaccacaaatgagtgtgattacttgaaagatgaaattgaaggattggttagcagatgccaagcatgtgtattttcctcataataatttgttggtgattgaagctcaaattgcaaacaaaagggtgtttagaattctggtggacaacaaaattttggttaacattcttttcaaaaccgccctccatgcaattgcgttagtggaaaccaatctaatgccctgcccaatttaatgtcaaggttttaatggagactctttactgccaatggaaatcattcagcttccaatcacattaagtggaggtgtatccaaaagtagcacaacatccgccttcaaatactacacatttgtagtagtggattgtctcattgcctaaaatgttatcctatgaagactagtcttagttgactttggagctataacttccatctggcacttgtgcatgaagttcccaaccgataatggaagcatttcagtagtaaagggtcactagaaaagtacaaggaaatgttataatgtttcggccaagatagtactcatggtccaagaagagaatcaagaagatctcagagcacctgtccagccaacattgggggtaatctaggaagaagatgagttagacccccatttgcgggtaaaaataataatcgaaacgatggaggaggtggaagaagtgtgcatcaacgaagaagatcgtactaaggttatcaaagtaggaacaaatctagctccgacaaaaaaagaaaaaagtgtatacatagtgaagaagaatcatgacgtgttggcgtggaaccattctaaaatgaacgggatcagtccccacgtgattttctatgctctaaacattgatgaaaaagcaaatctgattcttcaaaaaagaagaccattagattcagtttggactgaagtagtaaaagtagaagttgaaaaactaacctctatcgagttccaccgggaagcattttatctggttttgctagccaatctggtgttggttccaaagcctaacggaacttggaggatatgtatcgacttcacggacttaaacaaagcctattcaaaagatttctttccactttcctagattgattgaatggtggatgccaggtctagatacaaaattttaagcttcatggatgcacactccgactacaatcaaatgaagatgcatgtcaccaatcaagagcacaccagtttctagacggacaaagatgcatattgctccatggtaattccctttgggctagagaatgtcggagccacatatcagtgtctggtaaataaaatgttcaaagatgttttgaagagcatagtgacaatctagaggagaattttttcatcatccaaaaatgtcaaatgaagttgaattccaaaaaaaatcacctttgaggtttcttcaaggaaattcctagatttcatttttagctcgagaggaattgaagataatttggagaaaatacgaacccttcagaatataccttcccccaaaaaatacaaggacattcaaggctcaactgaaagaatttcagcacccagtagaaagctttcaaagtcaattgataaatgcattctatttgttaatgttcaacgaggaagcaacaagttagagtggatagccgagtttgaaaatgtcttccaaaaattaaaagaatatttagccaagccttcaattcaatccaagtcgattaagggagaacaaatgtacttgtatttggccgtgtctaaccatgtcattagcgccgcctttgtgtgagaagaaggaagggtacaacttccattatattacgtaagtaagatattgctaggtgtggagtctagatatccaatgattgagaaacttttctattatttgctagtcgcctcacaaaagataagatcatacatttttataggcttagttttattatgttcattttataaagtgttttgaaggtgtgtttcaattgattatattcattttgtatagaattgtacttattctctacttattttaggtttaaatggtaaaattcataatatggattaaaaataagaagaaacatgttaaatgagataaatatgatgaaattatcatggactttggagttataagatataatgactgaaaaattctaagttttgaatgatgaaattatcatggactttcttgttaactatgatttgttccctttttaggaaaatattgtgaatagaagttctaaatatctcttttagcttttcaaaacatctttaattgtttaattctgagtaaaattgatcgaattgtggcaaaaatattattagtcattgcatcaagatgcacgttgcccaaaaatcaagtacctgggtcgcgacactgaaatggatatgacgcagctcgcctgattttggaggtctagtaggatttttaaaccctgattttaaaaattcaagggggctttttaattaggacttctggaaagacaaaaatagaggcagaaagggaccttgaaggttaaaatcattgatctttaaagagtttatttcttctatctttattttttatatctttaattagtcttaatcaattcttcacaatgacaatgagtagccaaatttataattatggtgttaataaatattgcgtgatttttctttatggtttaatgtaatttagttcttccccaatttcttatatacatctattttatttgtgcttaattcctttaatttctttattactaattaattgtttatgatttcaataaaaaaaaatatgaaaagtgagtgttgattaacctgtagtaaaatagacatagattttgatattagacgactacatgtatggtctatgtagcatttaggatttttatgtttaaggtaattatatgactaatttacacaaaagtctaggacttttccatacaatttagattctatatatcttaaaaagaatatagatttaaacagttaatccactatcacatagaaattagaatagaaattaaaaattgtattagaccataggaaactgatactgtaacaccctaatgctaaggcacgctacagtgatttttcaattacggtgctatctttgctaatcaaagaactttctcgaaaatcatgtcaaattaaaacttttatattaaatattaacctttataactttacaaaattatttacaagtatcaagatcctgaatttaaacttttatacaaaatattcaaaatataatactcagatcgtacagcgactacaaaataacaaccgcagatgtcccgagactgaacactccaggtcgcaccgccatgacatgtacaacctcatcccagctcaggctcactcctattcaacttttgtctttcctttacctaca

SEQ ID NO: 302760 - DNA, 2988 bp, Cannabis indica
agatgcgatcgtggccgatgagataggattgcgagagagatgaaagtagagactcttctttgaggtgattgttgtcgtttgacgaaaaacgacagactgagagatgaggttttggtgatcggatgggaggaatttttgccaaacgacatcggaatcggcaattgatttgaagagaggagataccaaggatgatctgcaagcatctcttggtgttgttagagatattatcaaagcgatgcactcttgtggtaagtggctaatctccatgatccttctcttgatcttcttcttctttacaccaaaatacagatgtagtaaaactttctaatgtaactgttactaacgttttgtgacacttgtatatgaattagtgacatttgtcccaatgtaaaatataccatgtgaccatgtcactaaaacctgaaatgtaaataaatatttaatttgtttttttttaaaaaaaaaatactaattttatatttgaaaaaaataaatgagtgacatctggtaaatgtcagtaaaatattgtgggaaaactattaaaatttataaagaattattttcttcttaatttgatatttatattgtactaatactaattattatcataacataattaaattaatattaaagtagataattctttcagtaaagaatattatttaaataaaaaagatagtaattctatgaatacacttttttaaatttatatcatattaaatctgattgtttatgtgttgttcaatggatagaaaaatatacagggtggatttatttatttgtttttttttttaaactataaaactattttgtagtgataattatacgatatgtaacaagtttataaaatagagataattaaaaaatacctataatttaaatccaaatttttgaaaactaccttcatgagttttctttcttttctagactcatgccttcaataaatgctcatttaatctaaataaaaattttatatctaaaaaattatatatgtagattttcttactttattacatttttaacaacattataaatttatacttaagcattcatttacaaaataatgtcaataaaaaggtgaaacttagatcttataaataaaaatatgtctgtgggacattagcaaatacacaacaacttcaatttctttaccaaaataaagagtttaaagaacaaagacatcaaaaatcacacccaaagtgtatatatatacataccacatataatagtctatagatatagacatagatatttatgtgggaggtgtaggcctaaactcaattccctccaaaatgaggccagaccaagaagtagcacaactaacctctttgagagtacacaacactaaatcatgatcaccatcttcattgaagaaatgacccatttcaatctccttccacccatctcctctatcttgaggaattagggtcatgttgttgttgatgttgtctctagaaggaggttttaataacacattaaaaccctccatttcttctcttccttctaattgaattcgaagctcaactggtcttctatcgaaattgtactggttttcttcaagcttgaacacaaggtaagctgtgtatgttgtttttggggatagaatttttgtttccaactttgctgacacatgaagccaccatacaacattgagtagtgccacttcagggaacctgcacactccataatgttgcacataatcagacattttcaatattttgaaataaatatgagttagtgtgatccattgatgagatttataaatttatgttctcctctgcaatgtctaaattgatatgtattttagttgtaaatgaatgaaaaaagattttgacagagtttcacatgaaaataaaaatatccaccttctaaaggtgaatataatgaaattcctatcctaatattggcctgacaataaatttaaaatccaacaagaactatgaatataatatatatgtagtaatttaatagctaaatgttgtgtttggtgtgattaaattatcaaacttatataatataatatattttatgtgagaaaattctatcctaatcatagtatcctacatttgtattctgttcatcttcttacaatttatgtaacactaatatgatactgacatggcctaatatgatagtctaggtaaaaaaaatacttgcaataatagtaatataatgacaaattatgaatatatacattgatattcttagaattattttaattttatatttgttatggaaaatagttaatcattcaaaagtacaggctgacccatatagaagtgaggagagcgccttttgaaaaaaaaaaatcggaagcaccttcccatgtgtcaatatcgctattggtccaactaagtatcgggtctcatatagtttaatataatagcttttatggagtatcgctagtcaatcacaacccgacatgtcgagaaggtgctaagcaccactgatgcctaatagcaatgctctataataaagatgaaggattcaaattccaatgttcaaaagaagctactttgtgagagtattgagctcttattttaagactagaataattctaagcttaatttaaacacataagctataagacaagaccattggttaatgtttggtgcttcagattatatgtcacaattcataaccatctttaaaaggtaaaatatctaagaactgattcaatgtctcccttttcttcttcagaattatgctttatttcataatttcaaatcataaaataaattattattattattatatcttattgaaattaaattattattagagaaaatcatgaagagtgaaaaagaagataacctagattcaggtaaagatatccatctccagtaatgaggagtatcaccccatataatctcaagctttctagctccaaccatgaaacacttcttcccactttctctatcaatcccaaaactctgtctcaaatcaaccaaaaaaactcatcacaattaattaattatataaacaaat

SEQ ID NO: 302761 - DNA, 2416 bp, Cannabis indica
ataatactctttgatagaaaaaaacaagggttagagatctgggttgaatgagacatattatttcgttgcaatcaatgtaaagttccttaactttatatgtgtttaattctattattttagtgaattcatatttagggtgttaatcaacatacatggtagtaaatctagatcctagtaaattaatccccaacagtacggtggtgttgaacaatgggccatatggggtgctagaaatgatctagtttggaaggagaaagtggtgaaggatgaagacatagttatgtttacaaatgattatcttgaacaatggagaagtactcaaagttctaagttggaatcatcatggtctttctttctaaccagtgatgttgttgagtattagactttaccttaagttaatagcatctaagattaatgtggatgcaactttatttaataattgcagaagctatggtttgggtattgttgtgcgtgatgccttaggactacttattgagggtcatacaaaactttcccttagctcagtagaaccggttctagtagaggccattggtgttcaagaagcacttagttggattaaagattgtggttggtgccaagtgtatgtcgaaaccaattgcctttatgtggtgcaagctattcaatgttcattaaacatggtttccttatttggacttgtcattcaagattgtaagaatttgcttgctaatttacataatgtttatgtctctttggttaaacgattagctaatatagtgacccattcatttgctaaggccactatgttatatcttgattgttactttagtttggagtctattcaactattttgctaccttacttagtagcagaagtggttgcttaatgaagattaatctttcattcaaaaaaataattgcaaaaaagtacaaaatttacacactaaagtgatatgtcgtcgagtgctctccatacaacctaggcaattttgaaattgccgctcctctgagcttgcgtgtgggttttgagcctctttttggccagtgtgcatcgatgctccattccacactcctcttcttttgttctcgtctttgcgggttcctttctgagagtagtttttaggtttctgcgaggggtttttcaattgcatgtttgaagatatgtggtgttcccctggtggtccagttctattttttgggtcttcgtccatggcatccccaggtgctcgcctaattttggggttttatggggcatctcgttcggaaggcaaatttttatggttttgatttgggcccttcttttattgttatggctcattatctcgatgcaacttttgatcaggtctcttcattttctactttggggtatgtgcttctttctctcctatttggtttagtatgatgtttcttctctgccttttgctagtttttggcaccgtggagatgatttagctttaaaggtcaatgagttgtgcctatgggaattgatcgatgtttgtggagttctggttttctctagttcctatgttggtagtggcacgttgctagtttccttgaggggttaggaattgtttcctctgcgcctttttaaggctttgtttctatgtgagtgtttagagctctcttgtggctaaggtgggtcatgggactactgtcttggaactattatggccttaggtagttcatggcagttatggccttacagggcttggtgattcaggaggacgtaaatattctgttttcaatggaaacaaagctaatgcttccccgttgggaagattagggcatagtcttggattctttaatgcagttattgtggagcctttgggctctattgggggactttgtctttgttggaaggcagggattcaaattgatttaatctcatcatctctttcaagtattgaagttaaattcaacaatgttaatcaatgttgcttattggtggtgtggacttgtgtagtgttggcactttttttacatggactaatggcagagatttctagcatcttatcatagaatgcctggatcaagttgttggagctccaaactgggttttagatttttccaaagcgagggtgcaaacccttactattaaatattttgatcatgctcgtcagtgttacaacagtgccttaacaaaggcaaaaaaaaaaagaccagtttgcccaaagctctaaagctgaaaaagttaaaacaaatagggacccgacaaagacaggacaatgacatggatcctctctatggggactctaatctagaaattggacccgcggaagaattagaaaaagttgaaatagatttgttaggttttgtgccctaaataaaatccatttcaatataatcatatttattagttaataaagatcatgaatcatttttatgttgcatggttcacatgatttatttcatgattatattctattaggtccagaaca

SEQ ID NO: 302762 - DNA, 1419 bp, Cannabis indica
attaagctaataatttttaacatttctctttataatatattatatatcattacttagaaatatattaatcttatccgtacgtaccatattccatattaaaactattgaaattatatatataggggaagacttcatttaattaacattataattatttaatatatatttgccaattaatttggaaatgataaactagcttgtacagacggatcgatcctttcacagtttcaatctttcttgttgccaaccatgaacggccgcagattacttctataatcaacaatgatgattaatttaattggtttaataatttttatacatagtattattccactatattaaatgaaataaatgattgacaaataatcaaacctataaaaataatttgacttaaaatattttctttcttatttcttactaaactgtattatttatataaaactaaaagaacaaagaaatgcatatagtctctttgactttctttagttatttcccaaactcaagacttggtcttcaaagaaaatattaatattaaaaaaaaattgttccaaaattaagtattgtatctatgttcgatggttatgtttgtgccgttaaccacaatttttagtaaaattgaattttatgaatcgaatcataatcgggcttagggatggaataaagacctttgtttggttttgtttgcttcattatgttgttgtaataaagaagcaaaagaagctattatatatgattgttaatgacgaaataatattaaattagagaatatttataattaattataaataattttaggtacgtacacctaaaggtatcaactgtgattagttattaatgagtaaaagatcatgttgatacatctacatatattagaatttagatgatttataaattaggctacaaatcatttaaattttaatatattaactgctatttatttatataattataaattatgtcatatattatttatgacatagctacaggggtagccgggtaggtggccctgcctaattattattatttccggaattttttttaatatatgattgatgatttgatatttggagtattttctttaaaaaaaaaatgaaatgtacacggtatgtatattaactggaattatctccttaaactaacatcaaaacttcaaattgaagatgtatttttcttgtatatatcgttataattttctgttcagatcatataataattctgttttttttatgtacgtgttcacatgttaatatgtcacactacaagaaattaatgtcactttgaattttgatagtaaaaataacttttaccaacatatttcgcaaactgtacaagcaaaaaagtcaaattttatttttgagagcgcttttcattttatgctggcaaaagttctaataccaacgttaatttgtcaattccttt

SEQ ID NO: 302763 - DNA, 7280 bp, Cannabis indica
aaggaaagaaagaaagaaaaaaggaaactttctggagaaaattttgattttgagggaaaatatggaagttgaaatggatacaatcgtcttcttccgctaaaaatgacgatcctaaacctatgccgaccttctcgagacgtgtatgatctttcaatggaccgctgctcaagatttctcccctgtctttccgatcccggtaagcttcgagttctctaattaatttttcattttattttatttctaaactaataattcttgtttggcttgtaagaaaactgaggaaaagtgtttgcttttgattttgaatttttggtggcttttggtttcagttcgaagatctgctttgggtttaaaagtttcattggtggtgcttcatttggtatatgctgctattctttttcttattgatcgagatttcatacaaaagactaaaagtgaaccctggtatgttattgtagctcaaattcttggctttactctcaatcttgtttaataaagttctaacctttagtaatggatttatagctctaacttgtaccactcttaactctttctttaattttaacttgtgaaagttaagaattttctttaggttgcaagaaactgtgttatccactagtaattagtaattacacatgagactaattacactctattttaaaatacattgtttgtttggatgtcacttatgaattcttatttatctaaaaatggtattattgtgtaattagagagtataactgagactcctcaattaacagtgtaatgacctggttgaacaaacatgccaaatctcgaaattactttaatttacactcaattctaattacctagtgactttctaaacgtgcccttactgtttctttttcaggtactcttttgcatacttggtgctctttgttgccacattggctcaatactttattacttccagctcttcacctgggtgaatgcttattctttagttatagatcttttttgtgatgattggaacttgttaaacttgttcttccttttttaagctgtttgaaattttcatgtctagatatgttattgatgcgataaggactttaaatgagtcgaatgcggtttataatagaacagcagtttcttcaaggtatgtaagatgaacccttttatggttgttgaaatattcggtttttgtgactgagaatgcctgcggtttttcatattcttaatctaaattttaagcaaagacagcctgcttcaagcaaacatggaagtgtggctgtgtcggtagacttgaatgctgcggctggaaataataattcaacgtcttggtctaagctagtgatgggcatgtatccacctggaaccaccattaggtaggtttttcgttacttgagagctttcgtaactttgtttattgcaattgcttgctttattggaacttgttttcgaaattggtggtagctgcttgagtgaattgaaaaaatcggaaaatgtggcatctcagatgtttcatttctcttgtaaaacatgcttttttcaagttgcatttagtttgctttcttatggacctatgtccaatgagaacttaatgctgttccgacaagtgacaactctaatttctcttccatatttgttggctttcttttgaaatcgtaatagatataattccatagtttgtttcaaattttgcattgtatattaagtgcaatagatactacttagagccttttaatagataataattccaacagaagttatccagtttcctttatttatagtgagcaatcatttatctaaagttcacataacatcaatgtttttttctcaatcttccttgtgttgttgctaaaacttttaataatagtatcacatcgggtttctgtaaaattatttgagaagacatcacaacagcaatactgaatttttcactttcattcttgcagaacattaacttgctcctactgcaatattgaacaggtacttacattttaatcctttcatcaacagtatattaggataaaccttgttaacatttttttatataatccttcttctttaatgcttattgcttatctaactttatgtatagagaaattcaactgttccactttttctgttctaatagttaaaagcttatcttttggtctaagaaatcgtcattatctatgctgatgatattatcatcttttcagtatgacctaaagacattgttttttttttttaattctctagtttttctaaagtgggagattatagttacagttttcttacatttgatatgcagcctccacgagcaaaacactgtcacgattgtgataaatgcgtcctccagttcgatcaccattgtgtttggcttggaacatgcataggtcagggtaatcattgtcgattttggtgagttgtttacttactgtattaattgaagtattttatttacaaagtattataattttgtggtcaagtttttcaaactgaagaatactaatatgaatcttctttgactgtttgcaaaaaatatcttaggtggtacattcttgaagaaacagttttgtgcctttggactggatttctttacatcactttcttgaaggctgatatagcaagggcttggtacatacctaactcgaatctttatctatgtgatgattctgttgatgaatgaacaaccaaagcatttttgtaatatgctggttttggggattttgtttttctattcttctaattgattttcatttgcttgtctagagaagtaattttgccaatgtcatctgatgtgtttgttatcaggtggaaggtcggactcgtgatattgctgttgattatcttatcaatttccttgatctttctgttcctccttttagttttccataggtaaagtttcgaacacagtaatgtaattttctttaaacatcaatttcttaatataaatgacttttgcatcttcttcactgtcctataatggctgttactctttctcatttaaaaccaaagtaagaagcagttggcatgtttcgtaagcatttgtttaattctcaattaatactgcagctatcttatcatgacaaatcagactacatttgagcttgtaagacgtagacgcatcccctatctaaggttagtaaattcctggttcgcaaagaatattggatcgggaggaacattcctcaaaaacaaaacagattgtggctcaacttttttaaaagttactcgctttttgtgcgatttacaggggagttgctggaagagtacatcctttcagtgacggggtatgcagaaatatctttcgtttctgctgtgaacgatcgggtatgtacaggttagaaccgttgcccacagctcaggaactcgaggaaaaatcaagaccttacacatgttcggattgtgtaacttgtcgttgttgctaatattgatttgcattattttttcctttttctttttcttctcttttggcaaaagaaaaaattaatggggagaaagtatattgttaaacactacttcattggttgttagaatggcattagagaaagccaatgatgaataggcatttagattgttttgttttttgttttgtaatagagttcatttgtgtcactattatgtgatttttttttgctgaactaaaaattggagattgtgtttcatattgatattttccaaggctttcctatattgcccaattacatctttttcatttatttattctttatttttaataaattgtgcaattttgttaatagcaatcaactaaaataatagcatgtaatctaatcgagacatctctttgttggagatacgattaggattagaattagaaaaacgagtcaaataattagcaatttaatttttagattgtagcatcacaattaatcttaagaacacttatatttagttttatctactgttcaaaagacacaacaataaaatttgttgcagcagattcatttaactttgtagtttaagcactcaattattatgcaacatacgatattcacaattggactactaataaacttttcagtcgcagagaattaagttttttcaaccactaatagcgatttaaaataaaacaaaataaaattatgtcacacagaaaaaaactaaaacactcaaagtcatatcagagagacaagaccaattaattatagtagcaaaaatcgaatcgtaatagcaaaatacaattatgatcaagctgcacatacatccagggaagatcgtcatatcatgtcttatcagagaaaaaagataacttcctgtaattttaaatttaggagcgtaaaatacaaatttataataatttataattttttatattttatataatatatatataataaaatagtaatattaataatttttatttataattatttatttatttttttatttttattatatatatatatattaatatagtaattttaaaatttgtcattgtcatgtgctacttgcctaataaatgcaagattccaaattaaaaaggggccaacaagatgagataatattgaagaagcaacaccatcacatgaaaaatattgcacttgccatataataataagtccaatatttgcttttgcagccattttggactgaaactatgtgagttatcttgaagatttgagttgatacacagttcttgaaagagtcacttcacttcactacacttcttcaactctctaagactttgaagattaagtatggcccaaaagtgacacaaaatgagatatttttgttttataaggtgaaaagggaagaaaaaaaggtcaattatgactaatgattcacattgcaaggaattttacaataagtaattgtatttgtagaagattaaaaattaaaataacacacactttaaaataaataatgctaaatacaattatgaattgacgaatgagagtataaaaaaagtgcaatagatgttaaagtgactcgaactgacaatcttttatagattatagttattggaaagatattatccttttaaattttagctttttttctagtttcaatgaattcaaagttcaaaaatatatatatatatatatttggcgtaattaagattttgcatatagcatataggatattgttgtctgtgcttttaaacttttgaaaatttctgtaggacatttcgagttgtttaggcaaatcttttatttgttttagcatttaggaaaattttttagtttttttttatgatcacatacattgtagctatttaagagcactagaaattttaagaaaattctgaataatttataataccgaaaataacgtttaaatatttacttatcattcgtataagaaaaatagttatgcgtgcaacaaaatatgtagattttattttcgacattataaactacttgaaatttttaaaaaatttacatgtgatcctgaatagctacaccgtatgtgattatgaaaaaaatgtccaaacagataagcggtgcactgtaaatttacccttaacttttaatttatcgagactaatattttttctttttttaaaaatatttttattctcttgggacaccaatcccttattaaagagtgttttataaagtcaaaatgtatttaaatctcaactaactttgaaaatgctttaggaacttcaacttgttaatcttctacatatgatatatatacattgaggtttgaataggtagactttcttcaacaccaatctggatgacaaaaaaggatgattttattttgtttaagagataataataatgtgagaaaattaattatgactcatgattcaattttgcaccaaaattttctaatcgatggtatttatagtgggttggtagttaaaataaacacacttgggaagaaagaaagaaaaataaaaaatacaatctcaatattagtttcaaaatataaaaaaatataagtagaagaacaacaattcatgggttacttattgttctctaacttaattctcttttccctacacacatgataataatgtaattaatgtacattaattaattagctaggattaaagaagctgactttaacaccagtttcaataacaacataaagcccagcagcaataaccaaaacacttagacacattcccaaaaccccaagtgaccaattgaggcaccaaatgggacttaatttcttaggcttcttaatcttaagccacatgaaacatgggtaagccaatgtgacaggcaaagcaagcccacctatgagaccggcaacacttcccaagaaaggcaaagcaacggcgatgaagaagcagaagaacccgaaaaatgccctagacaaggctctaagccaccaaggcattgccttctttttcttgcttgtgtacttagactccatgtcgtcgaatgtgggcattccatagatgttgaatgagcatagcgcgtttactatgacaaagaaacttgttaatcccaagataaagcgtgacacatctctcgagtggaattggaagagcgctgtcagcattccgccgttggctggaatcaagtggccatatgcccaatagccgccaatggctagagggtataggcatgcagctatcaaagtgtatgagattcttactcctttccacattggcacatgtgaagggtgcttctcactagatggcatagtggcctgcatggattaagaaaaatattttgagtgatcacttaaaattaaagtctaccgaccaatattaaaaatgccaaatgattacactattttttcagaatcggctattagattaagaaaaaaaaaatactagaattctattaaaaaaaatatgtatatttttaagaagaaaatgaaaatgactttttgtatgaattaagtagaacatggggtttgaaaatgtcaaaaaaaggtggtaatatgaacatgttgtacattggtcaagaaaaatatgataaagaaagacatttattagtcatgtctttttcttacttttgatacaaaaaagtgattaggaacttgttaaaaacttaatatactttattaagtacttattaactaatatttatcataactaataatatcctttaaccttatcatttgaaactcaactctttgtgttgtatgagttgttaggtactacttacctacctaacaactcaaaaccaaaccaaactcccctcaagtttgaatttagagtatgaacaattaattaattaactaaacctacatatatagactttggggaaaagagtgcttgtgtactcttatttgttttggtattccaaataatttttagtcaaattttttctcatagtcatattaatttaagacatcttgtaaaattttaagaaatttagaaaaatttaacacgttaaaaa

SEQ ID NO: 302764 - DNA, 1681 bp, Cannabis indica
ccaaccaaacgccacctaatttttttaaaaaataatagatacaagaagaagacatatataccaattttcatgacattttcaatcagtaaactattgacgtttgaattgttccaaaaaaaaaaaaactgacgtttaaactatttttatttttcttaccaaaaaaactatttattttttattttttaatagttatatgcataatgcatagcttaagtagtagaaagaaagttaatccaataccaaaatttttcaataattaattaattagataagattggaagagaatttaaaatttgtctcagtctcacaccaattgagatttctttccccattctggccatagcgatacgttttggtattgaatgtgggggttttttttttgctgaaaaagacaaattcattaagccaaactgaaaaacttggtgagcacatggggactcacctcccaaaagcgaagagcaccattacaattatgagtcaacccccaccttgcgagagtgtgagccgcgtcattacaaacacgagagatccaagcaacagattgcctagaaatatcaaactcagaacataatttattaaaagcaaaacgaaaactccagtgaggacttcgaccctccaacaaacctgtcacaaggagaaagctattggagaggaaatcaactcccacttcagaaaactgcctggccaaattgacaccaaaaatcagagcctccatctccccctgaagcgccattacagtacctatcttcttggccccgatgctcctaactgatccttcatcatcaaaaataatcgcagcaaccgcaccttggattccatctgatgcaaaatccacgaagcatttcattctcccaggtcttggtaggccccagcgagtctccttaataccaccatctgcctcatgtgcccccacgtactggttcaacaataccctatgttcctcaacacatctcgcaatcgaattctgaatttcctcaaaagcaatcggagtgttattatgaaagataacattcctaaagctccacaatttatagtacaagatagcaccataaagaataaattcctccaaatccgaatgagagagaggaggattaaagagccaattcaccacctctttcccattactcaaatgaaacgcttcgatgcggatattccatggactagcaaaccacaacctccttataatattgcaattagagataaagtggtcaatcgtatcaccataatcttcatcacacaacacacatttccccggagtggatctgaaaatagcactcaatttacacccgaaaggcagagcatcctgatagagcttccagagaaagagtttaactctttcttggagtttaaacttccaaatcctactgcaggtgagatcacggctcacaaaacgatgctcgtttagatcccaatacgcctttttaatgctaaaatctccatctgcagcaaacttccacaacagtttatcttcattcgaaagagacaggaaatctgttctagccaaaagggagaccttatcaggattgaaccactctgttaacagttgttcatcccaggcttcccctgagtgatgcataagctcaccaataggcttatattcgaattgtctcgggttgatatctcttgggccacaaaccagaccatccaaagaagaccaattccctgttgggttttatgccct

SEQ ID NO: 302765 - DNA, 1752 bp, Cannabis indica
attatgataattagatttttatttgaaaaatcagattctacacaaaattctacccaaaattgaattttgtttcagtgaaaaatgatttttgaatcaatagatatcacaaaaataagattgcactgggaatgcatactccccgtgtgcacacgaggctgcatgtgggcgagggaaaggttgcaagcagcctgtttggggggcaatcctcggtcagaaggggaaaaattcggacagggccttgtttgaaggcctcttgtgagagtgagtctccccatccgcgcgcgcacgtgttgcttggtttcaaatattttcatccaaattcaaaacatcataactaattcataaaaaatcctaattgagttctgtaaaagccaaaattttttaatttttcatctaaatattttcagagcaaaacaaaaaatatttatcaacgtacattgcgttttccatacaatcatcagttatgcaaacaaaccaacatgaacacatcaaaattaacacaaacatggatttaaatctatatttcatgaaagtaaatcattaccatggctctgaggccaattgttggggattattttagggtaattctatgctatttatcgataagaaaaattctagttttcactttaagtccccaaaagtgtttatagtaacacttacctattttacataaatgtgacatagggcctccgttcagcaagcgatatttcactcaggttgactggtaaacgtgaatttagaaatgaagtaagattagtgtaaatatatatatatgtgtgtgcatatagtatacatgttagattgtataagttatatgctactaacactagtatggttgaggtacgaagtgtatatgttacaatatactattgaggggtatgacatagcgttgctgttatacgtgtttctaagcatgtgacatgtggcatataaaggaaaaaattaaccttataatctcactaattaaaatccctaattattattatgtcacaaagaagcctcacagaatcaggaataagtcaagactatgagacaagcaaaagtctacctcaccttatcctagtctcctgatagggaagacatactacctctccagataccgggaatgtccaagtaaagcctacccaactgatacctgaataggtagtcaaagagcttatcacagacaattatcacctaagagtgtcacagatgtctgcctttggtgtaatctagtttgcccaatgacagttacactttttctaacacaaaattagatcttgtcccctgcgtccaggcatggtagtgtgcgcacctcatccactttttagccagaaggttattttagacctctacttttaatggttaaaccttttgacgacacgtgtctccaacgtacaacgattcccaattgtccaactacatcacgcacgagcctaattatttccaacaggcccaatagacagctctcttttacatgtagtttacccaattagtgggcttttagcagaaaccctagactagtcatgggcatgtccataaccaatcatagcctataaatatccttctatatctatacaaagggggatcacaaccaaaatatatgaagctaaacatagagttaggattccctacaaaatattgtaaacacataaaaaatgcccttagatgctattacactgactcgtagactaaggttgatgaacacctaaactacgtaaaaaatctctatcttgtttatttatgcattttattatttctttagctcctaaa

SEQ ID NO: 302766 - DNA, 4689 bp, Cannabis indica
ataaaaaaaaaaaataaataactttgtgatataattgtatcaaattttcgtattgtgttactaatgtataattataaaatttgaaaatttaatatttaattaattttattactaaaaatataaaacaaaaataatgggtttatcatgtaaaacaattaaaaaatataaataattattagacttaggcttagctttgtattcttgagtcttagttgcttagaaaccgttaggattagttagctagttaattataattcagttagctaattctattgtaataataatagaattagtttattccttcttatcttcttcttctctgttttctctattttctctttccgcactaatatggtattagagccttgagtgtgctcttcaatggcgcggggtgagggagttcaaaccaggagcactgttgataactctaatcgatttttcgttctcgacaacacttctcaatcctactctgatgatgcacgaaatcccttcttcttgtctaacagtgatcacccctggcgttagtctggttccaaagatcttggaaggatgtgaaaattatagctcatggagacaactgtggctttaatagctaggaacaagctaaaaattgtcaatggaaagctccctgcacctaatgaagatgatgaagactttgacatctggaatcgatgcaacagtattgtcatctcatggattcttcatgttgtcaccgatgatattgcagagagcatcatgtatattgataatgttgccacgatatggtctcatattgaggagcagttcaatcaaaagaatgctccacgcgttttcaaaactattcgaaccaaacagggacttgttcaaggatcgaacaatatcacagcctactttactcgactcaaatccctatgagatttgattcaagaatatcggccacaaccaatttgcagctgtggagctatgaaaatcattcaacaataccaggatgaggatcgtgttcttgaatttctcatctctctaaatgagtccttcagtaatgcccgttcccatatcttgatgcaagatcctcttccaaacatcaacaaagtttattctactgtgattcaggaagaatgacaaagatgtctgtttattccacacactgaaaatgataaatctggatccaatgatggtggttttgctggtaatgtccaaccatacaaacctaaaatgtcatgtagtcactgtggcattttaggtcacacaatggacaaatgctacaggttgaatgggcatccactagggcatcatctatatggaagatttccaaacagaaatacagtacctattgggaaacctaacactcaaaatggcaactcatatggaaataatggtggaaaaccataagctgctaatgttactagcaatatggaaatgaaatctaggaaaaatactgatggtaatcaagacttggtcaatcgactctatgaagtatcaacacatcttggcaatcttttctcaaaagtctactgattgaactacagggaatcaaagtgatcctcctttagcttctcatttcattggtaaacattttcttaattttaaatctaagtggatcattgatacaggtgccactcatcatgtttgccatgatatttcactcttcactgtttttttatcataattcatccataaaatctgtaatttacctacaaattcttgtgcaaaagtgtcttgtcttggtacaatttagatctctcctaatttttcaatttctaatgtgttgtatgtccctaaattttattgcaatttgttatcagtaacatcaataattgatgtttagtattttttctatcatacttactgtgttattcaagacaatgtgagcaagaagaagattgggatgggtgaaagaaaagaaaacctatactacttacaagttcctatgccatctgatgttccttttgtttttcttcctttttgattcgaaaatcactgatgacacaatgtggcactatcgattaggccacccctcttgtgacacattcattgaataaaagtttgcaatttcataatgctaatgactcttgtcatttttattgttttatatgccattttgccaaccaaaaaaggttaccattgccctccaatcctcacattataggtcataattttgatttgatccacattgacatttggggaccatttaacaccctaactgtttctggctataggtattttataactatagttgatgatcactcgagatatacatggattcattttatcaagcataaatcagaagctcaaactgtcattcttcattttttgcagcttgttaaaacacaatttaatgttcaaatcaagggtgttcgttctgataatgctaaggaactgaaatttcctgaattgtttagttccctaggcatcattcactataactcttgtgtctaagaccacaacagaattctgttgtggaaaggaaacatcaacacctgttaaatgttgctcgtgcattactttttcaatcccatatacctttgacatattaggataaatgtgttgcaacagcagcatatctcattaatagagtgcctacctctaatcttggacacaaaacaccctttgaaatcttacactctgaacactagcataccaacatctaaaagcttttggatgtttggcttatgcttctactctacctcaaaacagatccaagttttcacctagagctgcaccatgtgtctttctaggatatcctcctagaatgaaggcatacaagttaatggatctcaacaccaatagagttttttgctcaagatgtgagcttccatgaaaaaaatttccatttgggcaaactgattcattatccaatgaacagatgcaatttttttccactgttacttctcagtcatcatctgattttactccaatctcctcatctgatcctattccaacctcctcatctgatcctatttcaattaccccatctgataacacaccttcaacctctagaccccatagagcttctgttaaacctgcatatctcaatgattatcattgttttttttttatctactaatggatcttttactactgcatttccattgtctcaagtgcttgattacaccaaattgtcacctagatttcgtgccctcatactctccatatccagctactcagttgctcaattttttttgagtgggataatgcaatggatactaaaattgcaagccttgaaaagaataatacttggatcattgtgagcctaccccctcatcaacatgttattggttgtaagtgggcttacaagatcaagcttaatgctaatgttagcattgaaaggttcaaggctaggttggtggctaaaggttacaatcaacaaaaaggtgtagattattttgatacatttgcacttgttgcaaaaatggtaacagtcaaacttatcattgccttggctgcaatccatggttggttcttacacaacttgatgtgaacaatgcatttctccatggtgatcttcatgaagatgcttacaagactctacctctagggtatagggagactttaccacccaatgttgtttacaaacttaagaaatctctctatggtttgaaactagcttctagacaatggtttgagaagttttctactgccatggttgaagaaggctttaaacattctgtactgatcactcactctttatcaaacattttgacataatttttattctgttgctggtgtatgtagatgatgtgattgttgtgagcaacaatctggttgaaatggaggctttaaaaaccagattagatggtaggttcaagctaaaatacttgggggaattgaaatactttcttgggcttgagatagctaggtctaagaattgctcttcaattgttgaaagaccttgggtacttgggttgcaaaccagcaagtacaccaatggaagccaacataaaattgtgggaaaacaacaaagactctttggctgatcctaaactctatagaaccacaattgggaagctcaaatacttgactatgacaaggccagatatagcatacccagtcaacaaattaagtcaatttcttgctatactcctagatcaactcatttggttgctgcagaaaggattttacagtatgtaaaatcctcaccaatggaatgattattctttcctgcatcatcaaaagtgcagctcaaagcatacactgattcagactgggtagcttgcattgatacaaggagatccacaactagcttttgtatttttcttggagaatctataatctcatggaagaacaaaaagcaacaaatgatttctagatcctctgctgaagcagagtatagagccatgacaaacacaacttgtgagcttgtatggcttctctctctactcaaggaattaaaagtagaacacaaggaactagccatgatgtattgcgacaattgtgcagcccaacacatagcctctaatcttgtgtttcacgagagaacaacgcatatagaaattgactatcatcttgttcgtgaaagagttcagcaaaggataattaaaacggcacatgtgtcaacaaaggaacaagttgcagacatcttaactaaggctctatttccaactcagttcaaagctttaaaagacaagattggattgataagtctatacatttcatcttgagagagagttgttaggctatttttagcctatgttttggatccaatttatgtgc

SEQ ID NO: 302767 - DNA, 3823 bp, Cannabis indica
tcaatatgcatcacatctaaattatgatgtaacagcaaatgcttccaatattcgagctcaaaaattattgacttcttctaccatggctcctgaggttcatttgtaacgtcacatttctcacacagacattttcttttctttgaaattaatttttgctttccaaggtagaattgaaatttattcaactaatctaactgttgttctccatgcaaaggtagctgtggtattttaaattcctgcttaccgtcaaatactttttttcaagtccgaaatacatgttcgactggtgaaaacttttggtgtcctatataactagagcatgttttctcctcataaataggacatgtattgtaccctttcacactatatcaagaaagattttcgaaagctggaaaatcatttatggtccacactaatatggccttacgattgaattcttcttttctaaaggtatcgtatgtaggaacatcctcgtacaacaattgactcaagtaatcaactagagggactaagtacacatcgatgtcattaccaggctgtgaaaggcctgatatcaacaatgtaagcatagtgaactttctcttcattaccaacctaggcagcaaattatacatcacaagcaaaagtggccaacaactatacttacttctaagggtggtatgtggaatgatttcgtctgcagaaagatcaagacagatattcctaggttcattgccaaattcatgccaccgagcatcaattgatttccaagtgggtgagtcagttggatgtctcatctaaccatctaattttctatcggtggcatgtcatgtcaaattgttagcatgattaacatttagaaagaaccgaaacaaatgatgtattggggctaagtaccataatacctttatagggacaccaacctttacctcatcataattctttttctttttctacctagactcaccacacgtgggacatgatattgcatccacaaacctatcacggtataggatacaatcgtggacatgcatgaatttttttcatattgtacgcctaaggaagataatatcttctttttctcgtagaaagacaaaggtatcacgttacctttgggtaataactctactagaaaaactagtaaatctgtcaaactcttatcactccacccgtgtttgattttgtattgtataatctaataagtgtcgataatttagtaaacatagtacaattagggtaaataggcttgtcaacatcctctacaaaactttaaaattttattgaatcgacatttgattcaaattgtgcatctcctatcacttctggaatgtgattatcctcatagtctaaattaacacccttaaccttcttagacttagatgttcccttgcccagaactctaaatcttttccccatggtgaaccaaattttataactcttgtctattctctttctaaaaaatgctcttttatcttagtaatgttgatatgctccatgttaccacatttatgacaaggacaaaaaaccaatttagaaaatttttttcaacaaaatgttttgccagttaaatatctcaccagcaaaatattttccccccaatttcgctacgcacattttccttagatgggatttttcccaccaacattttcaatagttttgccggtgagtaaatgcgcccgtaaaaattatttttcccgcgaaaaactccgtgtgctttggctattcccaccatgactttttgccagtgaattaagtcaatttcattggaaaaaccacctttcaccgtcaaaattatgcgcccgaaaaagtatttacttaagccaaaaaattggcaaccttatgctggcaatttagtttgtttcactaataaaatacaatttttgtcggtgatattcatgaaattttctgataaaaatactttttcttgtagtgagaatcaatgcataacaaaaataataaaattattcaaacaaggataacaaaacttataaacaactaaaacataactatatcccttgaatgaaaaatttaacaaatgcatcaacaaaagcatcacaatcactacataacaaaataataaaaaataattcaaacaacgataacaaaattcataaataagtaaaacataacaataatgataaaataaaaaactacaaaacaactaataaacagcgataaatcaacataacctataagaatttgtaaataaatactaaattataaaaaccaaatcaacaaaaagaacaccagaataatatcataataaaaacaacttaaagaaaaatagaaattggagatgatttctttctttaagacatttcatcaaacatatggcaaatgtacctctatatacatatatatacaaaaactcaacttataaaagaagaaacaataaaaaaaattgtgggcaaattagcataggcaataataaataaataaattaacagcaagattttttaaaaaaaatactaaattcaaaacttctattcataaaattcaaacaagataagagggaaaaaaactcacaaatcttaatataaaaatattaatagcaacaaaataaactttgaatcataggtgatagttttaagaacatatgtacaattctgagaaatccaaaatgttattttcccattggatcgcaacataggaggggttgcgttcttcacaactaggaactggtgacgacgtacgacgtttgggctcagagacaaaatttgcgccggggaggtttggagacgagaccagtgacgacggggattagagacgagatttttggcggtaggaggttggaagtggctgccattgaaagtgagaagtgtaaaatgagtgaggcaagaggagaaggtatttttataaattgttaatatgcatataaaaattttaaatatcatgtagaggtagtttagtaataaaaattagtttttatattttttaatgtaagtatatatattcaatactatatttatatatttatgtaaaaatatatattagcaatgagagccgatcaaaatgaatggggactggaaagatgttctgttctggaagggggacgaatggtggactagaagtggatgtgaggcgagctggagggggctgggagcctgggacaggtggcggaggggctgagattggctgaatggtgcttggaggtaggcggaggaagtctcgccgtcgggggttgaagagaagaagagaagaggaaaaatgagaagcagaaaaaatagttagtattttttatatatacaaaactattagcggcggacccatagtattaatggtacttgttgcccctaattttgcccaaaatacgtggaccaaccggatgatgacacgtggatgggaagggtttagcatttaaataaaacagctaagtcttcttgaaagcaaaggattatctcgaacatgcctcccggagaaggcatgtaagcctcatgtgctcccggagagcaagatggccacaaagcacctccgggtggtgtcagattccatctgaacagtcatctcgcatttaatgccgcatgggaggaagcgtattggaactgccacacgcaataaagtctgacgacacaacccccaatttgtacctactaggctatgatcaataaagtctagtgacggctactctgtgaggaatcacatcagtcaaaagggattaaggactaccttcataaaatccctacagcacctagggattagaccatgcattacccatgatatattcattgggaatgcataactttactgatagttacagaaaggcatgtaccttaattctagggatcaccccacaaaaacactataaataccccccaaagctcattaaagaggagtcgagaattct

SEQ ID NO: 302768 - DNA, 2485 bp, Cannabis indica
gttctcaaaccgattaacaattgatgccttaattataatgcttatttatttaattaatatctataaataaaatgtagagaaaatcataaacaacaagctttcatagctcagttggttagagcacccgtttagtaagcgggaggtcttgagttcaactctcaatgaaagcaatttgtgtttttattttttcaattaattgctaacaggcttaattccaaagtcacgggcctagcccactaaaccacactattcttttcttttttttttttggtatgatttacaaaacttttcacatccgaccgttgagaagaaaatatctgaggctatttaatcggctggcctagtcgtctctctcaaaccctaaccttctgattcgaaactgatctgggtttaggactttagggtttctgagaattgagatgaagtttttaggttagtgtatcttacaatatgcaggaattgtctgtgccagataatcgctggtaaggctttccagtgcaaatctattgagcttttattaatgtccgactctctgatccgttttagtgatattattagtactattatttgtttttccgtgttggtttttctctgttataattgcttttattttcttatttgtaagtatggctttcttagttctttcgtcatgttttgataatcgtatgccatagttgttgatgtcaatgatgataatcgtaaggcttgtttctcaaaacattcgcagtggccgactaaagctttcgtcttcgccagacttgagagctaatgctgccctaaccttccttggatgtctgagatcttaattttgtttttctcttttgttgcttcttttcccaaaacatttgctgtggcagattatgcgtttttgctcgtctgatactccttttgttgttttgaatttggtatttttaagtaattgcatttacatgtttcgaatttcctagctgatgatgtctatgatgataactctaaggcttgtttctcaaaacattcgcagtggccgactaaagctttcgccttcgccaggcttgagagctaatgctgccttaaccttccttggatgtctgagatctgaaatttgatcttctcctttgttgtttctatattgtaatttctatagaattttgacggagaatttctgcgaagaaatcctttacaatacgggagcaaacatgttatgtttgtatatttccttagttaacgtcaaatatcaatatcaacatcgttaatggttttccttttgggatttcctccgatttgatttgtctcatattccatcaccttgtggagcggctttgctgccattacctcgttggacttgccatggggcttacattttgttactaagttttgatctttttctatttgctactgtttttgtatgtattgccatagtttcattaatttactttgatgttttccatatatattgcccatgatggtatcaatcatcaattaccatctttcgggactgaatggccctttgggccttgctgttaatatgcaaatctaaggcattttctttatttttgtttttctttttagtgctaagttatactaacattttccagtaccaatgaggatatcatataccaattaacaccatctttcgggactgaattggctttttaagccttgatgttatattctgcaattctgaggtacttaaaaattatttcgattttatgttattcaaaattttttgtttcaaaactttgtcaaatttgtatgatctttctttacaatttgtttttttatgttggttttgttggttacgtaaactggagagagctattgtacattgtttctgtgcagaattgcctgaatagtggcttcatattattagattttttgtggaatagtggcttcatgtattttttaatatgttcatgtttgaaagtgttaacataagagaggggactacaaaaattgatttgggaaaaaccttagctctaggctgaggtgctctatacttcacaacaaaagtaacagagaactaactgaatctttaattgacttttaattcccccttaacagagagctgaatcaccctgattatcaacccatagtataggggaattgggtaaagcaatatgcaactcaggaagtaggaaacaatccatctgatttcagccgtggcatttgctaaagcacgaaatttatttatcagcgactcagtgaattaccctaaacaatttcagtgttggactcagggcaactagctcaattcacatgtgaatatccttctaaatccattatggcatggtctaagtattactagtcttttaaaaccagcacccttcacgtacctgagaaagcgtaactattggagcttggcaaactggcttgacttgttgactgtgaaaacaacaagccgggggcccttatagtacttcttctgtaacatcaggaaaaggaactcctttgagagagtttgtgagtgttgaagcctgactaagtgttgcgatatttagcacacgca

SEQ ID NO: 302769 - DNA, 2216 bp, Cannabis indica
ctagaagtcacccaccttaaatttgagtatgataactcactcttctctctcaaaaagaaaaattaaaaacataaaacataaactcttctaagttagtctttactctttatactaagtaaatatatacccaatggcattgattgataataacacccaacagcctggtgcctcttctattcacaatctaagtcatcacacacacacacacactgacactgccactgacaccgttatcggtctcggtaggtactgaactaaccaccctcatcaccctgtcatgttgaagtcctctgcatgctcataaagactataacttccaggcatttccatctttccatttaagtgctcatttcctacaaaagaaaacaccaaaccaaacactacttaatgcttttgcattaatttcattcatggcaccatatggtaattatgcatacatgtccagtgtttgtgatgtgaagacacaattaatgaaatggtgtaaatttgtgtaaaaccagaacaaaggaaagagctttatagaatgaatatacacacttgaattggagaggagaccatcataaaatggcaatggactcaagtctctaggaggccgtaaatcagtactcgatgtgaaaatggtatctcctttactggactgtggatcaaagaaatgcaggtcagaacccagctcagagttgtgaaagttaatatcatcattagcccttggaattaggtgattgtgttgggagtgaaattcctcaggcttagtcttcttgtccttgggtgactcgatatcagtttcgaattctgattcagcattattattattattattattgttgttattattattgggagctgctgcattctgttgcttccttttggatcgagctcgcctattctggaaccaattgtagacattggtttcggaaatttggccatactggctgagatcagaggttatctctttaatcttttgcttggtaggagttccattgccttgatcaaaaatacgctcaagattttgtagctgcacaggtgttggagtccatctttgtctggcagtgattttgtgcccagaagaagtcattaattgatcacagtaaacattccccaacctaattcctaaaacaaacaacaacaacaaaggataaatcagaatcatgtgaacaaaatatacactgaaacacacagaataaccaatctgatatataatagaaatgtcttgaaactgtcaataaattaataaagacaaccacttgataataaataagatgaatatttagtagttgaaatgcattggctgcaataaattaacaagaacaacaaataggaaatgaaccaatcagccatgacaacaatcaggggattccatctcataacccatgttttaatatatgactcgatattttatcatttaattcacagtatcccataataaatcaagagaacaaaatatacactgaaactgacagaagaaccaatctgatataatagaaatgtcctgaaactgtcagtaaattaataaacacacagtatatacatagtctctactagttcaagtacaaccacatgataataaataagagaatatttatagttgaaatgcgttgggctgcaataaattatgactaaaggactaaacttgggttcatattccataaaagaaaaagtgtactaaatcaaaacccagaaaaatcctgcttgaaagagaagaaatgtcatgaaattatattaagactaaacaaaatacacactgaaacagaaatgtcttgaaactgataataataaagttaataaaagtgtataatagtctccacttaaatggggctagcaataaattaaggctaaaggtctaaacttgatataataaaaagtgtattaaatcaaaacccagaaatgaaaattgaaaataaaacctgaaaggtcaagttgagaagtgtggttcttgtgcatctgaactagttgctcacaaatggtggcataggctgcaatctgcttccgaagggtttggagttgggcatcggtcatcactttcacataaggaattgcaggtgttcctcctccaattactccgccattaacaacactactactactcatattcacatgattcacattcaaatcatctttctcttccatcatattttcctttggtttttctactaagaaagagaaaaagaaagtatttttatttgattttggggactgactcttctcttctcttctctctc

SEQ ID NO: 302770 - DNA, 2564 bp, Cannabis indica
tatatatatatatatgagtgagtggtaaaggaaaaggtgtggagaaatgtatgggaattgaggttaggctcttgctatctttgccattttattcagctaatacacaatatcagatctgcctatttatatctagctactttctcttcactgtctagtctatttttctagtagcaatctgttctaactttgctagacagtagtaaattcctatcactctactattctaaatttaaacctcaaagacaattgcacaaacaaaatctcagggaccagttttccaaacagcaaaaagtaaagaggaattaatgttaaacactctaattaatattatatgatgataaattatatttataattatagctagcattgtataaagttatggaaggacattcagacctctggaattgggtacttccatgtttttagagctgtcaatccaattgtactagaactccctccatgatatgcatttctcaatgaaagcatcccaagattaccagtgtagagacgagccatcagcattgctaattcattagcctctgacccagaattcacaaaatacaccacctgcatttaaaagggtctcaaacattcagaatgcagaaaataagaaatccgatacaaatgctaaaaggatatctatgtctcattagattattgaacaaaataagggtctctttttgggaaacatgtactatttcttatatctagaaggctagaaggagaacataaataaatgccttttttttctttttgacatatatatatatatgtacatagctagaagagaaaataagtataaatttgacttacttttttacgcaaacccttataaaagtacttttcttattctaaaagccaaaacacaacttaaaagtttagccaactggaaccaaagacaataaaagcatgacataagtgtataaggaggccattctcttgatactctttaattctagaacgcagtaacttaactggagccacagcatgacatgttatatttatctctaaagttaatggaactcttaaaaaatcaaatgcaactaaacatttcaaagcaaggcttgatatatgaccctaatttaatgattttcttttgggaaatatcacattcttcattctaaagtggattcctgcttgattttaaatactgtggtaagatgtagaattgggataaagaaaaagagaacctttaagtttccaggcatttttgatgctaatgcctcagcaaaatcagttattgcatggtgcaagtatatggttgtggcatgctgaagaagcttggtttgttcaataacagcatttacaatatcaggatgacagtgtccacatgacactgtaactattccagcaaatgcatcaagataccgctttccatcctcatcaaacaaatattgcattttcccctcaacaatattcagctgtaaatactcattttagaaaattagtagcaaaacgattgaaggctcaaaatatatcatagtctgtaatgatccaagtttagcaaccaaaatttaaagtcctacataataacttattaatccaagtcaatataatatacatattatatacatattcgactaactcatttttccatatagactgaatggaagctttatttttaattttatttttcttttttgttctttagagaaaaagtacatgagagaaacaaaaacacaatattcatataaacatgcatatataaatatgttttgcatgataaatgtacagaaacaaaagaaaaaaagtaaaattaaataaataaaaagttgaaaaaacatacaggcttctgataaaagtggaaaagagaaggacccagaaactttttcctcttctcccaaacttggtcagctcgagggccattgtacggcgttgggtggtagtcgaagggcgggaagaccagggaaggttgagcagaagcaggtgaagaagaagaaaacgcagagaaagtaagtttgtgaagatggtgggcgagcctggggtgagcttctgcaagggctttcttcaaaagctgggtctgtaacgccatggctgttgatggggtgttcagattcagtggaatctggagattgtgattgtgattcgcgaggacccagaaaatgattatttaagcaatttcagggacatctagtgggccccattttagtgttttgaaagttttctgacgtggctttcttctttatttaaaatattgctcgtcttttttaggtgctccatcagctatgactctcctctataatcaacttaaccaaaccatcatctacttatctatacatagattgaagtgggtgacacgatactcactccaaataactttatctcgtttttcttttattagatttataaatgttaaatacccttataattacccaaagttttaagtttgtaagattatctttaatgggatactaaaatattaaatatagtataattttatactatatttactttaatggaacactaaatctatcctcataaatggttttatctaccgtgtcccaccaaatttaataggacactgtagaccacactatttttttaaaaaaaaaatttaataatta

SEQ ID NO: 302771 - DNA, 6099 bp, Cannabis indica
taatttatttttaataaaatattttaaatatataaaattataaatgtgttatccgcatttttacaagacgtgacacatggcatgaaaggaagaaaatcacatcaatcctcctgtaattgaaaccctataatagtattggaaggtcttcccaaataaaggatcatctagagtgaagggatgtgtggaagcctagttgcgccaacccatacttgccaagagcgggataagaaatgtctttcttaaacccggaagggtctagtggagagactctttcggttgacttcccaatacacacctaaaggacctaaagcggatgtcgaccgtcactgggtgttgcaaatatcgacttttttcatatgccaggtcaccaagtgatggttatgctttttctgacagaatcatatcttgtcccctacactcgagcatggtagtgtgtgcaatgcaccatctttttaccaggcgaacaatacagacttctacctgtaaaaaatcaagctttgagtgacacttgtccctcgtttttaaaggttaaacttttgcgtgacacgtgtccaagtcgtacaaagtggtcgccattatcacgctgctacatgcacgagcataatgctacccacgggattgaccactcagctctatattgcacgtaatttatcccactagtgggatttaagaaaaaatcttaggcgggtcatggatctacccatacccgctgcttagcctataaatacccctttatttccatgcaaaagggtcaggccaagaaacacatagctaaaagtctacaaaaatcacccttgatcttcttcttcttcaaaaagaaattaagggaaaagagctagggtttcctacaaaaaatcgtaaattcttcaatattgcccttaaaggctaatagagtgactcgtggactaaagttcattaacacctgaaccacgtaaaaaattaccctctctcaatttcaacactttactatttctttagctcttaaattttttagttttcaaaaagctcggcaaacaaaatgtatttaaaaaaatatataattggatgaccattggatgataactagatcagtttggttatccattggatcagatgtccgatccaacaaccgatctggtccgattggattttcaaaagttacatctgatccgatccaattatgattgtatattcgattctattggattagttgggattggatcggtcgattgtaattgaatcagatgagtttctgtacacccctaaatcagataaggataatcctttgatgttgcatcaaagaaaaaaagagtaaaagttttaagtttataagcggcataaacccaatatttatttttagcggcataagtacccaatgtttataaaactataattttcctctaattttgggagtacaaattctgttttgaatttattaaaaaaaaaaaatatttagaagtaagtgatattacatgtttctgttaagattcaatgatctagaatttgagccttatatgtgtcatatttaagacaataaaagggcatgcaccaacgaaattagagaaatattgcagttttacaaatattaggtacttatgccactaaaaataaatgttaagtttatgctacttataaacttaaaaatttaagtacttatactgcaatttacaaaaatatactacatatatgtatttggaaaaaagaaatagatataaaaaaaaattttaagactagtatagatctttttttaatagaacttgtgcttcaatagataagaaaaggaatagaaagcaagcaagttacaaggaaggtaaagaaccattccaaaccaactcattatcgaatccaagacctaacttagcaactttataagcgaacatattagactctctatgaacatgagctacagctaggtttagactgaaagataacaagtccttaatactaattaaactatcatccaatacattattatttccagtacaagagacaaatttatcaacaatagatttacaatcaattaggagcacatccacaggaagtcaagcacttaagcccattgatagcttgaaagatggccttagcttctactacagtaggggaaacaagcccaacaaatgtttagaaaaatgtgctttaacccgattgtaattatccaaaacaacaaggccaacactatgtcttttgcaatgtggatcaatggcagcatcagtaaatatcttaagattgcccaagagagctggttccacagcatcatgtggagcagtagtaaagttgttacttgatgtttgaacctgctgcacatccaaatacttgaagaaaaatttaacactccaatcatacacttttgtgggaggaagagtctactgattatgaaaagtattatttctttgattcccaagtgcccacaaaaaatagtataaaatacaaatatagtctttgtccaatttctgaacaatacctaaaaaaaattcattaatgtcaagatttgtataattattataaaatatagcaaacatggatgattgccaagcttttctcgatctgaagcagtctagcaaggcatgcttggtagtttttggaccaagtttgcataggggacaaactggagaatcaattacacattttttgaacagagaggaagctagaggaagagcctccaaacaaaagtttaacttttgggggtactttagaagtcaaaactttagtccaaaacttattagaatcagaaaaggaagatgaggagggaaggtcctgttgagagagagccaaatggtaagcagatttaacactaaaaaggccaaaactctcctgttcccaaattatacatctctattataaaaaccagaaacaggaacctcaagaatatcattaatcatggactcatcaaaataggctctgagtttagctaaatccccagaacctgaatcagtaatgaaataagacaacaaagaagagaagggagaaacatttgtgtgaaaaaatttatgcttatgattaggaatccaatgatcttccaaagttctaatacaatttccatccccaactttccaaataagttctgaagccattgaatctctaccccaaataatacttctccatgtgtaggaagggttatgaccagggacaccctcaagaatagaagagtggaggaagtatcgagccttaagaaccaaactaagaagtgaagtggggcttttaagaattctccaagcttgcttagcaagcatagcctgattgaaatgtacgagcgatcgaaaaccaagaccccttttaaatttagattgacacaaaaacttcaaggattttcaatggattttccttgaagcccctgtagaaccgcaccaaaacctggccatcgcagcctcaatacccttgcataacttaattggtaatctgaaacaagccattgcataagcaggaatgacttgaatcacagctttcagaagcacttccttacccgcccttgagaaacagttagcagaccaacatcgaaggacaaaagcaaccttatctttgagaaaagtaaaggagggatatttagatctagagagacattgaggaagatctaggtatttatagataaaaggtctatcttctaagctaaaagtatcaaaaaagagatttttgacctcttgcaaagtcttgggagaaaagagaatagaggactttgagaaattggtagtctgacccgaagccctagagtaaataatgaaaacctcctgaagagcataacaggaacttctatcagcagaatagaaaataaggatatcatcagcaaaaaaagaggtgagagatggaaggggcactcctagatatagcaatccctttaagaaggtcagcatcttgcctaaccctaagaagggaagataatccttcagcacagagaatataaagataaggagataagggatccccttgcccaagacccctagaaggcttaagagagcctttaacaactccatttattaaaaaaaaaaaaaagaaagagtagtagtagaaatgcatttcataaccagactgacaaaatcacaaaatcaataaggaaattaaaatgaaacataatactttccaaaaactgccacttaacccaatcaaaagccttagccatatcaagtttaagagcagcccaaccactcttgccatttttcctagagttgatggcataaacaatttcttcagcaatgagaatattataaaaaatgattcttccagaaacaaaagcactttgaaaaggagaaatagttttatttaaaacaaccttcaaatgattagcaaaaccttagaaaactttatacagagtagtacaaagactaattggtcgaaagtccttaagagagttagcatgctgtttcttaagaatgagaacaattaaagtagtattaatagtagaaaaattagcatcgttattcaaacaatccaaaacagcatggacaaaatcagggataagagtagctagttcttttgataaaagtaagcgtcaaggccatcaaggcctgaagctctatccctagacaaattaaaaatggcttttctaacctcttgaatcgtgaagggttgagcaaggaattcaatctcagaattcttagggagggtcctaaatagtctaaagttagattagtagcctcagcatcacaaccctcagattgaaataggtcagagaaaagggattggataagatcacccatagcatcagaattgttaacaacattaccataattgtccttaagatacttaatagtgtttcttttgagacgcaaagcaatgaaaaaacttagtgtttttatcaccggctttgagccaatgaaccctagcccttatcctctggtagatttcttctttgtaaaggagagcgtcaagctaagattggaggtgcttaatacgaggaataaactctctgccatcatgagcagaggtctgacgcttggcaatctctttttggatatcaagaatccgagcatggaaaagttgcttagcagacttattccaagttttaaaagaagaaacacaagatccttgacagtaaagaaacctattaagagcacccctaccactacattgattagaggtgtggctccaagagttcttaacagtggtatagaaatcaagattctcgagccagacattttcaaaatgaaaatgtttattaataaagggagaacaattaatgtcattagggtagagaagaaccttaagggctctatgatcagaaccgtaaaaaggcaagtgatgtaaagccgcattacgaaagagactacaccaagcataaaaaccaatagcccagtcaatacattcacaaaccgaacaattacgcaaagtaatttatctccatgaagtgaaggggagaaaggaaaaataatccaaaaaattagcaaattgatccatgtctctatgatcataatagtactgccaattttatcatcaaaagaaagtaggcaattaaaatctcccatgataaaccaaagaagattaggggcattatagaaaaattttgtcaagaagactccatgtaacaaaacgttgggaaaaaagaaggggagaccataaaaaaccagtaaagttaaacatatcattatctttaatctatatgattacaagagaaagataaaatatttacataaacaagccttccactaaagtagaagttccccaccaaaatatttcttaaggacttcaataccattatcaaaacccaaagcaaccctaattctatcaacaacctgcataggcaaacaagtttccatcaaaaaaagaatgtccagacatgttccttaaccaaaagggagaaccttctgaatgcaggtgcactccccaaaccatgtgcattccaactcaagatgctcattttcttgggcgggggtgcacagcatcacccgcctgttccaaatcagtagaattaagtggctgagcatcggtcagtttggccggtttttttctaaataaaaatccaaaattcggttttcggtctagattggtgcattctgaaaactgaccgaccaatccagaacctatcttaaaaccgaccattttaaacttcgatttggtcggttcaaaccgcccaaaccgaactttttaaaaaaaaaaatgatccaatttattctataaatacattattctaca

SEQ ID NO: 302772 - DNA, 5010 bp, Cannabis indica
ttttcttttcgttctcattttctctaatactaaataactatctttttttttttgcttctccctaattttctcttcaaaatttctttcctcccatttttctttcctaacaaacaaggagacgacactgtttattttttgtagataacagaaacaacacaaagaaaacaaaacttagttagtgcgagtattcaagtttccaagttatctctaactctcttagatgaattattatgttttacagaaagagtagtgaatttaaaaatcggtaccctatatttaatttgtgtatatttttgttaggttagatattccctatagaaagggaaagttgggatatggatacaagtgctgaattgtataattatatagagcattgctattgggcactagtggtgcttagcacccttaaaacgtgtcaccttgcgattggctatcgatattccctaaaagctattatattaaattatatgagacccgatacttaattagaccaatagcgatattgacacgcaagagaatacttagcaccactggtatcttttagcatttctcaattatatattcatctttgcatggcatatgttaaaccctaaataaacaattattacgtacaagctatagtagtaataatttacatgcatatgatgatacctaggtaataatttcaatgagtttagggcttactatattaactactatacattttggctccatatattgtttattatgaaaaaaagactaagaggtcaagttctcaagtatttctaggtcatccatcatcatattttatttttcttatgctattatatataatattaagttgaaattttggatttgtctaactatagaatttcactttttccaatgtttagaaactcttctttatatatttatagtatctaaatgtacatattataatttacaataaatatttagtatcatataatttaatataataactttttgaaagtagtaacaataataaacatgcaatatctattgttaattaattagaaaattctatacacccaaaaaaggatacagttgttttttttgtatcctttgtctctttttttttttctttttttactaattaaattttcttacccataaaatattttttgcatcttttgtcatacaaagaaaaagaaaaatgcattacaagcataagagaagacttttaataatctcatctaaatataattgatatataataattagtacgtaattataaattctacaatatagtacatgtgccatttattctaaattaggttaacctatctagctcgatactaaatactaattaactatcatagtacataataataataataataatactagtagtagtagtatattaataaattataagctcgatgagtgaaaattttgaaatcctaagtagatcgccctaagaagacatagctaatctgattcatcgcacgagcactactgactctaaaattgataacgttaattaacattcatcgtttccactaatccatttctcgagcatttcctccaaaccacattcacgatcatcaagatcaagaccctgatcacgatgatcatcatctccgccgtcattaatatcaaaattattataacaattatcatcattatcattacatggaagtttccatagatccacagctgattgatcaagaagaaaattttcaaagtcaaagtcaaaatcaatatcgttattattatttggttgaaagttagtatttttaaatactaaacccttgtttgtaaattttgttgccttagttcgaattggtacttgataagtagcagtattgtgtttggtgtcgttttcttcaatctgttgttgtttttgaacaagtttcttcgctagggttgtgttccaataattttttatttcattgtctgttcgacctggaagtcttcctgctattagtgaccacctatacgtacaaccacacaatgcatgcatggctagctagggttagactattatataaatatataagtaaaataaaatgggagaaatatttaatatatcactaaatacttattattttacaattatgtgtatgaatagtccgaatagattgaggcactggccagtaaaatataattacatatataaaataatgtcaaaattaaaaagaaaatattaaataatatacatataacttaaaacaaaaaataattatgaagtaataaaatgtgtaaatgtatatatgtatttataacatatatttcatttatacttgaaattttttgaataatttagtgtttattaaaaaataaagggtataaaccgaaaaattgtattgataaaagaaaatttaatattacatgtaaattatttaaatttttttaaaaataagtaatatgaaattatattaattaaaaaaaatagtagagtacagacagttagaattatagataattaatatatgaaaatgtatagaatgaaaattaacaataataattacctattgcccaatagcttatgaagcctaataattaagtcttcttcttcctcagaaatatttcctcttttaatatctggtcgaagataatttaaccacctcaatctacagctttttccacatctttgaagacctaattaattcataataaatatattaattattaacaaaaaccttatgatcgataattaatttgcataaaatgtatacatatataaataaatacactaataataataaacaaaacctaattataatattcataaattatatttcttaataataaattcctatattaatatacagttctttccacatatcttttaaagacctaattaactcataataaatatatattaattattaacaaaaccttataataattaatttgcacaaaatgtgcatatatatattcttaataatatatataactattaataataatatatatacactaataataatcaaacaaaacctaaattatactttgcataaattatattcttaataacaaattcctaattaataatttatacagctctttccacatctttgatgacctaataattaaaattaaataattaacaaaaataaacattctttttaaccctaaatcaactagacaaactcggtctcaacaatatcaacaacatcaaaatagagattagactccgaaaaaatacgatcaacatataaaaaagacgctctaatcataaggcgagcaacccaattaaacaaaaaaaaaaacttatataatttgcataatgtgcatacatatattcttaataataaaaagaaaattaacaacatttttatatattaataataaaaataaaaattaccagcttgtttaggaaggtttctccattttccttcaccatgagtttttgatataatcagtgagaatttggtcttcaagaacagtccaagctcctttgttcaatcccttcttagggcaacaaggacttcttcccattataattataattataattaattacttaattatagtaatttctaaacattacaaaccctttatataaccacaatttcaaactattctcatcccaaattggaattaaaaataaatatattaattaaatggtattgggtttttttcaaataataaatttaaccaaactttgttgacttatatgaattaaattatattaattaagcacacttacattaagtaaatattttaattagcaaatgtgtgaataaatttcaaattatattatgtaattatataataattattgttaggtacgtacattattgcatgaaattggcctagtcttagtaactacgtacaagtacgtgccttaacggttgtttatatataaatatatatatatatatatataaatagtttgttaatcgtgatttaggtatagatacaattaatatttaatgatgagtcactatgtgattaataattgggattagtttgacttgtgttcataaactaaattgaaaacactaataaagctctatatatatagttagtagtgaacctttgaaaaaagaaagaataaggagattaatttgactgtaatttaattaattggttcaatttgccaattgagtacattattattaattaattaattataatttgaggtttgttaattaagtctacttcgactttgtgggtagactaagtgtcagaagctctaaattttagagagaaaaaatctagagagagaagttctgactttgtgggtagtttttttacaataaaaaataagctaagggatccctaacggcactattactgctctccttttataggtgaaaggaagtccacaaaaatagggagaaaatacaaataagatgtttttgactgttgatgatgatctaacggtgaaaattagctctttgtggttatggtcattttttaaagccccgcgagttgcgctgcgggtaacctagagcttatttttgtaacttcctttgggtgaattttgacgatgatagtttcaaaattatgtctagagtgtgagacatgacttgatatagcattaacttcaaaatgcaagttgaatcgcgccaatcagatcaaaattgagtgagttatgactattttactgatgacagtccatgacccagtgtccaagttgacatctagcgcccaagttgacatcccagcacccaggttgacatatgacatcaacctggacgctggataagtgtaaaaacgtccaagggatgtactataagatgcctaagtgatattttaataccacttagtccatttatatgttttggcgaagctagtcaccagttctaggagatgttgttgttttgcagaattgagagactcgaaacttttcatttttgggtgagctggaaatgagaaatgcaaagttgtaaatttaatttctctgacttcatatatcattgtcactgtgaaaaactagacggacggtcgaaatagcatccagtaggacattttgttgggttttgtgccttaaataaaactcattttaatataatcagatttactagttaataaagatcagaaataacattttatgtt

SEQ ID NO: 302773 - DNA, 4496 bp, Cannabis indica
ttttattattattattaatagaatgcattaggtgattaatgaagaccacatggtttgatttattagagttgtattttgattgattcattgtcgggtccatcatcacctaacagcaactaatggctggagatatatagaagaatgggtcctctctcatctcaatcttcatatacttatattgtataacatacacattaatcatcatcatcaccaagaagaacactacttgattacttgaccatgatactttttaacattcttttgactaataatttgtttaaatctatacatgtattgaaattgtataatgtacatagtaattttgcaaactagtagtttaataacctttacaattcaagacagttttggttcttcttattagactttactccaaatttgtctttaagtcagtttgtgttcattatatcagttagtggttgaccgttatttctgttaattccttttaccgacttagttggttggttatctcttgtatatatatttgtattcttgtgctcgttttcattcaattagagagtattttcatttctctcaattgttcaattttgctctcatttcttttcgcaacatgtatcagagcgggaaagaatgctttcccagatctgatttcaatcacttccgcccttctccttccttgcttgtcgtgctttcttctccgaaaatggcggtgactaatcagactctctgaagtccgctgttccttcttctccgattagtactctatttcatgtgttctttcctggttctccttatccagggtattttcttttcttagttcaccatgtccaatgacggccaagaaattggatcaagagctgaaattccaagcactgtcatcgctggagaccaacaccaagctacaggtcctaacaatcaaagccttcgcgtcgtgagtttaagaaatcctcttgaagacccttcggatccatattatctccatcatggagataaccctagtaacatccttatctctcaacccctcactagccaagataattaaatttcttacagttgtgctatggagctgtcaaaagaaactatgattcttggacggttctattcctaaaccctctcccaatgactttaatctttacaatgcttggattagaaataacaactttgttatatcatggattcttaattctgtgtctaaagaaatttcctctagtttgttgtatgatgaatctgtactagctatctggacagatctaaaaatttgttttcatcaaagaaacgggccacacatatacaatcttaggaaaaatttgatgaatctttgccaagaaaaccagaccatcagcatgtactatactaggctgaagaccctctggaaagagctgtcgagttacagaccaaattgtacctgtaatggatgcacttgtggtggcgtgaagaaacttcaagaacactatcacatggagcacatcatgtctttcttaatgggtctctcggatcacttatctcaaattcgaagcaatatcttgctaatggatcccttaccataagcaaatcatgtttttcatctggtgacttaggaagagagtcaaaaaggtggcttcactactggtaatgactctaattccaacttggcttttgcttttcaatctgataaaaataccactgccaagcctgattctcagagcagcaagaaccatctacctagaaggaatagacctttttgcactcattgcaatattctaggacacacgatagagaaatgttacaagattcatggataccctcctggtttcaaaggaaataaatcgaaagatgcttcagcaaatcaaatgcaaaccaaaaccgattccaacacatctacagacgaggctcatactcttttacctcaactcaatgcagctcaatattagcagcttttaaatctccttgctaaccagcaaaatggtatgacaaacacaggccctagttcttcttcaggttccacaagtatcatactatccaaccattgcatcactcctcataatgaatcttggataataaattctgaagctacaaggcatatatgcaataacataaaattgttccaatatgtttgtcctatgtctaaaatcaggttaattcttcctaataatgattttatttctgtccaacaaagaggttctattctcatcaataaagatcttaccctcaatgatgtcttatatgttcctaattttaaatacaacattatttcagttagttctttaaccattaatgatggaattagtgtacaattcttcactaacagtttccacattcaagacaaactcaacaagatggagattggcagaagtagaactatcaatggcttgtatgtactggacagccagcctcgatgtgctgaagttcactctgttactgccgatctttggcatgctagacttagacacctttctcaacaaagacttgctcttttaagtaaagaactaaattgtaatgtgaattctatgcataaaaactccccatgttatatttgtcctttggcaaaataaaagaaattactctttcctaataaacgtacttttactgctaacaaagttgatcttattcattgcgacacatggggtccctatcacattccttctcattcaaactataagtatttcctctctttggttgatgaccatactagatttacttagatttatcttcttaaacaaaaatttgatattgctaatgcaattcctcaatttattttatatgttcagacacaattcaaaggcatttttaaacgttttcgatcggacaatgctcccgaattggtgttcaaagatctttttgctaaacttggaataatgcatgactttacttgcattgaaattcctgaacaaaacgctatagcagaaagaaaatatcaacacctcctgaatgttgctcgtgcccttttcttccaagccaaaatgcccattcagttctggcgtgaatgtatcatgacagccacttttctcgtcaatagaacccctactcctctcctcaaaaataaaacaccttatgagcgtttatttaatgttgcccctgattacaccaatttaagaaactttggttgccttgcctttgccaccacacttgttgctaatcgaacgaaatttgctcctagatccaagtcgtgtgtttttataggatatcctcaaggaattaagggatataagctatatgatatcaataacaaacaaatcttcacatcaagaaatgttgtctttcatgaaaatatatttccttttcaaagattgaatgttgaagctactggtattgatccactctctcgcatggtttttccttcttcacatatttctaacacacacataagtgattttcctacagttcctcagattcctgtgccaccatcacaagaacaaccaccccaagatcacatcatcgacaatgaatcagtcaatgcaccagcactagaaacaaatgacactcctggccctattgatactgccagtaactcgggccctgcccaaccaagaagaccaagtcgacaaacaaaacctcaagcatatttaagagactacacctcatcctcttaaaaattttatttcttatgataaactctcagattctcacaaagcttttgttcttgcagttacaaccctatccgaacaaggaaactacaagcaagctagccaatataaggagtggaatcaagcaatgcaatccgaactttatgcacttctgagaaataagacttggactgtgatcaagcttcctccaaataaaagagctatcggatgtcgttgggtctataagatcaagtacaatagtgatggctctattgaaagatgtaaagcccgtctcgttgcacaaggttacaattagcaagaaggtctggatttttttgataccttctcacatgttgctaaaatggtgacattcaaacttcttcttgctatctcctccatcaaacaatggcatactctccaaatcgacatcaacaacgccttcctcaacggtgatcttcatgaagaagtttacatgaccctgcctccaggactatctattcctcacacagatgacactttaaatctcatctgcaaactacataaatccatctacgaccttaagcaatcatcatggcaatggtataagaatttttctgatgctctcatttcagatggattcaaacaatcacaagccgattacaccttgttcacacgcagttcgaaagaaagcttcattgctctccttgtctatgccgacgacataattattacaggccccaacattcagctcatgcatcaaatacaaaattccttacatgctcagtttcaactcaaagccttgggacaactaaaatacttcctaggatttaaaattgctagatcatctgaaggaacttttctttaccaaagaaagtacaccctgcaacttcttgaagacactggttatactgacagcaagcctgccaaaacacctattgtaacgccctaatgataaggcacgctacagtacattttcaattacagtgtaatctttgc

SEQ ID NO: 302774 - DNA, 2901 bp, Cannabis indica
tgaggttgtcacttctgttagttttctttctaattataggcaaggttcaagggaagtcatactacaacagacgtttgacggtaaggtagaaccccccttttcccgttacccccttttttgttttgtagtctgaaagtcattttctaatttaattcaacgagaagaaattgtaggtaatcttcatggcttcattttggtaggcaacgtgtcattgtatcccatctactttttcttttgtagatgatagtctaattttctttgatggagtaaggggtgattgtcagaggtttcaagaactattgggtaaatatacatttacttctagtcaggttgtaaactttcataaatttgagattggcttcgggaaataggtgggagacgacatcaaggaggatatggctgatattatgggtgtgaaagtggtagaaaatcatgaaaactatcttggtttaccatcatttgtagggaggaataagaagcaaatgtttgattttattaaaaatagagtatgcagaaagttaagagattaaagaaattccttattttctatgacttggaaggaagtactcataaaggttgttatacaagaaattcccacttatacaatgagtaatttttgactaccaaagaatacaattaataatctctataaaacagtagcaagattttagtggggttctttggtaaaagagaaagatttattagtgtaggtggtctcatctatgcaagcctaaagagaaaaggagggttaggctttcgagatctgaatttattcaatcagacactccttgctaaataaatttgaagatgcataagatatccatcaacactttgctgaaaggtcttgaaagtaaagttttttttaaagcaaattaccatccaaatagggggtatttgaggctagatatggaaatcatgcttcttttgtctggcataatctggtgtggggaaaggatattattcttaataggattaaaaaatggtaatagtttgagaatcttagaagatccgtggctacctaggcaattaccttcaaggtttttgataagccagttgtatgctattgatattaaactctggaatggcatgtgggatgaataatttattcaagctacatttaatgaggatgatgctgaactgatcttgaaaatttcataagagaggtgggagaaggaagataaaatactttggtattatagcaaaaatgaataatactcaattaaaagtgggaatcgaatggcgtctaaactaaggcgcgagaagcaccaatctgatgatagtcaagaagtagcatggtggaggagattatagaagttaaaaatatcaccaaaggtcacacactttgtgtagaagatcactcactcttgtttacctactcattcaaaattagcttttagaggggttgaaattgatacacgttgtaacagatattctgctggtgcaataggactgttttacatgctttatgggaatgtaatcaatcaaacctatgtgaaaattatgtggttggcagcaacatgtgaaaggtgagaagaaaaagatgttctaatcttttaatgaagctatcaaagagatggtagcaagatgtgtttgagatttttctggtgctatcatagaatttatggtacatcaagaatagtactaagcatggagagaaagtgtgaaaagatagggaagtcaatgactggcgtcaccgtgatattcaagagtatagggggtcgacactgaatttaagagaagacaatcaacgtcaacaaggccaaatggagaccaccagtggaagaatccctggagataaatgttgatgctagtgtgtgaggaaggatcgaggttgttccgatcttagttgtgagactcgggactttcatggtaaagtggtgtttgtggcaactactactctacaacaaaaatacacacccttacaagcagaaccggccctgagcggtaataggcccaagaaaaaaaaagtgttatatataaagaggaatgtaagtattattaggcctatttttacaaaattttacgaaaaatactattttttcaatgcataaaagtatattacataaatattttgggccctaagcacaaacttagcccaccttaacctaggatcaggcctgattacaagcagaattcacagctattcaaactagtttacaatttggagttcaacgacatttacaaagttttattagtgttaatggagtagcgcatgtattagtcaattaagctttagcatacaaagttactgttgtatggatagggttaatctctctcttgtgtgagttttattttgcaacggaactagcctaatcctttatataattgtattttaatgaatggacatggatttcaaaaaaagaaaagaaagctctccttttttttttttctactattttagagagctatattgttttagttggagttcaatttaaaaatctactcctataggagcaatgtgtttagagagaataattaaagaccactctagagctttaagaaaaagggtaaattgcggcataaatacctaatgttttagattttttacacttaaatacctaatgtttatttttgaaggcaaaaatacttaatgttacaattcttttacaccgaactaccacttccgttaactcataaatatggacacgtggagggttcaaatacattacatttattttttattttattttaaaacttaatatttttaatatcagaaactaaatgctacttgtttcagaaaaaaaacttgttctcataacaattttcacatgatattggcacttcaattcgataatcatgttccatatactacactggttcattcagctatggtaatttagcactgcatttctcttatttttttttaaaaaaaacaagtagtatttagttttgatattaaga

SEQ ID NO: 302775 - DNA, 1039 bp, Cannabis indica
aagcggcttgtgaaaggagttgcagagtcatcgaagtataatggatacgggttaggagatgtagttttgtttggaaataagaagcgaatgaagattaaggatcataaagaactttatcatgtctttcttgatcatcgtgtcaaaatactttatcagtgttatgttggacaatctggatggaacaacaatttactttccatgatttctttgctagaggaccctgatgaacaatatcttctatacttgaaagcgaagcaatccgtgaagaatgaggaagcagagaaaaatcataagagcaagtcaaaatcaagaagtaaacagaaagaaaagcgatcaagcaaaaaagaaaaggagggtaatggccactctggaaataaagaagaggacaatgaggacaaggaagctcctttgactattgaggattttgtaagggaaaggttcaattgctttgcagaaaggctgtacttttgcgttgagaatttgtataaacacttacctacctctctaatttcacttgaagaattggagaagatgtttgaagcataccgctctctcaaatcttttcaaaatctggtacaaaatgtttcaggtgatgtattaaagaatatgaacaagtctacaatggatgaagattacaactttgtcaaattcaatttggcaagaacaaagaacctgcaaacactacaatcacttcctgaaaactttcctcctctatattctacagaggacttttctatggacattatgatgatgatcagaaaattctgcttgcaaaatgcatgcatggtgttctgtactgtttctagttctgctaagctggacagtacagaaatgttggtcatcgatgaagctgctcagctaaaagaatgcgagtcagccattcccttgcagcttcatggtttgcgtcatgctattctcattggagacgaaaggcaactccctgcaatggttagaagcgaggtaatttgagctttactaccatacttgtatttcctttgtatgttttttcacttcttggttaattgtttaatgttttcac

SEQ ID NO: 302776 - DNA, 1148 bp, Cannabis indica
agaatcactagcatcattaatagtaattatttataggtaatacctatggaaaaatgttctatatatatttatacttatactattttgttgtaaatcagttcataattatgaacaattcttcacatttaaaagaaaaaaggaaatctttttactaacataaatactataattttaaaaaacgaaggattatagccatcatacattccattataattatttttttaacctaatactatatactagaaagtaagagtgtacatcggtaaatttaacgtggttatagtatattttcactaatccaatataatctggggttataaatatataattgtaacccgttcaattaaaaattttaaaaaaattaacctacccaataattttgatggtttggtcgggttactccgtccaaactgatttttattttttttccctttagtattgttattagtttttggttttcaaataaattagattagataaaataaatgtataacatatatatatttttaacttaaaagtgttataatctaaattaatgttaaaacataaacataagaaatatactaattgactgggattaaacaaacattctttcaaaaataatatatgtatatatatatatacatatattaaaaaatttacaaactgcctaaactaaaatgagtaaactaacaagaaacacaatcaaaattattaactaactattaagtacaaactacacaaaatagtttaactattaaatgtaatttatgtaacatttataaataattttaataagaatatattaatcagtttatttaggttatattgtgcggattagaataatattcaacccactcaataattgggttgtttgtattttgttgggttagttggattatatttttttgttggtttattcaatttgatttaagcagtatatttgagttggatggtttgtaaatatttttaaacatggagagaagagagatattctcccatgttggatgttgataaaaaaaaatacgacatgatgacgtggataacattttgatgcgtggcacgaagaaacaatccaagccccctaagacttcaagcagcacagcgtcacctgcggacatgggtggggctggggcaaagggccccaacggccccaggtggacataggg

SEQ ID NO: 302777 - DNA, 2557 bp, Cannabis indica
caagatctattctaaaaagaagggccatttctcacagcaggctcccaccatcactttaaaacctttattattgtgtcggttttaattttgatgtcttactaacaaaaacaactttgggctcagatttttatgggaccaaaatttataacatatatatagctcaaatataataaactatattatatatatacatatatatctctcttagtaattaacaagcttccttgaaataaaacaacagtactactcacaattaagcttcttcttcaagcaagagatgttggtccctttctctcactctttgtcttgtcttatctttttttaaagaaaaataataattaataattaagcataattagtataagtatatttgctatactataaaaaatacatgaggatatattcatcataacttccatttctaatttcagtagctctagtaattaattaaaatctactcccaaagaaaaaaggtacggcaacatcattcaattcctgttatatatataattcaacccaataaggttaattaatttcaatctatatatatatgacttaattatatatatagcttggttcttagcaaaaatggcatatgcatgcctcttcaggtaatcaaattctaatctatcgatcagatcactcttctttatataaataaaaaattatatgataccatacacaatgtatatacatagatcaatcatcaatattagttaaatatatatatatatgtttattacttattaatttttttaaattatagtatctatctctacctataatttagaagactctagctataagtatgtgtatatagtctttgactaagcgttatcaacttgctacatatgaatattaattttatatatctaactatatagtaaagtagtatagtatcaaatatcaatatatataaggctttgttatataaaattaagggtgctgatttttttcacagggtatcacatgcatgcctcctcgatattgagtcactcaacaatatatatatatatataatataatgtatatataatatatgtatgtatgtgtgtttcttgttgaagctagagacgtgcgagtatcgtgtgtacgtgcgcttatataatctattctacaactataatgcaaaactcaatacacatctatatatatcatgactttgtactttttttttcgttacgtaagtatacttaattataattaaaaattacttttaattttctaaaataatttgtttttaaaaaattctttgtttttaagttgatcatcttagtaatatatatatagcttgtttttcttattttctttaaaataaattgggtggaaaaagcatataatatgtcattagatattattgtctcatgctttaaataaatgcaatattaataggtaatgttattaagtactagagctactacggcctaggactaggactatatactacgtcgactaactaactcgtgtacatatattaaagttgccttttccaaatctaattcaaaaataataataattataagtttattatatacttttgttgagtattaatttatacatatattaattatattaatgaaaacccttaaagtcatttttaaaaagaaattaatgtaagatgagcaagttgagaaagctgtgtaattagttcgttggtgttcaaccagtccactgtctattaatacttttagtaataaaaataaataaattaatattaattatttaattaattaattaattagtttatagtgtaagttaataaaaaagtatatctgataatgagaaaaaggttttgggagaaaggaataataataaaaaaataggagctgtatggggctttgtcttgagactgaacgacagtgggtgaccggttcagccagtgggcccccttcactgacaccaccggttcgctaaccggtgaccggcgctgtttacgccttggcggtcacccttgatacgccacgtgtgcttatctctcccatgtgggactgatgtggctccaattgatccaaatcacttatagccttgtaaataatataattaaaattactaaatcattttttattatttactcttgtttattattatggtcaagattttataatattattaattagagagtagtttttttgcagagatatttgtatgggtaattaatggagtttgtaccattgaactttttggtgattaattagttttggaatccaaaaatgctctgaatctgagggaaatgaggggtttgtaataatatgtaaatatttttgtgcctcaaagtgggggatttggtagtggacatgagacatgtctcttattaattacataataataataattattaattataatttttcttaatttctctactatttatatttttttccaaattttattattatataatctttttgatgtggtgatcaaaattatacatgattaattaacgatatattaagggtcagtttggcataacttttaaaaaagttaaaagatattttttaaaaaagttgtgataaaaatgtgtttagtaaacagtgaaaaaataactttttgaagaatt

SEQ ID NO: 302778 - DNA, 4085 bp, Cannabis indica
ttgaatatcttaaatattcaactatagtgaagtaggttctgcgaatacaagtataacagtcagatagataaataaattttttattgttaatgttattttgtttgttgtgtttgttaatttaggcacatttacaatttttaggaacgtccaattatccgttatgctatcaaaatttcggtagaattaagataaattttactaaaaatgcataaatattaaaggaaaagtgttacgcataactcaaataattagttaattactagctaattgtaaaaaattaagtaacataacacaaataattatatgcatttatataatttaatcatcacatatactttatataattatttatgtctatctataaaagctccaataagtaaaactctaatagtataactttcttaacaattgaaaaaaaggtacatttgacataatctaaataatattaaaaaaaatcacttttcacctcattttattttgaatagacaaaatcctatctccacatgaattaccattccaagagaacaagctttttaattataaattataaatgtcaaaccaaacaaatgaatagattcattttaagaaaagtcattccattttaagatccattccaatcaactaaacactaccctagtattagttaattacaacttatataactagtaactatttacaattagttactagttatcatgtcaatatttgaaatgagtaatttaataacatgaactaaactaaaacaagaattatagtaatatataaattaaaatgaaataattgtgagaattctaattagttacattatgtaagtagtaactagttaaaataagttacttataaatactgagatttttttgttatggataaatcattaatgcgtgaggagagagatacactgcgatttcaagtaggattagatgtatttatagagtttttcctaaagaattctagaaatcccaaacgtattcattgtctgtgtgtagattgttgttccgtacgaacattgtgaccaaatacttaatacccttcggagtgaactgggtcgtacatatcttattgcaatttgtaatcttgttgaagtacggatgcagaggcaggatcgcaccctgtttagcgtgaggtccgaaccacacgcagagtccctctccggggttagtggccagctatttgagggtaggcagaatggcttccactccgccaagaagacctttgtcataaatatttttaagcctcttttaggtaagactagacggaggagaaacccactggggaacctttttctccttagtccttagaggacggactttctcgtattccaccttgacgtaatcttagtccagaaccaagacctccctaaactcagaaatgggctcttcagcgtcattataccctttgaacgaaagagcccaaagagcttcttcctcttcttcctccaatacttcatctccatcaccattaggagaactggttgcctggacctcaccctggtcctcaacttcctagacctttggtgccccagtggtaacttcaatattttccctgggatgaacaatttaccctgcactggccattgcaaaaacttgagaaaaatgttagtctttatctgaagctttcttatagattttcttgcttttctctatcgcttaacatctaggcagagggtttggtttggtagtatgcttagctacggtaacagggacttctgctggtgtgaagtttttcttcacaggccttggacaaccttctggcagtttgtctgggacgttagcctggactttgtacgtccacgtagtgggcagatatataatgcctccagcccctgtttaattcctaaatgaattggttgtatccttctccactgatttggccggtgtaatggtggtgttgtaccacaggttctggagactccaatgagtcactcgtgacctctcactcgtcaaatctcgagttaaatgagttttcacttgacgaagaagaatctacacagagtcgaggctagatctcctaaaggaggtgaagaagatccttatctaccaggtggttacctcctaaatattctccagggttcttctacaaaagaaggaagacaaaagggtaagaacaagagataagtatgaaatttatgacaggggaaaatatgtctaatgtgcccaccaggttaatttagaaggaaaaaggaagaaatttcatcccagtaatgaaattcctaaatcaatggttcaatgaatgataaaaaactaggaaaattcccagaaatcttgaatagatgatttcaaatagtttctagcaaaataatgggaaaaggctagaaatttaaggactttagatgccttgcgtgtgttaatgtcaagaattcaaaaaccctgaatctacctaatctcaatcattgaagaacaatttcaaggatccaaaatttataggtagttcaaaaatattaacacatgcatttaaagaaaattaaaagaggaaagaagatttcaaaaagaaaatgattttatgcttgatttcttttgagactaaaaatagctaaaagagtataaaagaatctttgaccctttatataaacgctcagagtaattcagtaactaatgttcaaattttgggttttcccccaaaagatgtaatcatcagattttgaggaatgcatacgatagtacgcgatactcaataaccgttaatgcgctaatcgaggtccaaatctcaagaccaggcattaaatgccccaaatactgaagagacagtcgaatctttgcctttttttatttagtcacatcggatcaagatagagtctaaagaccgaacacgtgtcacccatccaaccagcttagtggccgaataagtccatgtgcgagcaaaaagttcctacgcggacttgaggggaaagtgttattccaatttctgtacaaggtgacatgacatctatttgagtgacacgtagagaatatttcataacctggacgggcaatatattccatggtgtactgactgaagcgatttgttactcgtgaacaattgatttaaagaagttggaatatgcggacaaggtatgttacatcatctgaccagcattcacctcgcagttagctcgcatactccgaacaaaataaatgtggctggaataccttcaggactattccccctaaattttcaagcgaccgcattcttgattttgtaggatagattcactccgacagggaaaaagaggaaatcccttaattttcctttttatttctcttaatttaggaaaataattgaatttttttatttatttcttatttgatttgggaaactaaattaatgtaattaatccctataaatagtggagtcatttcactatttagagatctaaatttatccattcaaaagagcactcaagctgctaaattctttgtaaaagcttttgaggaagatcaagaatttcttgcttcttttttcacaagttaatacaagtaaaatgccagtaggctattacactactacaaaaataggtttttttttgacgtttttaaataattgtttaaagtattcccgttgatttctataatcatcgcaaaacgggaaaaataggcaacagttaaaaattgtcgctgatgtggacttcccaacggtttaaaactgtagcctataacatggtataggcgatggttttgaatcggtgcctatagtatagggcacggtttaaaatcgtcgcttataccctgatggcagaaaaatctgtattttcccctattttttttcttgcattaattttataattttacctaaattaaaataaaacaactaactttaaaatacattacatttatacaataacaaaatgaatatatataataaataaaaaagtatataaataattaaatgtatttataccgagctcggagagagacggagacggacaagaggtggtggtgggctgacgtatgagacaaagataagaaggacatcgacgggaggtggtggttgtccgacgtatgcgacggaaaggagagatagaccgacaggagtaggggtgggtggagatcgatggacgagagagacaagaagaaagggagatcgagagagggaggaagacggcgagagag

SEQ ID NO: 302779 - DNA, 1129 bp, Cannabis indica
caatcacaggatgatgtcctactcctgcctggacccccactaggggcaccatttgtgagaaagaggaagaaaccttgatatatgctggactacactgaggaaaaaaagaataagcgacttcttctagagaacatagacctggaaagactagcagatcgtagattgttatgtatgttcaagatgtgggtggttggggacatcccaaatgatcgtcctaggaatctccacgcgtggtgtcaatgatgtcaatttcttcacaaagttgttggtggtcagccaataatttgaggatgatgtaagtatatacttttacttatggatacatttttttgataatgcatttcattttttgttgttattgtgtgtttacaatttggttagcatatatcgatatgtagtgacatattaacgatatatcaatatttgttttgtgatatttttcgattagattagcaacttttgacaatatcgtagccaactgagataggaatacagtatagcaacatatgtcgatattatttacgatatttcacaatattttgactaatggtatagttagtattaggtgattatggtttagtgacattctcgtgatatattacgattatgtttaacgacatatatgcaaataagcttataaattttcctagtgatgtttagagatgagttttgcaacatatgtcgttacaactaaaattaaagtgatgtagtttatcagcaatgataagtgtcacgggctcaccttttcaggcagcggaacacccgtgcgacaccttgacttctctaagccaaggttagccttccaaccacccgagtaacaataggctcaatttttgcgcgaccgtgtgcctcgtgcacacttccgtctcacgaacaactcccgccgagtcatgctcacaagcatccataagtgcatccatgcatcgagactctttagccaagatactcgcactgtccataggttcacactatgataaggccaatcctaacactgacactcgcctcgtcactcgtgaccaaggtagcatgtgtggcaagatgccaacgccaaactgacgtgccaacacttctaatcatgccccattcgatactgtccgtgttgggttttatgccctaaataaaactcttt

SEQ ID NO: 302780 - DNA, 2891 bp, Cannabis indica
atgctgttatttttgtaaaaaatgggagaaatgttgcaaacttaccaagctagctatgaaggacttcacacagcctgaagtttcacgaaggctactctctatagtctgatgaaaataacgggaacattatgaatggacatatctagtaggcatgcaataaaatttctaaacatgctaggtagaatattagaaaagaatgttacggccacaaataatttgttcgatgagaaaacatgattcatcataccagtcttattatttgatgagatcttgaacttttatcgtttaaagcagtttctcccacctgtctttgagctgcagatataaaagcattgaaaatgaacagggattttgtattaaaaggaaggctggttttagttttcttcaatcaaacatgctaagctaagattatcctaagtcacacagcatacgacaagtgatagcatactcatacagcatttaatttttcaagaacaggactatacaagcattaaaattcattttcctcataaggggtatcaataacaataaattcacccctaatggtttgaaagcataacaaagaagttagttatggtagcttggaaaagaaattttggttactaacaaggaaagtcaatacctcattagcttaaaattacaagtgacctaatttaccttcacaaatgttgattaaatgcctcagatgttggccatcctttacaacttcttcaactagttttaccacaatcgtccctttctgcattttaaagacaaagataatagtttatacaaaattgcaggataattcttctggacggacttcaataaaataatttcttctaagtacctcaggatcatccaaaagccgcagagatccagaatcacgattcaaaagatcgacaacagtctcgttgtagatctccaaggcagagaatttcaaggtaaaatctctctcaggggtctgtaaaattttaattaacatacacataagagaagttcatgccagctcaatagaaaagatttctcatgcaaccaagaacaagaaacagatcaaattcacctagtaatatcttaagccgtctcctgtccattaaaattctcaattgatatggcattttgttaagtaataacaaagaagtacaatagaaaatagaaattacattttttatgtgttcataaatgtcctttacagcattttctgtgattcctctcatggtatacgtcttaccactactagtctgcccatatgcaaaaattgttgctgcaacgtaaaaaaattaagtcaaaaacattggattcagaaacaaatatgaattctagctaaaaaatattcaaatcaccattcattcctgtgagagcagatagagccacatccttagcaccttcttcataaacctttcgagttgcagaactaggcccgaaaactttatctgttaactcaaacaataaattgtaaagaaaatgttgcaagcctcacgtataattgagcaaagtaagacaacatgtataaactagagagatctagggttcctctaacaatgttatatctcacaccggataaatccctaaaaatgtaccaaatgtgtatgaattcacagccctatcatggtttggactgttgaaaacaatggagtggtcatccacgcattcccaagctattagatcataaagtgcttgttctctccggctcagtggcctaatccgaacagtgaccaatattttctcctcacgaactcttggaccacctggggtggaaatggtggtcctttgtatcttagataatggtgtacttggtgtcccaaccatcatcttaacttactagtcaactctctgaaaattttcaaaaccaaaaatcataatcataatttaatggaagaaaaacataaaatgggcaagtttaatttgaccatatttagacataaccaaatatggaaaaatgttttcaatatagaaatcaaaggaaatgaactcaaaatttccttaaagaacaagtctttacacattacaagatcagatatttggggtactataacacaacaatcaccttgaaactttaatgtgaagtcgtcaaaattcacctgaaaaataaatttcgaacaaagaaagttggaatggaaagaaataattaataacccaacagaaacaaatgaaaacatatataaggaaacaaaaagagaaagacccaaaagaaaataaagaaagaaatgagagacatacgtgaaatttagccaaagatagcagaaaatctttgaccccctctgatgggaaatggagaatgtggtgattgaaggagtgaattctcagggggttttggaactcaaatctgtagaactaacggctactttttccgttcgtaacgtgctgaaattgaatgccacgctcgcgaacgactaagtactatttgaaattttggggtctgattcgggccggagatgggccctcttcgtccccataaacgggccgaaagcccaacaagggaatttggctatttttgttttttggggagcgtaagtttgtctatattatacaatatatgtaactttttccttttttttttctttctctctattatttaatactagctttaagaatgtttttttggttggtctgcagtcatgaaaaatatttgtttttagaagtttacctatgaattaaaaaagatgtctttattttagaaaagtaatgaatataaaacaaagggtcatgtaatctgcttatgttattattgacagaaaaaagaatagggtggattgtattggaattagagaataaatgacttgcggttagagttaaaagttggtagagataatggtatacaaataatcttagttgatatttagttggaggtaatgaaatggaatgaaaaaaaataattttcatttcatttctttatttaattgtattttaaa

SEQ ID NO: 302781 - DNA, 1647 bp, Cannabis indica
ttttttgcacaaggcctccaaaatactttggccggccccacacccaccagactagcatcgccgtctacaacaaaatgtggagaggagtcctcagtcacaaaggcagcatcagagtttgaagcttcaagcacaggttcaacggttttagtcatatccataccaacatgttcaacatattcaagtccagagttatcaccatgtgattgtgtgcaacaccatttcagaatcgaacggagatagttatcatatattgaatgtgtttcctcttttaagtttatggttcatagggttcagtagttgtggatggagtagtggtcttggagagtactgtatcagtttcaatagggatcacggtagtggtactgagaggaacagatgtgggtggcatcgtagtgtttgggaaggtttcttagggagaaatataaggattttgctgccaattcagctttgggaaaaggcaataggggagatggtcatttgttcagttgggtggatatgggaggaaagggtagagggtggaagattttgagacagagcatggttaagggtgttacgaacaaggcgagtaaggagggcccaagctacattctgacaagtttactctctcgggacacgaccttgtccaagacttggtagtggatccccctttatcaaagaaccataaagtctggaaatgtccccacctgcatcttcagcctctaagtattgtaaacaactcacgttggtgtgacccaaacgatcacacttatagaaaaaatcaagtagtttttcatactgaagtccaccaaaagatgttctgggatactggtgaatttgagaagagtgcccctcagaagtggttaggtgacatcaatatcgatacgaacacgtataaatagcccccaaccttcttcaagagagtcatcatcaacttccatgaattctcccattgtagtgccaatgaaattagccagagccctggttttactgaggaagggaagcctgtgaatctgtatctaaaaagaaatgcgggtaaaattagcagaaatagggttttttaaaataggtgaagaggaaaaaataagggtgggccgattgtaagtgccaaggctggcagtagagggtacgccgcatgtctccagcacaatcaaattggactaggaaataatcccgccgagaagagatggtcacagggaaacaaaacttgcaaacatcagacataagagagatgaaaccttcaggatttactttcttatgggtgaggacaaaggcaaatacactccattcatagattgccggtgtggatgcagcactcgactctctgatttcttgaacaatttttttcttatcactcagaacgaattggttagccatatcactaagcactctatccatgaaattaaaattggggcacaaatgattagaggagaacagtaagtggcataaatagggagtttgggaagagagaggttaataaagaactggtttctttgtaagcacacccacagctggggagaagaaagattataacagccacagaaaaaaagtgggcgtattggagaacattgtcccacatggattaaatgtaaagtattgagccatatataagaacatgggatactccacttattgccaattagttttgagatggaatcccatgattctcaa

SEQ ID NO: 302782 - DNA, 4158 bp, Cannabis indica
cgtaaaaaagaaaaaaaaaaagcgtatcacactaaatttgtaaataaaaaaagtttttagttactagtaaatttctcaaaaaagaatttcttcacttataatgtcgttttatcgtataatgtcgttttatatccaacaaacgacagagtcgttgggtacttctaatgtcgtttgcagtttttgtatccaaaaacgacagtgtagtttctgcaaagaaaaatcgtttaattgatgtagtttattgcttccaatgtcgtttttttccaatttgtttctgaaaaaaagtttcgcttatagcttctaatggcattttgtatccaaaaaaaagtttcgtttatttaatgtcgtttatcacttataatgtcgttttttattcaatgtgttaagttcaggtacagataaggaagagactgggcctgggccatggacacctggcccattaatattctgaatcggatcccaaatttgacaatggtacagaaaaagccctaattctactcttcttcttccttcttcttcttctccccattatctttatcgttctaccgtactcagagtccccactctcgttgtcgacgaccaccatcgccaatctaaaagtctcaggtgacatcttttttgctttgccttgtttaatagtcaagtgatttttttgatttcgttatgtatggatttgatctgagtgttctgtgtttgattttgcgttaatgatctgagaatttaatgttcaattcttttaattcaatttcagaatcttctataggtgttttatgatttactttgctgcaagttcttttcttttggtattggggttttgatgtattagatttactttgtactcgatgtttattttataaatcgttatttgggtatttttgggttgagatgaaaggtgtcatattgattcaacattttccacgggcagccatttatgaaattttgaacttttattctcagaaaatctagaatgattgaatgtagagaaattcttttaagaacaaacaattataaaacgtgattttgctgatttttgttttgtggtatggatccttaataccacatggctaaattacaaatcatgatcaattaataatggatttttatcatttgtttaccaaaatatagtttgagtcatattttggtagttttacgttttaattttttatgttgtttgaatttagttgcattgacaaaatgttgaagataaaaagaagttaaaagcattttcatttcagattattactgagaaagtgcctcaaaatgagtggaccaaccaagaaagtcgttgatgttgcctttaaggcttcaaggaacattgactgggatggtatggccaaacttctcgtcaccgaagaggctcgcaaagagtttgccacgctccgccgtgccttcaatgaggtcaacacaactcttcaaacaaagtttagccaggttcttcttctatccttttctttgtcactatagcttgttttctgaaattcttttgttaagttattgtttggattctgcttattgaattgaatttttttgagtgaagattaatattgtttcatttgttgggggcttaggtcatttattgaagctaaaacttagtgtctttgatttcaaaatttatttttaggcatgtaaagattataattgtttcatgttttttggggggaaaatttaatataaaatttttgttgattttgattgtatttataatcagcagaaaatatgggacattgtcgattactgttcggttcaagataaagttaataaaagagtaaatagaaagtaaaaagtttcaaattttaccatgattggtacctgagcaaccacactttggagccgtttgaaattttaatctaagatagcatcaaatgtttactgtgcataatacaatgtaattatgtttgcttttgtggcattattgtttgctttattgatgtgaacgtttgtttttttatgtcatttttgtgcacatttcaggagcccgaacctattgactgggaatattacaggaaagggatcggatctcgcttggtggatttgtacaaggagtcttatgacagtatgtaaccatactaatcactttattatcttgcgtattatatgtttattcttaaaacttctcaaagctcgtataagcgaaagtgcgcgactatggagtttcattatgttacttgtttgcattctattttgagcttattactttcagcttttagtctaatattaatgcagttatttgaagtacattgaatttttcatatattctactctttaggactactttaaaaaagagattagaacttctctccggaggggccattttgatgtgaatctatccttttcttcgtgattttagtattcttcagcttctttattgtgtagtagcttatttaatttgcctactcttattctctttacaatatgtgaatattgaacacaatacatttaataatctaatctatgccgatgtctttcgatggatcatgtcatagcattgtttttgcttctattttctttggcctgaaatgggaaaatctgtaagagcgtggtttgtcccatagacatagtgaaaatactaaatagtgtttaaatgccaggactcagattcagatgagtttttttaactcgaacaagaacttactgttgttgtgtttgataagaatatgttaactctttgttcacgacattccaacgtgtttagtttagcttaacttgggctgccttttgtctgctcagtgaagttttttggttatataatatatatatgtatatttatatatatatatatatatagtgtcaacccatgttataggatcattgaagtttcataagttattcggagtagagtttgctttaccaatcaacaaactcagcttgtttttctttattcatttctctgaatgattttcattttgcaggcatcgaaatcccaaagtatgtagatacagtcactcctctttacaagcccaaatttgattcattggtgagaattgaccaacaataatatattatataacttctttctttgaaaatttttcatgcttgctatctcctttttctaacaactactaccctttactactgcagttggtggaattgaaggaagcagaggagaaatcttttaaggaatcggagcgtttagagaaggagattgttgaagttcaagagttgaaggtaaggaaacagaacaaaactcataacccgagagggataagctcgaatgttacacatgtagtttgctcgggaaaaagtaaaagaagtcatctttttcttcttattgtgataatttaaaactctaacaataggttgtgtgatttttcttgacagaaaaagataagcaccatgactgcaaatgaatactttgagaaacatcccgagctgaagaagaaattcgatgatgaaatccgaaacgactactggggctactgaggaagaaacaaacatgcattttctccatcttgcctatataatttggtgtccttgtctgtctgtcagtctcatcatcctttaataataatatacataaccaaattgttttctgtgtaattttggtgactactgcatctccatcgaaaatttagggcaatcgatcctgtttcctctcgtaatcgttggacaaattgcttggatgtgcaaaaatattttggttgtgattggaattttttgtttcgcaaaataattcggtcgaattcatcaacagttttattgaattgagtagtttgattgatcatcctaatttgtgtggattgttcaatttgttgaaatatattgtatgcgaaaatacaactgttaatacatgacttgcaaagttttaaacttttaacaaaaaaaaatgacataatataaccgctaattaggatttttgtctttgaacttttaaggttgttaaaaatcttttttgaattattgagattgttaaatttaagtgtttttgtctaattttagtaagaaaagcttaacatggatgaaagtttaagggtatgatttgctatatgtcaaaatttgaaaggtatgatttgagtctggagagcatgatttagtagataaataattatcgaattagtaaaatcaaatgaaattgtacaaaaaattttaaatctaaattttaatagtttagggagaatttttaatggtcagaaaatttaaggtatgatttggtacatgtta

SEQ ID NO: 302783 - DNA, 671 bp, Cannabis indica
attatataaattaattttattttgtatttttacactaataaatatgcatttttaactacttaacacacgtggcactcaattacccaaaactaaattaataaaaaaaaaatgaaaagtcccttggtacaaagacacaattccaaaggaaagaagtatggatctttagtttcagtaattatccctacatgtatgttctatgtatatggatgagattgagtaccacctcctaatgtatgttctatgtatggggatgagataggatatctatcctatataggtatgttaagcgaccatccttaaggtgggtaaagtaactaaccccaaagtaagttagacagtgacctcccatctccccacaccccgaggatagtcatctacctgatggtggtagcttaatctatgggttaactcgtaatctcttacactcttatggtcctaatatcacatctcatttaatacaatacttgctctaagtaacaaaatcacatactactaagcactaaagacaacatgaggagcaagaggcgatgtcttgggagtaccaccccaaggtgagtactaccccttatagggttagtcagtcaggttgtaccctaggagcagggccggccagagggtggggcagccggggccttggccccaggccccacaattttggaggccccgaaaaa

SEQ ID NO: 302784 - DNA, 3860 bp, Cannabis indica
aaaaataaaaaatagaaaaatagtctcaatatattttatatatatatataaaatatatatatatatttataacatatatcacgagttgtgtagtgctggctattcgtgttatgtattgtcttatcgtgttaatacgatcatgcgacataatacgataagaaaaccatgaacatataattatcaaacgtattaaaaatacaaatacgatatgatacaaatacgacacgatacaatcaatatgttgtgataaaacataaaattgacacttaaacatttatcgaagaaaagggaaatttcattaatcacaaaagcaaacgccaccaacaaaaacaacagcaccaaaacacccagacactagctgaaaacaaaaatcttaatccaaaatattattaatcattctataattacaagtattcattttttttataagctatacaaacgacacttaatacaccttttaatattagtaactaagtgtaggactgtacgtgagtacccttcatggatgcacttattcctattagtactatacattgtagccgccaaaaaattatattagctttcatcttccctaccatattagttatagtgctcaaccaaccattgaagtgtaaaggccaccacttgaaccgagaaatgacactcataaaacaagtgagaatgacgctcaatacccataccacaaacatgatagatattctcaacattatcaatgccaaatcgacagaggaaatccctagtaagaagatgaacatgcacagtttgccaaagaataaacatgtttttaggcaagctaagcctattccaaacagctcgagagtagctctcatgttcgggttgaagaagactgttatataacaaagcagccttaaacttacctctcataccaacaaccaacacatactgcctgctgaagacttgtctaagatgacaaatcttcctctaagaccagctgatatcttgcgggagttggtactcctagaaattcaccccttttaagtatatcgtattgacccacttcacccataacacatcatgtttctccatgattgcccaaacaaatttagtaagaatagctcgattccaattagaaccatctttaaaatctaacccaccaaacttcttagggagataaacaaaatcccaagaagctaagagaattttacttctatttccactttggccccataaaaaatttgtgcaatgtttttcaatctctttaataacactttgtggaaggataaatatattcatccagtatgaagctttttcttgattttatcaattatgataccgcagtcctccattctccatttggtcggcctcatggcactcccaagtatttaagagggaagtgctcttctttaagcccaatagactgtaagatctcatcttttaaagtttggttcactccaccaaaaaagatttgagacaacactattaattgaaagaccactggtcttactaaactcagttaaagcctttttgagatggccaacatcacgagtagagcccttgcaaaaaaagatcaagtcatctgcaaagcataaacttatcaaatttaagcttttgcaaaattgatgaaatctgaaagtgctttcaagggcttcctgctttaatcttctagttaaaaatttcatcacaatatcaaacagaagaggagacattgggtccccttcccggaggcccttctgaccaatttttttttttctgccaatctaccattcataattagactgtaagaagtccctctaacacaagtcataatccagctcacaaatctgcccgaaaaacaaagatacttgagccaagtttcaagaaaaatccaatctaccgtatcataagctttacttagatctctcttgatggtacatctagaggaagtgttcttccttccataatttttgatgggatcctagaatatcagaatattatgagctattgtcctttgcttgataaatgccccttgattctgatctataatgtagggaagcacttcagctagccttttgtaaatgagcttacaaatacatttataaatggtagtacaataaactataggatgataatcaactaccctagttgacatcaactttaggcaccaaagaaatagaagtttcattgaattctcctagaatttctctagtgacaaaaactttgaatagctaagttgaaatcctcacgaggtcaggccactttattttatagaacacataaccaaatccatctggtcctgggctcttgagactgggatagtaaataaggcatttttaatctccttcttagtaaaaggtttaatcaaagaaagttgttgatataaataaagaacatttctcgataaaaaaggagtaatatcttgattcgagcaacccatgtagcttttgaaatgatcaacaaaatatctaaccacaaaattataattatcaacagtctagccttgagtatccacaaagtttcctattcaatattattctctttgcttctcgatacaggcataagaaaaggcattattatcatcttttttcttcatccaagtagccttacttttttgaagcgaaaactatgtaacattttctcacaagcacaaaatctcagagctgttgccttcttagcttccaacaaggtctcatcaccaggtctagcttgagcataaatcttagctaattggtactactccttggcctcttgaaaattcatctccacatcccctatagcttttttgttacactatctcaagaggtgttttaatctcagacttttcaaatagatagccttaagcctagtccctctaacaagtttatttcaattctctaaaaccacccttttcaagtcttgatgatctgcttagtaattaaaaaatctaaacggtttaacacctatcttaagcataacaaacgagaaaacaacacacaaataatgatccgacacaatttccagggtcaaattagctgaagaattaggaaaaaggtctaaccactcatcattcttcagaacatggtcaattctagaataaattctagtagaagctccttggctattagaccaagtaaaatcggaccccattctatgcaaagcatcagccagacgaagagcagactagttatttgcatcctacaactcaacccttgtaatttggttacccccaactctgtcaccaaaatggaaaataacattgaaatccccaaggataatccaaggtttaactggaaactgaagactagacaaaccataccagagtctatttctctcctgaaccagattcgagccatacacaaaagtagcacaaaactcattagcacgacaagccatcttgactaagcagtgaacaaattgatcatgttcttctaacatagtaacccaaaaaaaagttttcctccacacaatcaacattctaccctctataaatgagctcgaatagaaattccaaccccttagattattagccataaactcattcactttattttttctcatttagtttcaagaaaagcatctaaaccaatcctccttattctacaaatataaatcattgcctcttattttttttaccactattaagacctctaacattctagctaagaatattacaattatccattaaccaaaatgttagatgaattgttacttttctcacacccctgtttccattgtaaagtctcaatcaaatttagagatttaccatcagctactaccagaggcatactctggttcttcctccttgtctgtatagtcttcttaggaatataccattctccatctccttctcctctcaacaagccttttccagtcactatagtcttccccttcaagggatcagtttctttaaccagctctgtttttagtagtattagaaactaact

SEQ ID NO: 302785 - DNA, 1971 bp, Cannabis indica
tctatcaaatcatgtctcacactgcgatcgcaattctgaagatatcaagtcaaaattttgtcctcaagacagttgcaaatttcaactacaactaaccgaaataggtcccacagacgtgactcaagctccgtaaattgacgaccatcctccaaagtcaattttaccattagatcatcatcaacggtcaatatcttaaatatattttttcacattttttgaatattttattattattttaatgggacctccttccctataaaaagagagctcatttagttcatttttcacattcagaaaagtacctgtaaggtcagagcatgtctctagtttctctccctaaaaatcagagctttcaaacttagctatttttcttgtaatcattttcgtgagaataaaaagtcaaagtaaatgtaactctattattgtcgcaacacaagaagtgaactattataaattcttatgtgtgctctctatttcacttaattgcttttaactttcatctcgtctatacatacgaacaaattggctaaatttctgcatcaatcataaataataacttttataccgtaaaaggctaataacaaaagcactaattctagttagaaagttagttagctttagttaatcagttagtttgttgtttaaagaattgtttctgttgcgtttgtacactgtaactcaagtatataaatacaataaaacctcagctcaatagccaaggtttttccacaattcaattcttgtcaacttttttaaagcttcctcataaaattctcttaacatcttcaaaggcaaatatatttgtccattacctgtaaattagtgtacgaatatacaaaaacaaaagctctagtttctcactctttatatatcttcagcattttgttcaaaactatattatatctataacaattttcgccatttggttggttgctcgtatttttttttaattattattattattttttttgatataaaaacatagccaaaaaattacattaagattcccaacaaacataactcctgaaattctcaactctcctcttcttactgtgcgtgagtgtgcctctatatattttgttccgctcccattcaagacagatgaggaataaaattattaacagcagcccgcagaagtaaagccaaaccactcatatgcaaggggagaaagaacaaagaactgggtagtagctggtccaattagatacatttgcatttaaaaagaagagagaatttgcaaaatgatacaaaatgaatgcactggaatctaccaaaaccagcctcatattctgaaaaagatttcaaaggctatactaaatgcttgtaactttatgcagggcaagatggagattattttaccaagggaaaaaaaatgtcacagaaacctgcatctctatgctccaaaatattactcggctggtgcagggttctcatccgctgcaactcctgcatcttaagtagaaaataaaacgttggtcaacaatagaatgtaccaagctcataaaataacaccatttctcctagataatgtagttatgttcataatgacactaccttaaaatagtatgcgaatctttatctcatatataggaacaaagagtatattaagtttaggtagtttcatcaaatttaaaaagcaaccaaaacagaaatctggcatagacataatcgcaagtaagaatgaagtcaaaactaaatcaaaccaatgccatcccatctatgagaaccatgaatctaagtttttaaatgctaaataatatatccaattagtatattaagcaagtaagggctcgtttggaatgccgtattaggtcgtattgtattgtattgtattatattgaattggattatatattatatttttatataatactatgtcaaactttaagttatactaaaatattatatacttaggtgtccataaaagttaataccacatatagttttacataaaatattgcataaaataca

SEQ ID NO: 302786 - DNA, 1353 bp, Cannabis indica
tattccttttcttatagctcttacaacagtatctctgaatatataatccttagataataatatagtcttagcttagctgcttttcgaccgatccatccttttgcccagtgaatatgcatcactatttatagagctaggaaacttgaagaggaagagtttcctctctcgttataatgcgtataaacagaaagattgtgggatcaatgctgaatgcaaggatcgtgggattgaggatgaatacactgatagtgtgatcgtgtgtatgtcgtatccacgtaaattgatccctgagttatagggattgagctgatgactcatgatgcgaaagatgaattcgctaagtgttgattgctttacatggatcactgtctatcttactctggacatgccagtgaggcatcctgctcggcctatcttctcgtgcagatgctttaagtggactccacgtgtcaccattctcgtgatgccacgtcagagtgcaaaatttgggataacaaaaataaattatgtttttattattattttttattgaattaatgttttatattttattaatagatatattttataataaattaattttatgtttattttggaggaatttttatgatgaaattttatgtttacttttattggaaatatatgcattttttaacagtaaattatttttcttcttattttcttttccccttatcatcaagattaatttttgttttcactaatcaatatccatcactaacatcattataaaataaggatggaaaaagaaatagaattttgcaaatgagattttaatgaataagatgaaagcattggtataacttttacttttaatgatttggcgtgacaaaatactattaattttacctacctatatgtctagtaattagctaatattattagtttaataagttatgtatcaaccctctaattaagaagccattttgcaacagacggatgagatacttagaggtaccggtgacgcaattcacacgagcgtgactacatcaatgtccactaatatttttttttgataataagcgtattcattccattaaataaacagttttagacctctcggtcaatacataaaaggtcctccggaactgaggagaccggaatagagccatacaacttgttaataaaagtccaattagccacattaagggccgcaaaattagaagttctattagcaaacatgaaattacaacaattaaaagaaggagatgacttagaacaaaaggagatatagttctcaagcgcccaatgagactccgtcccattaagagcattgataaccactctcaagtcactctccaccaaaacatacttataacctagctcaatagccaa

SEQ ID NO: 302787 - DNA, 729 bp, Cannabis indica
tgagtgaagagaaaaaaaatttatgggtgggtagtgtaggaggggagttcgactggagttattgaatgaattattgagaaaaagagaggggggagggggtaatgtaaatgggagtaaaattgagttttagaaaaagttatcccattttacaaatgacacatagtattagtttaggggaccaatttttgggtttattaagcattgaatttcaaatttcccattacatattcaaacatgttcctatttcgcttactcgatttttgttttttcacagacacaaatcaagaaggttcttgaatcgttatacgggtttgagtttaagaaggtgaggacactaaacatgcagggaaagaagaagtttaaaggaaaatctttggttgctaaacccaattataaggtctatgtgactttaaagaatccatcatctatttttccagctctttataatactttcaactcagttgaagatgatgcaaaagaatgagtaagtaagaggtgagtaaaactcaaatattttgggggtaaaaaaagtgatagcaagaaaaattcagaaggtgcttgctacatacaagtcattaaatttgatttggctgaaatgtctagtgaattggctaatgcattgtatttcaattaaaattttcacatttggttacaaattatatgatattgatctttttgtcactgtacaaacaggtacaaaatgaataaatataggtgtcgtttggtaac

SEQ ID NO: 302788 - DNA, 1392 bp, Cannabis indica
ataagtttttaatttaaaaatagcgatatagtctctaagctcgaaattctgtaagtctattagtcatccttttaacatgtcaattaattcattcttaaaagatcattcgttgatattaaattgtggcataatttttaaaaaatttactttaatacagataagtccttaaaaagtttactttgatgtaaataaattctattctaaaaaaattgtggttataattcctaaactcgatattctcgttagttcgtaggtatctaatttaacagttatgtttatagttcttaaaatttccatgtatcaaaaatttattagttcaccgcataaaaattatttaaaaattaaaaactttagtagtttttttcctttccttttattaaagcttaaccactcacccattttagtggtggaggcttgtcaccaacaagtgtcattccttcatcttcactttctttttcgttccatcccactatcccatgcacaaaataaattaagtaaaaagaggaccaacaaacttacatgaatttaaaaactattattactgttttaattataaaattaaagactattagaattagtctcatatttctaatgtgtggaaataaattgtgacatataagatgaatggactactccttctactgtcaattaattttcagatgaaactccattcatcttattcataaattctaacaaacacttttttttttgaatgaaagtaaattttttaagaatttttaccgcattttattccttctatttattaggcaagtgtgctacttacgtaatctattattaatatatatacagctttttattatatatattcacatggacacgccgtggtcctctactaaattttggactaaatattgattagtcaaattgcatacttttcacagtagtgactggttggtgaagactgaggtagatagaaaacaattgtgttcagatgtcatataagaattaactttcatttaaaatgtgttctttcaaagtatcactacgcatattggatatttccttggcaaaaagtccatgttttgttttgagtaaaattctttcatctttagggtgctgagactttagcttgacccaactatcaatttaaattaggtaaatactatcttagattttatgtttaacaaaaattataaattgaactctctattttgttaaatggcaaaatgaaccttatattttataaaataataaaattaagactctggacttaattttcgacaacttttttttttctaatataactaacttgaagacaattcctaacacgaacaaatatagaaaatataaacagttttgtcataatacatttagatcggatttttattaaattttattttgattaaaaatcagttcaaggtcctatttgta

SEQ ID NO: 302789 - DNA, 2290 bp, Cannabis indica
aaataatttccaacaaaaggttcatcccgtatgagaaaaaatgaaatcaaaggtctgatggattctatagaaaaatagcagaatgatagcctcatagttcaacaaattattggagagtatttccaaggtttattcattgcttctgagctcaatgaagaagtccttggagacgttttagctgatgtgcagcctaaggtaactcaagtcatgaatcatgatcttaaaagagtttcaaggtgatgaggtgattcgagcggtgaaggatatgaacccgactaatgcaccgggaacgaatgctctaccagccatattctatcaaaaattttgggataaagttgagtccaacgtggttaaggtatgtttgacaattcttaataatggagttgaggttgggagtctgaatgatactttaattgctttaatctcaaaggttgataaaccaaaaaaggttgaagaatttagaccgattagtttgtgcaatgttatttataaagtggtctcgaggtgtttggctaatagattgagacagtcccttatagttgtcatcttagatacgtaaagtgcctttgtgaaaggttagttaattcatgacaatgctacaatcaggtataaagggatgcattgtatgcgtaaaaatcagttccgtaatggttccaagatggcactaaagcttgatatggctaaagcatacaatagagtggagtgaagatttatccaagctatgatgttgaaattggggtatgaggatcgatgggtacaaaagattatggtgtatgctactttagttagtttctcattcctgataaatgtcaaagttttgggacatgtcactcctcaaaagtggttaagacaaggtgatcatttgtctttgtttctttttttgttttgtgctaaagctttttcaagtttaattcaagcgggggagaggcggggtcggttgttagcatttaggaatcatggactaacagtgtcacatttattctttgcggatgatagcttggtgctcgtggaagccaatgaagaggaatgtcaatgttgtaagacagtgttgtagaagtacacaatagcttcaggttaggtcgttaactttcataaatttgagctatattttggtaggactgtggtggcaattaataagcaaagggttgctaaactattggatgttcaggtagtcaaaagttatggcaaatatttagggttaccgtctatggtgggcaaaacaaaaaaaagagttttttaaaggcattaaaaataaagcgtggaataagatacgaggatggaaaggctctattttctcagttgctggtaaggaagtgttaataaaggccatcatgcaagtgatgccaacctatactatgagttgttttaggctttctaaaagtactataaaaagtcttcattggatggctgctcgcttttggtggggttcgttagataaaagtcagaagattcgttggtgttcatgggactatctttgtaagacaaaggacaaaggtggattggggttccgtgatttaagtttatttaatcaagctctattggctaaataagtttggcggtgtattagatcccccctcgtccttatgtaccagagtattaaaggccagttactttctgaataaggggatattggaggcgaaatgtgggtctcatggatcttttgtgtggcggagtttggtgtggggaaagaaattgaatcttaagggatatcgatggaggattggcaatggtgagagttttcgtctgttaaaaaatttgtagctacctagacccttgagttttcaattttatgataagccatatcttcctgagcagctctatgttgtggatctaaagaagacagacggttcatgggacaatgatttagtgagagcagtatgtaatattgaagatgctgagttgattatgaacctactgtaatgccctattccataggaacgccacatgtgcaattttataaactagattaatactactatattagttaattattaaaaattgtgagaatattaaaaacttgactaaaataaaagattaaaacgggcattataacggcagtttaaaggtataccggggatccatattataaaaagttttacaaaagcactatatacaacaacgcctgaaaaacataaaaccaaaatacacaatagatacagtcagtctaaaacagctcatggcaacccgacacactggtcggtggggtcaatatgtacattgctagagaaggcagtcacctcatggcaactctaacttttccttgcccttacctgcaccacatagcacccgt

SEQ ID NO: 302790 - DNA, 4695 bp, Cannabis indica
cagaaataaatatgagatcttggtaagaggagagagaggcttacattagcaaagccagtgggtaaaggtggaaggattctaaatgcagtaggacgattgtccaacttgtatctattcgccagaaaaggtgaccccgccggtgtaaaaggacgaactgggtgctgctttgagcccatagattcctgcagcacggcagttgtattggatttaggagtgtgagagattgcattttctcccttgttcttgccagatactgtattagttttaggactatgggagggtgcattttcccccttgttcttgtcagacgtcatatcagcatgttgtgatataacaacaggagtagcagctttggtaacatcagctgctatctccacttttggtcttttagcaggctgttccatgtctaactcacccttggttcccgtagcctgcacaatattgaaactgagattcatatatggacccattttatgtaataaggattaactaattcacacaaattttatcgatgaaaaccatttataaaaagataatatcatatgcaaaccattatactgtgtcttatcaacatatgaacagcaatgctaatataaaacataaagaatagaaaattttgggagcacacaaaagttgcacagcctgtatgaagcatgaaatattagtacaaatgtaattaaatcaaacccaacgtataaataattcaaatgataatgacacaagatcttacctgtttgttgagtttgtccaacttgcggcggaaatcatttcgcttctggtctagcatttcctgtttcttgcgaagttctatcttcagttgctctaaagtctctaacttcttctgtgtgggaggtgtaaccttggaaccatttgagacaatgggccttgggttgtcaaaggcagttaaagaagtatcatgagcatgaacgaaactactcttaggtgcaccagcttggaggacactatctttactactacttgcaatagatgaatggggtggaacagaaacagctgctacaccacggggtgttgcagaaatgctagtaccagggccactactatcatcaggaatactgtcacgatttgcccaaaatagcttgataaagcgattacccattacagcatctggtgaattcaaagctgcatcagcttcttccctctttgaaaactggacaaaagctcgatcactgctcaatggtatgtaaatgtcaataacctctccaaacttctgaaaatgagaaagaagagcctctcttctgttgtttttaagaggaatcccattgacaaatagagtacgcagtgctttttgaggtggttttcgattgtttcgaatatcaaattgtgcctttgcagatgaatccaaaggtttttgaccagcatcctcagcaataattcgctttccttggcgaaatgagttttgaatccctgtagatgccaacttatcttctttgttgtcaccctcaatataatctgaggaagttatttgaggatcaatcttctcctttacatctaatctactttttgaaccgccaattctaccccaaacagatgtaccatgtgaaccaccaacagcatttccagtgcttcttactgggagttcattatcagcaggatcaccatttaacaaggattcagtttcatcaatcttaggtgaatttatacctaaaagtgcattagttgtttcaggaccattattattccacagtggttgatcaggatcgtacaaatcagctgcagccacacaactagaaccagaaaatgaggcgttcaaccccaagacatcatcagcgaaaccaggcttactcatgttgatatgtaaccctttactgttcattgatgtaagtgaagaggcactaatcgatggtatagacccaggcccagctccactgtttgttccaagtagatgtgcacttggaagcgatacgggaaggttaaactgtgagagactctgtagtttggggaaaatgaaaattccttaatacaaccctataaaattaataaacaataacaacaacgatgtacaacagcatattatcatttaccaaacccatgtatgttcaacttgacaacaaaatcatgtgatgatgattgacatggattgtaacctaaatgacttaatacagatgcatatctaagtgcagatactttgaaaagcacagaaaaatttcaaagaagcacagctcttactgacagaaactacgtttacagtacacctacctgaacatcttcaacaactattcgattgacaccgtgctccattgggcacatgtcccctcttaaacaaaatccacgctcctcaaagtctctacatctttggcgaggaataccaatactcaatgaagaatgaatgggtggtctaagaggaccttgtaaaccaatggaatgaatagtatccatgcccccatttggtattccaggaattaagccaaatgcattccaagatgcattctgtgcatttgacacgtttggcaaccctcttccagcaaatagactaggaggaatagagccttgaaccacttgagatgcaatatctgagccgaacctaggatcacgttggttccaggttccaagatctcttcctcttcccctagcaagaccagggtcacctgaaaaagtttgatttggccagattctttgatttacatccaaagctgatctaggcaaggatgcatggccagggcgtctcttatcaaattttccattctcgagagggttagaattgaaatttctccaaggtgcacttgcttgagaatcattttccctgaaatgattcccattttgaaaaggcttgttccgctttctaaaaggcttcgtaaaagcttgatcaattgtatctctctccaaagattgagaacgtgcatccctcctacgatgcttatggtttcgatcatcatcatcatcatcactgacttctttctcctcgggatcactattacaatcagaaggagaaagacctatttttggagataaaatttttaactccatttttttaaatgttgttatatagcgtccaactatctagatctcactatcagcaatcaaacaccttcaatctctgaaatattatcacaacaggacctgcagccaaaaggaaaaagtcatttttttttaatcaggaaaaagtcattggtacatatatagctaagattaaattcagtgttatcatcagaatttcagctcgacaatatgaaaagtagataggcagtaccctgagctgattgttaactcgggatgcaagaacatggttaaatgcatataaaaagtcattggccaagaccataatatacaaaacatatataatccccacatcatatttatatgatttttcccaaagttaagttatcaataatattattcagaaaatattatgtttaacagaaattgcaatccataccaattcatgtcagccccaccctcacgaccattctcaacaaaacacagataacagcacctaggaaacctaaatatcatcttctgaagccttggaaactttattgaatgaaaacctaattaaacatagtctgatcagttcaaactacacttgacaagaacaaccacggattccacttcttatttcttgctatacctatcaaacaactcatctcccaactccttataaaccaatcacttaagtccaaatttttacccacataataaaaaatccatttagagttattcaagacaagtaaaaaataaagtcgacaaacaaaattgccaaccaaaaccaaccaaccacaaaaactctctaatcaacaactgaaaagaaaagaaggcaaaagcaacgctcctaaataaaaattcgcacgattacaaagcgaaaacgtaatataaaccgataaggccgaccatattacacgaattgaaaaccctaacaatagcattggttgatgataatctaggtttcaagaatgaacaaaagcgtaaaattgatcataatcgttaccggaattgggaagccaatgccgccaagtaacttcaaataatcagatattgaagaaactcgtatcttccttccctgtaccggaaccagaaggcggcaacgtaaaccggtaccgaaccgaaggggcgggatcgtaatagagaaacaatcgaaggagctttaattatggtcctgctagagatttggagggaacaaccaacaatatcagagagagagagagagaaagctttcgcgactgtgactcgtttggggggtttgaagctttaggagcaaacaggaacgggagagagacgagaaagagagattagagttgaaaattgtatttttcccccattaattcatacataatacaatatctgtttctctttttattattttattttattttctcccacaaatgaaattttctttcatcttttatatatattttttaattctttatttattagttaagctgtatgtaccgcgggttctctcgtgtacgattaccaaaatatttttaattatataagtatatatttttttagtaatattctatcaattttgttttagattagataataatcaggggtcgtttagtatgcagttatttcatgggaatatgtttaacattgcgcttgcagagtgatgaagggaattgtaaacgaagctaacattaccatgtttggttgtgcacaataatattataatgatgcctgaaatataaagattactttatttagttgatataggaatagaatgtgataacttttttt

SEQ ID NO: 302791 - DNA, 759 bp, Cannabis indica
acccacagcatcctcaatgccttgaggcaattcatagaccggtgaggctcttgaagcaagctccttgaggttagaaaggttccagtaaaatggtgggatgctatcaaccttcacccacattggtgttttgtcgaatcttatctccgaaggggttaaccaagagggccaaggcatgatgactatgagggagccacaaacaaaccacggccttcgggccaggacgttcatcgcatcatttcggtttgcaaatgtgaattgtatgagtccatcttcaatttctttccatttccagcctttgatggcattccaagatagcctcagagagccttggatggctgctttgcctagtttgtggcggctaagaattttccccactagaacctggtttgattcctgcggctcatcgacttcaccagggtttagggagaaggtaatgtcgttactttcaatttggactgcatcctgaaacaattcgctgacttgtgaaggatccatggaactgaggaaacttgagaatgaggaatggggaccgttaagaaacttgggtagcagggatcgtaacctgggacgaggacgattgacagacggattaaaaccttgaacagcaacgactgtatacttccatgaagttagctcctatagagcattatcaattctactatttcattttggtttacaagtatatgagatcggttaattaattaattaaaagaaaggcattttacataaatatatatatatatatatatattttcttaa

SEQ ID NO: 302792 - DNA, 2633 bp, Cannabis indica
atataaaattttatttttatatatttttaattattttttctaccgtataaatttacatgcttttaataataataataatttttaaaattttaaaattatatttttatcactagtaaaaaaaattgtaatttctaaaaaacttaaattaatattgtttgttaataacaaaaatacatgccttggtcagccctttgtaatgattgcgaataaaattagtaaacagatgcatttttctactgatatttctcatctttttattgtctaatatgtcaatcttgcaaaacaaaagaaattacatttgaattctaataacaatttttcatcgaccattttttttttatcttattcacatgtacgtatgtagactgtaccccataaaatcttttaaaggatatacatatttttaattactgttgatgaccattctaaatatacatagatatattcttaaagctaaatttgatactcctcatccaaaatttatttacttttattaatgttcactatacataaaatgaatgtgaaatctgtaagaacagataataaccaattattttgctagcaaagaggtcattaattacaaatcttgtgttgaaaaaccacaacagaatattgttgttgaaggttaacattagcatatcctaaatgtagctcaagataattagctttttaatttaaccttcctctactttatattgaagctatatggtaaagattgttgtctatcttttagaaagaacaccttctgttctacttaaagacatactttctataaacttttacataataaatcccctatatatgatcatattctaaatttttgatgccttgcttatgcatctcatataaacactcaacataaattttcatctaaagttagagcgtgcatatttataggctattctgagcatataaaatataaaagcttacattgcttgacatacaaaacaatcacatatttcattctctagatgttattttttatgaatttatatatcctctcaaagacacaatccaacacactattaataataaatgagtttacaaaataaaatacaaactagatggatcgattaatcgttataaagcccacttagttgctaaggggtaaacaacaaccatgtattgattttcttgatacatatattcgtgtagcaaatttttttacattaaaatagctatttactcttgttgccattaaaaatagcatttacatcacatggacataaacaataatacttatatggcttaaaacaaacttcacgatagtggtatgctaaactttgcaccactctaattcaacaaggcttcaaataatcttaaaatgatcattaattgttcattcgacgaaaataagggatttttctagatttattaatttaaatttattttgatgacattatcattgtcatgacaattctaatgaactgaacacatttatttcaactcttgatgtccagtttaaacttgaaaatcttgacggcctttgattgttttattctaggacttgaagttggtccttgcaacaagggcatctctgttacacaataaccatttacctttcaattgctacaagactcaagtttccttagcacaaaacatatctcaacttctatggaaccaaacacactaagcttaacaatgaattggtgatttgttgcccaacccaactcactataaaagtttcattagaaaattggtcaacctcacaaatcacaatcacaagactagacatcaactatgttgtaaataaattaagccagtatcttcagtctccttgccaacccatttacaggctgcctacagagtactcaactacctcaaagtctctcctatacatgttttattcttatatgctaccactcttactcccctccaactaaaggccttcgctgatgcatattgggtgcttgtatggacactcttaggccagtctcatggaaattcaagaaacaatagactatctctcagtcctcggccaaggtataataccgtgccatggccaatgccacatgcgaactaatcacttggtggctcatttcaatcatcaaagacttcaacattgccacttggagatagattgccacatagttttagagaaggttaccaatggtactctacaaatgattcatgtctcatacaagacaaacctagctaacatattaacaaaacctttatttcctactcattttagtgagattgtatccaagtggtctaaaaactttttacactctaacttgaagggacctattagaacaagtcaggttgattagtttgttagttattggttgagtgtgtgttccatctttgttactctttatctcctatatatatataaaggcttcttcttgtaacaaatcattccattcagattaatataaatttctctaagttctctcttccttctctctttaatcctaataaatactgtttttatttgtcaaatttataagttcaatttagctctgatcaaactcctcctataagagcatctccagtagtaaaattttaaaggatgtttggtgaggtagacatattatgtggcaaaatattgagatgctatactattggagaaaaaagatgttattccagaaatttgcatggatgctatgttgtagaattggtgctattca

SEQ ID NO: 302793 - DNA, 2587 bp, Cannabis indica
ataaatattatttttgtaattaggaaaaatataaatatttatttttccttaggatggtataaatatttattttaaataattttaacctaaaatagaaaaaacccctttttttaatatgcactgctaactgcggttgttgactagttttaaatattgcaaagaatccaattaaaatcatagctagtagagcctaatcaaactttcgtactcgaatggtataaagtcatataaccaacataacctttcggcagtgtaattgaaattcccagcttaataaggtcatctgaaaattgatctatttcaggagttaaatgcttctgaaataatttacaaggaaaaaaaagataacattagataagcttctttttctcgaaaaaggtcttcaagtgccacaattgcaaacctgccaccgacaagcaaacaaaaagcgagagaaaacccaaccaagccatccttgagtttgttgttttgttgagctcttgcatttcttcttccctgaaacaaaaataaccacaattgaagatgaaatgtaacgaattatacatgttgcttactcccgaataaacaaaagaaataaaacgaaaagctaaaaacctaacaagaacacaatctcttacctttcacggagataaaacatttcctcgtgaatggaagtgacggtatcatacaatttcttgagctctaattccattacctggcatacaaaagcatagaaaggcatgagttccttgagaagaaactaaagaataggcaatatatattcataccaaaaatccacgcttcaacaacaattttataagagcaaatcgtgtgaaagaaaaaagaaagaagttagctacaagacatcttgtactacacaagctctcctgaaattttgccttcagagctataataaaacgataaacacaagcatcataatggaagaacaaatacataattttgcacaagcaaaaaggccattgtagtttttagcagtctttccttgtcagtaaagttcaagaagagatttacccaaaataaataagcaaacaagtgcaagaagagataggattacatcaattgctttccgatataacactgttcttagctcaagcaaaacagataagacttttgcagcaacttcaccaatcaagactatcaagtgccaactactaaagttaaaagttggacaacattaccactactggttatctccatattgaatggtggataacattaataacaaacaaataattattaattgaagtagtaatgggataacttgaacaaattaataagctaagtacatacttaacccagaggtatcaaaatttcgaatctcagtaacccaatatttggaaaagaacccaagtgccaatctttcttttattctaaaattcataaacccaagtgccagcaagtaaatttgataaaatgtaagcccctaaacaaatttatataacttcagctccgtaaattcccaccaccaaaagaataaacaaaaatacacaaatcgtgaatagccattttcaattagggcagagtacaaaaataaaaatcataaaagttaaattattaaatgcatcaatcaaatttactcattccaaaagataaaataaaaatgagaaaaaaccttacatcaacagagcctttcttagccacattggaccaatctttagcagcaacgccagtcttccaatcaaagtcaacgctgaaggtaatttgagggttgtgatcgggggcaaaaaagcacgccatgtaatctccagcctccgccgcaacaaacgcgaactgccctgtcgtaacgtgctccgcatgatgatagctattcccatattgcgaagtaacctatacaaatgcaatacaaaattaaatacaatcatgcaaaaccaaggacgacccagttctcaaaatcgaaatgaaatcaagggtccgaataaaaaaaaaagaaaaaaaggacagacccgaacggtgatcttgtgtgtatctggtaaaggatggccctcgctagggtttacaacgctgtacttgccgacggtcatggaattgctctttatatcttcggcgatgcatttggtatgacccgattggagctcgaattggagagcctcggatgtagacaataaaatccctagtattagaaggagggaaaggagacttgattgagtcatttctgttgaagcggagaaaaagggtgagactcaagtcgtacccagaaaaggggttcgagtttgctcgttgttctcggagacaaatctgagagaagaacgatagagattcacgttctgggccgtatccaattaaaacccaacttcgccatctaattgcgccgatataaaagtttaattcgccacgtggttgtatcttatttgattagacacgtaatgctttttcccatttttcttctttctttttcaagccaataatatttattcttatttatttctaatttctattctagcacattagaccatctccaatggtaacattatttaagaatgttaaaaaatttatacattatttaaaaatataagattttattggagttttttttatttttacacttcaagacagtttttttttttttttagtatttttacggtaattc

SEQ ID NO: 302794 - DNA, 1903 bp, Cannabis indica
cttttctttttcttttttcatcatcatacttctaatttggccctaggggaatttccaaagcccttttctgtcaaatcttcatccacaagtaaaacaagaaaaaacctttatattctttccacaatgcagaatatccaccaattggcaatacgcactttccattgtccaccaaataggaaaatgctatagaggagcttttctcagcacatattgaaggaaagatgaactagatttgtactttgtttaaaatttacttggatcccatctattttggattagcagcctccagagacatcgtcctcagaagaagaaaaaaaattcaatatttccctgaactttacagcattatcacctgcaaatatcagtcataatgatctgaggaatgaaatagataaaattggtttgcaatcactgtgacattggtaagattttataaacctattaagagaactaaagtttttgtaccttttttttttggacaagtaatcatagaacttcttcctaatttccaaagagataactaaaaagaagacaaatcttgactctacaaaaccaaacagatcatctcacctatttatgcatgtcttctttctagctgctggccttgtatttaaaaaaaaatagtacccaagcccataagaaaatgtgaggggaaagagagaaaaataactcaccggtcaactccatggccatgcagaatcaccttccttgtaataccttataatttaaaaccagatcatcagatttcttccatatataagcacgcactgtagctaagctcatatctggcgacaaaacctgggagcgacaagagagggagtaagtcatacaaccatatcaaagatgaataggtaatgccagtagctataatgtaacaaaagcttctaggcatgtccaagatgagaatccaacaccattattgtgcttcttattgttgttaccaattagtttaaagggttctaattggtacaagaaatgtcaaatttataaatacaacatcaatttttgccaacaagaatgactgtaaaatgcatatgcacttgcctgattgttgcagagaatctctatagagggcttaagcttttgccagggtttcattccagaacgaaaagatccatcaccaactgttgcaggttgcaatggccctccagcaagaccaggaggaaatgttgcatccgaatttaaactatccaatggcttgtcaagaaccatcttctcaataacataatttattacctatgtagtgaaaaacatcaaagctagttattattttaaaagaaaaaaaaaccatcaaactcagtcactcaactttcaagataaaccatgagaaagatgcacatcacaaacatcagcatacagaaaagcaaaagagtatgcaggttttcttcaacatttaacagagcatgtgccaacttcagaataaatctttaaatagttttaatgaccaataatcttaacagtaaaatactaaatgtggctacaagagttaaatttagagagcaagaaaatatttcttattgatacccaccacaacgcgttcaataattatcaaacccatctgtctaatcataaattatcatcttacaacattcaaagaacatttgccttttgtaagctatatctaccatgaaaaataacttactttatgaattctcaaaatccgaggtgcactcagttttccttgtgtgaggatctgaacagttgaaccttcgcaaggctgaagataaaaactacacctgtgaatattccaattaaatctacagattattaactgttttgcaaaaaaatagaaccacacagcttcaacctgacattttttggaaggaaaaaaaatccaggcaaaaagttgtactatctaaagcaattcatcttttattttatcttgtgtgtgtgtgtgtgtgtg

SEQ ID NO: 302795 - DNA, 3242 bp, Cannabis indica
aatacaacatccccactattttaagtctatgccagatatcccatatgaatgatccagcaaatatggcaaatatccaacctcagaagaaaagttagaagacacacaccaacccctccctacaaacgaaaaaatcatctcgccactcaccacacagccatggttgaccgcgttagtagttttaaaccgaaacaacactcatgtgctgggtgcagcttcctttttctcacctgaagcaccgacttctgtcgtatcagcagctgcagctgctgccggtttcccatctccctttgacacttcttgctctgcaacacacatgtaaacattacatttctatcaacaaaatacaataatcccaacatagaaggtgaacacttctaaatgatcagccaccattttacttaaaatcaattaagagctttttaatccagtaggatcgaatttgaataagaaaaaatacagctggcctagttaccttcgtcgtcactatcctcaaaatcctcaggcatccccattccacccatgccacccattccccccatgccacccattccacccatgccacccaggccttccaagcccgccatgccaccgagggcttccatgccaggcatgccacccattccgcccataccgcccatgccgggcatcccacccataccgcccatgccgccaaaattctgggaaaataaagcaagagtcagtataagcacacaatcagagctacttcagatacaagaaagcttgtgaactgatgaatactaaccgagaaatccattccccctaaatctgcgtcaccggcaggagcacctaattaaaagagcaaacaaatcatcatatgacaaccctgaccaaagccgaaagtagaaaaaatgacaaatagtattagacattagtattaccactatcatcatcttcatctacccacttatcccaatctactttaacattgtggggtgtctttccatctccacgcaaaagcttcttccaccaagccttctctgccttctccaagacacagaatatactcctcactccaacattaattttgctttcctataccatgcagaaatcacaagtccaacagttaaataagattcccaattaacagtgtacatagtacaatgctactagaagtaagcacaatttcaaccgcttacctccacattgaccttatcaaagagttccaatttcagttcataagcttggttaccagaaccggctgcactagcagaaaaggtaaaaactccttctgggtcaagatcaaccttggcgtcttttgcatcaggaagtagaactgtaatatacaccttgtctactctctgggcccacttcacttcaggatgacgactacaaaatttgcgtaagtctaatcagagggcgcatcaaattgaaaaggcaacaaaataaatatgcaactcggatggtaatggacttaaaattatcaaaacaacaactataaatacggaaactaaagataattacttatacacaagactcataattactaactcgttattttggtctacacaaataaaatagcctgagtagcattactcaggctcatgggctgcagcccaggattggataagtataataatcaccttccttgtaaaaacataccacttccaaaaacaacatacaacaaagcttttgtgagagagcaaaaccacaaactcgatcgcaattgaaaacaaccttaaaatcaccatttcagaataatttccccaaaagacatcaaaatgaataaaattaccgatatatacatatcaaattctccccttaacaaaaaaaggacagaaatgagttacgccaaaatcaaacaaccatttccaaactttccatatttcaacatcgtgaatcacaaacaccaaatcattattaaaaaaagataaatatatacatataaaaaaaaaaaaaaaaaagttattcatttctatctaaaaaatcccaagttttctcggtaacgaaatacgaacaataacagacggtaagtataaaatgagagtggcaatactgtaaacaggaataaggggcggagaagaaagttatgattacctcatagtttccggtaaggggaaagaaactgtaaaccctagaaagagagcaaaagaagagagagagcagtgggggtagagagatatttaagagaggcgtactcgagagttctagtactttcttttcttctcctgatttttttgataacctagaagagtgaagtagaatgtgatctctgacaagtttatgacgctcgtttcctttatcaaactacctatggatcattaatctcaaccattacccaatgggcccaatgggcccaatgccaatcccaacccttcaacgctttaagcccatttcacgtatacttgggcttctatattcacgcaaaacgggctcccccaaaatcacttaaatgaagtccctttttttttttggaaatttacaactggaattttggttaatttttacaaaaatactgttacacggaaaagttttcaaaaatactgtatttttataaaacaccagtagaaacagaacaactcaaaattccagtagaacaaccagaaaaacaccagtagaacaccaataaaaacttaacacagtatactgcagtatgaaaacttataaaaaaaacacagcctgacagtatttttataaaaaaaatagcaaaagttagtataccatgtaaatttcctttttttttttttacatttttaaagtaatattatttctcattttttttatatttttttctttttttcaaactttaaaagtaattcctgaggttactcggatgagcataaaaaaaatgttgttatgatatattcttcaatgtaaacatgtgggaagcatatatatttttttcactattttcaaaaaaaaaattatttggttactactattgggcccatcttccctgtccttaggccaagtatgacatcaaactagcattgggcccctatcgggctcttcgggccatcatccatatctttagatccaagttttagtcggactagcattgggctccatcggactagaagaaaaaaatcacaaaaacaaaaaaaaaatacattatctaccgatagcaaccatttcaacacacaaaaagaaaaaaaaaaaaaaataagcaacaaccctatttcaagaatcaaaataatattctaaattaaatataacaattaacaacaaaaagcaaaataaggaaatctcttatccactgtccccgtcgtgcccgtgctacgaac

SEQ ID NO: 302796 - DNA, 5624 bp, Cannabis indica
gagagagagagagatgattatcttgatttttccccttaattccttctattttctataattcactaaatgaaaaataaactaaagttatttaatcaaatagtggacagctgccactttaaaaaccagccacctcacccaaggaaaaatgataaaaatactcttcccacaagcttaacaaataaaatggtttagcggtaaaatggtcatttctaaatcctcaaataatcctgacatttcttatgtctatctatattgtcctgctactactaaaaatactaaaatgtgattctattggccaaacgtcgcgttctaatgttgttgggcacaaaacatgcaaaaacataaaattccatatatggcataaacaatacaccttgaattcaaataaatctccataaaatgataaatcataattaatattctagtttcataattaaaccataattatctgctaattttcaagttaaaactaagcggtctttacatgccagcttagctgatcatatgattttaccagatcaatttttaaagcaaagaagccctcttttccctttttgagcttaaaagagtggatgatcttgtgaactaaaacattattatcttggatattccttcctgggacaaatgatgtctgagtaggacatataagccttgggaggacccttcgaattctattcgcgatgatttttgagataaccttgtaagttacattgcagagggatattggtttgaattgcgacactttttcagagttgggaaccttgggtatcagaactacatttgtttcgttgattcctttatgcataaacccagattggaagaaatccaccactatctcgcaaaaatctatacccacaaaattcaataatgtttaaaaaacagttaagacatactgtcggggcccggggctttggaacttcccatagagaagagagtttttctaatgtccttatgcctagggattagttcaagatcaccctactcaacgggggacaggtgatccgtaatcaagtggcacagattctacatggggccctgaaacagattaaagaagatgtcatcaaggacctccaagaattccctaccaatgtccttcctattagtgagtcagaccccatttctattaagaatactttccataacataccgcctattacgaatagtggcagcaatgaaaaaaaaacttcgaacatttgtcaccatccttgatccaagaaatacaagatctctattgccagtataatgttttcctccttaaagactaattcagggccctacctccttggccccaactctcgatccagtctgtaatttctgaatatccctcagttggtgttccaactgttggatacaagtatccagcttaccaaatcgctctctattccatttgctaactactagacgagtagctctaaccttcttaaaaactctagcaggcacccaagcatgagataaggaattccaggcatggtcaaccaccagtgtgctccgagggtccctagtccaccaagcctcgaattgaaacggccaattcgaataagcctgaggatcttctgtacgaatgtacatgggcatgtggtctgaattgcaagtatggagcgattgaatcacaactttagggaaaatgtgtaaccactcctcatttaccactgctttattgagggccaatttaatatgattagggccctcgctatggttatcccatgtcaggttgttccctttaatggacatgtcaatcaaagcatggctcttaatcagctctgtgatgtaagggagaaattggtctttcctctttcacctgacacgctcaaaactacttaaaacgaaatttacatctcccaagatcatccagggcccgccaaacttcctattgatttcaataatgcttgactagaatttcttcttctcatggaagtagggggtcgtaaacacaagacattaaccaggggtaatgctcaaggtcacggtaaacaatgccaaaaatatgttcttagagatacaaatactttcaaaagtaaaacctgctttccaagctcaaatgatacccccccccctccgcactacccacccctggcataacaatgttaaaataaaaaattaagtccttaagagaacgtaccaaaaaagttgcatgcactttcagttcaataatgaagataaagtcaggagagcatgaccgaattagagcttttaattccagaactataaaggtttgccccaatcccctacagttccaagcaatacatctcatggatcttgtggaggagggacaccatcctcctccacaggggtcactccatcaactggcacacctattgtaaatccctcatcctcaatcacagcttcctccttgctagggatagtaatgtccaatccatcaactgagctttggccttccacgccgaaagtctagctgactggcccaaagagattggtttgtcaacttgctgagagcatcttgtaacaacctcgacacaactaatcctttccacttcattaatggccttaggtttctccaatgaattagtagaaacctgaacaacacttgcatcatcatttccacacaccaatcccactccacgagggaaatctctgactacatgcttcactcttctaatgaacaggtttggcttactccctagtgaaaaagttttaaagtccaaccttcgcttctttataggtgtagtgtgctcgttaatcttagaagacgcctggaccccaatatctaccaaggaagctttccgtttattatggcttgaggtcccaaagtgttaagttcttgtaaataaccttcttgggcttgaaaaaatttggacagagatctattctcatcaagatggtctgatacatcttggccttttaatgagctatttaggtcttcacccagaagaccattatccaaaaaatagtgacgacccatattagctctccccacatcgcacgacccctccaatagattatcaaaggttggcccagaagccttgaccgagatatcaagacccaagcccttcaaattattcacacgacccaaatcctccaatctattcacatgttccaacttcccaagagaagttaagtcactgcccagttcaaatataggtgaagccacgacccaactccctaggagctaataaatcacgacctaaatcccttaagctaaagccttggcctgtctccacattttcatgctctggcccacatatatcacaagtcaacatctgattagtatggtcaaaattgttttgacctttccccttcacatagctagcacgagaccttcccaaattcaaatcatcctctaccttcggcaaaccagctgaaggctttccaacttgcagcaaaggcttagaagaaaacttaccaaaattggccaaaacatgttcttcattacacgtcatagatgacaacaccttgggtctccacaccttgctaggtctgagacaaacatgatctgtccctttcatcttgggctcgaaactcgagtcgtgagtatgatgctctggttctgcctcgacgatcgctgccttcacccctgccaccgttgcaggctgtgccgacctcaaaattctcgactccgacttcgcaccacccaagcctttgccaaagctaggcccaacgctttcccctgagaagcagctcttgtacaaggacgaagaattcaaccacgatccaaacaccgggaagggtataccattagcattgcagatagatactagcaactgcaaagagcaaccactcctctagtgacccaacctcccacacaggtagcaaaaatttccaattttttcatatttgatttgtacccagcaggcctcaccattcaacacttttaaaaagcaaccacaaaatagagggtttttaacttcaacattgacttgaactctaatccacttatcccaggaaacaggtttggattcatcaagctcaatatagaccaccttactagcttgagcagacagcattttagcattgactctagaataataatcatgtggcaagttgtgtatttgtaaccagactcgtatcgtgtcaaccaccagctccttgataccaaagccagaagaccatgaaagaaggaccatgatctcccatttactgcattagggaccaagctccagcaccctcttcctatctgaagtcttctcaaagcaaaacctgaagacattagagaatgcttttgccaacaaatagggagtcaaccatcacctctgtattccacagttttgcacaagcagtggccacttctttttcccccaaaaccttaacagataggatcttaccaataagacagaacttggagagaacttgtgctaactaagcactaggggcaagagtaatcaatgcctcattaaatgagatacatctacctttcttaactccactgcaactaacaaaaccctccataataaagacagtcaccaaccaagacaccaaaccacaaacacgtgacaacaactacgccacacccaaccccatagaccacaaaaaagatagcacaccaggggacacaccagacaaagaggacgataacactagggaacagaatagcatccaacaacctaaacaagcaaaccaaaaggaaagacaacctttgacacaacacacacacacagaacaagagactcaaagacacaagcgcacgagtatggacaacacaacagaaagaatgaaaaagaactgggaagacacaatacctagacagagagaatagtagatgactattctctctcttaaagtataccatttatgttaaaaataagttttcgatttgtactaaaagtatcgtacacgcaaaatgtttactaccacaaaaataaagttaaattattttgttatttttatacaaacaacaaaatatttacaggcgattcaaattttctataaattattttaaattcaatttcagcactataaattattaaaaaaaattaaatattaacaggtgatttaaaatagttacaaagtacaacctaaaaaaataaaactaaaaaactattctaaatgtcaaaatcgatataggtactctacatgtttttccaatatgttatacgtctcacatcaattataaaaaattatctagctaaacaagttgttaatcactccaaaaagcatacacaactaattcataagtaacgcagattagaaatactcttgaaaatttagataacaaacttgcaaaaaattcaaactataatctaaaatcattagagtaggaaacactcaaagtgaaagccatcatagttgctaaacaaatttattaagcactaaaaatcccaatgacgtataagatctattttttttctctctctagctctctcttagctcgtgctggtgccatggcaaaaacaagagcaaaagtgcagggaaaactcattctgtctactaagaaacggaaaaaaaagggacctgcttctagttctgatactcggaaaactaaattaattgatgaagttttgggaattgaaccaattgttttctctgaggaggaaggcaaaacaaaggaaaatgaatcttagactatgataactttatggtatatagttattttcagtggctttaaacttgaattatcatgaaaagagtaatgaaagtgtgtttgtttgattgactttaactagttttat

SEQ ID NO: 302797 - DNA, 1164 bp, Cannabis indica
acaaaaaacaagaattttaaaaacaacaaaatgttattttctgttttaaaaaataattcacttttgttcaatattatttttagaaaacactatcaaaatgcagcttgtgttttgaaaactttaaaaacttttttttttgttctcatttctaaaaatacttatttgaaaataaaaaacaaaaaaaataccaaacatgctcttattaataattcgagttacacttttactaaatgaggtttagatactcttatgatggtctactcaatttttttggaagtgagtccctattggctcatcaaaatctttagttaactgaagtttcttgtgttttgcagaaaaaggaaaaaaaatcaaatataatattatagttgtgagattataagccaaagtagttgctagcctctatgttagtctgaaatggaatgaaaatgaaataaaatcttaattaataatttaatacaacaaaataaaaggttggaaagggaaacaaggaaggtaggtcataactaaagagggttttcatcaattcatttaacaaccattatgcattaagcatggccctattataaatgagcaggaatgagtctgtaccagccaattttgaaaatccaaggtgtcacttgaggtttcttaaaattttttagtatatatttttagtctaatcatatatcaaacttagtattcaaatttcttacactaaagtaaagtaatatattaaccaaaaacaaataaataaatgaatatggttggattcttcttcttacatgacatgtcacatgccgacctggccgtccaagtggtactttttggagtacctaataaaaaagtcaccacttaaaaaataaaaataaaacaagattctcccttttataatactttcgttatggagggattgaattcaatactataaatcatctttcggtttaaacatttggtggttgtgggcggttttgtagaaagaccaatattgaagtttaataagagactgatgggtcaattatgatatatagtaatgcgtgtacaatattgaaaaacaataatgaagtgtgatggctgaaattgaagtttggtatttaatgatcaacttcgtttagagcattgctattaccacataattgagaatactcaaatgataatgtcctataaatagttagtatttttttt

SEQ ID NO: 302798 - DNA, 1153 bp, Cannabis indica
acattttaatctacacttattatattataaaataatataacattatacaaaatatttaagtcaaattccattcatactagcaaagttttaaagtgggatttttttctctttccgtacagttagtggaatgttgaaattctgaccagtggttttgcacgtccttggtatgggtatggaggggcagcatttgtcttatatatatacgatgggcacacagtgttcctagtccggaaaggtgcaacttttttaattttatcagggttttaaaacctgtctattcctatcctttttgtaggaattactagcccactaagagttcttcaaacgtcctgggttttttttgaatatcaactgcatctaattttcatccccttccatacagactccctttacatctctcttctttttagcttgactttgtgagtttctcagcgacttgggcttgttcaagatgacttcacaagagattaatatggaagttgttgaggaagttgtgagcttggtcgaaaacgtgtctatgaaggatttctctttagagttgactcttggcgatgttgtggctttggatactatcaaaaaaactgtgatgggaaagtttttcattaagagaaagattggtaatgggagacttagatccatactttctgagatgtggaacgttagtcccggatggcgcctccaagagattaaaccaagatcttcattttcagtttttagagaatcagatgctttgaaggttattgggaacagtccttgggctccttgtggaggtttcatgatggtcactctgatgtcgaatgatggaaaatggaagtcggtagatctaaatcatgtcaatatctagactagagctttgggtgtcccatatcgttatttttctaatgagaatgtggaaaaattgcgaacagattcggtaggtgtttgtcgaccaacaaaacgagagtcaagggagttcttcgatgcaactatatgcaattttgggtaatccttgaccttgcaaaacctcttatggcaagagttggactggacaatgaagatgttggagttatttcaaatataaaaggctctcccttttttgctacaagtgtggtgttattgaccactcagatgatctatgctctgctaggaaaagaatgatgtccttggatgatgg

SEQ ID NO: 302799 - DNA, 2940 bp, Cannabis indica
ccatgatcctgctagggtctggcttaccatgttcctactaggatttggcaggtcatgttcctgccaactttggcaagtgttagccaacctttgcatgtgttgaccacccttagtaggtgagggtgagcttgtgtacacctttccttgcaaaaactgggctaccttagttgaacgcaccctttcttggtctgacagtcacttttgggcagccagtttgtgctcaaaccctggccggccacacaagctccccctagccagcctatgtactctctttggtcagccaaacatggttgtgcaacttcttaacggcttgcttaacttctctcgcttattgcttgatgatttttccatgccgtgtaagaagattttgtcctgctattgacaaagttgtattccacgtgtcttcagtctttgtttacgtggacatgtcatgtcaagtgaacaaaatttaggaaattaagatatataaatatagaaaactattcgcaaatgcaatgctattaaacatgtaaaaacaaacaccaatcaataaatattagaaaaaatctcattttccatcaaaggttcaccaagcaccaaaaaccattataaacttgtactatatcctccaagatcttggaagatagggtggaaatgagtggtaacaatgaaatgtgttaaattttaagtgtggtattggtgcattatttatggaggaaacttgaggtgacaaagagagatagagagaaggaagagagaccaaaaagagcaaagttagagagagatgttaaggcaattaatgttatgacaaggttattttaggtagttaggaaaagattggtacaattttttttttaattaattgtttatatattacaatgcataattttaggctcgaactcaagacctccaatacacacgcaccttcttatggccacttcagctagactcaagtggttgattggaacaatttgataattatgaaaaattagggtgtatttttgttgttgggtccactttaaagcgtaaatttaccattggtaataacatatttatatagtaaaatgagtgacgggtaaattagtaaatttgttatgtagctcagctgccaaagaagataatctgacaaggaatattagttgaagtagttgcagaaaactccaaattaatagagaaataaaggtaattatttaaacagcccttatgttttattgtgcataatgcaggtattaattaatgtaatcccatcattaattagctaaattaataaactaataccactacttatataagtacaatagcctaaaaacaaaaatcccacctcaaaagcccaaaaatgagcaggtaccatatgtttctttgcaacttgtaacctacccagctcaaccactgcatgccactcttacagttcaatttttattcttattttttaatttttctttaaagaaatcaaacgtttggcacttgtcactttgtgggtgtctcctttagtctttgagaacatatagctcaaatactatggctgagcctcgttttcaaaattattagatgagatcagaatcatgatcagaacttttggctattttgttgttggattcttcatctacataatataaggtcttttttcagaattttaaaagaacaagaaataaataaaatcatttttaaactttggtcatgttaccatatcattagagtatctattatagtttttttaggaattttttcatggttagcctaacctgtttacttcgatatgattccctttaaggaagccatttcggcacctttttctttatacacaaaccatttatgtatatgtatgtaggtagacacacatttattgacatatactagtggcagaaagcacaacttttttttctaaaaaaacaaaattatatctacataaataatagtgtttttacctttaaaaaaaataatgtttttatattgacaatgcaattacaaaatttaaaattgtgtgactagaaaaacttcattattattattattattattatttggagattggtcaaagttatattaaataatgagtattggagactaatggtatctaacaccttttataagtggcattctacgtttaggtagcgatatttttttaaaaattatattcttaagttatatgagatttgatacttaattacaccaataacaatatgacatcgaggagtgtgctaagcactaataataatttttaacaattatctcaattaacaatataaattattatatcacatttaatatggtaaattattacatcacatttaataatataatttatcacatcacatttaacctaatttatgacagctatgatatgaatttaggtcccaatttttattatactataaatatatatatatatatatattaagttgatattatgtataattagttttctatttaattatatttaattacggaatattaagtgcaatacatatttttattttcgtaattaggtaatgtatttttttttaatatttaagaaggcatttgtgattttgatcttcgaagatttgttttagctattgctacattagtgtgtcatttgaatatttattctatataaagtgtgcatatataacagaattcttggtttatgagaaattcatgggtgactttttatttatattaaaaataaaatagtttttgagaaattcattggtcactttttatttatatataataaaaaaaaaatcccattaaatcaaaaaaaaaaaaatgattaggtttttgctgttgtacatctacgattgggttttcttcaattatttattgtattccttttcctattacaatttggacattcccatgggatcacacataatattttaattcgcacttctcttttttcttcttcacaacttaataacaaaatatataagtaataataataataaaaaagaagcgtgacttttatcaaagttcacaaaa

SEQ ID NO: 302800 - DNA, 3263 bp, Cannabis indica
gttcatggcggataaggccattttttaacaccggcgcttatttttcaccggcgttattcctcgccggtaaaaggaagttttaccggcgcagttactatacgcgccggtaaaaagtcctttaccgaccaagcttcccagataatctttaccggcgcacaactgcgccggcaaagctttgccggcgcagtcagggtacttttgccggcgcaacaatgcgccggcaaaagctggttttcttgtagtgactggagctccccaggacgacacactaggtcgggtaaaccttagttcaagcatcccctgaagttgtaatttcaattccttaatctctgttggaaccatctgataaggtgccttagaaaccggctccactctaggtactaagtcgatagaaaaatcaatctcatgatgtggtggcaatcccaataacttctttggaaacataaccaaaaattcttttaccaccctgatatcctcaggcttaaatgtttcgggtctactagagtaaatcacgaaagccaaaaatctcaaacatccattgtgcactaaatccctagattttaatactaagatgattggagttcaagatccttgaacggatcctacgatcacaaacggttcctccccctctgactgaaaggttaacattttccatttacaatcaatgtgtcacatacttaggacggaaaatccattctaagtataatatcaaacatagttaagtccaactctaccagattagcgctcaatatcctattctcaattctaattggcatagacctaaatcaccttttaaagatagctaattctccgctaggtattagagttccaaatttctatctcattataatcacaaggcccacccaattttcaatttttcttgaggacacatatgagtgtgtagctccatattcaaacaatacagtatagtaggaatcgttgataggaagctaacttgttaccacagaagtactagctacagcatctacttgggtaaaggaaaactcccagagtgggttttgcctctagatttagtttctttttcctcagctaaaggaaatccttcttaaagttccccatcaatctgtactgaaaattgactttttgttatactccttggggtgacgtttcttgaaaggggacaacaggataagtataagtctaaaaaccacctctgccttggttcccttagaacctcttactctgacttgagcaacctggtgtcggtggaatctttcttttttgatcaacgtaagaatcaccaccatctctaccaaagctcagagtaggaacaattgtggtcccactaacacttggagtccctttgggctcttgtaaaaactcaaccgcacccacgactcgaagatacttctctaacatcttagcatacgtggtattgtcatcagtggtaatgaccaagttgtgcttaatcttggagtttaggctggccaaatatttctctttcttgttgaagtctgtgtacaatacccgaaaccaacttagcgagtcggtgaaacttagttatgtattcagtcactgacatgttttctccctgaaccaaattggtgaaatttttcctcttggtattcagaaaatctttgttatagtacttagtgttgaacaggtcttggaattcctcctaagtcattctagtaaagtcccgagtgaaggacactatttcccactataccaaggcatcctcctagtattgaaatgtggcacaagtcaccctgtcaatgccagtgacacccataaagttaaggattctattaatcacagtcatccacttctcgactttcattacattagagcctcccaaaaatgttggaggtacttgcttacaaaatcgctcatacaatgactccattcagttacaagcatcagtttgttttgctggcaatactggaaaaggagcaactagcacttattgaggagtcacaacaggaggaccctgttgtctcaacctctaaatttcttcatcttgctgatggattctggcttgcatttatgcaaacctttgctcctagtcttgaggagcctgtggcagattaacattgcctttgccatgagctcttctacaacctgtatcccaaccacggggatgagggagattctgatctccccaaccacctttagtctcaaccaagttgtcttgactccttatgtttcagcgggtgtccattgataggactaccctatgaaaccataagtaaggtcggtcaaacagcgatggaacttacaatccaaataccacatacatgaaattatgcactatccatctaacaattactaacatgcttcctatcatgcttttcaaatcatataaactattaaacaagtaaaggcttactgagctctgagtcgagcttgtctttgatgatgattatgcatatcttgacaatcttcggtaaacaacctggcggctttgataccaaattataatgccctacatgcttaggcatgctataataattttctaattattgtgaacatcttcggtaatcaaaagttttctcgggaatcgtgataaattaaatcttttctattaaattcaaactttactaaatacatatttttacatattttttgagatcccattaaaggtttacaataatatacaaaatatttttttcacaaatgttttgcccaacaactttgaaatatgagcccatgttgtcctaaaaccgaatactctaggcttaaccatccaatatgtacaatcatctttaagctctggagtcactactgctcaactttgacctttcttttacctacacattataccatatctgttagtcgacagacgtagtaagaaaagtatagaacatagaacaaattagagacttgaaaataggtgcccatacaactaccaaaaatgcttaatagataatcaagaacattcttaatagaagtacgaactatataccacatgcactaagtactcgtcccatactagtgtaggttgggttaatccatacctcaagtacaactaagcattataccacatacactttgtactcttcccatactagtgttggtaacattgtgccatacccattaatattatattgtaccaatacactctgtaccctaactgtacaagtgttggtagtatacaaatgatataattcagcatgtaagagttagtcccacattgctaatgtgtgaaaataaattgtgatatataagatgaaagggctactcctcccattgccaattggttttgggatggaacctcattcatcttattcctcaaattctaa

SEQ ID NO: 302801 - DNA, 1464 bp, Cannabis indica
attttttttaaaaaaaatatgtaaaaaatgcaataatagattaataatttttaaatatgtttttttacaaaataacaatacaaagatttatttagatatgtctcgtttaaatttaacttacaattttcgaaaaaagaatagcactttttattttatacctaaatttaatataagaacttaagaagatataatatgatgaatggttaataaatttatgtctatataagtgaatctagttatgactcgataaaatatataaaaaattaatttgagctgcaattaatagggccatgatcatcttgaaaactccataacaatggttcattatacatgtatccgaccctagagtgtgccaaaagccattgtaacacagaagacatcaatttttataacagtggaattaattaattattgtactaaattttcttattaatttaggtagagtcaagcatcatcaacttaatccaaatgattaattacatcgacatcatccgtcacctaagttttctttcttttttttttgggacaatttgaaagaagatcatctcataatattaaaagtcaacaaaactatgttaataagactactctgattaatctaataccctcttcaaataactttctacatttagattacatataaattaatattatattaatacaattggctatagttatatgtttagatacgtatatgtagttaattaagaggtttaaaaaactataggagagcttattttcattattcttaattaaggtcctcccaatcaaattaaataataacaatatttgacaacttgcataataataataataataatatgtctctccataactaaaggccaatatagaatagcttattataataattaagaagaccattctaattattatcccttaatttggatatattaaaatgaaaaaataagatcagccatatcccatatcataatatatatggtttactttctgtcacactcaattatatgtcacacagctgtgacacaccttacaatatatataaattaggttccaattccaattacctaagatttttcaaccgcttcgtaagagaatgatattaattatgaggtaaattgtgatataaatacatgttttatattttatacacatattttaattttatttttagaggtaaaaatattcaacaatataattctcttacatttgttgctatacttttgttaactcataaatatgaatacgtagagggtctaaatatattaaatttatttattttattttaaaatttaatatttttaatattagaaactaaatgttatttatttcaaaaaaataaaataaaagagatgcaatactaaattatcatagctgagtaaatcagtacaatatatggaatatggttatcgaattgaagtgtcaatactgtaaagtccttttttggcaagttaggtgacaaaataatttttccatttatggtaa

SEQ ID NO: 302802 - DNA, 1385 bp, Cannabis indica
cagaatcttcttgaattgatgaagaattttatttaaaatctcagtcgcacttcgagtaatatcaagagagaaagaaatagcaattcacacaagtgagatggtatttcaatttagaccattacgattccatccgcattgggcagtaagagtggtgccgcatggtgttgtacaacaagcaccgaacaagcaatttcatgttgtgcagaagttaatgcgcctcctatgggtcccaactcggcttgatcatcaacaaaagtctgattcaatggaaagtgtccttttccaacaattaccagatcgtactccatattgttcactatgctcctcacagtttctattatgtcattatccactaccttctcagtcaactctacttctgccgacttcctcctcttgaactcattaagtgcagcctcatcaagctcctggtttatattaatcataataataagtaataatgaattgcactacacattataaatttatgttttttaagtttttggtaaaccttttcaacgacgttttagtcctccaagttataattatctaaattacttaaactttttatgcatgcacaccctttaaataaataaaaaacaattatgttttattaaaattttatatatatatttatatacttagctaaataggtaccttctccggcttatcctcgttgacgatggagattgtgcaactgtatctttcatgatcatgctcatgataacatctcattacggtcacaatgacatgttcatggtgagccatcctcccagccagttccaaagcttgccgatcatctggtcctccacaaaacaaaacgcacaccttcttcatccttgaggaaatggttgtagttggttctgatgcattactgctgttagtagcaggagcaacgtgcagctgatcattacactctgaccttaaatcaaagcttcggtccacaaacatgccgaccgagcacggtgctgtcttcagtacccgctggttgacccctccccagccatttcccgaaacctccatgaacggcaaaattatcatcgacacccttttggcttgcgccacatgaagtatgtcctcgtgcatagaggatagccctgacacagccgttgtatggcgcacagtgacttgactatggactaggctgtaggcctcacatgcagcggctgtttggttcgagtactcatgcaacgtggaccacgccggcataagcgactgactaaggggaagccattcttgcgagatcgacggccatcataatgggaggagggaaacggtcggtgagttccacaaggtgcatgacataaagatattggaggacatgttaagagcctgtgttatggattttgaaggctcttggaataaatatctaccgttgatagaatttt

SEQ ID NO: 302803 - DNA, 3237 bp, Cannabis indica
aaattaaaaggataaattaaaaatatcaaaattccaccaaagcacaacacaatatatatgactttgaaattaacaattaattatataattccacactcaaaactaccctcccacacaaaagactcgaatactctttttatttactatattctagcacatcctactaatccttgggcctaacacaattacagagttgaacattttcatgtttaacttttatcaattgcattttcatcctatagctttttacttgttttttttttttttgataattaactttttacttgtttatttcactagatttaccctttttaggtctcttcttcattgccttagagggttcttgggtcgttaggtcttcttctagagagctgtaatttgttcttactttctcatttttgagtattttctatgaaccataacttagcatcttaactcagactcaaagataaacccgatttgcagctgacactagcaaatatggagtttggcttttttctagttagtgattttgttcctctaattcaattaatggtaggttagaaatccaatagataatcgctgtcgtaacctcgatcatgtttgcattacaggtagaggagttggtttaggaagattctcacatagatcattgtacaaagctagtgaaaggtgaatcaaaagtagtgtgggaatggcaaggttggtgtattttatttcggtagaagagtatatttctacatttgaattgtcacctttctataacagcttcatgtttattctataatttttcattcgtcttatacaattgaaggctctttgagctctaaaaatattagaaaaaagagcgagacgagcaagttgaagtacaccgagaacatgaacatgtattctgatcagccccgtcacatattaaagactggtaaatttctcctttttgtttcacaatcttgttcatctcattaattttttgaacagtggtttcaaatgacattagaggcacatatctcttgacttagggacatttgcaatatgtaaaagtcatagtatctcttcttaaaattcaggggacaaagtaagtaaaaaagaagaaaaagaaagaaactttagaacttattaaatcatcaagatatgcagttttcattttctatacacatgtatgtttgttttgttcatggatcattttaatgtattttaacttgatctataatatcgttttgaaatatgagtatttttagaagaaaatctccaaccaatcaatgttagataaaattctttccgacatcattccatttcgagaactcacaaaaattccgcagatgttgccacagtttgttctacgtgaagaacaccaccttttagagcaatatgatctaaagaaaggggttgaagaaaataaatttattcattaatgttcccaaccaaaatcaagtgactcataataaagggtaatgaagccactaaacagaactaagagaaactgaaataacatatttagccaatgtgtaaactactacattaacagacctaaaataatgaataaaatgagcttctttaaatcttaaaagactaataataatatgttgcaaaaccagccccaaaaatttatctaatgcaacaagattattaaatttttacaccatgctaagacaatctaattcgaaacaaacattatgacattggaatactgttgatcttaaagcaagggtttatgcaatcttaagatcaaaaaaataccttcaacgcactaagctgcgaaagttaggaccattctaaattcatcccgagctaccatactaaggctgcatgaacctttatcgacataaagagcagcatctatgttaatgttgaaaaatgagctttcgagctaagaaatctgttgtactttgtgctatatttttattatgtttttttaagtttgaattagtttcgttaatctaatggcatgtttatttaaagagaatggaaatgaatggtatgatattgattccctttactaaattttgcagggagaaaatagtgggcctatacaaattagagagaaaacaaatggaaaagttctcctcttatttttataggaaatattttttcctttcctaacttaatttatttttattttattaattaaacataaaaaagagaaatatgccttttaaaaatctacaaactgaaaataattacatgttctaataatgacaattttttcaaattaaagcattccgattaccttttctagttatgtaaataaaataatataattctagttttcttttcgggcagtttaataaatagcataataaaatattgtttccaaaatattgtttccgattattttttattttaaatcaagtcatttctcccatcaattattttgattacaattacagtttaataacacgcatagataaagctttccatggtaattacataataaatgattctcctctttattatctttcaatgaattactatctttagaaatatttcacctttttatctattaatacgtgatgattcatttgtttggaacaaattttactacaatatttctatatatgaaattagtgtatatattaaagaatataaatactggatagtgtcggtggcattagattgaattgagataagtggacttaaattaaaatcaaaataggtgttcaaatcaaataatcaacaatattattgtattaatttagggagggtgtcatatatatacacatattattgaattgactataatgtgtggaatggggtgtatgccccactattaagatttttctttgcttggactttgacaacgtgttgccctcattatcataataatggcaaatataagaacttttgttataccaaaatttgtttatattcacataatttatatctcatttttctacactatttcatgaagaatatgaaacttattatttaagaaattttattattatttaatttatcctagattgaggcaatttaatttgtttagctaggaggattgtcgttaaagagtaatgtatatttaatatcattattttaaataaattatatagatatggaatatggtgaatggaatggaaaatgataaagtaagaacaaatttatatgtattctttaacttcaattattaagtgtattagatatatttatttttggctaattaagatttttattctttaaactttgtatgaatcaaatcatgttctcttaacttttctaattgttaaaaatttttcttgtaattattaaaattattaaatttaa

SEQ ID NO: 302804 - DNA, 4525 bp, Cannabis indica
cgtcaagggctagagcaaccccgtaggaggcataacttgatgtttattgcactggcagatgttgtagttacgcacaaactcaagtaactgccttcttcattccctttcaaaacacatcaacaactattgattctcccacttgaaccaatcaaagctgccccatccaaacaaataataccagaatcaagtttctaggtcggtaagagcagttggagttcgaaataatgctttgctcaattggtctgcttgtcgggtcctcacccaagaatattgtaagctcaatcttttgaggacagagttcaagtcgtcaattgctttccccatccgtctagagtaggcttgctcggacatagagcaagtcggattggaaattgcaaggcttagtcaacaattctttcaggtgatcgagtttggaattgatggctgcaagtcctttatgatttatcctgattgcacatcttctctttcaacatgatcaattcatcctgaacagtttcgactaccctttccattgattcgacgtgggattcgatgtttcttttaggcattcgccaaaaaaatatatgctcccataccaattgatgtgccccatacacccttctaagtcaagtcagcaataatatgaacaataagccaaatgcaaatgcaaagaaatcagaaaccagagtgtttattttttggaattaactgtgaaaagataaaactcaacaccctaggtatttgagagacttggtgctttccaagatgcaatgaaccaacgtagttcatgcatacctcactcttctaaagaaagggctatatattcactcacaaaaccaacctcacaaagaccagactgcccatcatttacaattagcttgctgtcccaaaactacccccgtacagtaagacctttacctttcacataagtgaatcgtatgggaggcctatcatgattttacattatggtttgtgatgtctattatgaataacgagaatgagtaaaaaagaacatttgacagtcttgtataataaaattgctctcagggtccacccatgtcagctgtaattttgaagtttgagcttatgtatgcacccatatcggagactgggtgagttttttttttccttactttaagctttattgtccacaccttgtgtgttttttttaccttcaatttagatccttaattgtaatttgaaaaacatgcaggtctaacttgcaggcttctctaagtgcttgctctgctgcagtccatgaatttcgaattcctcctaaagctcttttaggtttgcattcatattgccctgttcattttgatgcactacatgctgtgctcgttgatgcaagtgtacacattagtctacttaaaggtgaatcatatatagctgcagaaaagcttccaaggtttgtgatcttttaccagttttgggaagtctagattatttgcagtggctttttgatatgttgaagtaacagagttatttaattatttcagtgattctattagtaccacagttgctgatggtgaaagtaatgggtcaaaccaggtaggttttcacacattgttcctctatatagtttcctagtgacatctttttgtcaaaatttatttattattaacttatttatcttatgtgttattattttttctaaagtttgtttacaaaaaataaaaataaaataattataataaataagttctttcacctaatttgaaatatgtggttattatattaggcacagggtcagttggatacgacggattcaaaagctgtcatgcttatcaagtcattagtagctgctcgtgacattctacttgaagagttacaaaggttcagcaaagctgccgatcaagttattgatttggatgagtttatatcaaaaatggatgatataaagctttctgattctgtctctcaaggaaatttttctgtcatagatggaaaattttctggacaaggcaagctacaaaatgtttctgaggtccttacttgtttcacgcagcaagtcttattttagtctttgttcgcctttctagtcatggattttgttgctaaaatgcttctttgtttcttgagcagaatgagaatggtactttagacctacaatgtggtgaatcactcctctctttgccaaagagtgttctattaaacacgcttcatttattgggcgatcaagtgttatatttatggaacacatttttgcagttccacaggttttatttttcttctcttttccaaatgtgtttttaatttttatatcattggcgatttagtagttttcactttttttcttgttcttcatctaggcagtcgcataatgcaatctcaaattattaaatttattttttgagggggaaagccaattccagtagcttgctactcgggctttcaagtgtcacctaagctttgcactatcgcttgggcctggcgcacctcataaaaaaaagaaaaaataagtaggactagagtacagaaacacacacacacagaacacgtgtaataatgtaatgtgagctccagtttgtatgtatgcatatgcatgcatacatatttttattaatgggatggcaatatattcattcagttatcaatttatcattagaaacctgattcattgacaggttttttgagttcattttaatcttttaattattcagcttcgtgtcaatagtagtatatgtaatgtgctgaaaagtgatttgatcctatggtctaattgctaaatcacctggttttgttgcaggtccaataaaactaggatattggaatatctgcgtgatggttgggctaaagatagaagggcagaatggtcaatatggatggtatactctaaggttgagatgcctcatcattttttaaatagtggtacagatgattcttctccccatagtgttcataaaagagtatcaagtatttggaagctcactgatgatgtaagtgatagaaagtgataaaagttttgttggtcatgccatatttttaatccgggcaagaattaattcttcactatgttctaataaaatattattttgtgctctgtacagccagcccagactgctgctatgcgtgctgagcgccatcggcgaagtattgctcaaatgaaagtgagtcctgtggacctggccactcatgaagtgacctattgctcgtatcttctgtaaattgttattattttatctttttgtgaatggaaatttatttagtgcagattaataatcggtcaatccaagacatgtacatatttggagatccctctcgtattcctgttcttattgtggagcgtgtcatgaatgcaccaacgcgtgctactagtgaaaattcttacttgagacatttggatgtgattaattcacctgctttacttagtgcacgtggctctgaagctgttaagctaactggcactaacaaaccaaagaatggtcgtgttttaaaggtggttgtattcgtgcatgggtttcaggcaagtcttgatgaactgtttttaaatgtttaggattttatatggattgttggaaagttgctgtgcctgttagctttaattatgtaatcgtagttgtgtgatattagaagattagaaagttggacctttggcttagaagatatatataatggacatttcctcttggaaaataccagcggaatatttctaagcttttttttcttcaattaagtttttcagttttgtaggtccagtaattatatatataatattctcttttacaagattttactgtcaattattttatggacagcagagaatacactttgcaatcattgcattatactggttattatcttattccgcaaaatattttttttgtgtttcaatctaaaatcatagggccatcatctggatttaaggcttgtacggaatcaatggcttttgttcgatcccaagatagagtgtcttatgtcagaggtaaatgaagacaaaacatctggagactttagagaaatgggactaaggctggcccaggaagtgatttctttcctaaagaaaaaaatggataaggtttcaagacatgggatcttgactgatattaagcttagctttgttggacattctattggaaatatcattctaagaacggcactagcaggtacaagtatggttttcgagtcattctttttcatgaatttatactttggcactagatatttatggttgtctttttgcagaaagcataatggagccatacctaaggtacctgtatacatatgtctctatatccggtccacacttggggtatctctacagttcgaactctttatttaattctggactatggcttttgaagaagttcaagggcacccggtgcattcaccaacttactttcacggatgattccgacattcagaatacattcttttacaacctgtccaaggtactgaagtttttcatgcctttttctggtgttgcttgttatgtgcatggaactatgaaatgtttcacgagatcttgtccatgtatgttactttattgacatggaaagtagtatctgaaccactcctaagttcttttctttctttctttctctct

SEQ ID NO: 302805 - DNA, 2685 bp, Cannabis indica
tttagtcacaacaaatattgtggctaaaaatacatttagtcataacaaattgtaatttttgtgactaatacttttagctacggatcttttagtcacaatataataatgataatttataattagtgacaaattttttatctttaatcacaaattttgttgtgactaaaagtaagatttttttgtagtggttaaattgttgtagataacaaataatagtgagagatctaatttcaacaagttgcttactgtataaatatattaatttcaaatgacttgataaatatatattttttaaatttgtatttgctttatgtacgaagttatagtgctaacgattctcaatattggagttcatgtggtggtgggcgtggcttgcgtgggtaataggtatatagtcccaacaaagacaaaagtgtaacaagcattttaatcatttttatagtatttttgtttgcatgtaaaatttggaaattaatatgttataacatgcatgcatgcttgccacgtgtatgtcctctcctatcaacatatataatgtccaactgtcccacatgcggacttgtttaatctactattatatatatttatattgatcaaaggaaagaaagaaaacttagaataggtaattcataaaagagagagatatactatggcaggtgagatgatgaggggatcaaggaagacaatgaaggtgatggtggcaatggacgacagcgaatgcagcttcaacgctctcaagtgggcactggaccacttatttgttacgcctccagagatgggaacaacagtactggcggaggagcccaacccggtggaggctgacatgctggttctcgtccatgttcagcagccttttcagcactatggtttccctgctggaccaggtggatctggtttgtctacacttataatttgcatgtgtataatcatgatataaagatgtactagctaattaattaattcatacagcacatgtaaaaatatatgtaagtttgaaattatttgacagcggtatatgcaacaacatcagtggtggaatcagtgaggaaagctcaggaagagaactctgcgattttgatgtctcgtgcattacaaatgtgcagaacgaagccggtacctacctaataataacttgcttaatttggttggaggaaaagaataagtttcattattccatttttcttttctttgtattttaaaatattagaatccaatttcaatagaattactttttcactatccattttgaaatgaaaataatgtccgttcgatatgcaaaaaaaacaatttgacattttaaattttatgatatgcaaaaaaaaaatttgacatttaaaattttattccattcttaacattattcctctcaaccttaattttatatctgctaatctaaaattactatgttatgtatataaatgtagaatgtgaaagcagaaacactgattctggagggagaaccaaaggacaagatatgtaacgctacagagcaaatgcatatggatctcctcgtcgttggtagtcgtggccttggaaccatcaagaggtattttatttatatattatatatgagaaatatatcgctagcaaatcataacgtgaggagaacatcactcgtccttaacaggaatgctcattatctatggacccaatataaagatactttttgttttacttattattggttggttgtatatataaatgcagagcatttctggggagtgtaagtgactactgtgctcatcatgcaaaatgtccaatcctaatagtaaggccacccaaggaaactgctgttccgactaccatgtgaaggactcactatctttctccaaccaagaagtactgtaattgcgtaaattagtatcttaatgaataagctggggttgatttttttttggtttgggtgtgcttttttatttagtagtttgttttgtatgtacaaatttcaaaagcttttgtgtgtaataagaggaacagcagtacatttatatgatttgaatgatctaatagtagtaattaacgatgaccgaaagaagaaagtcaatgcatgtgaaagccaaaattaaagtaacaattacgactcaaaacaaaagaaaagacaaaaagacaaaaggaggaaagaaaagcaagacaaactaaaccaacttattatttcaaataaaaggccctgtaattttcttataataaaatatataaatatttaaaagatataaccgtacatatattaagttatgacttctgttaaaatttaaataacttcagttaaattaacgagccaaaaataattagtaggttgattatgcatgatttttgccttatgaagtctgtcaaagagtttgaattttgacatgtactaaatcatgcttttgaattatcgacattgttaaatttaagaacttttatcttaaccattctccttaaattttgatatttcctaaatcacgctcctcgaattttgacatataattgtttatatattaaaccatgctcttcaaattttgatatttaccaaattatacccctcaaattttaatatgtattaaattatagcttctaaacttttaaccatgttaattttttttactaaaactgaaaaaagtgtttaaatccaacaatctcaataatttaagagacatttttaacgatcttaaaagttcagagaatatgatttaatacatgttaaag

SEQ ID NO: 302806 - DNA, 1131 bp, Cannabis indica
cctatcactatgattcatatgtttactatgtgactaggatggtcgttgagtttaagtggtaaacaatactaaccaagtgagagaataactgaatattttatactggtaagtcaaatatttgatttgattttgatttatgaaagatatataattaattatttgataattgatttaaaatatactatttattagtttaccaaatattgtattacctaatttaatttctaaattaattgttaaaatattttaataattaaagtggcacaaatactgatacagtatctcacctatgaatataggatattggtctccaagttcactacttattatgtgaaaagtagtaattccatataagagagttagggaaactccaatagtaaaagctaaatttagtgttgaactaacactaaaagagggtacaattttaagactaaatttttctttactccaactacaaaactaaaatttatacaaaaaaagtatactgtttattatcttaacatataaatataaataatacatatagattaagaaaaattaactatttaaccattatttaattattaaaaactaaaaaaataataaaaaaaaaccaattttagtatagtctacagtatctcactaataatagtgagatactgtagataatttcatatataggatagcttttagtgttcggttagattaattttagtgagaaacaatactaaacttgagtttttagtgttcggttggagatggccttacagagagcttagaagtctgaatacccacactaatacaattttagttagtttgtttggttttttgttttttttcttgtgtagattcaaagtttgtgagatcaaagctcataaatcaatgaagtatttcgatcatttatttatctgatgtatatgttcgatttatttcgcatttttatacaatcatatttatataattaatataaaattctaatatcacccacatatatatgactttgtttatttatttttttactaactgatatacaatagaacctttatctaagaatactcttttataagtaataacctttaacttgttataaaataattaaagtctcaatttgaacacattataaataagaataacttttaaattgtaattagt

SEQ ID NO: 302807 - DNA, 5650 bp, Cannabis indica
gattgatatcacattttttttacctgttatacatacataaatatttactcaaaaaaaaaaagcaataaataataaaaaaataattataaggaaaaattaaaaaaaattaagactggtaatagaattgtggtcttaatgtatgtaaacgattttttttaaaggctaaattttaagcttttgcacaacaccctcaaaatgtttggaccgaccttgcaccgaatatgtagtgtagtggttgagacgcttttcataagttcttaactctaattgtcttctagagttcaaatatcgataatgaaattttactatttgacctaaaaagtgacattcccagattattatcaagctgaaagagatggagatatgatgtgcaattgtgcacgattttttttttaaataatttttttatattaattaaaattaaaatatatttaattaaaatagatttttttaaaaaatatttttagatctcaaaaaaaagacctaagggaagaaaacgaaaaacgacatgtcgtaactaccaaaccaccaagcgaaaaccctaaaaaaaaccagtacactgaagctcagtcgattatggcgtcttctaatgtggaagaagctgtagaggaagtaaacccagttccaaggttacagatttactccacctcctccaatggtgtctcacaattttggataggtttttttttttccccaatatcatatcttataaaattcctttttttttgttttctgagtaaaattagagctcaatgattttgttttttgttttttgaacatagaaaagtacgaaagagaagctaagaagtattgggatgtcttctacaagcggcatcaagataaggtttgctttcaaaaataaagttctgatcttgattagctacttcaattatttgttgttttctgataaattagactggaagattaataatttcaatttgtgtaattaattaactttgataaaatggtcagatttaattttatagttgtagcaattgttatagtttttttgatttctaagtattataagattagaaggggagcttggttttggtaaaaggaaaattgggttttcagtaattggaattttagaatgtgtttggtaggagggagagatggaaggaaaggtaacttggttgcgaatatcggggaagggattttaggaggaaatgaattcgagtttgcgttttgatttctaattttaagagggatggaaggaaggataggacaactcggtttcggttaattggatggttgtttgatgtgaatggttttaggagggaatgaaattgagtatggatttcaaattcttagtttgagagagatggaaggaaggataactaggttgctgatgattggaaggttaggttttaggtgggaatgaattcggttatggttagcttggcaatgcaaaagtcctctctttctttttcactctacccttggttacttacctcttcttattacccttatcagccttaaggttgaacaatgctatatgggctctcgatccacgtggtgcctcccgactagttgtcaggccttcaagcagcagccttacaggcctgacgaccaatcaggaagcctcacatggatctggagcccattttcattcaggacatacggctttgttccttaatgtttgttcttcctatgctgtatatttatttgtaaattaattatcattctcttttattttcagttttttaaagatcgacattacttggacaaagaatggggtcactacttctctgtaagctgagaattgaaatggattttgtgtatttccttttaagaatttcgaagacgtatattgatttccttgtttgcagggagcagggagaaaaaccattttggaggtgaacaactattctcacttctcaacctactgatcttaatgtgatttactccatgtttgagcacagacattgattgtatatcggttgttgtttacgagcagattgggtgtggagctgggaacaccatttttccattggttgctacataccccgatattttcatttatgcatgcgatttttcacagcgtgctgttaacttggttaaggtttgtattcatcctttttcgaaagctttgacttgtttacttaaccttaggatttgaataagtccttaaattttcttatactttattggctggcaaagatgtgataggctaactaatgcaattactataattaagatacaattcacaattggtgaggttatttctttagaagctcattgaatttctgttacaaaaattccaaatgggcgaaaccgagacatgatgaaatttcggtttggtcattacaggcacataaagacttcaatgattcgcatgttagcgcttttgtttgtgatttgaccagtgatgacctcacagatcacatatctccatcttctgtcgatatcgtaaccatggtatttgatcgaaaattgttgtcatttgtttttacttaccttctgattttgaagtggctgacatgttaagcagatctttgtgttgtctgcagtgtctccagagaagatgtctctagtgttacagaatgttcgaaaagttcttaaggtaagttatcccatctctctgattagctgagaaatttatctttaaagctttcatttttctataataaatcattaactttatgtgatgaaactcatgttgtattgtttgccagccaggtggttacgtgctttttcgtgactatgccaccggtgacctagctcaggttagcctgttgccattctctctgtagttttcattttcttttcttcaaatgattggttttttctaggattgttcacgaattggtttagtctgagttttttccaaaccaaagcagtattacagttttctaaacattcaaaactgaacttgaccaattaaatacgcaaattcaaataatgctttggtttaaaactatagtttgtatttcgtaacatttttttaagtacttactcattcttttactaatttttttcactttttaaagtttgtaattcataaaagacaacattgataaaaaatatcaagtcgagatcgtcccgaaatattaaaattccataataaaaatatatgtatataacaaattaggcgatttggtttgatccgctagcgagaattctaaaactttgaacaaaatagagaattataaaccgtccaaattaactaaactgttgacaccgaattgatctggtttcaaatgatttggtccggattgatttgggtttgaaactacgaattgcagattgctatgaacaacccaagttttttccgaagtttctatggctgtatgccaaattgtaacatggaaataaggacattgatcttataaatttcgagactgatctttatcctggtactaatatcatgtggaaatttacaggaaagattaacttgcaaggatcaaaagatcagtgaaaacttttatgtcaggggtgatggcactgtaagtgtgttgtttcacactagtgttattgtttcagtactatgcatttctattttgctagcttaattatttccccttatatttccagcgcgccttctatttttcaaacgagttcttaacaagcatgttcaaagacaacagatttgatgtcaaagaactcggtttgtgctgcaaacaagttgagaaccgatcacgagaccttgtaatgaatcggtaaacagtcttgtttacacataaataggtactttattatatgcttttatgaaaatcccggtttctaaagacattcaaaatgttgtaggcgctggattcaagcggtattccacatttcagatggtacagatcaatctaccaataccgaggctgccattcaaggcgaagagaacgttttgaagcgtgccaccgacaatgttgaggtcgatatctctgatggtttggcagcagaaatgtttggagatagtccttccaatgatagcgaggtacgatactttcgtcactgaatttatcgagaaatattaaaatttgctcccgaactattgcacttatctaagtagacgagtaatagtttataggcgaaatcgcaatctgtcctaaggccatgtttggtttggcgtaatcataatcataatggaatcattattacgatttcatcatttagtttggttttgaaaatattacaccattcatttgaataaggattacatgtctaaacctatgtaattgcctttccaccatttagtataaaagtaaaattactctaatacccttagcgttattttatacccttccattaccaaaatgatttaaagtaaggatatttatgtcaatacacaacacattttgttaccattctaaaattaaactaaacatcataatactattcctaattactattccattccataacactaaaccaaacaccacctaaattcattttcatgaattttctaccatatcatgcaaatgaataatgagaaagtcatggaattcgaacccgaactccatttacgattcaatttttgtagctcaatagctcttatttcctatttcaacgtatcgatttcggcttagcttatgattattttagattatgaattttataagttttacgaagtttttcctcttgttgtgggactaagggaaaatgcctcagtaccctattcggtttttcaaaacctaaaaacagaaacactattttcacaatctttcctaaattcatttgacactaaaatattatctcctaatcttcacagataatcaagatcagagatcataatttcgagatcaaaagactatccaaagagtaccaacacacatgcacatcgaccggtctaatgatatgggaatcagctcatctaatggcttcagtcttagcaagaaatccatccatagtttccgaaaaaaaggttctcgaattaggcgccggttgtgggggtatctgctcaatgatcgcagctaaatacgctaacctagtgatcgccaccgatggagacacaaaagccctcgagctattgacacaaaatgtctcctcgaatctcaaacaaccattatcaaacaaattgattgtgaaaaaactagagtggggaaacaaagaacacatggaaacaatcaaggaagtaaacaacaatggtttcgatatcataataggcacagatgttacatacattgctgaagccatttcgcctctatttgcaaccgcgaaagagatgatttcatcaaatagtaaggatcatcagcctggattgattctatgtcatattataaggcgagtggacgagccaaccatactttcaactgcctctcagttcggtttcaggttaatcgaaaggtggccctcggaaaatccctccgcctctgcctcggaaagcattatgaattcttggtttgcaggggatggttctgactatatcccatgtaaagcattgaatattttgtacttttgcatggaataatattgaaattgttgtcattctatattctcttgcaaattttttttcagtcatttttcttctaatttgcttatttattttctatcatattattatagaaaattgtagtactgtatttttttttaccttcaagatattttctcaattgacagtgtaattttttttttcagcctatcaaatatgctataaatattttcacatttttttttttttgaggaatttgtggcaaaatctatgtttaatttttataca

SEQ ID NO: 302808 - DNA, 4228 bp, Cannabis indica
taaaataatttccaacataactctctagaacttgtgagtgagagctctcctgagctaaatctcttgtacgcaattttgtaatcttatgaataatagaatcttgagttaaatgtagctcgattaccatcatgacatgaggagtgaaatactatacattgtggtgtctcttttagtttattttctctattattattgctgttatttcttattagacgctatggagttggccatttcttagcatcaatattttggtgcttttattgagagccaccacccgacttcccagttaccgttagagttctctgctaggagctttgttttgagaaattcagaagctctattactagcatatttgaatgtgcggttctagtacaataatttgagctcttagtcgtcacgcttgagaacacaatgatttttatgagattcgctagagtttcatcacttccactaactggccacgtgggaaccaacacttagggtgaaaccctgaatgctcagaacaacaccacaactcatggtagtcgtgccactacccaacaagcacaaatcactaaggttcctaatagagaagagagccatgagcgagcatccaaaacgactctgcctaaggaatgccaacttatgggtcttctacctgtcgtggagcaatcaccaactagggaagcaaactatgagcgagcatgcagaaggactcaaactagggaatgcagacctatgagccctccacctactattggtaggactaaccgtaattctgcttcgtgaaatttgaaaaaaatgggtcaccaatctcctccacgaaattctcctcataggtctaatgtgtctaggccaccccgtgaccctacaaaaggaagaggatctgcagtcaaccttagggagtggggaggatcttgaagctctaccatgaaagtggggactttgagattcgtgggttgaggaccaaaaaactactccacatttggaaatatttatatgattaacatagtactatgtgtaggtgctttgcccaaggtcttgatggccaaaagtacaaatgcttgccttgggtgcttggagatgtgttgagtttgagcaatgatttccaactacacttgtaaccctaaggaagactattttgaaggaaatagtcagtacaatactacgagaaaccacacacaaagaaaatgctcaatagatgattctgtcgttacatgggataaattcctacagttgctaacaaggacacacaaccaagcaataactataaggtcaaagttgatcaacatccttgttaaactcaatagacaaaaggacctaagagataacattaattagaaacaaatggtggaagaggaagcctctagcaaagaccccgctaatcaaatagcaaaggatccaactggtataaaaaccacaacttgtggtgttagtagggtcaagttcgacactatggccacctgctatggagtatcataactccaaattcgaatgagtttgagctagaatagaagcaacattaacctctctcagatcacgtcaaggctttagagatttcctccaaatttaagaatccagtgtggcatccatacactgataaaaaagaccctatatctcaaaaacacaatttcgaagtacgaactgacctataaggcatttaagacgattctcgatgccaaatctttccagccacgctatccaaaccagcacaacaatgatatctcaagctttctccaagatctatcaattttgaggagacacttaaataatcattttgtgatcaattctccccaccaattcacataccaatcgagtgcaacaatttggtttgcattaagcaccaacaagatgagcctctaaaggattacttacaattattcataaaggaaaccatgcagacaagggtacttagtaaagatgcaaatgtaagggaaatggcagccagactcactattatgagtctgctctggaaatattttaaactcaaattagtatacaatgttcaagagtttttagacatatttgatgatttcatcaagctcaaagaggccgtcaagaaggttggaagagcttctcaactagcagcaaccaattacactgattatccacttcctaagtcccaaatgcacattgatgaagaaggtgaagaagaatcaaggttgaatgcctccagtgaaattggttccccttttgttttcgaagatgaccttgagtagggagacaatgatggtgaatccccttccgtttctcaagatgagatcgagtaggaggacattgatgaagaatctcccctacttccaaagacaaatcaagatagagggtagtgacgaaacttatccatttgtttccaacaaagaccaagaatatgggagcgctgatgaagatgtgtcctataagtctcatgaggatattgaccaagggaacgacattgaagacttccaatgagagagggacggaccctatgtcatcatagaagtgttgaaccttagaacatacaagttggcatgctatgaccaccatttgaatctagtaccagtaccaaggtacttgaatggggagcatctgtgacatattaccaataaaagcacatttctcttcagccctagttcactttactttgaacaaatggatcatctctagaattgaaaagatgctttgaatctctctcttttagccaagggattctgatcattatgtgacgacccctactctttagttgaaccgagcatcaatgtaatgggtggaaacttagtttcgttaaaacagttttagatctgctattgccatatcttttttagtcaaagtagatagaggtaagaaaagcaaactcaccctatgtaattacatttaatttctaatgtataaaatcactcgagcttattggttcttcattgttattaatcaattatagctcacagaccagccaagatgtgatctttaagtaacttcagttattttttagtgagtatacattgccaagctatcaatctctagataagcgatacgaatgctcaaactatgacaaatcacagccaaggctcatgatcaagaaagaaactagaaaatttggtaaggaaagtgaccaaagaatgtacttctttaattacttggggcacacaccatagtcaacatgcatatttaaaactttttccataagtgagttagcacttcgatggtctaataaaatgtagatgttacccatgaatatagtaaccgagttgcacacttgagctagtacttttatgatttaaaatataaacacttgagtttgatcgcgtaatagtggccaagtttataaaactaaagtgttattgcaagtgctcctccacggagcacaaaaaaaaaaagaaagaaatgaaaggcatcatcaatcataaaaaactctctgaaagcatgatgttgcatacagtagagatcttctcattgcttgtaagaaaccctgtgggagggaaatgctaccctagtagtggtcttcctttggttgctaaacttcttctcagtataggatgttgtacttagcacgtgtttagtccaatctttatttttttatttcctctcttggagtttttctttataagcctctaatgaggttctatgagttgaaatcttcaagcaatgttcttcaacaacctttgatttcacttttattctaaatctggctagtagtaataacacttatgctaataaattggatctatgtttgattgccaaatccacaagtaataactcactgcacctcaattgtggtctatcttgttgctagcagatagcttcaataaacaaacatcaaagcttctcaccctagttactaagagactaatgttgggggcaagagtaactaggctaaggtaacctctgagccaacttatcaatattaaacctacctgtcaagttcccaacagtagcaggcattggttgcatcctcgatcggctgaagagcagcctataactgctacaacacgtcattggaagatgccaagaagatctccttcgttgtgaaaacaattgagcagacaaagaaggcctcatccattgtgaaaagagctgaggatacaaagaaggcctccttcaatgttaaaaaatagcaaaggagatgaagaagatctcctttgttatgaaaataacttaggagatgaagaaggctccctccactgtgaaaatagcctaggagacggaaaaaggcctccttagttgtgaaaatagcctagagacagaaaagacctcttccactgtaaagcccgcttag

SEQ ID NO: 302809 - DNA, 2696 bp, Cannabis indica
tattaggagtaaaacagagtgaaaatgaattgtgttattagataattggaatgaaacagtattacaagtatttataggcacaaagccaagctacagtacataacagaataaacagaaaaataactaacaaaactaactaattcctaactgatctaagatattgtaaaccatattaagtacgtactaagtattctaagtaagtaatcgcaatattttagtgctgtcaaaattcctacgataacccttaatcatttttgacattgtttttttttttttttttgggtgtacgagagagagagaactaagtagcttttttcttttctttgaaggatgacatttaaataacattatcgtggtcaataacccctttgaatacaataaaattcataggcacataacgtatgttttaatgcatatataggtttcgctttttcatcttcaactcagaatgttaaaatgttattttctatgcggagaagtttatacttaataactagtaacgagattatttcataaatatcacaatacttaataacgagaaagaaaattaattaatttatacctagaaacgtacacatttattaacatttgatcatgataaacatataaatacttattgaccaactcttcacttttccctattcttaataaccaattcatgggacaatgaagtaaaatttaataacggtcatttaccgcaatctctatataagccctgcaaaaccactatagagttgtcttgttatctttcatataattgattgttatttacctaagagaataatatggctctacacattgctctccctttgttaacaattatttgtttcataccaggttcttgtttcacagctgcatcgagagcatcaatcagtaaaactaatggtttctcaactgatctcattcaacgcgattctccattctcccacactacaattccttccaccactcattatgaccgccttcacaacgctttccgccgctctttctcccgcctcagccactaccaatcaaccttagtgacacaaaaatcagctatccaatcaagaatcattcccagcgaaggcgagtacctcatgaacatttccatcggcaccccaccaatccaactcatcggcatagccgacactggcagcgatctaatatggactcagtgcaagccatgcaccgagtgcttcaagcagaccccaacccttttcgacccagccaagtccaccacctaccatgacgttccatgctccgccaaaccctgcgccgagctctaccaagctacttgtggttcgcaccacgacacgtgcgtgtacagctactcatacggagaccgttcctacacgaagggcgatctcgcttccgagacctttaccgttggctctacttcaatccccaaaatcgttttcggttgtggccatgacaatggtggtactttcgacgagtctggttctggcttgattggtctcggaggtgggtctctttcgttagtcactcaattgggcaagaccatcggtggtaagttctcctactgtttagttcctttgtcagctgaatcttacgtcacaagcaagatcaatttcggcagtgcggcggttgtatctggtaacggtgtggtttccacgtctttagtctcaaacaaagaccctaaaacttactattacctcactttagaagccattagcgttggaaaacagaggttggtatatgatactaaccattacaatatgacgtcatcgtccaaggctggggtagcggataacgaggggaacatcataatcgattccgggacgactctgacgtttctcccggctgggttctacgatgatttggtgcaggttctagaaaaatccattgaagccgagaaggtgagtgatccgaaaggagtgttgagtctgtgttttagatcagagagtagtattagtgttcctgctatcacagctcactttacaggagccgacgtcgttttgaatccgctgaacacgtttgcgaaggttgaggatgatttattctgcttcactatggcgccttctacggattttgccatatttggaaacttagctcaaatgaactttttggtgggctatgatattgatggtggaacggtatcgtttaagcccactgattgtagcagattgactatttgacctttcaaatagacccctttatatatattattattattattgatttgcttgcatggccttttccagtcttttttcgcgtatcgttttgattgagagagtacttgcgcgctctacttcctactttcaaggaaaattagcttttataaatgtaagttagtagcgtggaattacaatatcagcaagtttgttattgcttcgtgcaatgtttttcattttgttatattacttatagtttgtgtttgatcgtaaacaatttttctgcatacgcaaagttaaaatcttactcacattctcaggcctaacactacatcatccaacttttaatttatgatttttctttttttaaaagacatatttagaaaaagagtacaattgtatgtggaatgtgaaactttgttctaattttttaatgggctgagatgcagtcttaaatttggaaactttggaaaataagttactaaatgtccatttttaaaaaaattaagaaaatgaccgaatataataaattagctaataaaaattataaaaatatatttagtagatattttaaaaaaatatata

SEQ ID NO: 302810 - DNA, 2532 bp, Cannabis indica
aggtgaaaatatcatttttatctttattgtaggagcatttcttatttttattgtataaggaaagagaaatgttaaagggtgcctaatacttttgtagagttatttgcggcataatttccttaagttgttacgtttttacaactaaccctcaatttttaaaattttggtggtaaaatctcctaaacccaagttctgttaacacttaaccccttctatctatttttggctcttaactgtcatggtggaatgtctacgtatacacaatgtacacgtgacacaattttattggtccacgtaaataaatatttaaaaaaaaataaaaaaattaattattttaaaaataaaaaaatttctttttctttaaaaattaaaaaacaattttaaaaaaataaaaattaaaaaaacctaaataaaccctaatttctttttctttttttattttctttctcaagaataaaccctaattttatttctaaacaataacaataagtgaataagtttgccccattagcaatgtgggactaaatctaatacatccttatgatcaaagtttgtttaaaaaaacataaacatagccaaatattacaccaaactttgatacattttattttgtagaaaacactttagtttcctttcacactttattcacccaaaactacatagaagcatactaaatgatcataatctcacataagaaatctcaaggagaataaggttttgcaacaacatgaagagcttttttctttgtaacactaagcccataaacttcactcatatccaaatctgaggaggacccattattaccaaacaactcccaatcaaaccaatacaaaagattagcaactgtatattccatactagccatagcaaatgagatgccaggacaagcccttctcccacacccaaacgccacaaattcataaccttgagctccttgacctttaaacagatcaactgggctgttctcaaatctctctgggatgaactcttctggattttcccatacactggggtctctatgaattgcccatgcattgatgaacactcttgtcttggcaggaatatggtaacctccaacttctacacttactgatgtttcacgaggaagtaacagaggaagtgagggatgtaacctttggttttctttgataatacagtttaagtagttcattttgttgatatcattagaatcgatcttttgtttgtttcccactacttttctaacttcttcttgggctttcttcattactcttggatttcttaaaagctctgccattaaccattctaatgctgttgaagtagtctcacttccacccacgaatatgtcctgcaaaaatgaatttatattagcattgtgtatttgactaagagaaagaaagagagtgtaaaacttactattaagatagctttcaagtgctccatagtcagattcttttcctctttctgaactttgagaagaatatccacaaagtcatctttcaaattttgacaagaatcatcattgctttccattactgccttgtgttcttcaatcactttatcaaagaagctgtccattgcattaaagctttcagtcaaacgaccaatcaatcctctaataacgtcaacccatttcaaaaaagggaagaaatctccgaaactaaaggccataaaatcaaccattatctttctagacacctctccaaatctggtctgatgaccatttacatcctcaactctctgcccaagcatacaccttgccattatgttattagaggttgcaataagcaaattgctgaggttcacagacctcttagaaagacaagtttctcgtattgtgttaatcaataaatcaacttcttcatcccttacgaactgaaacaattgtacccttttgacacttagaagctcaacaacactaaccttcttagctagtctccaatactcaccataaggagaaaaggccaagtctttgcagccataaagtaagatcttaccagctacagtatgtggtcgattggagaaagctatgtcatggttcttagtgatctctctaaccatttcagctgatgaaacgatgagagttgggactcttcccaaatgcatgaacataagagggccatacttgtcggacaggactcgaaggaaccggggcgggtgagtgcctagctggtgaaggtttccaatcactggtaagcttggtggtgatggtggcaaggtgctttttttgccacttgatgatgatgattgtctggttgtgaatataaagaagagaagaagagataggaagcaaagagagaaaagaaatgggtgcagaagtacttgttgcaacataactagtatctccattattactggaaaatatctttgattcctagctattggtaagttttggttttagacttttagtctgtgccttatatataaatataggaaaatttggattttttttttctgagaatttgagatgtaccaaattatattttttgaacttttttagccgttaaaaattactcatgaactattgagattgttagatttaacgacttttgt

SEQ ID NO: 302811 - DNA, 3337 bp, Cannabis indica
gtgattgtcaaagatggaggtctcatacttttgttttggtattgacagtataaaagaaaaaaaaagggaggacagtataaatgttaattctgccgtgtggtagtaaaattgaaaagtattaccccaaatccagtatttttgtaaaatgccctttatttaacacttaacagctaggtatctacagaagtttcagaattataacttaggtattattatcgccaaaaagtaaacttaagtatttctttataatcagaaactaaatttaaatatttataccataaattactgattattccaagtaagccattcatgttgttaccaaacgaactaatcactcaattttcatatatagcacaaaatgatatatagaccttattgaagaattttttatatctaacatatcgatctatatatatatatatatatatatatatatttatatcaaagcaaataagtcatacatgttatctatcttcaaatactattccatatataatttctagctgaacggaaacttgatgagttacactagctagcttattgtaaaacataataatttgtcaacatcttgtcaaacattatagctgaaagttttctaggtcgaatcgtattataaagcttgatctgaggaacactacaggaaaaaaaaaattacttttaataaacaatatcttagtcacaacaaaaaaaatttgtgactaaatgtacttttaatcacaataaaaagttacttataactaaaacatagtattcaaatacaagttgtcactaatttaattttattcacaacaagtctaactaaaaatatttttaattacaacaaattgtgatttttatgactaatacatttagccatatatgaaccttttagtgacaatataggaatggtaatttataattagtcacaacactttcacttttagtgacaagttttgttgtgactataaataagatttttgtagtgcaaggcttatgatatgatagaatggaattcatcgaagaaatgttgatggctctcaacttttctaaggtttttcatgaattctcaggaaaaagttttttcagcaatgttagtggggttggtttatcagatttagtggaattgaaattgtcattggaaccataaaatacaaattattaattcatgtgtatagaccataaaatatattgccaaaaataatttgaaagtgttagaacagggaagattaaactggagatatatatagaatggtttgaagttttataaatgtagttgagataacaatttggactttgagatgcgttgtttaagctgtaaaagtgttttggaggaatatacaaacatagtcgattagttaaaaaaaaaacatatatattaatcctaatcattgatttgaaaaattcattggtgtggggagaatggtctttccccactcattgtagggttcacattcatctaaacattaataattaattgatttgaaatttaaaagaaataaaaattataatgaaagatttgatttgggttttttgtagatataaacattaaataagtagctatttttttgaaagaaaaaagtggtagctaaagctaaacttgtggagttgtttaatttattatttttattatattaattagtatactagatctccatttgagcctatttcccatatctagatatatagagatattcagtataagaagaggtcaaaagcttggaaagaatcaatgtatttgtaattaataatccataaacatccaactccagttgagatctaaaatgggtctgacaaaagttgtgtaaagataggggaaaacgaaagaacaagcagactcaaaatttattaaaaataaaataaaataaataaaagtctaattaaagaaagtaattgaaaggtgaaaactgtgaagaggatatatatagatatatttttttttttaaataggagggcatgaggcttcaattaataacagacatcagagtgtgtggaaatgaaacctctctgtcaaaataatacaaaaacccaacatatataaatataacatcattgcatttatatattattaataattaatgtcccaagaaaattaaatccttccacatgtaatcgtataaatatatatatatgtatattatcaatactcttacttcattaccaacaaattaattaattacttcattaataatgaaattttgtacacgaagtggaagattgatcaccaccatatatatatgtccttaaacaattaataataataatgaaaaaaagaaaaagatgttttcattacaataacgtgtgtaatacaatatatagtccatcaatagtaaccccatttgcaatactatatagagtaatttgtagtatgaatacctaagtttaactctcaattgtaaataaataattaagtttaatttttggcggtaatatataatattgttatatttttgaattttataggtacctaaccgttaaaatattatgttattattcatgtgtcattttcttattggtatattttaattaattttttaaaaaataaaaatttaataacttggaccaattaggaattaccacgtggcaatttacttaacaattaaccgtcaggtacctacaaaagtttcagaattataacttaggtattattaccgctaaaaattaaagttaagtatttattaattaaatttaagtatttatgccacaaattattatatacatgatatactatatatttgtaccgtttatatatatatatatatatataaatatattcatgcagggtatgtaatcactaattataaaattaattattaaatcttctaaaaaagataattattaatttcttatatcagcaaacatgtcttatatataataataattcaaaaatacaaacttaattatattgcatagattacataccgtgtgtgtatatataaaaccatacaactaattactccaataatgagatagatcggaaaactaaaataatagatctgtgtatatatacataacacaaaaatacattgaattgtgtattataaaaatataaacacctagtacttgtttattaattactaagtaaataaataaacctagctagattgtatttactgttatataataataacaccaacacaattaattcacctatattatacgaattttccatttttttttttaattaattgtactcttatcaaataaattagcataacacatataaaaatagtatatatatatatatgaggagtgttattgtcaacctcctattacaatctcttagtcaacctccacgtttaaaaacacatattagaatttattttttctcacggtgttcgttatgcttaacatcatttta

SEQ ID NO: 302812 - DNA, 3002 bp, Cannabis indica
ctgttttagtttttacacttttgttaaactaatgttgttaagtgtcaaggtggacatcacaagtgtacacgtgataaatttctaatagtctacataatattaattatttgaatatattaaaattattttaaattattttttttcaaaaaataaataataaaaattgcagcccatttctctctttttttctctaaaactatcgggaaaccactactataatgccttaactcatagagacgtcatgtgtgtacttttacaatttagtttataataataaactacaatttatttaaaatatgtggtttaattaaaattttaccatttaaataaagtgaataagaacataacattacaaatttttaagcttcggggatccccttttaaaattttacaaaagttgcccacttggcattacattcaaaatacaactttgagatctcaaaagcgacataaaatcatgtcccgacaactcgaccctactaactgaataaactgatatgtacatttgccgaagaagaccatcaaactcatagttgatctaacttgccatttcctttacctgcaccacgaaagacccctgagtcacaaagacaacaaaaaaagcaatgtaatatacattacgcatcattatacacgcataaccaagtaagcacatacgttaatccatcaacaaccataaatatcaaatatttgtctaataagacaagcttcactgctactttataaaatatttttttagtgtcgttgcctaataaggcaaccattactaatcatattgtctactaagacaatcattactaatccccttatctaataaggcaaccaatactaatctcgttgtctaataagataaccattatatataaaccttttaacagttttatgtagagttataactctttcttacatacggttatcaccgtgtcacacatagacatgcatataggtacaattgtgcgtttcttacctaaaattcaaatttaagtatactgaccaacctgagtggaactcgctcgaagattaaggccttacgtcacaacagcgataaaccaataaataactcattataacccattctaggatttatactaaaaattgaaagtttttctatcaataaaaaatgtggtaataacctaaatattgagaaaatataaaaactgcagcacccaaaactaagctcatccgggaaactagatcccaaccgggtacccaaaattttgagtacaaaccagtagaaccggttacctggattgcactaggaaccaaaaattttgagtttttaaaacttaaatctaaccccacttgtttcaaacttaaaatacacttccaaaacagttaaaatggtcatttcaaacatattattcagctcaaagtaaaaatcgtgattgtgtaaggttagagtgagacagtccatagtagagggagaaagttcgtcttgtaatctcggcaacagtatgagaagattcttgtaactttgtaaacaatatcaatatggttattgctgttctaactgagatgtagagcatggcctatggctcgaactcattaaatcctaatgttatattctccttgatttactactttaatatgttatctagttttcttgtgattctttgatagtgttgttcttgattgtgtgtttgttgatctagtatacttgtatcgtaaatcattaattgattcacaacacactcatgtaatacacaaaccctagcctccattatttctctatgcgctaatctctctctttaaaaaatttaccacaaagtttaagaaaaattgcccatgctagcttaggtgattcaaaggcctttttggaagatcatatgaagaacaaagatgaagataacggtttgaattccatgaaatacctggcatcagaaaggacaaaaggtaaaaaaattaaagggggagtcattaattccactgcgtgattttaagtatttcttatgtaatctttgtttatagtaaatcaattagtaacatgattctaagtgtaattacatgatttatttgttatattatgtaattctacatgaaaataaatcaattttattatgtgtttcttaacagtagattgcacataggagttggtttgaatcgaaactgatgcaagtcagaggatagtatgtcaatttgggtgcaaagtatttgtactagacccaggttgaactccgagatgtccaagtgacatcctcaatctcatgattaatctttttagggtcattgtgacttgttcgctttgtcttgttgaaagataacacttagaaacgatttcattagattttgatgcttacttggacaccttctaatgtccacatgggcactagcacaattcccaacacgcaaattgaccaccttatcaagaggtagtgccagggttgctctccttctgtaaaaaatgatatcaacatgtcaaatttctaggtaaacaaatatgttgttgaagagaaaaggagttgaaagatgggattcaaaaatagagaaaatgtaatttgatcgttttaaaatttacagcataaaattaaattgtatttcagaagtttgtttttgaaaatgtcctaccaatcagtggtggattgagggtataattttaaggtgggctaactaaaatttgcactgaaatttaaaataataattattgtaaaaaaaatatatattatattttttacttaaatctcgaataaaattattatacagattggaaaaaattttaacatctaaaaataatataatattttataattctcgtgttttgttatttatttgaaaacttgtgttggttatagattaaatataattaaacataataaaaaaaatttctaaaaaatgttattagtagattaaatactctatgttaaatattttgtagtttttttcaaaaaaatagatttatatatatatattttttttttgaagaaatttatatatatttatatagaataattatcttttttaccctctgtacttatgacactatactattatgccccttaatctat

SEQ ID NO: 302813 - DNA, 1798 bp, Cannabis indica
tttttatgcagtgtaatgcagtgcgagcagtttatgcagtgtgagaagtttaatgaacacccctactgtggatgcattagctgaaaatctaatctccaaaaggtggtagcattgtcatctacaaaagcaaagtatatggttggtacaaaaagaagctatttggctaaaagttctcaatagtgaattgggattcagatcagaagacatggttgttcactatgacaatcaaaatgctttgcacttgatgaaaaatcctatgttccataaaaagtcaaaacatattgacaaaaaactacatttcattcgagacattattgccaaaaggaaggttcaagtgaagaaagtgtacattgatcacaatctaacaaacattttgactaaatgttactcaagctagacactgtctagacttgaacataagcgataaagggtgattcctcatcatatgcaaaaggtttaacctatcttcaaagtattcaaagacctagtgcctataccaaggtatatttgttgaaatgtagtttagtcactaagtcaacactctctctttttctctccactggagttagttaagttagttgggttactctataactaacatagctcaactcatgtaaaatacaatcattttttataaagttcattcttagagaaatgtttagctttagagattgattacttaggtatatatctttagaaggagagactagttcttctcagagtgttgtacttagaaggcttgtggtgtgtctgatcaagctcttctcaatgttaggtttttttgtgtgagttaatctcttgttaggccttagggtaataaataaagagggtaattgggtaattgtaatgggaggaatttatgttacatatatgagtgagtagggagggtaaaggggtggtgaatgatttagttaagtgagcttttagctcttgggagagagctgggtctctcgaatacccagcaaagcttttatcttctaatatcaattgatcatctcaattatctctactttgctactgtttgtaccgaaatgatagaaaattcttatcaaatggtatcagagcatgatcttgtgacctccgtcacggcgccaagactaccgctctttaatggagttgacccgtatggttgggttcttcacatagaagaatatttccaagcttatcagaccctagaaagcaagaaggttgctgtggctcaagcatgtttaaaggatgttgcttggagatggtttcaagcagtggaggagcaagatccaatcaaaaattggttggaatttcgcatcacattatttaattgctgctcgaaaagtgataacgatccgtttgacgaattgatggctctccgatatgagaattgagtgctagagttttgggttcgttgccaaagcattcttcgttgaacgacagctgaagttctttcatcaaactagcacatagaaagaagagttgcaaaatgacagggaacaacctgttaatcttcttgagtctccaacgaaaatggtggaaatcaaggaatctaatcatggctttaaatctaagttgctctctgaaagagaagtagagaaaatatcaggccatcaatgttgggattttatgccctaaataaaacccatttcaatctaatctgatttattatcaatagaagattagaaattatttatgtttacatgtagttttcaaaagacaatgtccctgattcatcagtgcactagatttatactgatgtgataatcaacgataaagtgtacttacaacttggataagtgttatgttctttccagaacattggcaaagt

SEQ ID NO: 302814 - DNA, 2309 bp, Cannabis indica
aaagttacctgcattgccagcttattaccagcatgagaacctccattaatgacattgaaagctggcacaggaagcaccaaggtcttatttccagcaaggttggcaatgtgctgcaagtaacaagattaaatgaatataaacaatagtcattgcatccactagttaacagtgtaatattttctcttataccacacaacctaccctatacagaggaatcttcttcgctgaggcaccagctttacacacagcaagggatacagccagtatggcatttgctccaagctgaaataacagatagaaaacaccccagtttttcattttcatgatggtatttatatgtatatgaatatgtatttatattttttactcctctcttgaaaggagagagagttacactaaagtaaagtaggaagtccaaaaaaggaaaacagataccttttgtttgcaccaaccccattcattgacagttccatcaagctgttgaaccatgtaattgtcaatcttggtctgttctgttgggtcctgaaattcacattggaaaaaataaatgtcatggccttcaattccaataaacattgttttttttttcttttcttttccactataatgtttatatttagaaaataatacctttccaattaaagcaggcccaataatggaattcacgttctccacagcctaaatcagcaaggaattaaaagcaatagtcagattaactcaacaaaccccaaataatggataaaacaatacagaaactcttggcaataagagtgatgaagcataaataaattgacaccgtaggaatgtaaaatatcaattgtaaaagtaactgtataacgaggtaagaattggattttttatccagatatgcgacattgctactaattaagcaactaaactaccatttcaaaaaaaaaaaaaaagcaactaaactaccaaatagcattagttgcagcttgcatctaaggaattcaaacaattcttaagttttaaaatcaaaacagagcatataacaacaaaatcatattcagcacaatacactcaaagttgctataccttaaggacacctttcccaaggtaatctgatcctccatctctcaattccagggcctcatatatacctataaaggacatttcaagagtaaattcaaaccgtagattaaacagtatagcttagaatttaaaaaaagctcttaatgtcatagcactgatgtctaataccctgttgtattactattggtgtaattatatatcgggtctcatataacttaagaaaataacttttagagaatatggctaaccaatctagggcgccgcctataaaagttgctgggcaaatagcaatactctaaacataaaggtgcataaataatatgatataagatacaggtccccttagatgattaattgtgcaaataaataatacatcttattatacttaggatgtttaaaactaacaaaaacagagccctgaattatagtaagtacctgtggaggcaccactgggcacagccgctctggccaaagttccatcactgagaataacatctacctgaaaatcatcacatccacactcatatatcactatattggttataatagcagatatatatataataaaataaaaatcatgcgattaaaaacagcttaagtaatgtcttctacttgtaataatccccatcattttctcagcaaccaaacagtggtagttaagaagaaaaaacttggagtttcagatcaaaggaaaacttacttcaacggtgggatttccacggctgtcaaagatctgacgagctttaacgattttgatcgtgaccatgatgactactgaatgtgttgttctttttcctcttctcttccttaaaactcagaaatgagtttggaaaatcttaaaaagggtttgaaatgtggggggaagttggtgaaaaggtcgccacgtggtcacctatcacgggtgcctaaatcgagacagttgattgtgatactatgatgatgatccgacggctctgattgccctgttctttctcaaacacggttggttggtactttgttctacttcacttttctttttcttctgcatccgcacgctgatgtgggtccggggagagcatatatgcctttttaaaagggcattgctaccttctcacatgtcgcgttgcgattggttagcgatactccataaaaattattacagtagaatttttatccaaaaatacacttgggaccaaataaattatattctaattgagaggttataactcaatagagttagaaaaagaaaattaaaaaactaaaaagtatcaatgtaa

SEQ ID NO: 302815 - DNA, 1613 bp, Cannabis indica
aaacgatatatcactaactagctatagtggctttttgtaaaataaaaatgccttaaaacattttaattattcaaaattccattagagaaatgctttatttttttaaaaaaataaaataaaataaaatatgcagtacaagttataaattttaattgccactaaaattaaatagtttattaatatattaacaaatgtcacattatcaagtttttattatgtagtgggatatataaaaaggataattacacgaataaacatttgacaaaaagcataaggttaaattaattaataatttaattggttatagtgggataaatattcttataaattagcacttaataagtgcagcataatgttaagctccacaaatatccagaataatattatatttatatatatatagtcctaataaagagttaaagttaaaacataattaagcaagtgactaaactaagaaggaaaaaaaaaggatgaattaatatttgtaaatgattggaatgaaatccaattaaggcttgtgtgagctataatcacctctacaagtaatgtacacgattttctttattttattggaatgaagtccaataaaatataaaaaatttctataatcatctctaaaagtaatgtaccgatgtattatttatttttttatttatttgagagacttttttagtctattttttgatggtcgtgtatgagaaatttatacgtgtaaaataaattgtttgaatattgatttttatattgtaaaatgttctaagtttcttaaaattttgtaagatatcttaaacaattataatgtacataattataaataaaaatttaaattttttttaaataccaaaagagatataaatacatcggcacatatattttaagggatacatatagaatcatccaaatatttatatttaatatataggtatggtggcatgtgaatcacgtgcgttatggggagcaaagcattagagttgataagagtggaccaatcaatggagaaagacaattaaacctagccattattatataaattaattctttcaaaatagttaaatgagactatatatactctccttctcttgggaattatttatttatttattattcaatattactcttaaatatacacatatttatttatataagattttaaaaaaataaataaaaaatcttcagctctttggagaagcaagacttgtgcatatactaattaaatgatgttgttaattgttatatattatcaaccatgcaacaaccaaagaagttatgatatggctctcaagtgagtacataccacacatacactagaaaaaaaaatggggtcataataaattaatttattgggtcatagatatatttatatgtattgatggagagaattttattttatttattaatgctaaaatgtgacacataatcattttcttagtattatgagattaattagtgtgtaatgatatgtattgtacgatttattagcattatagtatattgatatttgatatataatatgcataatgtacattactataatattataattactaggaaacaaaccgcgcttcgcatgcggttatattttgtttattaataattaaattataaaaatatat

SEQ ID NO: 302816 - DNA, 1794 bp, Cannabis indica
tcaatctgcacatacaagaaacaaaaaacagaaaaatgttgccctagcagagcaagaatcaagaagaagattctaacagaagagagttagttagtacaacggttctcacagtatttatatgctgaagataataaacctaactaactaaacaaccagcaaggtacagctggcacaaactaacaaacttgcagaaagctgacatggcactaaaatgaaattagtgaagacagatgcaactaactacagaaaagatgttagaaaagcaaatgcagtttcagaattaccaaacaacagtaatatctaatttgccacacaaaacacgacacttacacatatgcttgcttcaagtgatcattattttattatcattactgcctaacatcagaaaacagagtatgcctttcatttttgcttaaaaactaactaagatgaatgacaaatactggttatttagatatttttatatttttgtgtgtgctttgggctgtttgtagcccaaagttgatacttattgggtaagatatttaacaaaacgccaaaatattaatacatttccaaagggtcatcttgattaagaattcaatttggttctttattggacattttgacttctctttttagtgcttatgacggtcaaggaggttattgttaaattttcttctttttttcctgttcattttcgtctctgcaagtcaatccttatgagactagagatatagtatttgtcctgctatgtgttatttaattttccttaaaaattattgttgtgttggtactaatattgatcgtctccattgagttgcagggaaagcaatatcttcaccaataggtgcttgatcaagcatgaagattggctggagatatagcctttactttacataaagacttctaaggttatttaattacttgtgtttaaaaaattttatttttctttgtcaatagttaatcttagcacgagcatctggaatcattgttattccaagaagttttatctcctaagaaacttcttattcactaatcattagatttgcagagtgaatgagatgatgcgtgaccaaaggggtaaagagaattggcaatcttaggtgataatttggacaagatttttggtgtgataaaagggttaacatggtctcctagagaaattatgatgaagattggcttctgaagagatatttttcagttcacatatatgcttgttgcactttactttcaagccttttgcaatatcagtatatacatgtataaagtcatgtttttgcgatgctttacatgctcaatagagaaaggtatcgaaatgttttttatgagactggacaactagaatggttaagatcactttggttgctttgcatattttattttactatttataatttacatgttttagttttctattttcttctttcattatagtgttaaattattacaagtttgatatttttatatcgttttctctatcaataaagattgaattcacacactttatactgatacttaactatggcgacaatcccaaaagaatatcttaggaagcacattagtacttcacatattattgtgaagttaatcaattttaaatcatcaagtaactaacataaagtttgattcaatttttattctgcagtttcatggtattattaaatatacaataaatgaaatcaacactgtagtaaagaatggattaattactacttaactgagtatatgtcaacataatagcttaggtttcggttttgctggaatgtacaattttaggtggtcgtttggttagaggtaatgaaatggaatgga

SEQ ID NO: 302817 - DNA, 1666 bp, Cannabis indica
ctacgtagtacgtaactactacgtactctctctctctctctctctctctctctctctctctctctctctctcgaaaagctttcttttaccaacccttttctggcttatatatgtatatatatgtatagatatatgtatgtgtttgtttatttaaataaggtggttcagccaaattctctatggtttaatttttgaaagtcatttggattctctcccaccccacctctttttatatataaagtttggtatcttatccacattatactatttatattatgttcatagtacttatatatcattaactatctggactcttatggtgtgtgtgtgtttgccttagtgcaaatctattattttctttactaatgggtgaaatgattatttcctcaagttcatatggtgacttgtttgttttattgcatcatttaggtgcagggactcccattcgacgaggattaggtggtatatctatgcttaagtggtcaccaactggagattattttttttctgctaaattgtatgttactcgaagttaactgcattctccacctgtattactcttagttaactgctaatcagggtttttttcttcttctttgttgttgttgttgctaatcagtatggttctaatcagtttgttagctcattataatcttgattttttttgcagtgatggtacattttatctttgggagacaaacacatggacatctgagtcatggtcttcaactagcggttttgtcatggtaaaggaagctgattttaaaattgtggctgaaagattttaattttaaagtctttgtttttcaactcacatgcaattagcttttttttttttgcccttctccctaagagagtttcttaatatagcataattttctttccattttggtttattattgtgtttctgataagattgataagccctccaataaggctgactaaggaggaagttgacaaatcaacaagttagttaggtgtcaccgtgtcagtgattagttagttacgactctgttgagatggtttggggattgtatagagaaatgagaatccgtggaagagtagagaagaatttggttgttctttgtagaggagagcctcttgaatttactcagccttgtatactgattaagtgctgaaggagaaggacctgcaacgacagggactactaaccctcttcttgttttgttcctagccatatgttatgagtctttggtgccttaccaatccctgtatttaataatacacaagtattttccagtagtttgtgtgtgatttgtatcgacaggatactagaatcctgtcagtttcattttttctcttatatcaaaaacaatatttgtatatatatatattgctagactaccaatgcaatttgtatataagaggaggtactagttgtatcatttcagtaatagcttagctgtccttttctaatatttctttttattaattgatcttggtggctgtagcttattttaaaagggcggaagtggcgtgtcttttgtcttaggctgctgtctataattagagggaaagggcactttgcaaggggcttttgtttactttgtttgtttgagttttattaggtttcttatttaattttattgtgttttattgggccgttttttttaagttaaaatttattgggctttttttaagttgc

SEQ ID NO: 302818 - DNA, 2998 bp, Cannabis indica
gtgaaaaattaaggaacttacctatttatttgaagtcagatttgaacttacctattttcggtacgattgcctctctctctctctctctgggtttctctctcgtctggtcactgccgataatcagcagctgtagaatcaccaaccacggcaggtattcaatttttcttctctctctgctctcgtctttaccataatcaacttttctttaggctcagtttatctccttttgtttgtagcttcagtgtttgactaaatgcctgaatcgtacagagattaactatattcttgtttgttcatcaagttttactaactaagtattcatctcaattctgttaattcttttttaccaagtatttatgcatgattagtattaattatgttttgggtagttttgattttgattatgtttagttaaagtgaagaaaaaaactgttttttctttgaatgtttgggcaggttgtacttagatttttgtaacgagttaatatattgcataaactcgaccaagaacaatgtataaccctaagtgggatggaataattcctatgaagaaaggattgttcatgttaggattgaagaacaagaagaagaagaagaataagagattagcaaaagcagtcatgaagaaagcaaaaagtaatttatccgaatcagaatcgatcatgagtgtgatgaacaacgaagatcttttgctcgaaatactgatccgacttcctgatttcaagaatgttatcaagcttagtagtgtgtgctttaaatggcactctctgtctcatcaaccacactttctccaaaacttcattcttcatcacagccttaaacaagaagaagaagaagaagaagttgttttggattcttcctatgttcttttgatgagaggtaattacgttaccactggtcccgaagcaagctcttgcttccacaaacgtacaatccaaaacatcttctccaatacatcaaagattctcttcccatctctgtccacaatagttttctagaattctttgatcggcccaaagctcacatattatcttcttttcaagatttgctacttcttgaagaaagactatttctattctgtgtcataaacccaataaccaagcaagtggttgaacttcctctctgtcccaaaacactgtacaatgactacacatgttttgttgaaggcattacatatagatgtggctttgtagctaataaccagggcaacttcaaggttgtgttaatcacttcagataatgctcctaatcgcgagtttcgcggatctatcttctgttctgagaccaaagaatggagttgttgtttcaaattactatttccattcagattatatgattggcatccaacacctattggatgcagcaatggagtcatatactggccatttgggggttcatgttttcaaggaatagcagcattcgacaccagtactactcaatgttgttcggttgtcatgccaccagagtttgacaccactttatggcgcaatgctgcgtttggtgttcgtcttggagtagttcaaggtcatttgcgtctgttgcagctgtttttagatgaagaggccgcggggggtctccatgttctcagagcatgggatttagttcaatcttattcatcgccatcaccatggattatggttaaagatgttagattgaaatggggagcatatgaaaatatggcattgtttcccattgcaatccatccccaagatgaagatgttattttcttgaaaagagtactaatcaatgataaggattataatgctcttgctgctactgacaactttgagaatgataataacaatgttgatatctgtctgtacagatttgggagaagatgttatgaacatgtctgttactgtccattcgccgaaaacactcgaagtcctcgcgttttgccgctgcttgttcatggttggcctacaagaatgcctcctctgcataccaagcatcctccaccaggttttagattatcaaattcatacattcatagtatcagatcgatatatcaatagtgtttaaactttatttaaatttatttgattaaagtattttgttgatgtttgtttcttagttcaacaaattatgatgatgagttgagactagatgtcattttttgttattaattttatccattttagtacatttttcagctgttgatagttgatttaattgatttagttgatgataaattatgataatgagttgagactagatgtttgtttccctataaaatgattgtatataaatatttactaaaagcaatgtataatttagcctttgtttagttttattattttaatttcattaaatttttaattattatataaaaaaaatcatattttatgaaatgattataagaaaactacgtgtgcagttgatttttaaaaaattaatcatttcagtgagatattttattaacaaaaaatatttattatattattattttttttttttgacaattaacattatattattatttcttataaaactacagatacttacggttaaaattatttatattattaatttgttaattatcttattttatatatatcaaaagtgtaagatccatataaaaataagtttaaatcaaaattttaaatagtatttatataagttttaaatgctaaacgatatacaaaatattatctttcctaaaaaaagattttaaaattttaaaattggtttttaaaacacaaatattcatgtgtcatcattaaatcgattccttgttaattagtataggattaggatttggaattttcttcataacctataaatataccaatccaaccattattattattattttaaaagttcataagctctacttcattcatccctacaagattattttcataatttcaaagtcataatttctacataaaaaagttaataatggacctatcaagggctcaaactctagctcaagagattgcgacggacatagcaaaagacaaaaaattggagaagtgttgtactcgaatcggagactg

SEQ ID NO: 302819 - DNA, 4426 bp, Cannabis indica
ttttttaatccatcaagtattggttttaacctgacattaaagggagttttagtgttagttataaaacgacactaaaaattaatggtgtcggttttaaatagacattaatagaaaaaaaatatatatgtattctttaagtgtcggttataaaatggcacctaaacttaatagtgtcggtttagaatcgacaccaaaaatgtgactttttgtcactggaatagttggttttatgaactgacattaaaagtataagtgtcagtttaaaatcgataccaaaagtagagtttgtagtagtgatagtaacttctaaaaaggtcttagacttcggaataaaaaacatcgtgtgtagatatgaatttttacacataatagtgtttaattatggaaagcaatttgacagtgatattcactaatttttgtgtcaagcatggaattatcaaaagcttttcaactgtggtcagacctcaggcaaacgaacaggtggaagctatcaacaagattttgaagacaaccttaaaaaagaagcttaaatcttgcaaagcatattggtcaaaagaacttctaagggttcgttgggcctacagaacaactgaaagaacttcaacagaccatactccgtactctataacatatggatgtgaagtagtaatccagttgaatccatagtgcctacacataagagaaacttacgaccctactcgaaaccatactttacttcaagagtctttagacctatttgaagaacttcgagagcagtcacaagttcaactccaaatgtgccaaaacaagatcgctagaaacttcaatttcaaagtcaaaagtagaagatttgaaattagtgatctagttttgagaagggtatttccaacctctcaggagctaagagtgggggtcttatgaccaaactacgaaggtccatatgaagttcaagataaaattggtgatggcacctatcacttgagaacaaaaattccaagagcatggaacgctgaccacctgtgctgtaactataagtaaattgggggtggccagtttcctttattttctttgattgttatttttcatgtacgccttaggacaggaaccatttgaataaaacaagaaagaattttcatttcatattcagtatttttaaaaattttgtcttgtaacaaaaattatctgatcatcaattaactattttatgatttcagtacaaaatttgacaagtgagtattgattatgctatagtgaaatataaactcagatttcgatataggacgagagtacctatatggtttatgcaacatttaggatttttatgcttaatgcctcttatttgtttaaatttatcacgagagtagaaaattttcatataggttgatatttatatgtcctgccctaaatataagtttctttagtaaactctcacatgaaaattggaatttgggaattaaattatattaaaccatataaagtagattcaattaaaattaatcacttaagctttaattattgttaagttcactttaattatttgttttctttttcaatagaaattaaatttcttttcttattattattgtcaccaaatagaatgatagatttaattatttgataattaattatagtccatgtggaaacgatactttgtatattattatattacttaattcgactacgtatacttgtgtattagaattttcacaagttttttagcacagttgtcgggaactgctttagttaatattaaatcatttaattccaatttggctttctcattctactgatgttcaacttgataatactcagccatgccttgaccatattttatccaactcttactatcttcttaacgttgttaatctttgggggataaggatctctctttttgcttatgcggagacaattattatgccttttgtcgctgggcttttaagtacgtaatcatatttcagatatttgcatactttttggatatatgtggttttatttattgaatttactatgtttcaatcttatttccagatccctgaagttctggttctaaaggcctgaacctttgggctttcgattaaatgcatagatttagccttttctttttagtaagccgtttgtattccttggaacatggttccaatggcccgaacctcgatattttaacaacttacttttagaaagatcttggtaagtattttttaatttagaattttgaaacttaaatacttatttaacctgaattaattaattattcgagaatcaaaattttttagcaagcgttactaacttttagaatttttttaaaacttaaatacttgattaacctgaattaattagttattttaagaaacgtgaatgtctcaattaaattaacttgagttaattacaaagcatgagcttgtaaattaaattaatctgagttaattacgaaacctaaacttccaattttttttaatttgagttaattacaaagcctcaacttacaaattaaattaacctgagttaattacgaagtatgaacttctaaattaaattaacctcaattaattacgaagcatgaaataaatacacgtagaaagtcggggaagaattaaatcacattaaaactgaaataaagagtcaaacaatctccattaacaatgctaattgaaagtctagctactcatggtcattaaaaataactaacaacaataaataaagaacatgtgggttgtgacatgttaaaaaattattgatgaaggtctccagagctgctttctgcttccaatttttgtccctcaaaattgttgcttccaatttccatccctcaaaataaagaagaaggaagaactcgtcaaaaagttattgatgaaggtctctagagctgctttttgcttccagtggacgtccctcaaaattgttgctttgaaaagtgtcaaaagggtcctttagatagcttttcaatagggttaaaaccctaaaatttgtcacttaaagcatgttggccgcaaaactgtaagagcatgttgcgaccgatgtcttttaaattctcccaagaatttgccacaggaggtgcattgcaacattgtagaggcatgttgcggcgcttaaagctcaattttgagtagtgagtgattaagagcccctgcctcaacattgaatcccaatgtggaggcccgcctataaaccttctaaccacaaccttattgccaatttttttccttttagcgctctgacattgaatttctatgttgtggtgctacttcaaattttccaattcttcaattttgaaagctccaatcacattaaatcttttgaatttttcttgaattgatctcatggtgctctattgacaagactttatttaattcatcctctttgtatattttttttctcgaatttattctattcttcttcaatattaaacctgacaaaaatattaacaactaaaagcgtaaaattacaccaaacacaactaaaatacactaaaaacactttaaaaacctacttaaacataatactaataaattcataacaacgcaccgtcattcctctttttcagatttgttgcatccatagaaggcccttcaaaagcccattgaatagggcctcttcttgcatttgaatgacttgttggttggctttttggtgctacttcccaagcctatgggtaatttctccttggtctactcgaaaatttatggattgttctccattttttttatttttggttggggagatgtgtgtttttgagttttaattatcaaaagctctcaataaaagcactaaattgttaactcaaaatggttagattctgttatttgtgttatctttttttaccgcgtgtctttgttatgatttggaagaacattgttgtacttggttttttatttgtgttaatgggtttgggtgatttctaaatggaccaagggtttttttttcaactcgggggtgtttcattattttagtttttccatatgcttcttctctagttccatctgttggtatctagggaaagtctgcccatttaagtgttaacaggtctgatcatgttcaagggagcatctcgatgttgttctgtttttatcccacctgcagagccctcttccctgggggagtttccatgatgggggtgttttattatgctcaatgagggggagatattgtacattggctggtatattagtgactattatgtgacagcatagcatcttagtttttgttagtttctcttttatattgttggttgcattgatcataattttccaagggggagattgtaagagccatatttttgtgtttgtcaaattattataagttttctgccatctagacagtcagtagttccatctgagtatgtctattactggtttatgggttagctttaacagatcagtattttcatgttaaaatatcagttgtcaatgagttgttagtgttggattttatgccctaaataaaactcttt

SEQ ID NO: 302820 - DNA, 4722 bp, Cannabis indica
attgatccctgagttatagggatcgtgctgaggctgaattcgctaagtattggtcactctgcacggattgccgaatactttgctctggacatgccggcgagatatcctgctcggactatgcttcctgagcaaatgttccaagtggattcaacacgtgatcattaatgtgatgccatgtcagagtgcaaaaattgggataacagtatgtatagtgattacttagtcttaacaagtattttacattaatgttcatactagtatcttatgttgatgacttagtctacaaggaacataatgttccagactaagataaaatgtcacaataagatgtctctaagtatcgatagtaagaggttaaatgtacacttatgtatgcattaaaccagactcctactattaagtgggagccatcaaagatgtaatcaaacaaggaacattagggagacaataaaaaaaaatctctgaatgtggcctatatgttagatgatagaggtgtatattagaattcttataactacaccaactcagaacttaatattagtgatagtggttactcttgggtggaggaattattttagaagagtgtaaaaacccatttataataatatagttccactagtgaagcgaaataacttaaattgttttttgaaaagcacaagaaagttattcaaactgaagaaattgcttaactagtttttatctctattccttttgggtagaattagagatgtgtcttctgcacattcggatgcacttaataagaagtaaagaattcagtacccttagaggagtaattcatttttaatgccatataatttaaatctaaccctaggagaagtcctataaaataataagatggttctcattcaatccaatccaacctaagtcattctagttttcattctttgtgagacaactaaagacttgagaacctccttctgtagaatgcaagtctccctctctttctcttcatattttcgagccatatagtgaaagagtacatgtccacccatagcaagtcaagtactcaatcatagtgtgtaagactatgaagaatccaacacttgaaggagaatcgggcttagatcttgataatactctgcaacagaaagaaacaagggttagttatctgagttgaacgagacatattattccacgtaatcaatgtaaggttttcttaactttatatgtgtttaaattccattgttttagagaattcatatttagggtgttaaacaacatacttgttagtaaatctagatcctggtaaaataatccccaacaatcacattacttcttatcctccacatgtcctcactaatggaataatgcaaggttcaaccatacacaacattttgaaagattcgggaataaatattatttgtgtttccaagaagggacacgtagaatccaagtcatgaccaaacgcccaccaatgggtccccaaagaagacaaagtgggcaacaccctatttagataagaccttccaggaacgtaccttagctacgtgatcagatgaccttctaccagtgacagctcgtattcggaagtaggcccagtactgcgatgctggaatagttagacaacatgttcctataagaccagtctagtttctctttttattcctttacatagataaggaaataactacttcccaaatcttaagagaagattgcatcaagctaaaaaggaaaaattcctaaaatagagatcaagcaattaatttacaatgaattgcccacaattataggacatggttttgactattttagccgtatccaatttgcctagtcaacatatcttctccttcgcgggatagacttcacgagaaaacccaaattatgtaattcaatttaaactccctaatagagggaaaagggaaactaggtttaattctctaaataatataaatatccaatgaatcctacagatttaggattgaattcccttgcaacactttctcaagaaaactcgagaacttatgcacattctattctcaaggtattttttggctcaaaggtacataataacactaactcgcggactaaggcttgttaacgccccaatcacctaaaaactatttgtgtctttctcgctcttctcttttaattgtttatttattcaattttaattatttataattatttttccaaaaatctcgttaaacatgtgattttcatatatactctctattatatacaataccttgacttagatgtcaccagcatcacaaagcccagtaactttccagagatctttctacatctcaaagtacttgatgtgtgctagattatcttctcatttagtatacaatttccataccaccatcttcaacttcagcaaggggaaggcattgattcatgccaagaatggagagcctcttgacctacctagttccaggtctgatgatttttggcagctaagccctttatcatatctcttatttgatccaagtgtgcttgcacatgaggatttgatgcaataggagcctatttgagtggactttcatgtttgggctacaaccttggattggtaaggatctggccaaccataccctaggaaagggtatgttcaaggccagtcagccctaggcttagcatttggctcttgctagccagccttgggttaggccactgacaatggtcggcgagctctaccctgggcagttgttcatggccggtcagctctatgttgggaatgtcttaccactcgttctcccctcattagctcatgcagcctgtatgttaacaggggtagatcacaccaattgttggggtttactagatctaactatctaaagtgattgttctcatttctctagttgatgttgtcttaggtgtttccaccaatttcgagacctaggcattaaagataggccttagaatgacttactccaaaatgttttggacaggaatctctttttgtttatcgtccaaaggtgcaccacttaggggctgctcggccaaaggttggccaattggggggtgttgttgaggcagaggtcccttgccgaccccccatgacatttgtttccaaagactagcaactcccatcacaatatttatgtggcagcacctgtccaccttcaggaaggaggaagtctgcccttgttcttgaagagcctagttggactatttacttgtagatcttgcccgttctttcgactagtctcccttggagagtatttctgatcagatcttgacctcccttggcagttctttcattgaattgccttatcaggtcattagcttctctattacgacagtctagccctaccaaatgatatcagaggatgtactcctagtcatcaatccatctcaaaaattcacgtctctattgtgtgaatgcatcgcatccaacaacacgtggttcttcaattttgccaaattggcatacatcctctctatgtatggccaattcaaagtcttctcccaaatacacatgaggttcaccaatggctagtttgccaattccttgccccatttccccagcataatagcggggacaagagttagttgtggtgtgtgggggctgcttcacattagcttaaccctcagtacgaggttctgatggtggatctaccctgggcatcagaggctggtcattatggtcagtagggttggtaaggttaacatgactagttatgttggtcgagtttcttgggcctgcttagttggcagagttggcgatatccattggggtcgtggaaattgtagttgtgggtggaacacgaacatcatgattagcagtcatagtgtcttgaggaagacccgatgaggtagaggttttaactgaagttccccttgtaatagccatggtgatagatcagatcaatagacaatgttctcagtgaaagcacaaaattgtttacctcaaatttggcaaaccgacagtggaatcgtatttatgattgaaatcaacctgtgtaaataactagatcaagcaaatataagggatacaatatttttatagaggttcgcccccatttgatagcggataatgacctactttccttttgtttgtatttatattagagagaatacaactcaaattacaagtgttgtcgattctggagtggctctcttaagattacaattgtaagaatcaagagggaaatctcaagtgtataagatgagggacacttagtctcttctacattgctaatggtgtgtagaagagagggtgagctagggcttttagtgtttgaacatagcacttagaactcagaacttaagacttcagaacatcaaagcataacgactttaggcttagtgtagtgctctttatgtagaagagcttacaagagattataggttgatagcccttaaaatgaggatatatcacctatttgttactcactaaattaataagtaagaaacatgataattagtcccaaagcataggtaagtaactgaagtttatcacatatttttgtgggttgttgaagcccatttcgtaattggaagtgttgtccaggatgaaagctgcaaaggaacaaaaagtgcttgctagaagagaggctggctaacctcccctttgttggaggttggccagcctatgttggaaatagggtcagccaggggtggtctagccaaatccccttggttggctagttcactgtctttttgtcctgcttaagtatttatagttctcatcaagtggtacgttgtgcatggtgacttggccttcttgctgacaagctgtactcgacatggcattaa

SEQ ID NO: 302821 - DNA, 1747 bp, Cannabis indica
aaacacagggtccaattggtaactttgtaaaacagagggtccaaaatggtatttaccctattaataacacacatattttccattattcgttaattaatgttgttcggttactgagaagagagcttctctcttgactgactcactcttcatctcctccggtcaagcccaactaccattctccaccgcttttctacttttcatctcttcataggtaacatttcatttctttctttacatgcttttattatataaatatatgtatagattctcagtcccaatatgagcttttttttttaactaatttttcactatttcaattattttgattttcttgttttggcaattttgttttatactaatgttaattgaaaaaaaaaaaaaaaacagaacaaagaattcatatattatgtaatcttgttctttacttctcatttctttacatggttttataagtctttttatatgtgcatccatccatgtatatattttccaaggaatttttgaaatgttgaatgtactgagcttagatttgatggtgaaaattacaagaaaaattgatacttatagtcgagttgatttcccaaaggaatgatatgaattagtttagttttcttggtttgaaaattgaagaattcatttttgtaattgttgagaaaagtacaagtaccaaatcaaatacaagtacaataaaacttggtaagaatcataataacaagacataatcgtaccattctactaatctttgagagaccttaatatggtagatttttggttgtagaacaagaaagaagcataagatatgtatgttttcatggatcactatacaattcttgggttgccaactggcaaagaaggtgctaaggttacaatagaagagataagaaaggcatataaagcaaaggccctattgttgcaccctgataaaaactcacatgatccaaaagccaatgctaaattccagaggctcaagtgttcatatgacatactcaaggatgcctatgctcgaaaacttttcgatgagcagctacaaatgaattttgaacatgatgaggagagaaggaagatggaatctgatctagctagagtaattctttttttgtgtgtttttcctgttttattgattactccttaatcaggtgaattgttgtaactcttttgtgttataatgtttgttattattagaataaaaagaaggaagagaaggcaaaagcagctgtagcaaaagcgaagaaagaagcaagagcagcagaaaaagaagccaaaagggcagaagaagttgtgaaagccataaatgaagcaatggcagcagaagaagcagccgaaaaggcaaatgatgaagcggaagcagctgtaatagcagcagaaaaagccaaaggaaagtctaaagcagcagcaagagcagcagcgaaagccaaagaagaagcggaattagcagcagtagcagcctcaaaagccattgaagaagcaaatgcagcagaaaatgctgcaacgagagcaagagcaagagcaaaagcagcactgaagtgaaggcttacaaacttgggcccttattatgaccaaatcccatcataattttcatctaatgagaattagatctcaactcaaaactcatgaaaattataatgggatttggtcatgactcatgcccaaacttggcattttttggttctcatactagccaagactgtggttctccatcttccaaaattttgtgaaagcaaaataagtttgtgattcatgagatatt

SEQ ID NO: 302822 - DNA, 1265 bp, Cannabis indica
tttttttttttaaattattttactttttatttttgtataaaaaaccctattttttgatatatttaattttctaatattttattgatataattatcactaaataaaatacaactataaacaaagcaggatttaatatatcgagtataccatagtttaaatttaaatgtagaagtattaatattagaccacatcaatagtattaatgtaacaattgtaccacacttaattatagatagtacttttaataattaatggtgcaaactctaaaattaaactcccacaaaactagagagctaggttgtgcccggatatagatacacataatatatatgttattttcatgatggtgatacatataataaagagtatgtatgtatgtatatataggtatataggttggtataggtggagagaatatatataccgtggagaaaacaaaaaaagcttttttttcggtttcacttggttggttgggtggtagcaggggaatctaagcagtaagcgcagtaaggactaaatcaaatacactgtcactgtgcatatatatgcagaaagagatggatggagagcttgatggtgatagaccatgcatgtattatttatatatatatgacatatatatatatccctatccctattacagtacactatacatatatgtgtgtgaatgtatgtatacatacatgcgtgcggatttcgtttcaagatcattctgtgtgttgtttgttgtattagagtttggtgaataagcgagtgagtgtgagagagaggttacttaggggaatggattgggggtatatagggatctctttgttgttgttgtttttagtctactttttattctttatgagggaatctctgtttgtttgtttctctaacactcagttcatgtcttggcatctttttgacagctttcttcatatcatcacttcttttctcggaattattagaatgtattgtactaagtttattcactatcatcactcttctttctcatatgtaatgtatatttatttatacttgcatatattattcttcttttcctctctctcttttcttattcttcatatatttgaaaattgacacgtatatatatggtgtcacatccatagacatattagtcatgagttagatgtatgcccgtttcccattgtatatatatggaacaattctgaataggtaataggtattaaataaagggaaatttatatggtatactaacttttactatttttttacaaaaatgctgtcaggcggtatttttt

SEQ ID NO: 302823 - DNA, 5423 bp, Cannabis indica
atttttaacgaccaaaaaagttcaagggccataatttggtacatgtcaaagttcgaggggaaaaattgctaattagccttaattttaagaatgttttactttatgcatatgaagtggtgagagaatcttttaagaaaataattatcagtgtatgaacaatatggactgaaagaaataagattactcatggtcaacaattaagacaaccacaaaaagttgttcaatagattagccaattattatgagtctatcatatcagcaaaagaaggcttcaagaaaagcctccaaacatatagcaggaataggggcctaaaagtgattaaggagagatttctcacacaattcttatggttgatgcaacagtagtaaatacaacgagtttagttagttttggtgctattagcatatcagaagataatagggtcatgtcagtgttatacaaacctctcaaaggtcaattattagagtgaactttaaggaaaatttgtaatgaatgtttctgtagttattttatgctctttatttatttttgtattgatttatttcttgctctctttggtcttgtgtatgataacaaaatgtgtattttggatcccaatattgagttttttcattcttggtgattgatttaacacattttatgaaataataattattggttaaagtccatgatttgttttatgcaacgaatgttgatattttttctctagtgaataatgaagaagaggaagatgaaaatcaaatacttccttttggcagctacaatgaggttggagaacctgtcttcgatctgagcgatgtcttggtggagggccaagactatgttaatgaggagtacaaggaagctcgacccatgagcaccaaagggacgaaaggtcctctgtgggtctcacctccatccattctaattttcatgagattgactaatctcttcgaggaaggtagaggcattttttcctagtcccaggcagctagctacaaatcctgtgggtggattttgcacatggtcagggcctcatgctaagaattttgcaattctacccttgcatccatatttcaaggagatggctaactattacaagctttgttcgacttaattcaccccaaaggaatcaagtatttggtcgcactatttgtgttgtacgccactcaaggatggggtgagccttctgcccacaacaccaactagtgttcgatctaaaatcaagtccaaattaaaatagattagggtatttctatttcacccagaatgagtaccagtggctgagtggcactaccaaaaaggtggtgttccaacatcggtgggtttatcgaagattactactttgtgaaagacatgggtaccgaccaagtttccttccagcacattcccttctactatcatcctcccttcaccctacgtttaaggtcaagagctcaaaagattctttaactgccagaagtggctcaaaacatttcccttctaaccaccacatctcatttcatcaagtatgagctttacccatctgagaaggttcaggaacctgaataggtagctgagaggggttagtttcccattttggatttatcaattttaaccacctaaaggataacctccgtgttgtctttcccgattattgtgaaggaaagaaaactaaggaagaagtaaggaaagcaaatgaggattcttctaccgtctaggatcaagaaaatcttatcgctcaagactcaacccttcagttgtaagaccctagcactcccctggagtgagtttttaaaccctttttttatctgttcggcctatgggtcttttatttggtacaatatggccgaccaagcagcctttaaacttggaaaaatatttttatttttcttaagacaaccgactagttaagcagcttttaatcccaaacttatcctgcttcattatcttaacataaataatttcctttaattttgaattttgtttcttgctttagcttattttttaccaatgcttgtatgggtgtaagtgtaagtgccccccaagtgactgagcagacttttgactaatggtcacttatatttcacaagttttattttatcttctcgacttttcggtttaggaaaaccctgtgtacacctattaggtaattaaataaattgctctaatttgtaagagacgtaaaattgacataatttgaattataattgctatctttattcatttattggtcgatatgtgttgctaccgtggtaacatacatttattaaattataaaaagctattacatgatccatctgatctttagctaattaaaacacagaaattttgaacggtttattctgctaaaaaggcattgctcaagagcaatgatttttaaactaactatagtttgaaagtagtcatgtgaccttagcacaagtgttctctaaacctttgagtgaggttcactcagaaagccattacttaagagtaatgttcaagcattgtgaaatttaagtggtccctggaccttttgcacttattggtagtattttcttaaatgttcaccattccaataccttggtaatagaactagctccatgttttcattatacgaaccaagcttgtatgctccagattttgtaacttcagttacttggtatggtccttcccaattaggcccgagcacacctacgacattatcttgtgtgtttaggaatacccttctaagtaccatgtctccaacaaaaatttttctttctttcacttgcttgaagtaccgagccattttttggtgataagttagtagctttagatttgttgaatcacttttttcttcaacttcatcaagtggttctaccaggagggcatggttagttttctggctgtaagttaatcttctatgggatggaaattctaattcaatgggcaacattgccttacagccataagccatggtgaagggtgtctgctcgtttgttatcctttcagttgttctgtacgaccaaagtacctcgggtagttcctctagccagttcccattggcttctttgagtcatttttacatgatttctttcaatgtcttattgatttctttgacttgcccattttttgggggtgtgcgactgccaagaaactctttatgattccatgtatcatgtagaagtctataaacatctggcggtcaaattaatttccattgtctggaataatttttgtggaagtctgtaccggcatataatattttttaccataaattccaaaactttcttggatgtgattatttccaatggttcaacttctatccatttggtgaaataatcaatagccacaattgtgtattgtactccaccattttctttgggcaattgtccaatcatatctattccccatatagcaaaggccacgagctttgcatctacatcaactcgttaggtagtgctcgagggattttggaaaacttttggcatttgtcacatttttttcacataggcctttaaatcttcaattgctatcgtcaagaagtaaccttgccttactgttttcttagataaactttacccacaggatgattgccacaaaagccttcatgaacttcagacaagagtcatgcaacttcttcatttgtgacacatctcaaatggcatggaaaaacctcttctgtacatcacatcatccactattatatactaagcagcctttctcatcattttttgagcttcattcttgttgcttgaaagttcaccagtgctaagatagattgtcatgggagtcatccagtttggtgtgttgtctgtcatctcgatttcctccgtgaatgtgatgttgggctcttttagaaactggattgggaccaagtttactttgtatattacatattttcttgaaagtcgtgctagtgcatcaactgttatattttttcccttggaatctgcttgagggtataccccttaaattatgtgagtaggttgtagatcttacttagatatgccaccattatttatcctcgagatgtatattcccccaagacatgatttaccactaactatgagtcactacaaatttctaaatattcatcacatacttcctgagcaagttttagactgacaatgagtgcgtcatattttacctcgttattggatgtcttgaactcgaacttgattaacccgtgcaaggattgccctagttgtgatgagagcaatcccagctctggacaactggtcagtggataattcgtccacgtgtagcttttaaattagcttatcttcaatgctttcttctagtgggggtgatttttcttgctccttttctggctcagtattatcttttgaacttgcctatgcattcagccacaaaatctctcaaagcttgtccttttactattgtgtggggttgataggttatttcatactgccctaacttaatttcccatttgagcatgtgactagatgcgtctacctttagcaaaacttggcataaaggttggttagtgtaaacctgaactggatgagcttagaagtagggccttaactttcttgtggctaagatcaaacagtaagtcaatttttcaatcaggaggtatcggctctcagcctcaactagtcttttgctaatatagtagactggatgttaaacattattgtcttcttttatcagtacgacacttatagcatgctcggtgactgcaaggtagattcctaactcttcctcggccaagggttttaagagaatgggaggttctgcaagttttctttttagttcttgaaaagcattctgacattccttcgtccactcaaacttcatattaccttggaggatgttgaagaaatgaacacactgatatgttgattttgagacaaatctgcttaatgcgactatccaaatagttgggatttgcacttctttgacctttgttggcgattttgttggcgacttcatatccaggagggcttgaattttctctagattagcttctatattcctcgagcattaacaatgaatccaagaaacttacttgagctgaccttgaaggaacactttaagggattgagtttcatgttatattttctgaggattttgaagcattcatccaggtcctctatgttccccccagccttcctagatttgatgaacatatcatccaatacttccatgttatgtctgatctagtccttaaatatcttgttgactaacctttggtaggtaggcccagcattcatgaagccaaatggcataactttgtagaagtacagaccaatatatgtttggaaacttgtgtgctcttggtcaggtggatgcattcttatatgattataccctgaataagcatccataaagctaaagatttcatgggcggttgttgcatccataaggtgatttattcttgaagtggaaaacagtctttagggcactccttattgaggtcagtgaaatcgatgcatactcgccaatttttgtttggcttgggtactagtacggg

SEQ ID NO: 302824 - DNA, 1741 bp, Cannabis indica
atataatcaatataagtagtccgtcctcgaattattagttcataattagagttggttaaaagtaatatttttcccttctaattatctcttgaattccttatgtaccattaattcaatgtgaacagttaatctataatccatttatagatttagatccaactgttagcacgcctaaaattaacactataagagaactaatatttcatcctctttgaaagcttggattctaatattgtattacatgtttccagccactcatgttatcaagctctcaaaacaaaagttgtaagaatcatcttctctaaaaaattttgatgagtgaatcaaataactcaataaatacaaataggagttcgtgtatactcaagatttaggcatatctattaatgatcatcattgtgatatgaataattctttcatgataaacaacatgtggatgaaagatgctattacatatcggttcaatcatgtataatcaaattatgcacagtaattttaccacatgtctatccacatgaatcatatgcactagattatagtgcatagtaaaccgtactaggttattccatattaaagattccatattttaatacactactgacttattttattcacattgtatgatcttaattgtcttgtactaccttactacaacataccatctctatatgaaatatagaatttttagatatatattaattatacttctataattaacatatttatttatcttataattgtatttcatatattctttaatatattatccattaattacttgcttttaggacataaaccctaacattataaaggtggttttgaaaaatgttgggttgtagcatatgtttatatgtttcctgatcaaaatttagagccctgggacatgtttttttaaaaaccaccaacaaaaagttagctttgatctctttcttattttctcctagttggcttggttttgaagtaaccgtaaatgtctgcaactgtccatagctcccactcaggggtggattcaatgggaaatgggctaagttgatcagcatcttgctcccctgaccattggtgctcatactgtaaaccatcttccaagggatattgtcaagtggatgaatgggaccctacaacattgttactcagatgtgatgccacagttgatgattctaagtaggggtgcggtctcaagggtctggtttgggacaattctagtcatgtgttaggagctaatgtgatttatcgacatggatgggtttcggttccctttgctgagtatttagccattaaagttgggcttgagttgctctaacaattgtaggtccagaatttctctattgcaacagattgcaaccaaatcattcctcaaatgtgtcagtcttcttctaatagaactgattggagcactgttttggaggagttgacctctaaaggtctactgtccaattgttacaacatttccacacctcaaaacgcttcaatcaagctgctcattacctggcccagttagaaaagaataataattgtaattatctttgggttgaggatgttccctctgttgcttcctctatttttgaagatgattagctgaactttctttggttattttgttggtaataaaaagtttcatttcaaaaaataaatataattcagggctcgtttcgaatgtcgtattagatcgtattgtattgtattgtattgtattgaattgtattttatacaatatttttatgtaaaactatatgtggtatta

SEQ ID NO: 302825 - DNA, 5024 bp, Cannabis indica
attcattggaggaaaaaatgttggtggctgtgactgtaaggccatataagtttccaactttcattgttttccttatgtttagtctcttgcttgttttgaacttaagctctcattagtcttgagcttgatcatctttatttaacagaaatgaaaccacacccttataagtaaaaatctcttttgggattattgcagcggttttagagaagcaccagacaggccagcttgttcctcttcttactgaagctggctccattgaagttaaggcttctgggctgtgaatattaaggccaccatagccttaatgatgtaacaagataaacatggtcgcccttctcttcaaacaacctttgtaataatgttaaaaacagggtagatgatctctcagagcaaaacaagtgtgaatttccaatgtttgctgtttaagagtttactatgaaaaaaatatatagaaaagaaaataattacagtattgtttgtgtttggatgatgtgaaatacaagtactcatcaaaattgtaatggaacagtgtttgggattttattatgttcacttttggtggagactatctgatttttgactaagtcactaagctaattatttacagtagaaaaagtatgttgagctgagctgtcgcctccataagaacagttctagatatttaagaaaaaaacttgttaaacctatcatgggttaggtggagtggtcaattctacagtccatttatgatgatattcagttgcatggaatggaactgttatgttcttgactaggtatttgtaagttttgctttgttgaaaagttaaaacttggagaaaaactatggtgggacacctaggaaaatagttttctaaaagaaactgcttagtttaatggttcttttatgtaacaaaatatgttagtaatacatacatatatatatatatacacattaataatgagtaaaaagaacattgtgacattccttaatcttagttaatccgaaaagcgctatatagaaaaggcaagtatgattgatgccaccgctaattaaaaccaaaaacatttggccaaatttttctttgtatgattcttttttttcttccctcggttcacttttatcatagtaaagccaactatatacgaaatcacagctatattgggtgtgtgatgattgtgtaggcctactataatggtgatggaaaatctcaatgaagatttattatgctttcttgtattagtcataattgaaaatattggatatacacgcattaattacgtgtcattatggtagattttagagtggctaatagccttatactgtttttgttgtttgttctacaaatcctttagtgttaaaatttaaaaacaataaaaccaggttacatggcacacaattatctttgagaaaaaatgaggaaacaaataatatacaaacagaaaaatttacaactgaaaagagaaaaaatacctcttcttgatccaaacccctctctaaaataaatatgtgaacataagaattgctatggtttcattagactaaggtatgttccatagaatcttgagccattttgaggttaagaatgcatgatgtggtactacttggacttttcttattatcttgtgaagtaaccaaagctagagagtccattttccagtactcaccagttctccacttttcccctttaaatgcccatttcttctcagattctttcttctgctgattttgatcagtcccaccaatgccataatcagagtttgagattgatacttttctccagttgcaccagattcgtagcataatataaagcatcactaaacatattagtgtagatgttaatacaatggccactactataccaactacttgtgaatttgatagcctccctttaccatgctcctcagattccaaacatgaaactaatggtgggccacagagtctgtgatcattacccatgaaagagctcagtgggaatccagaaaagattgttggtatttgtccttggagatggttgtttgaaaggttcaacttgtgaaggcttgttagttttccaagtgaagaagggatatctccttgaagctgatttgaagacatgtttagtctctctaacttcatgaggtttcctagtgatgatggaatttccccagctaacaaatttttgctgaggtcaaggattacttgtaactcagtcaaccctcctagctcaactggtatagaacctgtcaaagagttctcagagagcctcaattcatatagcttcttacattgctggattttcactggtatgggtcctgagaagttgtttctttgcagattaagaacattgagagatgtaagatctccaatctcttgtgggatttcgctggagaagttattgctgtacagggaaagcttgagtagtttcgaacagttcccgagttctttagggactattccatggaagttgttagatgacaaatctaactcacctagctcttttaagcttcctaaccatagaggcattactcctgtgaactggttattttttagtaaaagatgctcaagctttttacagtttaatagttgaggtaggacttctcctatcaaactgttgaatgataagtcaataaaattgagctctgtgaattgagagaactcagaaggaatgctgccagtaaggcggttttgagcaagtcgaagacggcttaagttcctagatgtggctaggctaattggaataggtcctgagaaactattgtttgtcaaatccaaagcagtaagaaaacttgagccagtgaggggaaagatgcttcccatgaatttgttatgggaaaaatttatgattttgagattttttagaaggaagagagatgatggaagaggaccttcaaaggagttattgtaaagagtgatggtgcttagctctgaaaggaatctgaatgtggatggtaatgaacctgagagcttgttatcagctagagccaagatctgtagctttgtgcagaaacccaagcttggtgggatgggaccagacaagtcattttgcctgagatgaagcaaaactagttgcttaagtttcccaattgtctttggaatcaaacctgaaaaatggttaccaaaaaaatcaatttcttttaagcttgagcagtttgttaactctgttggtatttctcctgtcatctggttatcatagaggtatatgacttctagcttctgtagttttcccagctccactgggattctgcctgtgatcctgttaccaaacagataaagactttctaagttactcaagttaccgatttcaggcggtatagttcctgaaaagctgttgttattgagcaccagatctgtcaggctctctaatttgtccaagaaaggtggtaattctcctcctaagctgttatctgaaaggtctagctgtaggagtgaagagcagctcaatagctctaatggaaaactcccagagagcttatttcgagcgagaagaagttgttgcatacttgaaatgttgaggcagaagtttcttggaatgctaccagtcaatccattatcagaaagaaccaaagctgtcaagctctttaactgagtattgagaagattaatggttcctgaaagcttgtttcttgataagtcaagtacttcaagcttagataactgattaagctcaatgggaatttgaccactcaatctgtttcccagcaaacttaagtacttcaagttttgaaggttacttaatgaaacaggaatcgatccggagaggctattgtttgccaggttgagaacttccagtgatttaagagatcccaatgaaggagttataacaccttcaagcatgttgtttgatgcagcaaagttctgaagctctttgcagccactaatctctttcggtataaggccactgagactgttgttctgcagatcaagagatgtgagatgcttcaagttaccaatctcaactggaatacttccattgaattggcaaaaggcaagacccaatactctcaactcattcaagttagtaatagctggtgtgatttcacctgataacatgttgtttcctattctaagaacttgcaagctcttcaaaagaccaatctcttctggaatcataccagatagatagtttgagtgtaggagtagtatttgaagattttgaagttgtccaagctcagaaggaatttcaccggtgagagtatttgatgacaagtcaagtgtttggagagacgagagccgccatagctcacgagggatggtgcctgatagtcctgcccaagataagttcaagctaactatttggccatttgaacatatcacaccattccagctgcatgcattaactcctggagaccagttttccatgactcctgatggatcaactagttctgattttacttttagaagccaagaggaatcagtggaattgtctccatgaacaccagcaataacagcagcagtgatgacagaaaagaacaagaacaagatgccagccattcctaacatataaccaacaaagaatatttagtatttacacttggaaaacttagttccatgaaagacaaaaatcaagaaaagagtgtcttaactgttataactcaagtttcaatattcagaactggtaagataattgtagagctggggtttttatgtagttaacttgaagcaagtgtttatggttagtttacatcattaggctttaaattataatttctttgaactaacttccatgtatatatatatgtcatattatattatattatatactaattactttttgtagttagctaaaaggtgtgagtgcatctctactttttattctctaagacaacatggaatattattgcatgtctaggtagattttgagtgtgaagaagtgatggagataagatagtgatatgggcattggtgaaagcttgaaacaaaaacaaaaaggtttagtaagacccacttggcctagatagaaaagtagagtggggtaatctctctataggtttctatgatgagcttttagaatataaaatttatatatatagaaaaaataaaagataattaaaaacttaggatgtaa

SEQ ID NO: 302826 - DNA, 1297 bp, Cannabis indica
cccaaactacctaatatagaaagggagtaagaaagtcctctcccatgaacttcaatgagaggttcctactagacttactatccagaaacaaaaaaaaaattagggaacattcgttccagacagaaactcaggaacatcgaagaagaggaatggaatagaaatcaataaaatacccaaaaccagaaggattttgagcacaggaaaattttgccaacacttttttacaaaatggctgatcccaaaaattcctaacgtggaaacctaaaggcaatacaacttacaatgcctaaatctaccaacagtataaatcgtacaatcagagaatcctaatttcattcataacagaacatgcaagtacaatatatagcagaaaatccaaaaaccacagtcaaaatacaaaaaaatcaactgatacgtacctgataatggaacagaaggagccaagctagtcattgttgggttcggttgaggaaattgagcacaccttttgtgaagacaatggacgatggtgatcaacgaatcaatttatacattgaaatctagagtcacaacttcttttagcgtccaactctcgatcactgggggttgacaattcggaaatttttgagccttaatccttagcagaagttggatacaaaactggacgtcatgatctagtttgatttaggttgttttggctctaggttcaattctaactctccaagaatgcaatgaaaactcaaagcgctaaagatgaaagtttaaaattgggggaaaagtggtaactgaagtcttttaacggtatttatacttaaaatggtgatccaagtgaaggaggatggacgatccatgatcatatctctgaaagcacaaactatatcaaatggttgggaactccagcagtcaagtgtgtcaatacaatcaattcgccctacaatcgaggcgcaggttgatgatgaatatgttgtttttaattcttgtgccaaaaaatgaatagccatcaaacaaaagcttttctggaaagtaactgttggattttatgccgtaaataaaatccatttcaaaataattagatttactaattaataaaaattagaaatcattttatgttgcatggttcacatgatttatttcattattatatttaatgtataaattctattaagtccagaatatatataattatatatttattcatgattatagtgtcgtcaacacagtgaaatataatcgtgattatatgttcaaaagtttaattctcatgatttgtcagttcactggatgttgactaacatgataatcagcgataaggtatact

SEQ ID NO: 302827 - DNA, 7819 bp, Cannabis indica
ggttggtttgaaaaaatagtcaacaaccacaccacccgcaccccgaacactcctagtactgactgtggaaacgctaatgtggtcttgatcccaaagaagaaaaatccaaaatttatggtggatcttcatcctattgtgctatgtaatgtcctctacaaggccgtctcaaatattttggagaccctttctaattttaaaaagtatgtaaacaaaaaaaattataatttgcaaataatattttaaatatttatattacgaaaatatattttacatatttaaacacccaaaaactcaaataattttattaaaattgttattatttccaatacaacttcaagatatcaacattctatttactatttaattattaaatattatggaaaaaaattaaaagggaattaaataaggaaaagaaatcaaggaataaaaatcatattgcttttttttttctttttaatttggcatgatagaatgttgggttaaaaaaaagatgacatattgggcttttttaagttttgggacctgttgttatcaaaaaaaagtttggggccctctgtatcaacacttcttgcacgggtacatggccgactctggtcctctataaagttattacaaaggtcatgtcgaaccgtatgaaacctttcatggatagtatattgtttcggagacccaaagtgctttcatcccaagtattttatcttggataacgtcatggttttctttgaagtcctccactatcttaaaaggaagagacaaggtttacatagtttttatgacattgaagcttgacatgagaaaggcttccattagaattgaatggtgtttcttagaatcgatgcttcaaaaagttggttttgcggacaaagtgggttcaattgattctcaagtgtgtttccctcggctcgatactcggtggtacatgggggtagaacaatgggccctattattccttctactgatatcagactaggtgactccttatttccttatctctttattctatgtgtggaaggtctctcggcgctactaaaaaatatgaaagacgtggttggattcatgggtgtaaagtggcaaatggagctcctaaaatttctcgtatgctttttaccgatgatagttatctttactacaaggcaactgtacaggaggcgctctgaaagttcaagaattgttgagaaagtttgaatcggcttcaagtcaaaaagttaatcttcataagtcatcaattcttttcagttctaatactcatgagcatgctaggatctatctttgccagctagtccaaacgcagccagctgatgagaatagtctctacttgggtcttccgagtactttaggtcgtaacaagtcaactattttggggcaccttaaagaaagagtctgtaaacatttacaaggttgggaaggaaaatttcttttgaaagttgggaaagaggtgttggttgaattggtagctcagtcattacctagtaatgcaacgaatgtatttctccttctattagaaattacttgggatattgaaagtttagtggcaaaactttggtggcaaacgtccaactcgcctcaccagggtattcattggttgtcttgaaaccgtctttgtaatcataagaacagagggggcatgggtttctgagacctttaagattttaatttggcccttttgggaaaacaagggtggcgtctgcttactcgttcaaattcgcttgctacccgtgtattcaaagtaaggtactttcctaggggaacttttctcaatgcttctcttggtaataatccaagttttgtttggcagagcatttagaggctcaaaatgtagttcaggatggtctttgttggtgtgtgggagatggttcaggcatagatattcttggtgaaccttggtgttcgataaagtgaacccatatgtttcttcatctcatcgtactttgctcaatgctcaagtttccaattttctcagtatggattacttgatctgggatatgagagataatctgatcaacaattaattctgaatattcctcttcgtgtgtctaatgttaatgatcactacgtttggtccttaaaagtttctagtttatttacagtcaagagtgcatactctctgctccaaaagaatagaggtcgctactttgatagtgaagatgtagtgttttggaaaaaaaaatgtggaaactgaaggttcctcccaaagtaaaaaacctgctatggcatgctgcaagaggctaccttcctacgaaaattcaacttcagacaaagcatgttgctattaattttctttgtcccatctgcctgcaggatgatgaatctatcttgcacattctagtcacttgccaaatggaacagagtcggtattggtaccaacatagtttatgctggtaatttctttgactggtgtgtggagtcctttaaatcgctggattatgagattcaatgcacgcaggaatgcactctagctatgctttgttggcaaatgctaggaatgatatcgtttggaatgggaaaatttttaaagaagagaatatagttgcaaaagcaagaatttttcttgatcactagagatgtgctcataactctgattttgagtcgtcatggcctagttttcaggcaggtgatggaacggagcactggactttacataggtaaataacattaaggtcaatgttgatgtaactttatttgattcggatcataagtatgggttgggactggttgctagagatgaaaaggggctgcttattgaaggtcatacgttattttcacatagaacgattgagccagaattagctgaggcaatggacattcgagaggaaggatagatagaacttaatcatgttcaatcagacactccataacaaaaacctaatccttctaattcatttgcatctcctgaacacaatcaaaccaaggtgtcctatacacataattatggaatctcaggacatatagagaagtattataaattgcattgatatacacctggtcataagtttttttagaaaatgtagtgtggtatagttcctccaaatgaaaatccagcaatgtgcatattgaccccactagcatttagtgcttatctctcttcgtctacaatttagtcaattcaaagtcaattacaactgtcaaagggagaagtggactcttaatgaggattttattttgtgttcaacaagaagaaagattgaagcaagagaagtttgaaagtgctcatttggcaagcacctctaaagataagggcaagaaaagaaagaatgaggcttctaaggataagggtccagagtacataagaaataaactcaaactaataatgatgatggttatttcttttgcaacatgaaaagatacatgaagaaggaatgtgctaagtacattgcatggcgagcaaagaaaggtacttttcttacttttgtttgttctgaggtaaatttagcttcagtaccaagaaacacatggtggttagattctaatgctactactaacattagtgtttcaatgtagggttgcctaagttaccgaaagccaagtgatattgaaagaagtatttaagtgggaggcagcaagccagtgaacgtggaagcaatagggtattttaggttgttttaagtattagttacaatttagacttaatagatacttttgttgtaccggtatggagttatgtttttgtttcttgtttggacaaatttgattattgttgttcatttaaaaatacttattttagtttatctattaattcaaatattgttgaaaatggttctcttatgatttatgacaagttatatttgcttgacattattgcttcttataatgaaaccttaaatgtggaatcatgtggtactaattgttaaatggataatgaaaaatcaagttctttgtggcacaaatagttatgttacattcctagaaatagagttgagcgacttgtgtctagtggaatattaaattcaattgatttttcagagttaaatgtttccattgaatgcatcaaaggcaaacagaccgaaacaaagaaattgggtacaaaaagagctacggatgtcttagagttgatacatataaaaatttgtgggtcatttcctacaccttcttggaatggtcaacaatattttgtatcactcatagatgattactcgagatatgcatacctatctatacttcatgaaaatctcaagtcttggacgtgttcaaatcttttaaggttgaagaaagaataaagcaagtcagatctaatgtggtgataagtactatggtagatatgacagatcaggtgaacaacgtctaggaccagtgtcgaattgttccacagttcactatgtcaagatctcctagaatgaatggtgtttctgaaagatgaaatcatactcttaaagatatggtaaggagtatgattagtctttcaaccttaccaaaatcaccctggggagaggcacctgagacaacagtctacattttgaatagggtaccaactaaagtacttgcaaaaacaccttatgagttttggataggtagaaaacccaatcttaaccactttcatgtttggggatgcctagctaaagctaagccttataggctaaatgataagaagttagacctacatcttcagtgcaccctatcttccatgtttcacagcttcgtcgagcatttggtcacaatgattcttctcatttgctacctccacagttaacttccaatttagagctcttgtttgaacctgctaaagtattgggtattcgcaacacccactcaaatggtagggggagaaatagaagtgctcatcaaataaaagaacttgtcggtctttgaggctacttggaagaattacaacaaccttttacatcaatttccttcttttcaccacgatgacaaggtgatagtttgggcggcgggtaatgatatgccaccaatttgttactcctatgccggaagagctcgcactaattgagatgagatattgatagaagtttataattaatttctgaattagaatttattttgaattatttgtttctgtttataaagaatctacgtctctcgaatattctgggcaattttctattttcaataaaatatccctattttcctcaataatttactttgtatttttttttctggtttgactcaatacagtattagtgtatatcaaagtatatttcaagaatttgttagttcatttgtgattcctcgatatcttgaaaaagcatgaaaaaacatattaaatcaagatttttagccaaagccaaatatagggtgatggcaaatgccacttgtagaatggtttggttactcaggaactccattgcgacaacaaatagctctacacatagctactaatatcatttttcacgagaaaacaaaacatattgaaataaattgtcgcttagtaaaggagaaaatcaagatgcagttatcaaggcaacccacattgtctcgcaataacaagcagcaaacatattcactaaaacaatgtttccacaacagttgaagtacttaagacataaagattagattgcaaagtattcccaatatatcttgagggaaagtttgagactatgagttgcataatgaattgtccacttgtgctgtcactatactgttagtttagaattagttagtcatagttttagctaatatgttaacatttttagtaactcaattagtcctcctaattgagactaactcatatataatgctctttcttaattttactctgttctctttagtaaaaatgtggtccacataaattattcttgaaattgttcctaccattatgagccacgaaaagaaaccacctttgtttaaccatttcttctactgttgctaaaaaaaaaacaaatgaaccttcatactaaataatttggtgttggaggccctagctagctccaagtgtggatccttgttttccttatcccaattcacaagaggttgtttgcatatgctgatgtattttgggtttggagcaattttctaaaattgagagtattcaaaccataaatcccttcccaaaatttcaagttatctctccaccaatatggatttggctctgtgctatccaatttgctaaactagtttaatgtttgatcaatacattattaaataaatataaatacacattggctagagatgatcaaacttacatgatctgacataaccaaagtggcatgaccaattgagttcaaatagcctcaaatgtagaaaacttcacaaatattgtgtcatcatttttaattaaatggcactagtggcaaagatattgaaacccaataatccaaagataataatttcactcaaaatacactgctcattaaattatcattgtgaggcaattacagagataaacacaagttaagaacattttgtgctaagactgctgtcacaaaactcccctttctttctttcatagacatcctactatatatacaaacctaaaaagaaactaaaatagaccagcttcataccctaaaaagccccatttagtcagtatttcttatgttctaagatctctaattttctctacaatattagtgcaacttactttgcaaatcaagggagaaagaggggatcctctttgttcttgtatatttcgaaaagctgcttagagtagtttgttgcaagtgttctacacagtttgacagccttgggatcatacttctccaactcctctacagttttcgttaaatggccttctttatctccatcagtaagataaacagccaaattcgtgcccctgttccaaaaatgaaggtttacatatcaggaaaataagtgtgattaacaaaaccaaggatactaattaatcatccaccatagaatactagcaagaaagaggtggctaatggatattcatagttgagataagcctataagaaagagaataatggtatttggaagtgattacttagtatatgtattcaaaagaaaactagctagaacatttcattcaaaatgaacaaaacaaaaatcattataagcaatataaatctcaaatttacaaggctcaaatttgtacctgagagcatcaaacttactaaatccacgattattataaaccaatgttcctttgcagatcttctcgtcagcagtctgctggcggtagagagcacatacagccttcatgcacaattcggtatccttcccaaaatcagcaagcatgtctgcctcaaactcccacttaaagcttttatcttttttcctttgaagattagataaaatctcagaaaagtctattttgtcatctgaaagatctactgattcactagaagattcatgatctcctgattcactagaagactcgtgacctccagatgcatcactgtccttaacaataaagccgcccaagctttcaccttcactgtctgagcaaaccccatctgactcatcagtttcggtatctgcatttgtaggaactccttgaagacgattagttttggttgtatttttaggtgactcttttcttgcaacatctcttcctctgcattccttcaatggtactaaacgccttcttcgaggggtcactgctcctttatcattgttaacagcagaagtagtagcattctcaaaggagcccctttgatcagggcgaatacgttggtgatttatcctcttaagtctggcaattggcttattatcatcactgttgctctcctcatcagagtcactcataacaacatttaacgctcgttttctttttgggagtacaaacatccatactttttttgttttacatgcagcaagtatcttccatgttgttctgtcgactactttgtctcaccagtcatctcaattgcacaagtaacactcccctactaatgggctgacagcc

SEQ ID NO: 302828 - DNA, 2457 bp, Cannabis indica
aaaaaaaaaaaaatttaatatatattaattattattattattagatattttaatatatagttgatataaaatattattatggtttcctaacttttgtttaaaataatatttactaaggtccattaaatatgaaacattctaaaatggaaaaaggaaatagaaataatctataaaagtaatcacaaaagaagttaagtgaccccctaaaaattgtttttttttacatttttatgaaattcatacaagtaacctaaatcgtaattaaaattcacataacaactcacatataaattatttttttttttttgaaaagactcacatataaattattagagcaacgcaaactataaattaaaaaaaaaggttaaaaaataatatataagataaaaaaaaacactatagagtgaaatttcaatagtttttgcctacttaaagggaactacataattattacagtaattatgattaaaacgtaatttatgattaaaagtaattttaatttgacccaataaacctttatgtatatattttttgatacactttcattgcaatggagatatttgtgatctcacagattatgaaattggagctttattttttctaagatggtagtcataaattgtgatgtatggttcaaaagaaaaagtttgagctgaataatatttttatatttttgttatgtaataagaagatgtaaaagggattattatatatttccaattccatatagatgatgtatttaatatcttcattaaaaaaaaggaaatatttatgcttaacacgtcgtacgtgtatataacaatttatttcatgctacctactgctacaatacaatctctaatcaaattttaaagttttaattttttgtttataaaaaaggagaagcaaatttaaaggttgaataatgttgcatcaaacaaaaataaaaagacaaaaacacacacacacacacattgttaataatttggttttggttggttggttggtcgaaaatcgaaatatgaaacttttggttgatagattgtgcatacgtagagcgaaacgtgtccataaaattctactgacacgtgttcgtctgttattcgttggtagtttaagtggtcagtaccactgagatgagtacagtaaggaaggataaaggaaaagaaacgattgtgatgtgacctaaggaagaagaagagagagagaattgttgcaaacatattcgaacatttcccaattcccaaacttttcttttatttaatttttctttctttctgtgccatgggatatatggatgatccaatcactctaataatggggggaaagaagatcttctgcttctcgatcagaataataaagcctcctttcttatatgtattcattacctttcacaaaaataaagccatccactatatttcttgatcatatattcatatcgaatattgtttatatatatatgtttttatacatatatatcttgttttgttttcttcctcttgtttcttatgtcactctaaataattggtttacatttcttattattaatcttcatacaataattatatgtaaagactttgttatttattcaaagttataaaagggtaggttttggctttcttaatatcgactttatagcctcaaaaagccaaatttttcaaaacttttcaggcaaattgttttgttaatatatttttatttattcaatgggtctaataatttacataaatatttttttccttagcgtttatacccattttctaattgatacactattttaaaatataactaggattacaatgaattgggtttatcagttttacatcaaattgcatcagtatcttggatctgtgtttgtatagtttttgaaagaaaaaaatttaaaataatcataacacaaattaataatgctagggcattgtataactttcctataatataaataattatttaaaaactatatatggacaacttaataaacatttaggtatgacaaaatgattcatataaatatatatatatttatatatatatcaaacaaaaataaatgaatatgtcaaaagaaagtatgtgattgaaaatttgtgatgtaatttttttttcttctatgagtagtgattccataaacatttcatcaaagttaattaaaaacaaataattataaaaacctttcttaaaatcaatctaaaccaaaaattatcgtaacaattcaagtattgcatgggatcgggtcattgaaaatattccctagctagtagctactatggtagagattatttaaactaaagcaaatgacatacaaaatgttatgcatgatatgatgactctacttagcaagttagcatactctaattgttattatttctcaagtagtggacattttttgccatcactttattgagtttttcctttttgtgcaaattatttgtccactctttttctactcttgtaattttatcaattttttttttttttaaa

SEQ ID NO: 302829 - DNA, 1874 bp, Cannabis indica
aactgaaattgtttaattaattgaacagaaaaatacttataaaaattaaattaggacctaccaaatcaaagcatatattataatatgaattaatgaattataaatttaggtcactagcatgttgtactcaaaaaaaaaaaaatcactagcatgtaacaatagttcagtatactgtacatgaaatgatattatataaattactaaatttaataactgaaatcgtttaaattgaaccccaaaaaaatttataaaaaactaaattagcaccaacatatacaaattgtttttgtagtttgttacaccaatcagtcaaaaagtagtgaagggcagttgggtttgggatgacttttgtagtaggttgggaagccaacgacattgttctttgcttcataatataaccaaataaaataaaggccaccaatagtattaatgccaataaatatgaggattgtttttttcttttatattttctaaaacaaatatttttttacatatatataattagttagtacatgcaagcataaatttttttttacaacgttttgattttgaagatctaactaatacgaaataaattgacaaatataaaaatgccgaataatattttacaatttgaatatatatatttaaatatttgtaaaagtgatggtgatataataaacatatctttaaaataatataaacatgaaagctacaaaaaattgtttattttttaatttttttaaaatgattttttctcatatttttgtttgaaaactaagttttgtttttaaatatatatattttttttaatgaattcatacaagatatgacttttaataaaaattcacacgagttttattattttttatttatttattttaagattttggtgggctgcgccaggcccatgcagcttatggtgacactgatggacccattaatataagtaaacaaacatatatcgtgtggctgtaaattatttatgaagatgatgataatcaagatcttattaaaaatcaatcacataataattatacttttaaaaagactaacaaataagattacttaccagtccaactccacatttcacataaatgactctcttgccataaacattccccactcgaaatcgcctgcctgcaaaattaaaaagatatctaattaacattaatccctattaatgaaaagctattgtattaattgatatacctgatagatcgagaaaagggtagtcggagtcgggttgaaaagagccagtagagaagaaagcatcttcttcaggaggatatacagtgataagcccaatatagggtcctttaccatttatctgctttactatctttttatatgaccttttccacgacgaacctgatccacctaaatgagtcgatgacccaactactcctaatactaatactatctcccatatcatcaaataataccctaaccatttccaatattgccccattataaactattcttacttaattttcctcacaccctcctcgatcgatcgcttctctctatgtaaaatttcaacccttattatgttattatatatagcccaaggctaagaattaatatttttttatgacaacgtgataagaatattatatatatgatagtgataataaagaatagaataaattacatattatatagatatgacaatgtgaaaaatcatatctagattttttttcaaccatttgtttgtgcatttttcacgttttgaaagccaatgaatgataaaagttaaacaacgcacacctaataaatatatcatttcttaatttggttagtgttttttttaacttgtacactctttggtgtaaatattgataaatagatgctgcaaaaaacaatgtacaaattgataaataaatataataatt

SEQ ID NO: 302830 - DNA, 1124 bp, Cannabis indica
agtaaagacaacacctgaacacccaagtataggagtcaaatttttgatactccaaattatccactccagctacccaagggttaaaaatctctgcaaaagcatgcatcctacaaatagaaagaaacaatcaaacaaactgaccaaaaacaactaaaaaaaaaaagtaaaattgaaaacgaataaagtgcaacaaaacatgaaaaatggtaattactctagcaaggaggggactgggaggtacctaagagtggtctccttcggtaacaaatagtaaataaattcaagacgaagacacatgaaataatttccagttctaatgcccaatattcttatttcatcaaaacctcccttagcaatgccgaattagtagcaacaaagtgagtattttccatatgagaatgtattaagttgggttcaaattaaagcatctacatctatattatgaaaataccaacaccaagatagtacaaaatacataagtgttcttgatagaataataaacgaaactaacccctttccagtatgttcaccagaacaaaactggagaaacggaaataaagttcatcaggaaaaattagtcctattcctcatcattttgtcaatagagcatacctattgtaaatgttaaacacttgtgtatgaatatcctttttataataaatgaaagcatattttaattttaaaatctatagatcaagcataatcccatatagaaaaggagtttttacactacactgaatttttttactttcttttttcttttttatttttatactgtactgtattaaattttcactgttattccaacaactattttttagttgttccactgttatttttaattgtttagttttattgttttacgggtgttttataaaaagatagtgtttttgtaaaaaaaattcgtgtgattgtaaaattgtaaacttttgcttaaaatatagtatttttgtaaaaaccccaatagaaaataacttatagcatttttttagagtgctataaatatggtgtatatgtactttatagtccatgttcataaaattaaactccaatggtggtggtgtataatgttgtctaaatttgatattgacttagaaagatatacagtaagtttatgatatctt

SEQ ID NO: 302831 - DNA, 828 bp, Cannabis indica
ttaatatgaaataaataagtaaatatggttttagtataaaacaattattatagtcttttaatcaaaagaactttttctaaaagttgggttacagcagcttcagcttttagctgttgcttttccaaaaattcttcaaaaagctgttttttgactgtttaccaaacacacttttatcacagctttttcaaaaagcaacttttagcttttccaaaagctgtgccaaacgggccctaaaactatgtgtatatatataatcatattttattatacatatcaaactatatacataacaattagttaaaaagattagatgtacatatatattatggatttattttcttaaaactttaagggagggccagggccattccaccctataaagtgtctctgcccttgtatgcccagcgtccaagttgacatctggagctagggttatagttttctgctccgtcttagtgtagatagctcaaaatttgtacttatacatgaataagacctatcatttgcatgatagaggcatcagaatcactttcggaacacttcacgtttgaagcacctgggcacccaaagcccaggttgacctggtggcgcacccagcgcccaggctggaacacttcaagtcactttcctagagatgtttctcaaaaaaaattctccttcttcatccaaaatgaagataaaagtccatcaaaaaataagatacgagtgctttcgggagataaatagattcgtttggtggccaagaagtcgacccagcacccatgttgacctagggctgggctctagcgcctaggttgacactttgtcaacctaggccatttccaagga

SEQ ID NO: 302832 - DNA, 2990 bp, Cannabis indica
agatcctggtaaaataatatccaacacatgtcagtgctcgcatcttgagcaaaatagcacaaactagcctttagtaaaatgggcataactctcttaatgtttatccaaataacttggttcaacttgaattgaaaatatcttttcaagggggagttaagtgtgtctcatagtaatagcttaattctgaagttatcaggctcaaaattagctcacaagataaacgggcacactttaatcatgaattgagtggtgcaagtaagtgtaggatattggagaactatgtcacagcccatgtggcatcatatgcgagaagtggcaccctaaaacatctatttccaacacttttctccaatttcatgaattccaaaccaagaggtgacatcccttgtcacttctctctaatttggtacatttcttgccaagaataatcattttctcaatatttgtgagattttggcctaagaataagtgagatttttttagatatttatttatttgtactcttttattcattattgggaataagatatgagatttgaaagtgagacaacccaatacgtaggggatcattaacaaactctaagcctatataaagatggtaataggctagctagggagagggggacgaaagacttgagagataaaaatcctttgtgactgcttagaacacataacccgttgagatttccttcatctttttcctaagtcctccatactttgtcgacaccaagtctctattactaaatcaccattaacttacaaaattaccaagaacaagagaccattctcttttcttgctactattggtttattgttcccaagaaccttacaaccatcatctttatcaaatttgtgaacattgggtcttccatgagtcttgtgttcataagtatcgatacaaattttacctagaaatctattattgtattattgtccacacactcttgagagcataactctggtgtgtcagatccaattaataaaaataaaaatagacgtgaccccattaccatcgtgacatgggggcaaactactataaattcttgatgtccattttattttgataaattaattcatcgtaatcctcttattttttacgatcttcttagatcagttgatgaaaaatcgcatcaacagtttggtgctttcattgatagcgttgtagtgaaagtttggcaactttccgtttggaaaactcattatttcaacaataatggcagattatccagacaagattgactagataaatcaatacccatgtggcgaatttcaccttgcaagattgtttgacaaaaaactccaatctccataaggggcacaacacccaacactggggacaccaatcatggccatcatggagaaaattgaagtagcagaggcgctaaatattgaggaaattgatcctcacattggtgatgacagggccgaccttggtccaattgaagatcttgaagaagtcatactaaatctagaagaaccaaccaaaactgtgaaggttggcaagcacctcaataaggaaatcaaaaagtcccttatccaattcctacttgacaatcaagatatctttgtgtgggtccattcagacatggtgtggattgatcccaatgtaattacccatgtcctatacctggataagagcatcccagtaaagagacaaaaaagaaggctccttgatgagacaagatatgttgccttaaaggaaaaagtagataaacttcttgctagcaattttattcgagaggcattctgccccatttgggtggccaacctgttttgttccaaaaccaagtgaaggctcagtgaatagcctcagcttcagctaagattggagaaagacctaaggttgcagaaaagtagaatcctactattacacaatcattcgaatcttgaacaatggccccatatccatgtttgttatcctgacttcttattgcagcatcaacactgagcttatattgccctgtaacaagtaataagaaaactggtcttgattgagctgcctttaagttttgcgtggaataatttgattagagtgtgatcctcacctaggctgagttgtagtcctacaaataagaaacaagaaaaggttctatattcatataaacaggcttctcatctgcaaacagtaatttgttatgatggttccatatagcccataaaatgccaaaaaagtatatccaatttgtctttttgaaaagtattgaacgctctcaataaaatttcttttatatcatacaattcccgttgttattgaaaaaagttgagaaactagtgtacttccaacatttacaagccctggaacactctaaaagggaatgggagttagagtcaatatggttcaagcgcagggagcaatgagagtcatcaaggatctttctcgagaagagattaagtttagatgggaggaggtggttaaaagctctctaaataaaatgttttattttaggaggaatgtttgaagacctaaataaatttataattggaacttgtattatattttacactctagttttctatgaattatttcaacaaacaccgaaggcatttcaatttaagaatattttcattcataaaatctaagtaatgattctaacaaatagagacacatatatataaacataggatgaaaaagaaaccataaaatccataccagagcaaagggagaaaagcaataccaattcattgatagaaatagaagattacgtactattaaatgggattgaatcaatttccgtcaatatggtggagacgtagtgccggtggttgtggcagagatggtaacgataatatagtttcgatagttgtagtagaggcggttatggtgattgttacagaggtgaagtactactacatctgtggagagtgtagaacttcacgacattgagaaagaagaaaaagagttgttttgcatgggttgtttgagaaagttaattaaaaaatacgagttctactttgtaatgaccactttagtaatttggattagtaaaggc

SEQ ID NO: 302833 - DNA, 1261 bp, Cannabis indica
acttagtatttacgccacaaattacttaatatcatatatcatatgtattaggattcgaaatctaatccccctagagagtgaatcaaatcgaaaagtcaattgtaccaagtcttacttttgttagttactaacaattaacaaaaatgtagggctttgagctttaagggacaataggccatcgaattgtgaaattatagtattgaatagctcatcgaattggggctcatgcaagattgttgtattgaactcatcgaattgtcaacgtttgacaattttgaatttttttttattttttggcaatgaaattcttgagtttaagaaggcactgtaattaatctttttgtcgttgaccattttgatatttcttttattacacatttatgatgtatagaaaaattcaaacaattttttaaaaaagaaacccaagtacgtactagtttgttactctttagaaaactcattgaattctttgtcaattgtgtttttctcgagaataaatagccaaacatgaaacttcaaatgaatttatatcgaaatccaaccatacgtgcctcttagacaacttttgtttgggttatactctcaagtatatctatgaagcaaattcatatttccaataacataaattctagctcttgatgctcattcaaacatttacaaattaagtagcatgtgtggtcaaatgtcaacactaaagtcatgtatcaatgtctcttgttatgccatattcaatattatttgagctccctctatggcttgagaactctcataagtctatgatctaatcttttaagtctatgatcatgccttaacaagccctcaagagagaagtattgtagtagcatataaatttgggaatagggatcacgtgggtgggttgtccctaattttaaatttaagtaaaaaataatttgtcccatcaatcaactaaatacatataaagagtcacatatatatatatggaactcttcttaatgggtattactcatgaatagttactaaacaaatttaactataaatattaattttaaaaatatcaaaccttcgaattttgatctaataacgaataatgaaatcacaaatttaaatttctctacttaatttaactacttaattaaaaaataaataaataaatgtctctttttacactatatcaaaaatatgttcatacaaaaatatttaactcaaactcaactttttcttttttatttttcttgctaatttttttttttaccgatggaacaatctcagcccatatgat

SEQ ID NO: 302834 - DNA, 4748 bp, Cannabis indica
cgtttttttggttggtaagttgcctattttttagggtctatttttatttcgttttttctgttttcaattagtttgatagttttgcaatttctagttagattttttatattttgttctataggtatacctagttgtagtgttgtactagtggtcgtggatgataattaatatttataggacttgtttggaacatcgtattaggtcgtattgtattatattgtattgaattagattatatatcatatttttatataatactatgttaaattttaatttatactaaaatattatatatttaggtgtccataaaagttggtattatatatagttttacataaaaatattgcataaaatacaatttaatataatattatacaatacaatatgagtgtaatatggtgtaccaaacgaacccattctgactacatttatattcaaaaaaaaaaaaaattgcaaagtttagcttgaactaattgttttattgatatgcaaaagaattacaagaggtgatgatgttccttttttctcaagtgtggatttgtagaagaatccatttggttgtatattgaaggtaggcccacatgagagcccacttaagcccaaagggtgtttctctttcttgggaggtaaaattaaacaagtgaagcttagcttagattattgtttatgtcccaactcactcaactcccatatgtctactgattaggaagtgacacgaaaacagatataattaatgacatgaatataaaagaatgaaaaaaagagaaaaactggaaatgttaagaaagaggttaaaggttctatcactatgaaagaaaaggtttaatagtatgaaaaggggttcctacttcctatgttatgtgatagtgtttgcattaggcccacatgagagcccacctaagcccaaagaatgtttttattattaatttttttaagaaaaagaaaaggcaaaattaaagaagtgaactcactcaactcccatgcatgtctactgatgaggaagtgacatgaagacagatataattaatgcatgtatataaaaagaataaaaaaaggagaaaaaattgaaatgttaagaaagaagttaaaggttctataaatatgaaagaaaaggttttgattataagtatgaaaaggagttatgttatgttatgtgatagtgtgtttgcactagtttagaagattgacgtgaaaagcagaaaccaccaaatatgcttaaaaaaccaaacattcaaattaatatttaccctccataaatatataaatatatatatatatatataaatatatatctgcatgcatgcatgcatatcccaatcccaggactctgatgatgtgagttcaagtaaaaaaaaaaattctaatattttccatctcaaactaagaagacctttggcaaaaaattaaattattattttatcaagagttcttaatttttttgttcatttacacattaattaattaaattcttattattcagatttttaatttcttatataaatttcagtattcttgtagttgtctcctaaccacgggatcgtgaaggcaactctggtgaagcctccagaatgaactctagatcgtctcgggacgacccgctgtgagaatattcattccgagcattgtagtgactactttcctcaaagtagtcttcaataagatcacaagtgcgaagagaattgaattggtcaatcaggttcaattcttctccatgtactcaaggaaaatactcgtactgttagctatcgaggccaatggcaaagtaaaagctcaactttcctcttttatctcaaaagtatttccgagtatgaagcggcacattgatccttacttgccagaatttgtagcctccgattttgaagtagcgtctcctactacttccttcaggttaagtagcaggttcttgtccccttgcagggtctcgaggcttgctctcttgagaacatgaggaggaattgtggaagagtcctgctggttctctcgttgttgcgaggtcgttcaacatcaggtggagggacattggttggcaccttcgagtttgagtcctttcgggctcttgatcgaaggtactttccctccaggagctctccctatttggtgtttgcctagtgcctgctcggttaccaggtgtagcattggtagtctgagcattcagagtttcaccttggacactagttctcacgtgaccaactggtcgacggggtgtctctcaacaactcagaaatacctctttgggaagcagttccgcaattagagcgataagcttctttaatttgttgagatacgttagttctttgttgttcctgctcaacgtgttgggttttaatgttggttttaatgttcttccagttttccacgaactagtgccaaaaccgttcgtgttgcttatcgagagagtctcacatgttattgttgcaagtcagccatagtttggctgagctgagctacttgaggatcggcctcctcagggtcttctatctccaaacgtggctccctaggtggaatttggtcattggtgccagtcccgggagctggtggtagtggccttggaagacgagttgaggacctggttccaaggcctgcgttggtgtctggggtgcaggagtagtcccaggaactactccatcgactggcgtgctcccaattgattggccagctattggagtctgtctgtcaacacttgtagaacgttttgtaaccatcttgattagtgactttcttgagttgtggctctcaatgaaagtaccaaaatattaactcagaaatatggactagacttctaagtcacacccactcgctagattggagggaatataaaaaattataaagtaattaatgagagacacaacaatttatagtagttcacccctttgtcacgataatgatgaggctatgtctacttcaagtttttctttctcatgagatggtgttacaacaactatttaagtatcaaaaacttcggactctagagagagaagctctgaccttgtgagtagttttctgaatgtgaaaaatgaactaagagagctatccttttataggtgaaggcggcctacaaaaataggagataaaaatacaaataaagtattttccaccattgacgttgatctaacggtgaaaaatagcttctcgtaaatatatttaatttttgatgtttggtgggtcctgctgtaggatacctaaagcttattttcgtaactcctttaggggtaaattttggcaacgatagctttagaattttgcctagtgtgtgaaacataacttgatagagggcttaaatagcttcaaaaatcaagttgaatcacgttaatcagataaaaattgagtgagttatggctattttactgaaggcaattcaggttccaacccctagattaacatccatcgcccaagttaacattccagcacctaggttgacatctgacgttgtataagtgtagaaacatccaagggaagtcctttgagatgcccaagtgatggtttgacaccccttagtccttttatatgttttggtgaagctggtcactcgttcttggagatgttgttattttgtagaaacaaaaagacttgaaaattatgattttcgggtgaaccaaaattgaagttttaaatttgattgatctgacttcatagatcattgcatttgtgaaaaatttgacgggcggtgagaacgacatcagattcgaataagcagaactagtgaacaaggccaaatgttgacctggatggttagggcctttaaaccgagctcttaggattctatttttgatactttcaaggcttccaaggcctctgaacttgaggacgaagtatcaccccctatttttgaccatgtcagattcaatggtcgcatcagatttgacattcgagtatttgaaggtagcgtcccaggttgattgtcaacctgtgcgttgggcccaacaccaggtcaacatgggcattgggccctatttttcaaggactcgagtttgtagttttctctccaagtgtgcttggttcttcgttatttctgatgacggtgaagatgccagagccctttttgttaatctaaattggaaacagtccagcttgacaaaatgtcaacctgggcgcagggcctagtcctaggtatgaacctaggctctgtgtccctattctacccctttagaagtttcatttggtccctagaaatagttgattctcaatattttctgaagataaaaatgatgctcgaaagaaatctaggaaaactttgtcaacctaggcgcagggccagcccaggtgttaacctaggcgctatgccttgttatttgtgcccaaaacttattgtttttcctctagaatgacctattaccccatttttgttaaagaccgattcaatacaaaagttgaatcttcgatcatatgcttggaaggtgcccagattgacaaattgtcaacctgagcgctgggtgctcggagccctgggtgctcaaaaattaacttgctccaaatctattttgatgcctcaaatatgtccatggtttgttaagtcgatgtcccaatacaagttttggccattttgcactaagacggtccgaaaaattgaaactctagttgaggatgtcaacctgggcgccgagtggaaaccctaggtgcccaggttagctttcgagttgcaagttcatgtaattttagctcccggaccttgtgttaggttgctccatgtcttcatggtacaaaatactgaaagatagtgagttggattcaagttattgaattctgaactt

SEQ ID NO: 302835 - DNA, 3171 bp, Cannabis indica
gatgtcttcttccaggtccccgtatagaaaagttatagttacatagatatcaccactatcataaccatcacttaagttagcattgtgatagggtatagtcattcttattcttactttgtttgcttgaatcttcttgatgatctgaatttggctttcttccccttctcttgtagaagtaacattctcttttgaaatgtccaggctttccacaatgataatacctattagggtctttatgacctttagaattagatcttcatttgttgtgatggttgtatcttttgtgaaccctctaccaacgtttctgcctctatttttccaaggtttcatctgtgttggtcttcccttacttagatttaaatctccattagaacacccaggtctttgtactttcatctctaaatctgtggactttaatgctgagattactttctcgagagtaatctcagttcttccatactttatttgtagatttaattgccttgtatgattctagtaatgagttgagaattataatagattgattctcagcactcaatgtctcattttcccatgagtttgctaattaactcaatatgcaatcttagatcttgttatgttccagattgattctcagcactcatctaagttatgttccagattctttgaatgactcattttataaccaaagattattttctttaagtaaatcttgttaattaaagacttcttctgaaactgttcctccaatttcttataaatttttattagtgtatcttccttatcaaccaatttgattattgaattagataattcctcttgttaagcctttgtagtgtctgctggtcattcaattggatcacttagaacttttagcagtttgttctgggcaagtaacaagactctgatttttttcctccatattcgatagtcacccgaaccatcaactctgtcaatgtctatcttaatggaactcatgtttatttgtataaagaattaaatcaagaattaaaaagattttagatttagaaatatcctgatgttaatcttgtaattgtgtgaaatacaatcttattcttgatgtactagtttttcatattctttccttgacttcttaatgttattctgagcatcaactaccttattctttattgggttcgtgtagtatatctattttagaaaaattttacaatgcaccattttaaaagggatgtacatttatttagtatctgaaatatttttttagtcaattttttttttctcaagatcatgtacgttaatgttatagttatttaaggcatcttgccaaattttaaaatattcagaaaaatttaacacgtaaaaattagagttcaaatagtgtattgcacgcgtgattattttattttatacgcatgtgaaatagactatttgaacactactttctatattataaattattttgaatttttcaaaattttatagaatattttaaataagtacaatgtacatgaatataaaaataattggactaaaaaactcatctagatgccgataaataagtaaatagtgcattgtagaagaattccatttttattctaaataattaatttttttatagattaagaaaaataaagaaaaatgagcgtaggcaagagagcccccactaccttgtagtgtatataaatataaatatagagtgaatattaattttgggagagaattaaaaaaagagaatattgatgaagaaattgactcatataattaaagatggaattggagaaagacaaaacaaaagtaagaagcgtgcttaagttggttgcctaattttgacttttatttcaccctaaaatacgttttaattatttaattaattattaattagttaattttattatatttctatataacaacattacagtcaatgataaagaattttcaagaccaaaaaaataatagtggactcttgattggtaataaggacaaattacgagtattaatatatatattgctagtcactttcactaaaattaaaataataataattaaaagaaaaaaaaaaacatctatatagaatttaaaattagtttttaaggtacgtaacacgttcttgtgtctcacgttacacgtattcattttatttttttattattatataaaatccaaggaataacaattttatttttttaactcgtgaaagcttattatttcaacatgtaatattgtcattattgaaaatatatatatgtaaatataattatatatatatagctagaaaggactataggaagctacatgggcaactatagacttagacatataatttaagagaattattttatgggtgctagcttaatattttcttcaattttatactccaataataaaactcataatttaaatatggtttcgaggaaaaaaactaaaatcatatcttgaaatgaggagtgaggagactaaggcaaaatatataattattatatatagttgatttttatagataataaataataataataattgcactaaaagacaaaaacaagtaccatatgatattacaactttgtttgggttccatggatttatttttcttagacatttccttgcaatttcgtatgatattatatagaatggctattattatatatacacaaaaaaaaaaaaaaaatagaaagaaaaatccacacttatttaataaggacatttgaataataaaatttgatgattatttttagttaattaattacactaatttaaaagtgaattacaaatgtcccaattaataattttgtgtcctgtctattatgaaaagctgaaactactaatctttattgtttagtgaccatttcattttgcctttgttggggtagctaggttgagtattagtgtgaggattataagtactttttggagtactttcgagttggtttaggcggtttggaaggctcgaaatgagatggcttggaaacaaaaaatactttggcaacataaagttatattgtcaactagggtgtggttggtaacaatggcaaatatctcaatcaagaaagatggggtcattatttaatctaaatagggtgaataatagttaggcagggccgaccctgaaacaaagtgggccacagacaaatttttttttttggcccttatgttagaaataatatggtattttttaaaattaataaaaaaattgtataattttaaaagaggaaa

SEQ ID NO: 302836 - DNA, 3277 bp, Cannabis indica
attaaataaattaaaatatacgaaactcaatattaaattataccgatgatgtctttaagtggtgctaaacatcatttatcaaataataatatgaaaaataagaaggtaaatatattattagtaagtattaaaaaagtttgaggattagggaatataggaaaattaaccataaaaacataaaagagttaagatgatcaaaaaatagaataggggcttatatgcatagagagagatgaatgatcataattaattattatcatatatatgtgagaggtttagcttaaggatcgcataagaataaggaatagagattattgttaatacataaaccacacaaattaagtattgttgtcaccctaagtttaggcatatatctatataattcattcatatatatacacctcaactactcctactatatatgcaaccccacttttgcattgatctctccatgagcgccggggcttagtgcccacatcaaccctctacacaatatccaaaatatatctatatatcaataatcataattgattaatcataaaaatgggtaaggccaaagtgacggtggcaggaatctccatcattcttgtggtgggggttgtggtagctcttatagccggcgttacccacaaaggtggcggcgcgagcggtgacggaaatggtgatgatgacctttctttttcgtctaaagctgtggctgcaatttgcaggccgacagactataagaaattgtgtgttgagagccttggcgaggctgcaaataatgagacagcctcgccgaaggatctcttcaaagcggttttgaattctaccattcaacgagttttagtcgctgtagataagtcatcagtgttgtcccaaaataccacctcggccccacataaaatgtcccttgaggattgcaaggacttgttggatttcgcggtggatgaactccaagcctcgttttcaacggtgggcgattctgacttgcacaccgttaaggatagagaagccgagctcatgaattggttgagcgcggtcatctcgtaccaacaaacttgtttggatggaattcaggaccctgagctcaagtctgacatgacaaacaatatgttggatgcgtcccagatgacaagtaacgctttggctattgtttccggcatttctagcatcttaggagcatttgatatcaatttcagtaatctcaccagtcattttaatccaacttcgaccacgtctcgaagacttatggaagcgcctgtggacgacaaagatagctcgtatccgcagtggctttcggctgcagataggaagctgttggctactcgtggaggtggtaatttgagaccaaatgttgtggtggctaaggatgggagtggacagtataagactattgctggcgctcttgcttcctatcccaagaaccataggggtcggtatgtgatttatgtgaaggctgggatctatgatgagtacattactgttgccaaggaccaagtcaatgtgtttatgtatggagatggacctagaaagaccatcgtcaccggaagaaagagctttcgagatggggtgtccaccttcaagactgcctcgttctgtaagtcaattagttttgaaatggaatttcatcttttattgataatttaatataaaaagatgactaaccactcgtaaagcgttacttctaatgtcactacaaaaaaagttaattttagtgacaacattttagtacaatataatttttttgtgattaaatattgtagcttttagttacaacaaaaaattactttagatacaagttgtcactaattcaggtttagtgacaacaaattataatttttgcgactaatacttttagtcacggacttttcaatcacaacataagaattattatttataattggtaacaacttttttatttaaagttataaattttgttgcgactaaaagtgagattttttgtagtgtgttaaacatcgtctaatttcttaattctttctttatttgtagctgctattggaaatggtttcatagcgaaatcgatgggattccagaacacagcaggaccagaaggacaccaagcagtggcattgcgagttcagtcagacatggctgccttctacaactgtagaatggacggataccaagacacattatacacacaagcacatcgtcaattctatcgcaactgcgttatatcaggaaccgtcgatttcatctttggagacggagcagtggtgatccaaaactctaaaataattgtaaggaaaccagcagacgggcaaaagaacgcggtgacagctcaagggagaacagacaagagagaaacgacaggaattgtgatccaaaactgtaggattgtacctgaggtgaaactgtttaatgaaaggttcaagttcccaacctacttgggtaggccatggaaagagtactcgaggacgatcatcatggagaccaccattggagacttgattcagccagctgggtggatggagtggaatggaaactttgccctagacactctttactatgccgagttcgctaaccgaggaccggggggctaacactaacagaagggtgagatggaaagggcacaagatcttgacaaacaggcaagaggctcaccaattcactcctggtcctttccttcaaggaaatctttggttgagatacactggtgcaccttacttccttggcttcaaaccctaaacacaaacataataatattaataattatatcattctaattaaccaattattagtactattttcccacatatatacttctttgttgttatatatatcacatttatatatatgttgatattattcagttatcatttctattttctttattttttccctacctattgtagtagctaactagttgtgtttttcttatttattcgttttgtattattatgtattgactgttttctttgaacaatattctttatttgattgaattcaattaatatataattatactgtatattccaaatcagtgtaaaagtgaatttcactctcaatatctttatctatataaatattattatgacatttttctatgaagtcactttttgcaagatataaaatttgaatgaatataaaataaattacagtgacaacacataatttacaatatccggccagttaggcaaatacaattcctcataggagtattaaaaataattagtttaattttagggaatttttatatttactactctaaaattagttttttttttttttagttatatttttttttagttattttttacgtaaaatccacata

SEQ ID NO: 302837 - DNA, 2287 bp, Cannabis indica
aattttttcaaacaaaaaatttgtaatctttaaaaataaaatacattcacaatcttaaaaataccaaaatcttaaatgaaactagcaatacggctcggcacgtacattcacctaatatatttatatgtgttaggaagaacatagaatcacttacccgtattttagcaaatggtagaaaactaaacacgtacgtagtgatcgggacataatacgactgaaacacttggccgtacgctcttatatatacatatttgttacttaattattaataaaatattctcatgcaagtggatatatatatatagcattattaaattatattatatgcttttaattaacagacgttgagaagattaatgtctctgctatgatataagtgtacattaatattttatcttttaacttaagatagaagcaaatcatacgtgattcgacaatgggtaacaacaaacaagcttcactgaatttgagaaagctttttctgacaactagtactgatgataagaagttagagacaaaattcatgtgacgtgtctttcatatatacacaccttattgaagcacaaaaacaaaaaacaatgtctgaaatattgtcgaccacccccacaatatgtatgagtgagagagtttattttcatgaggctttggattcctccttgagaaatggtgaaaccatgttcaatacagcttatttacaatttattatgtattgcatacaaaattaataatattggcacgtactcttctcgatggttgagagttctaataactttagttaaattctgtacaaattagattggtcggccatcttaaggaacctttgcacgtgcgaaataatcacgtccatgtcatgttttagaagtttgaatttaagaaaattttcatcctggcccctatgattttatatagtgatgatagccttgtgtgtcctatacattataattcatcatattatttgactcatttcacatggctaagtatgagtgtgactgagtttcaaattaattatcaaagactttaggtatatgaaatttattgttctgcacttctagtgctattcatgacaagatgtccattactaatctcattatatttgcacctatatttctataattgacttaaagaatctaggaagtaaataacctaactttgtacgtacttattaaatcaatataaatgtatgtatacatatatattattatcacttctaataaacaaataaatttaattgctcttaattaacgagttaaacaaaatatataatattaaacagtttcctgtcactcgtatcaacacgtacgcatgcatatatgccagtacatgtttggagtctgcagaggacataatcccttaaagctcaaacgttctctgtcttattattcatttatatattaaggttaacttagttgtaagaagtaaaattaattattataatgataatgatttttctttctaattttaacattgatggatcgttcatcgttatgtatattttattatccattaatatataaatatatgtacataatttgcatactttttacagtcttattaacagagcacatgtgatgcctctagaactcacgtgcgcgcaatgcacccctgattaagcaatatcaagaattaatggggatccattatcgtcatcataatgtttgatagctttttttaataattcaatttatttaatgccactcttcatatcttccaacaagaatatgaattaattaattttaatattaatatctggaaatcattatgagaacatatcaatatttaacattacattccctaaaaaaagttacgtacgttcaagttagctgcttacagagtcatattcatataacacggtaattaaattagtttaggttattataagattaatctcacattattactttatttaagtttgatattatatgctgtttttgtgatccgaattttaactggcttagcttgctagagaagtttattttgttgtgctaaaactaaatattaagaaaatttagacagcactagacactagtagtgtggtaaaagcatctccaatagtactttatttttttcaagtaaaataattaaaaaattaagaataattagcaattttgactccagaactttcgacaatactgattttggtcgctaaaatttagggctttttaaaaattttcttgaacttttacatttacagaaatttaatcattttgttaggttcggtcccttattccatttaattaatgatgacatgtctttttcaattagtaactttacccctgaaatttgacaa

SEQ ID NO: 302838 - DNA, 2804 bp, Cannabis indica
tataggttctactggtgtatagaagtcaagtgatgctcatcgtggcattgagaagtgcagtgtatgagggggtgatggttttgggtgggaggttgtgaggtgggtggggggttgtggtattggtttgggtctcggtttggatccattgagtatggtcttgtgggtaggatgatgggtcagacttgaacaaacccacttgttgggtttggccgtggggaggacagctttctagggagccataggtgggaaagggtggtgtgttctcagggggagccacacagactgcactagccgggttagtagtcatgaaggaagccaccggagggttggcaaagttaagctgttcaggacacaaaaaagcattagtagtaactttaactttgcctgatatggttttgatatcataccttagctcaggaggatacggggcttcgtcacatgctttcatataatccaaacaccctttgttgtagctatgtcccatgcagccgcagtagaaacagatgtctgagagattctcatatttcaattcgagccaaaccactttattaataaccgagaagtggatgggtattccacgagggagcggctgagcaacatcaaacatgaccataagtcgaaagtagggtccctaggtctcacgaaaagacggtcggtaaacttccaatagatggccgagggaggaggagataagcacagccagctcctccgagcgtttcagaaagggagtgttgaacacttgaacccaaagtggaatcttgagcaagcgatctccatttaggacatccaaagagtttggaatgtccattagaatagcttggtttagataggtccaaggttgttgcagcaaaacccgacgcctttctccatcacaaccaaactcaacaaggaaaaggccattggaacgatcagtgatgataactggacaccgagagatatggttccagtttttggtcattttttcaataaaattcttgcggttaaaggacttaaccgtgagaactttggcaacaaggtacaggggagtgtgttgggtctcggttttagtaaggtttgaaggagtaggatcatggagagtttggatggtacattcagtttctgtgagattgagagcaacagataatgagttggttaaatcatccattgataagactaagtgtatgcggctgtaagctaaaagagagaagaaacagtgaaggattttaactataaccaaatgtatatggagggtgaagcacaacaagagtaagtgtacatggctgtaagctaaaagagagaagaagcagtgaggtattttaactgtaaccaaaggtgtatggagggtaaaacacagcagggagtaggacacaaaataacttagcagaggatatgagttaaagatgactataaccgatgtgttcgtgtgtgtgcaactgtgttgtgagtgggtgattagagagtgtggatttttaacaaagctagggagagtagcaaatataacatataaatggaaagagggccgtatatgtgtctgtaaggaacaaagactataaaaggctgaaacgaggatgagtggcttttgaaggaaattgcccttaaatagcataaccctcacataactaaggcaagctaagtcagtatcagtcatatcctttgcatttaataaggaatagggtagctgcacaaagggttggaaaagaacatcatgcagaacccaattgctacagatagcagttaatgagatattcaaatcccatttgacaaagagaataacaatcggactatatattgatttaagagagttcccattacaacacataactttgaaagtgcattgatcagacaacaatttaatgggatatccgaagaaatacctaaatttatcaataaaatcccagttttcctgaggcgatttgacagtgaatagggatttttggaagaggaattcaatacttgtaagagcttcatttatatcggtacggatttgcaatttggggaggtggctggagttattgctgattcgactggggtggttgggctgtatcagggagatgacatcgacgcggctcggaagcgacgagctgccttgggattcggttgaggacgaatcggagccaccatgatcgtgggatctggagctgggtaagggtttcaccatgtggaaacgagatgttaggaagtgtgaactcaccgggaatggagaagaaactttgttcatactgtgaaagggctgcgagagagagaaaggaaaacgaagagtctggaaactcataattcctttacttattacaagttagtcctctcaattgcttccattctatgctttaactaatcaacgtagtatgaggggcacgaaagattttgtaataaaataatcaactttgattctctcgtactcatagcatctccaactaagaaaaaaaaaaatgagctctaactatgaaaaaatgaaaaatgagctctctatatggataggggcctcttagggattagggaacttcatattttttgctaattttttttaatattattttaataaaagaactattacctttttttattattttaacaaattaatttatatttaataaattataaaaagttgactattattcgtggttttggtatatataggaggtttttaattttttttaatgatttggtatattgtaattatttaaatcatttataaattttccaaaaaaattaaatagattacgatacagaaatattttgtttcactactatttttccttatactaaactacgaaccttatttttattggaagattcaaaaaatttatatgtccaaaaaaagttatact

SEQ ID NO: 302839 - DNA, 1431 bp, Cannabis indica
aaaaaaaaagttaaaagaaacaatatataagggtaattccctttaatttttttaactcaaaaaatatatattatatatatatgctgtgtaattgatttctatttaattattttttttaatatttaggtaatgcatgtgtatattttcttacagtgtatatgttgattgtgatgagggttatgtgtactattttttaatatttaggtatgttaagaaaaagttgtgattttaatttaatgagtgattaatttgttgggtttattaattggtttggactaattgggatcgagatattgtcgcaggagcaactatttttgtctacttgattctccaacaaactcaacttggggacctctataggcttggtagatcattatccattacaaaattatacaaatgaggagaatttcttgcttgatcttggtaacgaaacgattaggacattcccccttttaaattcttttccttatactttggtggtattcaccttagtgattttatgttgtaattagtttaagacacttataaagataatgaatgttgtattattttttaattatatatttaattgataatattagttaattttgattatatataatttattattttaaaaatattttgaaataatttttactttttcaaatttttaactattagctgcgtgtattaacagtggaccatgccgctaatgatgtttgtatttcgagactaacataaacattagcggcggatcccgcttaatatttattattagcagcagatgcttagtccatcgctaataatagttaatagcaaccaattagcggcagaacactaccgctaatagtctttagctaaagtttttagggtactagtagcggaaccctccaccgctaatgatgtcaagagtagttgtagtgaatgtaacagttgatggagccatctttggtgaaaattctgcttatgggtttggcatggtgtgactcaaattgtttactagtccgtgcccgtagttgcttcattgaaggattgacaactccagaaatggttgaagccatgggcatcaaagaagctcttagcttgatcaaacaacacatctgattgcttagtggtggttcaaagccaaaattcatgacggtcccaaaaataattttttttagggaccgtcgctaacaatattaagtgactattttaaactgtcgagaaaaattgagtattcgcgacagtttagaacactcaagagggcaatccgcgatggttttatgggtttatatcacaatttttaatagtgagttatacccgtaaccctaaaactgtcacatataatatacccgacggttttaaactgacgggtataactgactaattaatgaaacgcaaaccctagctacatctttctcattcagtctccttcctgccattcactctcttctcgctctctctctctct

SEQ ID NO: 302840 - DNA, 2901 bp, Cannabis indica
tcacctataaatatagggtctcggtccccgagctcctcactcattctgttcataacagcaaattccatctaaagagagttgagagagcgaggaagcccgattacccatggtagtcaatttcctttgcagatcaaagcttatgtgggtttgaagctcaagattcaatggctggaggtatttcgatccttattcatagtgtatatatgtttgattaattccgcacttaatacttaaacatatacatttcagtttatatatataaatgtctaacaacccctagttttatgttaggtccgctactgcatacactataatttatatatgtatgtattattttattttgtgtgttcatcaacttttagtgactactgctaggttttattcagcaaaaaaaaaaaaacttttagtgactaggtttcattgcggattattgcctctaattaatgtttcaatattataaatcagaaaacaattggcgccaaaattataagttacgtatcgttattctatgtacagttcaataaggacaaaagtccctagctataaaatggttaaaataaggggcttttgaattaattcagttaatctttataaataaatagaaagaataattaattcatttatcaaacatctgcaataaagtggtatctcataacaaactctttaaacttattcctgtacaactaaaataatccatccatatttatttttattaataaattttctattcattcatttttttttttttgaaagtgaaaagttcattcaacagaaagaaaaaaatgggccaacatggggtgaaccctccccttggaagaatttagcattttggctagaggatctagcactcttagctaaacaatcagcaaacacattaaaagtcctgctaataaaaacaaacttacaactaacaaaagacttaaccaaatctaagacttgcaaagataaactcttaaacctccaatcaggaggacaacttagaatgttaaatgcattaactactacttgtgcatccgaaaaaatagtaacattgtctaggccaatttccttagcccaagtcagagcattaaaaatcgcttgagtctcagcctccattgccgaatccgcctctttcttgcttaatctcacttcccaagtctccctgcctcgatcgacaagaaccactgctaaaccagcagtattgttctcccaagaagcatctgtgagaaagaatatatcaccagaaaactctagggaactcgcaggaactccattccccacagttgaatctctctgattagaacctgtatcttgccaactcaaatgttcctgaatcatcttctgaattttcatcaaaaggcactgaacagcgaccattttgcctgccaccctaagttgattccttgcataccaaatttcagagaatatgcaagccgcactaataagggtctgaatttttagcttgactgggaggcttccaatgagattttccaaaaaactcatcatgtcattaccagggaactcctccactttgaaagaaaaaggatttgcgaaccagagagcccgcgccatcggacaatccttaaagagatgcaaacaagtatccataccatcatcacacaaatcgcaggttttatcatcaacgaaaggcaactttgcttttgtaggaatacattcattaactgatcgccaaagcataagggccaaccgaggatgaatttctggattccaaatccatttccagatgtcacggggctccttaaaacgctgctcttgatccaacaaataagctccttttaccgagaattcccctttgttattattcctccagatgatgctatcctcggatgtcgaaggaagtctagtgatcttcaagactttccttccaaaattttctccaaaaattcgaatcactaaatcttcattccactcgctccccaccaaaagatcagaaaccagagaaatagcattgttatctgatctgaaagtttccatgactgacttgaattctccacccttcaaccatggtatccaaggttgattccaaacatcgatgctctgaccattagctattaaagaacatgacccctttacaattaaatctcgacaatcaagaatgcatttccaggtgaaagaatcagaatttttctcctgcacaacccaaaaattctggtttttgcagtatttcttgagaaagcattccacccaaggcttctcatccttatttgcgacactccaggcaagcttagcaatgagagctcgattcatatcttcaaatcttctaaaccccaatcctcctgacctcttaggttgacaaatgctatcccaggatttcagcgccatgaacctgtccttctcaacattcccgatccaccagaattttcttgctaaagcatccattgaacggcatgtggcaagtggtattctgtttgtagacatagcatagataggcattgatgccaccatgatttaattaaggttgttctaccagcaaaagaaagcaatttcatcttccaaccttccaatctttgtttcatcttttctcgtaaatagtcatatacttctttttttccgtcttttgaacacaaaagggttgccaagatgtagttcctcacccgagctttgactaaccttgagaacattcagtaaagactccctcctggactgtatcaagttgcttgaaaacagaacacttgatttaaatttactgcataactgacccgaccaactttcatacagcgataaaatcttcataatattcatagcttccctctcatttgccctcataaataagattgtatcatcagcgaacataagatgggaaatggagggagcagaccttgctatctgaataccatgaatttctccctctgttctgctttgagaattaacctcgacatcacctcttgacagagaagaaag

SEQ ID NO: 302841 - DNA, 3375 bp, Cannabis indica
atatttaatctatatattaatatgaaattattctctaatgattttaaatcatggtttcataattttattccaccaaaatttgtttatttattccagcaaagttatggtttcagcttatttattctaaaacatttaattattattattatttttaatgtttttttaatttctttttaggttgttgttgtcctatttgtaagttgttttttttcttttctgttcacttaatatgttgatgccgaattaatttgtattttgaaagttaggttattatcccgttatttttgttgttatttagttgtttttgtgttattattgcgttgcaaaaaaaaagcctaacaggacaaagcccactacgtccaaacttgccacgtggggccactgatgagttttgatgttgtaatcctacgtgtgtcaatcaactttgatgcctttacccccactttgcgtgtgggtctcacttgctcgcatatccacatgtatagctcactttcttatccgcatttgggctttatttctactgtaattttgtaaataaaaaattagaaagatagtatttttgaaataagtaaaaaatattaatgtttatttttccttgtgatgatatgaatgtttatttttagagcaacttttacaaaataagctatattttaaaaatagatcacaaattgtatctccaatagagattatcgaataataataataataataataataataataataataataataataacaaaaccttagttggaaaaagaaggcaaatctcagtgttcatgatctcgtagtgtagaaagaatagtgaaatagactaacacaaaaatcaaacaatgcccggttctaaactgccagttgatatatcaaatctttctctctctccgatgtacaccatatacaataaagaaagaatagatcttatttccctgaatcaatcatgacacgaaacagaagcagtgggcataagaagaagaaaaaaagaataccccccttaaccaatttgaacccttgtgttgttatctgtacatgccgggttttaaacagttccctcttgcattgctttgctcatccaagtcacacgaattacaatccaatacgcccttcagtaaatttagaccttccaaagatatactcctcctcactcgagtttgaggtatctctatccgagggggagggtcgggcgaaaaacaaatcacaatgacagtcaaattatcgcaagtgttacgcttgagtgcctccctaaccagctccctagagcacctttcaggatcgttgtggagcatcaattccttccgcgctatagtaacagcgcattggctgctcattacatcccatagtccgtcgcaccccattattaaaaattcgtcctcctcggtcaaatgggtctccttcaattcgggttccgcactcagaggacaggcagaacctttcgggcctttcatatgccaatcaccgagcgcacgagccactgataattggccattgagatagccatcataaatgacccctccaagtttctctattcgcagtttttcagatgtgcaattgggtttgtgatcgtttgacatctcaattgctctacctcgcctccccaacactgctctacagtccccagcattagcaatgatcatggtcctgcaaagaagaaaatacacatgtaagctattgaaatgttttcaagagtgtcgtgtcaagcttacgcaataaatggctttggggctagctaacttacgttccgaaaataagggcagtcaatgcagtggttccagaggagatatcaagagagctggcatccgcaaaagcataatcagctttcagaaaggcacccttaattgctttctccaaacatgttgggaaatgggagtcctccactatgaatctaaggatgttagttcgaacgaaggatgctgcatccacacctccatgaccatcaaatacctgcaatgcccaaatatgtaatccacaaattagagtagcttagctataaaggtaagtcaaaaaaattaacaagtatttttcatcataattcatctgtcacaaatttctcaattccagtaaaattttcatctgtctatggtgatgcttatgtacagtacaggtgatgggataggaaagaaagattcaccccataaaaggctccaggagatgggatctgcagtgtattgcctatatgttcaacaagaccgtctatacataagtgttcgtcctccatgtactgtttaggtcctctttcagcacaacttccagatctgaaaatgggcagaaacccggatttctcatcagaaggcgaattattgggaattatcccaacatccaaagtctggagaagagtgaaaagaaaaatgagttatggagttatcatttttcagtgcattatagcatcacagagtctggtgtgcatataaacatggaaatacaaatgcaaccatttggattacatagatgttgaaaataatcaatacagtttatcttcctacataaatgcataaatgctcaaaagggctaacaaattaaaggccctaaataatataaagctatttcaccaaacatatagtttcatgctttgcttccttccttcaaatatatgaaagaacttactacagaacttacaactatgtttcaactttcaagtgcagatagagatataacaatccacctagccgacacaatatcacttctattgcaaagaagaaaataaaatgtaatttctataatgccaaggaaattgtatcaaccatcaagggcaggtgtgaaaactgtttcatgatcaccatgatgaagtattgactagtaaaataataccacgtgaacagaaacaatagcaggagcagcttatattacaaatacagtcttctaaattggcaattcaaaaactcaccaaatcagctgttgccagcagccttaaagagctcatagtatgccgcactagatgtcgtggaggcttcccgttagtgttctgttgttttataccactcagattctccgaagcttcgtcttccatggctgaggcattgtccttatggtagccaccttctaaaagtgtatatggatgtgaaaaatccatatccgcagccatattgcttccaaatcaaagagtttactccttaattataaaacttcttaaagaacttaaccgatttccaaatcaagtcagcttgttataccgtcaaattaataaagatgtcgcttctatgtggattctcacttacaaactccaaatccaatctaagaggaatagattgtctttatctatgtctatgtaaagcaaaccaaataaataaccctaatgtttctggttcagaattcaattctttggcaaatcaaatagcacacgaaacgaaacccccgaaaaactatttatatatatatatatat

SEQ ID NO: 302842 - DNA, 1922 bp, Cannabis indica
ttatatatttatataagaaaaagatgagagaagagaggaagatttagaaagcagcaaaggacccatatcctcctccattaaggcaactaaacccaactaactactctctatacatgtgaaccgtagccattagccccatttccattagcaccataagggaccttgttctctgttttcttcttcttcagtacgtaaaaccatgtataagcttctaagcttacggcaacagcgcccaaaccaatgattatccctgtgtaagctctcttccacacttcttcaggctgcaagatatcgaaaccttcgtaaatgttaatgatgctgaggatgatgactgcgtacccaatggtgtggtgatagatattccagtagagtctgtacttgtggtccttcttgggcctcaagagcaaagcaaaaacctgcattagaaacccaattaacattatcatttggttaacacaaaagtgcccataaagtgtttgaagaaatgtttaaaagaaaaattttaagtacctgaagggttcccaggcagaaaagggcgattccaatgttcctgtgagggttttgtgtgatgccaactgagtcacttccgagtttcagaccagttccccaaccggcgactccgactatgtatgcagaggtttggcaagtgacgtggaggtaaaaccatgctgggtctgctgatttgaataccttcaagtaccttgctattacagctcccatgggcatcaatataccccaactcacagcgttcagtactccgtgggtctgaaatttattaaatattttattaatatcacaacttaacaacaacattatttaaatacatatttgttttcattacttggacttggacaatgatattgactcaataaataaaaaaattataaaaacaggaacaatttaaagaaaaaaacagagacactaatcaaactatgaatagattctcaatgattaatttctaacaattttgttttacagaaaactaatttagtaatattattatcatgaaatcaatctaaagatcaagaaagaaccaaaaaacaaaaacagagcaaaacaacatataacagaacaaaattcagaatagaaaccaaaaactaagaaaaaaaaaagtaatttttaacttacgtttcttttcctgagtgtagagctgccccctccggattgagactgaccggaaagaagattcaaagaggattttgacctagtattatctcctgatgtttgatgtggtccaagtgtggtacctgaaagaggacccgattgccaaacctgggtgatggtactcgtcgttgttggaagagtccaagttgcaaagataatcatttcgttgttctggtaagtagctgataaatccgtaactgggtaagtgagattcccctcagccaacgatgtctgataagtttggccgattggagatgtgtacactctcgggccaccactcgatcgtgggtaagccacaagagattgagccccgggcatggctgatgccaagttgttgctggggttgatagcccatgccacccacgtggaacttgttaccccagtatgacggtaagccatgttgagtttccctgttgttgagtcaaacgtccaatggaggaacgagttcagaacggcaaggtcattgcactcctggaactgttggtttcttgcgaagttgtagctcttacatgtttgagcagaggatgataaaaacagagtcgaaaaaacagagagaagaactactagacttgcgagtttcccggccatggtggtcggttttagtccctaaagaaaatggctagggacttaaaaattgttaatctgagatgggtttgtgtcaaaatgaatcaaaaaacaaacctttaatccaagtctggccagggaattgtgttgttgttgtaatatatctccacaaaggccttgcgagagaatgaact

SEQ ID NO: 302843 - DNA, 1111 bp, Cannabis indica
ctggtaccctcaaggggaactagcccaattagcactaaagtcggggcactagagatctagaagagtatctaaggaagaaggcctagtaggatgtatctggtaccctcaaggggtagtgccggatgggtagttcaaaaggtgtttcagagccaaggttgacatggcactcctttaatactgaatcccataatatcagaactttctgccttatgtcagaccatgagatgcgcgaaccaccaagggagacatgtcctttgtgaagctactgtacacgaagacgacgcatacatgccacataaaaattcttgtctcaatccttatatttaatctattttctttcttttattttatttaaatcgatttcaaacatttcgataaatactttatatttatattacattatttacttattattttaatgttgttttcatgaagtttcgctaaaaaatataattttaaaaacactcttaataaagtatagtcaataaaataaaaatgtaaaaaagtgtaattttaggtaggagaattctcattgttaacagtttttatggtataaatttgtaattttttcaaaaaatattttattaaaaattaaaaaaaaagttaaaaaatgatgagaaaagattattcgtctgtgttttcatattttatatttttctctcaaaataacatttctttatataagccatattttttgataaatatgcataaaatttgatgtaaaaatgattgaagatggaaggcccaagagtggtagttgggcccattgaaacatgtgattagggttagagaggagcacctacctataaatacagagctcaggtagatcaagctatcctcaagcctcctcttcctcctcttcttctttttcttctgtaaataatggttttgattgattttgtgtttagggttttgattgtttgtatgtgtgtgttgataatatgttttgggcacttaaagtcagacacgggtgtttgttaaatttcaacaataacaagcgaccttttgcagtgtgcctaaactgagttgctattatcacgattggagggagtagagaaactgatgtctcaatgcctcccttcaaatttaaattagctatatatatatatat

SEQ ID NO: 302844 - DNA, 2752 bp, Cannabis indica
cgtgtataagagccattcattctatgggtgtaaggagacttgaagcggtgacgttacaaggactgatgagatattctcacatatagttagggttcaaaggcccataagtcgtgtctcttgaagagagatgcaccagcccacttgaccttggagaaggatgagaaatttattgttaaaaaagtaaaaactttgactcgctaaaatttactgagtaaaccctagaaaattttaattattattaatgccctttaaaatttaaaataagaaaaataaatatttttgtactttccatttcatttctttatctttttcttcttcttcttccacacccaccaatattatcatttttttgtatagttattatcaatatttgttgaaatatctgcaaaatgtataaaatattagtcaaagtaatacaaaaatggcttccatttcccgatccacaatttattagaacttaacatactatctaattttataagaaaagtttcatgatttaaatgtagaatataaaatcctagaaaacaaaatatagttaaaaaataaataaaataggacaaattttaaattaaaataatagtaaaataacatataccttactttctgaagcaccctttctattcgcagaaacaaatcaaacaaaaatatatattataaatatataaatagataaactttatagtgaatattttaatatgatccttaaattctttctttttattaaaagatccttaaattcctatgaaccccagtagttgaattgctgctatatataacacatgaatacatatactaaattattgtatggggcagtaatagtactaatgatttgagttagtttctttatcttttcatgggtcctatcactttgtacatattggaattaatgaataagtatttttttttttctctaaattatgatatttgtaaaattttgtcttttgatttttttttttggataacataaagtttaaatatcaaatttaaatttatagatcaataagaaatttcagatttatataattatttttggagtcttatatcataataaaactattttaaaagattctctaaaaaaactattttaaaagaaaataactaaaatgcatgctacaaaacattcgaatgatgtagaatgaaattttatatattctaaatattattgtacctcatatgacttacatttatttgttttgttccttcttaatggtacgaaattatttatgttaagacaaacaagtcacctcaattcttttttaggttataatattgccaggtgtcttatattatattcatatatagatattgtgtcttatattattgctatcatattcaacaaaattataacatgtgtggaattgcattgaggagtggatagaaaataggacagatatatcatatgttatttcaaaattaattattgaacattattattgtgtagtctctatcatcacatggcctattaatcaatggtggttgtagctgtaataattgaatatataattttgatgtccatgttgttcgtatcactagaggaagaaatgagtcttttgccacgtattacacttccaaaataaattttacttttgtcagcacattttttgtactggcaaaaaagtatgtaaatctgcgttagtataaaaacttttgcctacacaataaaaagtgttggcaaaaataaacgcgtacatagactcgtaaaagttagactttttgcttacgcaaatgtgtattaacttttgccatcaaaaatatgtacggaacaattgtacttttactagcacattaacgcattggaaaaagtctttaacttttgccagtaaaaatgtacaatgagaaaatcttattttactagcgtattaacacgttagaaaagtcactttttgtaacgcccgtatctaaatatttctaaactcaaaatataactttatatttatatgggtcgggatcccaaagtttaaaacatgttttaaaagtgtttaactaggatatgcacatatatatatatattatttatttacaagttcgcatacaggcaactcaaaatagtaaaagaccgaaaccctccaggttgcactgtcgcgatatgtacaatcactgccaagctccatctcactgttcctccagcttcccttttcctttacctacacaaggtagcaaactgatgagtcaacagactcagtaagataagcaaaacatatatatgagtaatgcgagatcgactttatgcttaagccgccctgggctcagtaattgagctccccaaatagttaagaacgttcttaagggaagtacaacctctgtaccaaatgcaccaaagtaccagccctgtactcgtgttggtagagtcatcaatgtactcccggaaattactaagtgttgtaccacatgcacgacgttccccctggtactcgtgttggtaacaccgtaatcacaccgatatcttacactatactaacactcttaaaatcacaaaacaattagtgttagtagtgtagataatttaaaaacaatcatatatccatatatatatatatacattcttatgctatcttaccttgctccgtgctcaggtgtgccggtcagcctgagtggaagtacagctcgacgccttacagggccctaaaccataatattcaaaattcaatgagagacacgctaaaatatctatcagggatttaaaattgaaatcaaggataaccctatcgataaataggatgcaaacaacctaaattacgcaaaaaggggaaaa

SEQ ID NO: 302845 - DNA, 1066 bp, Cannabis indica
tgacgtactcgtgtataagagccattctttccgtgggtgtaaggacccaatggaggcttgaagcggggacgttacattcccccttccaactgtcacaggtgtggaggttttcctcgacaagagagcttttccttcatttgtgggcttcttgtgtaggtccaaaatagacatttggtgagacaagaccttgcctgtctgcaactgatgggattgttgagggtgtgagtcgtccgaatatgcccagaaaatatgcatgtcaaaaatgattggggggggggggggaagttcccaagaatatttactttttagagaagcttgttttattagagaggacaaataacaatagttttcctagtaaagtgttgcacaagctaagtccatacacaatgggggtatctgggaggtcatgatcctttctggagatttaagcatttctaatttacatctcagtgtcttataaaattatgatgaccttccgggagtccattcttctctcggaactacgcatccttgagctcaaggacattattctctaagcctcattgaactgggctctaggtcagaaagctatactaaaagaaaatggaaataacataaataattaagattttttcaaaaatttacctatatttaatggctaaaacatatacattcttaaattactattcttttacaagatatatatatacatcaatttctttaattaaaattatttcataggaggatcttttttgctagcctcacataattgtataatcttttttctcaaaaattttggagaggatccttttatttgcatcccatttacgagacaagtttcatattttgatttatttatttgagttttttgtttttattttttttttcacaaagtgatttattatttgagtatagtttaaacttttaaataatctaattcagtgatctgctaacaaggccgcccactatttggctcgtagctcttgttattggtctgatcgtagtttttcggagagtactcttcctagtactcttaaatcttttgtaattgcgaatttggtttgctaataaattatccattcccatt

SEQ ID NO: 302846 - DNA, 5505 bp, Cannabis indica
aaatcaattcagggtcctatttgtactattttagaaaatacagggtccattttgtcatttaacaaaacacagagtccaattggtaacttttgtaaaacagagggtccaaaatagtatttaccctaataataataataataataataataataataataataataataatagctattgttcaaaaatactactaaagatcatgaaaaaagtgatctgaaataatttttattttgtttttatgtttatgtacagtttaaagccattctaacttttaagcaagattctttttcaattttttatacgttttaaatttgattttattctatttttatttatgtttttgttttaaataagaaattttttttcaagatgaaatatttgtttatttattgaatatttgatatattatttaattattttgaggtggtttgtaagataataaataataattggtgaatgagatgattttgttggagagaaaaagagaaagatgagtattgattgttaagatggggtgcacgtaaatatttgcacaggcctattatatgcctatgtcacaagcaatatgtactactgctcagtaagtactgtcagtcttaataagtatggactatgctcaacttttttatacttttcacactccattccctactcaacaactttacactatgctagtctctactctaactctactaccaaatctatgagatagtgtctttagaatactattagggttactctaatggaatactaaaatctacaaaatagcagagtttatatacaaaattgcttcaatataactttaaagggtaaatattttttagaccacgtgttttacaaaagttacaaattgaacattttattttggcgaatgataaaatggactctgtattttttaaaattgtacaaataggaccttgtactgattttttgtcaaaataaaacttaataatgatatgatttagagatattatgataaaactggttacattttttgtatctgttcgtgttagaaattgtcttaaagttagtcatatcgctattggtataattaagtattggatctcgtataacttaaaaaaaaaaatagtttttatagaatatcgctaactaattgtatggtgtcacctatagaaggtgctggaaaccaatggtgtccaatagcaatgcttaaatgcttaaagttgttcatcaaaccgcctgcaccacaccgtaccgcaaaaaaaatgcggtttgaaattctttgcggtgcgatcgcggtttagatttttcctaaactgcgtggtgcggtgcggtttgcagttttgaattattaatatacggtttaaaccgcaccacaccacacattataaaaatttcaatttttatatttatttaggtctaatatgtgaaggtctagcctaaaacccactaattattgtcttattgaaatttaattttattttcatatttattttcaagccttatggtatttttgacaagtgttactcaagctttgttgtatttgtaatagtttaattatttggtgatagtccaaaccgcaaaaactgtactgcactgcactatttctgcggtgcaatttttgcagttttttaattttgcagtggggttacggtttcagaaattgaaaaaattccatgtgcgggttggtttaaaaaataatcaaaaacagcaccactcgcaccgtggacactcctaacaatgctcttataaaaattattatatatttttaatagatgcttcgtagtgttgtaaatataagtcagattttgtgagacggtacgaaactggcacgaacacgacatgacataaaaaaatatgtgcttagacacaatacgacacaacacgaaaaaaatataggcttagacatgacacgacacgacaagcgcgaaaacataacatgtaagcacgaataaattagctcgaaaatatgatgtattaaaaagcctaaattttgaatagtttacaatgtcaaaagtaatatttaaatagttacttactaagcgtataaaaaaaaaagagttgctcgtgtaacaaaatatgttaattttatttttaatattgtaaattacttaattttttttgaaaatttacaagtaatcttaaataactattacataaatgatcatgaaaaaagttagactaaaaattttattagatatctaaacattgagggggtctaccgaaataccctattagaggggtgtccctataacttttaataattagtattttataccatatttaatttccaaaaatagaaagtaaaatttaattaagatgaattaacaatgtctaaatcaaactaaaatttacttgtgaaatcatgaatcataatttgatgagtgggtcccataatctataccatcacatgagtcatgagtgggttccaatatatagatctaacatagaataaaagttcatccatatgacctattatataaaaaggaatagaataattgaacacaataaaaataataattaaggctaagagaatctactatcaaagattgattgaaaacataaatgtgttttattattatataatcattaatgaaattaaagtccctatatatatctaaagtatttatattaagagtaatttacggtataaatatttaatttaattttcagttgtaaataaatatttaatttttatttttagtaataataataattaagttataattgtagaacttttgtaggtacctaaatattaagtattaagtaaattctcacatgataatttctgattggttcaagtcattaatttttttttaaaaaaaatagtttaaatataccaataaaaaataatatgtggataataacttaacatttaacagtcaagtacttgcagagttttaaaaatataacttaaatattattactaataaaaattaaacttaaatatttatttacaattaaaaattaaatttaaatatttatgctgaaattactctaatattaattcatggtcgctttggtccccacccattttaataaaaattctcaacaattatgtatagtgaaggtagtgatgtatccttctatacatattaaaataatgaatattataagggtatttacggtactcaaatattgcttgtgtagctttttgtgtttttgtttcgtttttttttcgttttttttttttttcggtttttttttttttttttggttacattgtatttatagtagatttgttatcatttttttaaaagggtttataattttttttcttttgtatgtgtgtgttttttttttataagcatgtgtacacgaaatgtaatttaattttggtatcataaaacattttgaattttttagaaaatgggtagaatgtctatgataattacaatacatttaaatataaaaaatacgagagatgggtacattggcacttttttttcgcgagaaatatcgtaaaactccttaatattgtagaaaattactaaaaatgaggcaatatagtctaacaatatataaagtgttatattattagtgtaattaatgtaatattggatcctattttatatatcttaatttcataattgcgataaattgttaaccataaaacctattctcgtacatattggacattatgaatatgataaaatatattaatgttgcctaatattctttaaggtataatattgttattgatgcaatatagtatagattttatataatttaatgtaataataacttttaaagaatattgctaactaatcataatatgacacatttagaaagtgttaggtactagggctggtcttgaaatatagtttcatatgaaaaaaaaaacaatatttttgagatcttatttagaaaaaaaatatggtattttttaaaatccgaaaaaaaaataaaacccttaggctaagtgagctctaagcacatacttaatagaagaaattacaattgtatatacattttattttacatgtattaatttttacttttatttttatatttttaaagatatatacacttttatagatgatgcccaatactcgtaaattatgtgctagagttaagtaaaaagtaagagtatattgaacaactcactcacaaaagtagatatatttcaataaaatataggggaattacccaatatactatttttttaactttattttcaaatttacagtttgcatttctaaagtggttgcagcgctagttgtaataagggcttctgtacgattttttgttgcaatttaggttgtagcgctagttgcaataggggtttctatgtagaattccgtaaaaatacaaaaaaaaaaaattgttttgaagtgtaaaaatgaaaaatgccttaaaatataatatgagagtattttttttattaatgtatataaaaaaagagatattcttattatttcagattgtattaatcttatacggtccttttttaattttcatatttcagttcaatttgttaaacgatctgggaataaccaagcggctaactgattagctcgttcttctggttcatgtcctgatcgtatttccagtagggagtctgtcccttctggtttggaagctattttgttagctgctataataaaaattgcaatctttgtttcaaaaaaaaaatagccaaacctactagacaccaatgatgctgaatatgctcccttcaatccataaaatacttaattaatattacatttatgagtagtagtttaaaatagtggtgaaacctttagctatttctttacgtactcattaataatattagtgaattgagtgtagatatatgaagtatgtacgtacgtaatctgcatgtatttattaatgtagtaataacatagtacgtatattaatttcacaatcacacaaaaactaattatttgctcataacatttctaacttattattactacaataaaaaggccatttggttatataaaatatacatttttattattaccatgaaaaatgtaaattttccaaaataccataaaatgagtacttttctcacttttaactaattaatatggtccaactctctatttttgcagcccaaacttgttaacactaatatgaatatactttgagaccttttcatcacaagctttgggtgttcatctaatttaatccgcactatttcgctcatagtgcatccgactttcactttgtggattaaattgaattagatcattgccgattaaattaaatcagctattttatgaacacccttagtttagatgtctttttttaatcttataccaaaatacctacataaatattaattaatgttagtcaaatttatcaaactaactatttaaaatactaaaatatataaaataacctcacttaatttactctatacaaccatgataatcgcacaacataaatttatagtcattttacaccataatagtcgtgttaaataaattaacaattaacccaagatctatttgtatataacatagaacacaatagtagtatatgataattgagtatgtgtacctgattgatccatagcaattatctctgatt

SEQ ID NO: 302847 - DNA, 2064 bp, Cannabis indica
tgtaaaaatataaaaaataaaagaataattaaaaaaatgttgttttaggtgcgtggtataaatttcactttttcttaacaacacacatgttctgttcttcgaaatagtaatatataaagcattattattggacaccagtagtgtttagtacctctagacatgtcattttgcgattaattagtgatactttctaaaaggtattacagtaaattatatggcactcaatacttaattaaactaatagcagtaataacacataagacgatgatagcattactctaatatataatatcaataccgcacctacctacctagctattcctctaatctaaattatgcaatgtatgtgataacaataggcttcactattatattattattcaatttctgtctcagcagtttgtataagaggtcagaatatggatatctaaaaattactatatcttattgtaaaagaaaaagaaagaaaaggttgagaaaatcaaagtgaaaatgtatttagttaacaagagcgcaattacgcctaacttcgccttggttcccagtcttgacaccaatgcgtccaagcttagtcatggcaagcacaaaggcctgttcaaaagcagtagaattggatgcaaaaaggttgacaaattttcttgcttttttgtcagtaaacaaggtttgatcagaggtgaataggcctttcccttgttgtagattcttgaagtagatgttatcgaagatttccggtgtgtttggatccatgtctgtcacagctctagggtctgcatttcttggacactgctcttggagcacctttgcatattgcaggtcaagagttggatcaattctgtttttgctcttgaaactataaatcctcttgcttattctgctgcaatgtgagaatccaatcgtgtgtgctcctacaacaataacaacaacaaacaaatctcaatactaacagtagtcagaaacacgagtcaagtaattaaactctaatttgattgtgttgtgttattttgtttacctgagagtgcaacaaggtcgattagattgagaccgtgtgagacaaacattgttttgagcttgtgaactctgaattctggtcgaggcagatggtgacgcacactggctctagtggagattctcccatcaagtcttcccagttcaacttcataaaatggtccccctgtctgcaccattaattagtaattataaaacaaattacaaacatagatataataatgaagaagaagaagaagaagaagaagaagaaaggagattaataataataataataataataagtaaataaataccaatttgacaacatctctagtggccaaagccaaaatgtcagcacaagaaactttattcttgcagtgagggactctatcaacagcctcctttgctttgatgacagtgtcaaacccatctccagctagtgaaagattatctgagttgtccttctctgctgtcccattcctcgaaaacaatattattgaagcatcacatccctatacacatacatacatttccaatcaaacaaacataaattatataagtgcaaacaaaagtttgaaaaaagcaaaacaaaccctgatgaaacaatcatgaaaaaagagcctaagagtagctggagctgttgtgaagatccgttggaacttgtcttcaactgcagctcgaactaatgactccacatttgggcatgagtctttgtagtagtcctttcgaagctgatgagtagtagtagcagtagcactactaaggaagagaaagagaaaagaaacagagaacatagttggagaactcattttataacttaagaaaactatttttactctctctactagtttagtttaccatgaaataattagtgttgcttttctaatgatttatgtcttaatgaactgtttatatgtacatatatttatgtaagcaaatgctaattaaaaaaaccaggggggaataatgggaggtgggttgttcttagctgtaaaggagatcatgtggggtttctcataatttaaaaatacagagagagagagagagagagagagagagagagagagagtagttagt

SEQ ID NO: 302848 - DNA, 1204 bp, Cannabis indica
tgttcagttttgctgtagcagaattactttctgctgctgcaaacgcttacagtttttatattttctcatatacaattgacatttgcaaaaacacggtttttcagatacagtgcaaaatgaggaccaatacatgtttatcaataactgtaaaaaaaagtaattaatcctatttttactatttccaatttggtccctcatcaaattagaaatttttcttatggtatccacatattaaaatcctgacaatcatgcccttgagtcataaattttattctgaaatagaccacataaatttgactcatttacatgatgacccaacatatattgtatatattcagtcactacaaaaaactgctacaaacttgggcatacatattagactcccaagttctagcaaagaggtcatcagttctcaagttccgccatctcagccaatccaagccccttcgcccagttgcctagagacaagatagatcttctaccacatcctccttttaacattgtcttaccggtttattattcttcgttaccagaggaagtagtatgtattcaattggagacattagattgatttttcagcaagaaaatcatttttgagtatgaaaatataaggaaaaaaaagcgaattcgctttacactaggccaggtgcaaaattcgttgatgctacaaaatttaacgagccacttcttgacatttttgatcgtcaagcgattgctgagaggctttggcccagatctggctaagtttgcagcaaacttattggacctaaatgctgttatgtgtagcagattaggttctgataagttttttacaatggcgagtggagatctagtctttatagccgatagtcttaagaatcatgttgctgctgtaaacttattaacttttgattaagtcatatacattttttaatctttggcttacatttaatttcatatagtttctcttttagataagtctgattgtggagaggtgttgtaacgccctaacaattaggcacgccacgacaactaattatgaaaccctaatcccctaaattgggattactaggaagaaaagcgcgagaaatttaaactttgaactaaagcgaaatgaaaataaaacttgtaatagcattaaactttacaaataaaagtgacaagtttcgggatcccaaaaatcttttacaaaatattacaactcttttcactagccgacctaagc

SEQ ID NO: 302849 - DNA, 676 bp, Cannabis indica
taaaaaaaaacaaaaaatatatttttacacgaaaattatagaaattcataaaatttatataagctcacaacaaaagtttgtacatgagaaacattaattgtcaattaagttatgacatgttcttgctcaactattataaatacttatttataaatataagtaatgcagaaatggctatttaagattgagctacatgacattaataaattgtgtggtggtaggaaattgcaatacatatattttctcttaaaaaagattcatattcgctatgagtaatgcctaataacatctagaaaataattagcagtttttcataataattattaaaataaaatatataagattcaataattatactcgtaacaatataatactttgtaataaattttaaacataagtatcctttagcaatatagcatttctcaaggttttggatactcgtagtaatgatgtccaccatttttttattgaagcatttatatatataaatattacaatgcatattttaaaatttgattctaagactctcaacacacacacccattcatactcttttggccacttgagttagcctctagtagttaaaattagtgacagacctaaaatttttattatgtggggattaattgttattaaaaaaaaaatttaagtctactttattttaatttatttattt

SEQ ID NO: 302850 - DNA, 1731 bp, Cannabis indica
aaaaaaatgtgataattcccattacagtgtctagatcttggtaaaataattcccaacacaattaacaagagtgtttaaaaaaataaacaaacagaaaagacataacaaaatagaaaaaaaaataggattgatatttttctcactcctctctctctcctcacatgccccacacctctcaaggtgtgtgagagatctaaaccctaacctcattacggtgtctcatgagttgaatacacactgtaatatctaaatttgttcatcctataagatctgatagcccactctatttctgagtgttatataagaaaagaatcaagaatactctgataggcatcaagagataattgaatttctttcagtagagatccttgggcttatggttcatattggataaaaattattttatcaaaaatttacttttgcttgcttttataactttgatatggaccataaaaatcaacactttcctcctcggataatctcaagatctggtgaccaactccttatccctaaagtaatcagtggctggtggaacgacccgacagatgggaaggaatggtgattcgcctccacgtcccgtgtaataaaaaagtctcgaccataaccaccaatctttgtaatttttcatgtgtggtaagccaacagtagcctaggagagaaaaattaaagtaccctaagttatggttgcgggggttggacttgagatcaaattattagatgatctcatgaggaaaaatggctcccccaaccctgttgggctacaatacgtacaatgtagataaatacctcaaccctttcagactcagctacgttgggcagataccgtagtaattcgctaccctttgaaattaaggatggagaggtaggatagcaccctactcggcatggggcttggaccatgcacagaggcccgtccttggatggtgcaccgattgcccttcacgcgagaggaaaattacgacctagttgtaaaggccagtagcacggaggttgttcaaccgctttgatgtagacctggacagaaaagactaccataagggtcaagcttttgtagattttctcgaaatgggcgtggattctaatttagttcctccttgttgtaatctgcaccagcctcaagcacccacccagaaggtggtataggctcattgttcgagttgcaacccccatcaatgtttgggggtccaacttcctccattacttcttccacttctcatatctaccttaacttcttccttataagattcttttttttttttttaaattctagattgttttgtgcttgggatgccattagtcgcccaatatgaggatctaaggctgaagatactcgagtcatttgctttgtctgagccaactttcatctagtatgaggagtttgtctataggtgtgtttggcgatagaaatagcaaagtctactaggacagcttgtctttagggcggagtaggacgtccatcagggagcgtatcctagacatctgccagaacaatataggtccacgaggccagaagaaattttctccaacctcagttcagttcccagatgtgtttgtcatagctatcaccgccaacctggtcagtatagtgatgatgttggaatttggactccaaagagtcacttgaaaacccttcctcaaaggattatggagaaaatgaagtttcactcaaggatgaagataaactacaagaaaagaaaagctacttttgccggcgcttaagctcgccggcaa

SEQ ID NO: 302851 - DNA, 3873 bp, Cannabis indica
ttttcggtagcccatctcgaaagaactccacagttaagcgagcttgacttgggagtaatttcaggatgggtgacctcctgggaagttttcccaggaagcgtgtgagtgaggacaaagcacgctggaaacactcgtgttggtctgtagggccagtcatcaatccatgaagcagcaagagtgacgtacccgtgtataagagccattattccgtgggtgtaaggacccaatggaggcttgaagcggggacgttacaaagacccaagctttctttcttttcaaggttgtgacttcatgagacatggttgcattctagatgggctagctaatgcagctttgagagattttggtttagtctcaacattagtgctttcaaggtatgtttttggtttaaagataccatgtttagacctggttaacataggataagtgtttagttgttgaggggctgctatggcagtggtactttcagtatctgaaccagtattaggagatgcttgagggttgtgacatggtgggacaacatcatttgggttgggatgatttaggatttgaggtgaggtctaaaactagaggcttgattatggtcaaagacgggttcttggatattgttattggaaatagcaggtcttgagtaaggtaatgtatatgctgcagagtcaatgattatagggacagatgatgatttgggttagggggagagaaagagttgggagtagggaaactcttgttcgttgaaggtgacacttctggccacatagaccctgccacttggatgtagacattgatacccttttgaggggatgctatatcctataaataagcacttggaggatctaaaggcaaccttgtgattctcatatggtcttagcaatggaaaataagaacaaccaaatattttcagcatattgtaatttggtttttgactgaatagtttttcatagggagagagagattgtttgttgttgtaggaaacccatttatgagataagcagcagaagcaaaggcttaccaccagaatgctaaaggcatgtttacttgggtaagaagtgtaaggtccatgtcaaccacatgcctatattttctttctactctcccttgttgttggtgagtgtggggacaacaatttcttttaagaatgtccatagttttgagagtgttttacaagggttcatattctttccctaagtcaatttgaatgctctttattttggtctgaaagaacctttcaacaaaggcattaaactgtaaaaatagagcagtggtttcagatttagtttttattggaaaagccatacaaacttagtgtaatcatcaacaaaacttaggtatttgtaaccttcactagaactgtaaaaatatggaccccatacatcagagagaacaagttcaaaaggcatggaagtgttattttgagaaggtttgaaactaaagtgatgtaatttgcctaactggcatgcatcacagaaaataatatgtttacatttcttatttggaacaacttaagacagaatttatttaaaacaacttgagaggggtgaccaactcttgaatgccaaacagaggcaatttgagaggtttcatggacaggattacttgttgtagtgaaattgtaggccctgggatttggtttgagagaagcaccactggtttgggtcaattctttgggctttggggcagacacttcgagtttgtaaaggccttcactaaggtggccctgaagaaggacctgcttggtggtcttgtccttaatgagacaacacacatcatcaaattcaagagtggcattattgtctttattaaactgagatatgctaagtaaattctttgtaacagtgggaacatgaagaatatcttgcaagactaatgttttggaaggaaaattagctgagactgaactatgacctatatgatgaataggtaaagaagagccattacctacaacaactttggcttttcccttgtagtcaacagctgtggagggattttgagtgtcatttgtcatgtggtgagtgccactagtgtcaagaaaccaggcattggacaaatcagatgtatttgaggcagaactagcttcaagagaaaggcttgtggagaatcactggtggagggttgggaattggaattcaaactttggggagggccagtaaaagtcatatcaaatcattgataccatttgattgccacatgtccatctcttccacccaattggcatataggcttatttcctctgcctcctttgttgttgtaatttcctctaccccctctgtatagtcctttaaaaccatgattactgtaaaagcctcgaccaccattgttgagatttgtggaagctatgttagcttgaacattgacaagaaaatcaaaggtaagttgttggatacccatctcttgactttgaagcatgaaatgaattcttgaagagtgagaggcactgtgcgagaggtgaggttaacaacaacagcttcgtactcagatgcaagtcctccaagattgtacaagaccagatcatcatcagataaaggctgttcagctgctgacaaagaatctgtgtactgcttcatcttgaggatgtattctttgatcgactgtgaacctttcttggtggtctgaaggagctgtaaacttgaagcaatctggctttggatcgcgtggtgaataattgagaaaatgtagtccaaatctcagtcgatgtttggcaattgacaacatagccaagcatgtttttaaagacaaaattcattagccaatgcatcaagaattgatcaaaatgtagccattgctgatgagtaggatttggaacattacctgtaagtcgagttggtggtggtggattcagaccgaggatgaatcgatccagttcatatgctcgagctgcagcaagggcaagagacctccaaatagtgtaattcgttcgatctaatatgagattcgaaggcagaagattattgttgggaagaacaggttgagcttcgactggtggattttgttgagccattctttcatctgatggtggatctctccttgctggttgtttgcaattgttggacatagctttgataccatgaaagaactctgtaaaaccagagttcttgagctaaagaattgtgagatggaacgagagatagagagatggaatgaataaagtgaagctcaatcaatcgattggcttgtttgatctcttatttatatacgtgatctttgtacaagaatggttagttacaaactcagcaaaaaccagctacacaaaatagaaaaataactaacttaataacagcttgttagttaggtataaatagtaataactaacaactaattacctaactagctactaaccacctatatctccaatagattcatattgtattaaaaatttacgatcataataataataattaatacaatataaaattttatccaacacacattatttttacttatttaacataatactaccttttacagcctaccaaacgaactctcaatggattaaataatatcaataaagttgttggtgcaatattttggttctcaatattatagaaaagcaagaggaaatgtgtgttttgtaatttctgactgtgcaaatcctagtgtctcctattgttttaggcacgccttaataaagtgaggagatcgccttataccttaataggattggaaatggggattccattggacactgattctcatgtggcttgcatggggcctggcatgcatcctaaccgaacgggtaacaaattgtaggtcaacgaatagtttagtagacccaatgtcgagatgggtaactaaggccatcttcaatggtaaaacttaaatttggtgttaaatcaacaccaaaaactactacttcaacattaattttttttttcaatt

SEQ ID NO: 302852 - DNA, 1142 bp, Cannabis indica
aaactcaaaacatattttgatacatcagtacaaagtagaaatatgttaattgtccatttatgaaacagacgattgaaaatgcaattggagcgcctcgatttgaccatcatagtagttaggaaattatcacataagtgtgtcaagaatcaagaaaatgcatgaatattgttggttggcttacgcattcaagcctctatagatttaaaaagtgagccaaaagaaagatcaaaagcatacaatttccgaaatcgttcttccatggaattaggatgagaaaactgctgaggccttgaattacgatgtacagggccttggacagttgatcttgctaactgtaacattaagaatagtgtcaggaagcagaatttactctaaatcatagaataagactatacctctaaaagcacgaccccacggagaacccttttaactaccatttgtgtttgatgaagcaaaccaagtaaattgaatcactaaaacactttcaactaaatgattatagcacaagcggtaccttggttacatcatgtgcggtcaaagtttggtttttgatagaaggccactccagcaaacccttttgattatgatgggtccgcccattggtttgatatgcgtactttctgttcagttcattgatcttctcttgcactgctggttttaacttctccagctcactcaaagcattcaataaattctacaagaaattaaaattaactgacatacctgataccttaagttttacaaaagtgcttttccataaactaactatgagtatattacctttctcaagtaatctcttttgcttttaccagatgcattataatctcgatggcatggtattgtttcagagaccaagctacagcataaaaaacgcaaataatgtaagcttaagtaagggaaaaaggacaccaatctaactttcaccctgttccacaccaagccagtagcacatgtgattgacgggttatatcacaaaatcaaagagggaccttctcaattgattgacatgtaccttgagaaccttagaagcataacatacagatcgatgatattcttttcttgtcgaaagatgttggcctacaatacaagcatattaggaactaaaagtcatctataatacacataataaaaatggagaatca

SEQ ID NO: 302853 - DNA, 3300 bp, Cannabis indica
atatataatatatattaaaaaaaaagtcccaaatactaaaattctttctcagcctctcaataaaattatttctcacatatattgtgtatttatgtggttaatttttattttagttaaaaataaaaaaaaaaaaaaaaccctcttatctcggttcgggcaggttaacctgcccaaaccgtcggtcaggttaagattatttttttttaactgggtagattgtatgcagaattttacaaaccgatctttacgttaggttagaaaatatgtaccataaaccgactaaaccgaccgatgtacagccctaatctgaactccgcattgacattcaaatcagtttaggatgcgatttttaccaataaattatcttttttttaaaacatgtggttgaaaaaaggaatgaaaccaaaaagtagagcaagagaagaaaaaatagaggtggtaagaaaaaacctagatgcctacaataaatccactacaaataagagagaacggaaggttaaagattaaagcccagacctagccaacaccaccccagctgtgtgtaaaagaaaacagtatccaaaatcactattatattgctaaatgacattgtgtcatgaaaaaagaataaaaacttgttaagtgccaaaatcagatatttctctagcttaaatttataaatgcatcttacatccaaacccaaaataaataaatataatagaaaaagtattatcacaataaatttcagttcttcagtagctattacactaaccactacgacagtaaaccaaggcacccatacactagagtatatttgctcttcataaaattgaacagtagggtctaaagctgcaaaacaaaattcgaaagcttcatcttttaaaaattttactaaaacagataatattttgaccatattaaacaaaataaaactcaaggctaaaatcggcaaacgcattagagactggatacttaatatatactctaaagattcacgctacaaaattaaaaccatgaatttcttccaaacagaaccttcacaactgaatcgacctcttacaattaacttaatctccgattctagctgattgagcagacatgtatacccaaaaaaaaacagagagattgcatctataacaccaagtctgttcgtcaaaaacaaccgctaggtaaaatatacattttctacttaacagtttcaagaatcaaaaaaaataaatcctactccttcaaaaagtaaactcgtcattgcaaaaagcaaaccgaggaaaatcttaaccctaattacataataataaaaaaaacccctaaaactttaatataaccaaaaaaaaaatagaggaaatgaacagtaccagaagaagtaagtctagagacgctacctccctccatccggtgacgaaatccagcccgtttcgtctctcagctgcttcccaaacatacactcatctactgcttcaacagaaaaaaaatacaaaactagctctaatttaaccccaaaaccaatgttacctaatagaataaataagggggaaaatattagagagatagggaaaaactaacagaacaaagtgaccgcctttagcaaacataccgaagactttgagtatctcccggatcgaattagggttccggcgaatcagcgactctagggggaaaaacagagttggaaacgacgacgaaggttgagaaatgtagagagagaaagagagtgagcgcgtgtgagagtgaatacttcgacagtgcctttttcctaggttttttttttaaattatttttttccctttttcgtattttgcgtgttcgttttcatgatccaatttctgagtttggtaaactcaataaaataatcaaattataattccccaaactaaccaaaaaataaatcggggcgtttcgatttcaatttcgcgagacgggcgaagatcgacggttgaaaagtgaatagaatttgacacgtgtcaatcaatcagtggtaagcagtgagcatcttgggttgtgataagataacagagcggtcgtcaaatattgaaactggataataaatcgtaaggttttcttaaacttatttgacggtgaggatgttgctgtgaggaaagatgagtacaaaggtgtgtaagattagattaaagggttctgtcaaaatcaagacatttgtttataaaaacgatgtacacgtggcgtaagaagaaggtggaggattggtcagaacgaaatgtgtaagtagagactagagataccccctctcatttaggaggatagaagcgaagaagaagcgttgcctagtttatctagggcttttatttatttatttattcattttgattaaatatttatttatgtattgagtattaattatgtaattaatattatcttaaattttaagagcttatgtacagttaaatttgactttataaatttttggggtttttttgtttttacactttaaaacaatttctaaattgcaacaaaaaaatcgaatagaaaatcctattgcaactagcgttgtaaccactttaaaaactcaaactgtaaatttgaaaaaaaaaaaaattaaaagtatagtatatgggataattcttctaaatttttaccaattttaataaataattatttgataaaagaattgtaaattatttcattcaaattctttttaaatttaaaatattaaaaaaattacacataaaattatttatctcacattgctggatgagattaattagattagttattcatactttcaacatgttctaaaacagatcttgacaaattatatgtaccaaacgacccaaaagtacaataattagcatttgaacatactgaaagtatgaataactaatttaattaaatctcatccagtagtgtgaaataaataatttcaagtataatttttatatcatttttttattaaattttataaatataagttaaatttaaaaagaatttgaatggaataatttacaaatttatttttaattacttttatcaaacaattatttattaaaattggtgaagatatataatgtcaaatttaatcctacataagctcttaaaatttaaaatgatattaattaagcaatagatactaaatggattttaagagagacaatataatattagaattatactaggtggatgtaatgtgtcagcccagggttggtcctatgctaatttgggtcttaggcaaatataaaaaatggagcacaataaaaaagtgaggttgttgagatttgaacactaagagtatgtttggtattattttctgttttttgttttaaaaaattatttttagaaatgagaacaaaaaatagtttttgaagt

SEQ ID NO: 302854 - DNA, 3870 bp, Cannabis indica
caaactatattttttttgcagtgtagtgcgatgcagacagtttaagcgatttgataaacacccctagcaaaatatattaaaaaggtttctgcatacaccaaattgtccatttatatatcaaattcgttataaaggctggttaataatcttggagcctataccaaaagatctctatgagtaaatatagattaatttcaaccctaatttgttaagaaccaaaaaaatatctaagttcaagtgataacaattgagccaataataatcataacatgtaaagccactatatatatataattaacaaataaattattgtacaaatcccactatgacaaagactagtctagcaatatgcatggttcccaagcttatcctacttctactacctgtaaagagtaaattaattaataattacaataataattattaaaaaaaaaaaaaatactaaacttggatacaactatatatatgatgatgataaaaatcttgactgtacaaaaatactatttcactaattaagagtttatatatatacaaacataactaagatcatgcaaatcatacttttatagcacactttctatagtgtcatatttaataataataataattaagaagagatattataacacccttttgaaacagctcttgagtttggcagcacaaaaattatgcatatttatggtaatgaaatttctcactagttgaaaataatctactaatggtaattaaaagatacaaatcacagctaattattgaaaaaattaattaattaaaagctgctgtgctaattaaccaatggggccttgggctctcaaaaattgtacagctagaaatatataataaaaatcaaaatgtagaaaaattaaagcagctttacaaaagcataaagatataatttacataagttgaaagagattgtataaatataaatatttgttattatattattctattttatactactgattacttgattagtgattatataagatcatattaaccctagaagaatttaagtaaaaattgtaaatttgtgcaaaacaacttaaatttttgtaagtgtgattaataatacatgctaagagtatttatggtgcttaatattattatttataccatttctaataagagatgcaaaagctgatctatattaagtataaataataattttataaaatctttgtatcaacttgttctaatacataattataaatcttgatgtaaatttaatatgtcatttaatgctcatttaataatttatcaaaaatataaaataataataataatcatacaatagtaattattaaatttaataataaaatactaataattataaaaatcatttaaatgagtatactaactaaactttaaaaataaaatattaaaatggtataatggtaaatataaaatcataacatttattgtgatataaattttgcatcatgttgatctaaatttgaatcactttttgctatatttgaattacaatttggcacactattggagtagacttttaacaaagtgagttatattttgcatttatgatgtataatattattactggtgtaatttaatatcaaatcctacatattttactttaatcaagattatagttaatcactaactaattatacaacatcacctcatagtggtgttaggcactttggtgtcacatagcaatgctcaataaataaatggctaattaagatttttgtctcctgaactttaacatgcactaaattatgccccctgatcatttaaggtcattaaaaatcccctctaaaccgttgagattgttagatttgagaattttttttttctattttagtaaggaaaatctaacatataaatgaaaagctcaaagagcttaatttggtacatgtcaaagttcaaagatcatgatttggtagatatcaaagtctagtgaaggatttagtacatggacaatcacataattagtaaaattaaataaaattggataaatatccttaaatctaacgatctaaatagttcagaataaatttttaacggttaaaaatattcaaagagtatgatttaatacatatcaaagttcaaaacaaaattcgtaattagcttaaataaatatattcaattttttattcttagcgaaattacttaaacttttatgtataagaaataaatacatttttggacatagtgatcagaaattcataaatattcgatgcaaacacctgcaaacagcgcaagaacctctttgaacatggataactcatcgtctaatcgaagggcatgctttgtcaaaataaaacacatttttattttctgtttttattaaaattgaaaaacaaaagtggttacagaacgtatttttatttttcaagaacaaaatttttaaaaacaaaaattttactttcattatgtgattaaaaaattaaaaataaaagtgttaccaaacgacaccttagctaataaaaaatactaaaaggtattagtagtatttagcattttcttaggtgttaatatcgttattggtccaattaagtatcaagtcttatataatttaatttaataacttttaaggagtatcgctagtcaatcgcaagacaacatgtctagaagtgttaggcacaactcatagccaatataacaatactcttagctaattaattgatatttaactacatttatagcatagaacaaagtactacctatatatgtttacttaacttgcatagctcaatagatagattagatagtgcttaagagcgtgaactataaatacattaattaattggtaaaaaaatctgcactcatgtggaggctgattaaaatattaatttgtaagattctgttgcactaattatttaccaaagggtatgtgtgataataatgataattaagaattaattaataacaagattaatttttattttatatttttcaagtacaaaagggacaaaggtgcatatgatgggtttatatatatatatatatatatatattgtagtttgattgattaaattgatgatgatcaagattagtggtgaatagtagggcctttagagcaagttgatatgaatccctatttttaaaatatatataaatataaatatatgtacatatataattagtctttgaggggaagacaaatcttgtactgagataccatagcataagatgtagatcatgtaatcatactaattatagtatcatatctataattattactacataaagtttaacacattaataactagtgaaactcccactcaacatatgtttgtgacaaaaaatataattacttttctatatatatttatataaattgggtatgtccatggccacctaaaaaacaaacacactactcatagaaaaatcaaggaaaaattaaaaaaataaataaaagggtagatgaagatgaagtagtacactaccaatttccacacgtatcaatgagttgtagtagtaataataataataaaatagtttcttttcttttttgataaaaataataaaatagtttctagaaacttatgaaggtgcaacattccttacaataaagaagaaaacaaaagtggcaatgagttaaaaagagaaatggtacttctaaccccacatcatgtgttatcctaatctactatgaaaagacatttaaaaatatataagaaaaaaaagtttttgtggttaaatcttactaagtattgttttacttgtacttaattctccaaagctcaaattttgatagtaaaattttttaaattaccgaactgttagcaaatttaaagtgtcatctaattaactgttaccataaattacttatgtatacactcttatacatgtggcacgtttatattggtacacctaatattattattttaaaatttattt

SEQ ID NO: 302855 - DNA, 1419 bp, Cannabis indica
tggtcactaggtgtaaatttctcatttttcaatcattacatattaaaaaggatatttgatacctttcagtatttggataattcacctaaaaaatacctttcagacgacttaatcattaagttgacaatcatatttctacacaatcaaataacaacatttgaatcatttagaaacacaattctgcaaccggtgttttaaattgacaaacatgctcctgctcatccaaacgataatctcaacaacccctaaaatatataaagttcatataacatagaagttcaccctacaacgtacaataaaataaaaataccacacatccattcaaaaaaaggggatgaccagtctaccaacaatacataaagtcgatttgttgtaccaactacgaccagaagatagaaatcaaaatacaacataacaacatcaaagatcactgcttaacgtcaaacataatgtcatcaaacctacagaagatagaaatcaaaatacaacataatagcatcaaagatcactgcttgacgtcaaacataatggcatcaaacctaccaccactaggatccaccatctcctccccctgatcaaaatcaactggcaatggcgacaacaacccatgatcatgagcagctccatcaatctccataccctcataagccaaaaaaaaattcatacacctctatgtcaccattgacatcccagtcttagtacttattttccttgtattccttcataactctacctcttgtcttcagaattgctttcatgaccacactaccaagctgatcataacacatttgtttcaacttaagatgcttgtcacgatataaggtcataacttccagcttagcttgtaccttcttctgatcttcattaatcttttccaagctcgtaccatgctccaattcgtaagtttccaattctcgatgtaaggaagtattcgtctctgtcgactgatgatttttctaattcatttccacctccttcttctttgcaaatatatcaaagcttgaagtgcatgtttgtaaagaccgcttagtttaatttagaaattagcagatatttaaggtttgattatgaaaattatttatagatattcaaataattatttatgttgttatttttgaattctgaatgcatttttatgtcatatagtgaaatttcataattttgcattttcggtgcccggcaacatggaacacggtgtatggctcagtagagtcacaatttagtatttttgtatagcggggcagtttatttagacattgggaatgtcgagattagtcgggaatttagagttttcccaaaaatacccttaagtgctttttaacccttttagtgtgggaggggcaaaatagtcattttgccccataagcctttgtccttttgtggacttaatatttgatgataatgtgatttatgtaatgt

SEQ ID NO: 302856 - DNA, 910 bp, Cannabis indica
aaaaaaaaaaaatttaactaaatgctatggttgcacattctggagcagccatcttgttatgattcgtgagtgttgaaagactactataatttgtagtatagaggtacgaccgacaattttctcctaggaaagctactagtagctctactttgtctgtggagttttgattgatatttttttatactaaactagtattccctcgtcatgtgaggccaccttatctttcttgatttcacgcgctcataattctttatttttgctagggggggatagtttgtcataaattatgttagtagaaccagctgattaaaatagacacaagtgattagcttagagttaaacacagatataggctaataaggttgttgtttactttataatgtaagaattttctatttaagtgatgcatgcaatattccttcaggatcatttaaaagggtggatagtaaaagtttatggcattgataccgatggtcagttccttgaaaggcttgatgctattgtgccgaaacttttggtgcacccagtctagcacctgttaaatggcatgcaaatataaaagttacagccttgaaaacattctatatgtatcctgaatttaataagagattgaactcaccttcattttgatctatcgatcttggagtctcagttatcagattcttggatgaaggaggcacaaagtcacaaacttgaggtagttttagaagtgctgagagatatagcagtatgaaaatgagatatgagaattcttaaaagtttgaggatcttttcattgtgactgttactaagttgggtgtcactggttgctggaaggatctcacatgttttaagaagagaaaaacatatagaaagatacaagactgtggttggctgttcttttcaatttcaaatcgtgggagcaaacttg

SEQ ID NO: 302857 - DNA, 3897 bp, Cannabis indica
aggatcacatatgaaaatcaaagtctcttcaccacatggttgttaccagcacattaattggtgtttaatagaataaaaccgttggacaagagaactggaaacatgctcaatcaattcatgttcgtttatgtatgttttcaaaaaactggttccaaaccataaaacaacttaaaaacaatcattaaacaattgttttcagaaaactcaaaatttagtttttgtaactcctctttgaattaaatcttcctccaaggtctcaatattcattgaaatgatttaattgagtattgtaaccgtttctaatagaaagaaacttatctcattgattccataacttccatatgtaataactcacttaattacatgtgattcttaagttacaatctattttcacatttgtaactcctcatatgttacaacttttatgtgtattattaaactatatatgatataatacaacctccaacacataatatatattaatctcatgttaatatataatatgtcacatttaaatattttaaatttttaacctatattatattataactaataatattacatatggtcattcgtgaccaccagaaaaaagtttttcgattgataaattgggtccttcaagcacctccatcccgtatatgttaataagttttaatatataaataacattcaaataataagatgttatagccttcgtctatgtaaagcaagcttagtcgagtctgtttggacagtttggtttgagctgtcaaagttgttatttacaactcagcaagtccgaagttcaggagattgttagaatattttcacttggattgttgatgtgtcttgtatctcgtttgtgcctatatttatgattattgttttagctctcatcacgattgagagagcgttttcacaaaaccaagtatgcacgtttattttacatggtattaaagcattctaaggatccttcaatggcagcttcaaacaattccagtggtgctggttcttctggtctcactctcttccaaaaatcgatgaactctggctcagtctgctccactactctcaacatagctctatcaatcaagctagatcgcaccaacttcttgatgtggaagtctcaggtcatcccaaccgtgtgtggtcatggtgttgttggttattggtttggtactaagtcgtgtccacttgaaagtattatcatctttgatgatactggaaaggcaagtgaaggtcccaatctggaaaacaaagcttggatcaaagaagaccagttactcttgagttggctcttgtcttcgttgtctccactagtcttgagtcaagttgtgcaatgcgaaacaactcgatctctctggacgacgattgacaatatgtttgctattcgatctccagctaagattcatagttgaaaatttagatccaaaatctcaagaaaggtagtatgtctatgactgattactttgctcaattagaaaattttgtagacaacttgcagcagcaggtcagcttcttgatgatgaagaactggtgatgcaagatcttgctgaagtcggtcctgaatacgatccaattgtttgcagcattactgcacgcaagcgaaatgagaaaatgtttgtgaatgaggtctatgcaattgcacaacacaattctactatggaaattactactcctcaagctcactacacctccaaaaatggagaaaatgcaggtcgaggttgtggtaatggcaatatgtgtggctgtggtggcagaagaaaatatggttcaaggcgtggaaataatccagcatgtcaaatctgtaccaaaataggtcacattgccatttactactcgtatcgcttggatgatagtggagctgcagcctatatggctacctcagatggagcatttgatcctagctggtatgctaacactggagctacttcatgtcaccgccaagcttaagaattatcccatcaattcatactatgaagataaagaggaaatgactgttgctaatggtaaagctttgtctatttctcacattggtcacactaattgtcctacttgtttatctactactatgctaaaattgagaaacattttttgagtacctcaagtaattaaaagtcttgtaagcatatccaaactcaccgttgataataaagtttttgttaagttttactcttcttcttgtcttgtgaaggacaaggtaataggaacagctctactcagagggaagcttagcaatggtcaatacaagttcaccaatcctcatgcagagtcctcttctagtgtccaaacttttcatgtgaataaagcacactaatactgattttactgttacatttgagtttgagagttgtaagacatctgtaaaggctattccctcatgtaatgtcactcaagtgtctacaaccttagatcaatggcataggcgtgtgggacactcctccccttctgtaatgaatcatatattgcaatcttgtactgatctaaaggttactaataaaaccattagtttttgtgatgctcgtcaatgtggcaaaagtcacatatttttccattttctaattctaagcatgtgtttactacttcattagaacttattcattctgacatttggggtccaactaagtgtctactcttggttacgaatgttatatccattttatatctgacttttcatgatacacatggatttttcattgactcaaaaatttcaaactattttagttttcaaaaatttctagattttttctgataaataatttaatagtataatcaagtgggttcaaactgactgggaaggtggaatgactttgttagcacaagcatatatgcctctttcattttggtgggaagcattctctactgtcgtgtatctaatcaatcgtcttcccactccactgttacaacattctactccattgtttaaactatttggtaagaaacatgaatactcatttgtaagaacttttggttgctcatgctttcctcatttacagctttatcaaactcataaaccacatttttcgtacttctacatgtttgtttattggctatagtcatggtcataaaggatacaaatgcttacatccttgtggcaaagtttacatgttcggaaatgtcatcttcaatgaaaataaattttcatgctcatctttgtttagtggtcccccttctttatctagtacatcttacaagattcttgtgttggccactaccattaattctgcatcaacttctattgctaagctacctgatgatgagagaactacaagtcaaactcctctaaatgtgtcttttatgacacctattagtcctatctcacaaacagtaggtgaccaattagtacaacaacctctgtcatctactcaaggtgacaaccatctcctattatatcacatgtatcattgcattagtcatttcttttcacttgttaaagctgcaaatgagattttaacagctacagctcctctgttgcttccacaagattgagcttctagtcatcctatcatcacccgctccaagaatggaattttcaagccaaaaatgttcttggctaccaaacatcccttaacatattctttgttgtctcgttaacccaagacagttaaagaggctcttgcttcgcccaaatgaaaggctgctatagatagtgaacataatgcgctcttgcacaataaaacttggattttaattccttcccaacctcattaggaataagtgggtgttcaagcacaaactgactcctaatagtactcttaacaaaggtaaatcacatcttgtggctaaggggtttcatcaaattcctagtgttgattttgttgagacttatagtctggtcattaaagctacctctattcgggtagttcttaccattgttgttactcaaattcgggtagttcttgttggaaatttatttta

SEQ ID NO: 302858 - DNA, 1212 bp, Cannabis indica
aaaagttgttgcaacttgcaaacagtaattagcggccaaaaatcactcttaataattttttgttatagtgatagtaagtatttattgtattaagcaaatttagttaaaaacttaaaaaagtctccttctttcttttccatgcatatacatatattataacttagtcgttatatcaaagggtcagggatttggtcggttaatattcgatcttccatatttatattctaattgctcttgagtattaagttacgaagaaattacatgactagtaagtagtaactataattttgattgaatttaacaaactacgtgagatgtacatagtatacaccaatatttatatggaatcatacaaaactaataaaatatttatagatatagagaagagaaaaaaatgtttagcaaagaatgataattatatatatagaagagaaaagtataaataaataccaaatacagtccataatcttttttttttttaatttctttaatcttcacccttttcttgaatccaaacatattaatggaaaatatttggagaatgaccaaatgcaataatacgaagccaacacatacatcacacttatttgtgtcgtatacattctttacatttcgtcactatactttatatatttttctaagctgtctgtgtgtgtagggtttatgtttaaccaatatacataatcatatacatatataaatttatgatagcataataatgactaaaactgcatatattgagctaagaatacataaaaacagacattaattaacgagaaaacccggtttttagggaaccaaacatggcaacataaaaccaactactccactatactattcataagcaactacactacatatttttgtataatgctttaatcataatttgaggatttgagaaacattttgacagacaataacaactcaggaagcactaaatagctattggctaattagaagctctcgaccacaaacaccaataatatacatataagatctttaaaagtacctaattagtttaattattatgtgattatttttatgctaattttgaggaagacgaccttgatactcgaaccagctcacctctaagctctaaccaagagttattaatctcggaatttgcattagtgtcaacagattataacatattgtttcagtacttattattattataattttttaaacttttttttcttttctttttagttt

SEQ ID NO: 302859 - DNA, 2558 bp, Cannabis indica
aaaaaccgtcaaaaccgccaaaacccgccaaaaaccgcctaaaaccgcctaaaaccgcccaaaaccgccaaaaaccgcataaaaccgccaaaccgaaaactgccaaaaaccgtacggtcggttttatacggttataatttctaaacggtcggttataaaattttaaaaaccgaccataaccgaccgattttcacccctattagaaggtgcccagattgacagattgtcaacttgggcactgggtgctcggagccccaggccccggtattcaaaaatcaacttgctccgatcctcaaatatgtctgtggtgatatgtttatttgatgtcccaatgcaagttttgaccactttgcacaaagacggccccgaaagcgaaactagttgagaatgtcaacttgggcactgagtgaaaccctaagtgcccatgttggctttcgagttgcaggttcatgtaatttcagctcctaaggcttggattaggttgccccatgtcttcatggtacagaatactagtccgaactttcatcctagagatcctaaagtcaatttgggcgcagggctaggatcccctcccaggttgactactgcgactcgggtctactcaacttcttgatgtcatccttcatgccacgtgtcaaatattgatgtccacatcaccagggaaagttttcgagttaccagttctaattcccaagaaaaaaaatggtacacatgttcggaattacaggcccgttagcttatgctctaccgtgtataaaattgtcgccaaagtcctttccaatagaattagggttgtcttagactctttaatttcaaacaattcaaagtgattttcttttggatagacttatctttgacaatattattattactaatgaagttgttaatttcattaataacatgaaaagtggaaagctgtgatggggcgctctcaagcttgatatgggaaaggccttcgataagtggaactttatgaaagccatccttctcaattttggcttccctagaaggtttgtttcctttattcttagctgcatctccactgtctccttcaatattctggccaatggttcactctcaaagttttcatccttccaggggcattaggcaaggggatctcctctcccctatatctctttttgttggtctcagaaggcctctctgctgccatccgtactagtatgaatgtaaatttttttaagagtttctctatttacagagcttcaccggtgatctcccacttgcttttttcagataatagtctgttgttcaccactgttacccttgagaattgtatagctattaagaaatatccttgacatttataataaggccactggccagatggttaattttaccaaatgttctatacttttctccccaaacactagccttcataataaaaatgtcttctacaataacttagggctatctaataaagagttcatcagcaagtacttacgagtcccttaatgtgttggtaggcttaagagttcttccttccactatctcttacagaatgctagcaccaacatcaattgttagaatggaacgtttttttctagggctgggaaagaaaccctgataaaagttgttgtccaagctatcccatcctacaccatgtcttattttcgtctttcttttctatctgtaaacacctagagagactcacgactaaatttatgtggggctctagtgctaacaagaacaaaatccaatggaaaattggtcatttctttgtgtttccgaatttcggggggtttgagtttcagattcattgtctatcataatcaggctatattagctaagcaggcttgaaggatttttctttcttgtccagattacttaaggtcaagtacttcaaaagcaatgatttccttcatgcccccaaaggtcgctactcttcatccacctagagaaatatcatgtggggaagagatctacttgtaaagggccacatttggaaagtgggaaatggcaactcaatttcaactattggttcttcttaggttctcaatgctaggcctctttagtttaaagaatgtatttcccccctaatcatttggtctcacattttattctagaaaatagatcttggaatgttgatagacttaaactctatttccctaaggacactattgacgaaattcttaaggttcctattttccctgctatgaaggatacccttatttggagatgtcatcctttggataacttcactgtaaattcaacctaccaccttgccaaatccttagtttcttcaccctttgcctcttcctctaatcatgttgcttttaaaagccggtagaaggtagtttggtctataaaaatcccaccaaaaatcaaacactttatctggaaagccttccatcatgtgctgccatgtgctttcagccttttctagaaaaaatcctttcccaccccttttgccttctttgtaatggccagaaggaaacaatctctcacgcccttctaggatgtactagagcaaaattcatatggaagtatatcggtctttaatttttctattcaaccaatagacactgttgagttttatg

SEQ ID NO: 302860 - DNA, 3492 bp, Cannabis indica
ataggggcttgatgcatgagggatagtttccctcttgcttacaatgcataaaataaaaaattacaatacttacataattataatatataaaataggaaactagaacaggttgccatatttctctaactcaatctcacgattataaggattctattcgtgttgggacataataagatcattctgaagtaattatctctttcaagttgctcgacataacaggcttctacctgttcagatgtcttctctacagctctgctcgggtaatcaacaatcatagatgttgacgaattatgtgcaggctgctagggacatttacctctacccaagtatcaaaaatataggacacgtgtcgctcaatgctcttgtcacgtcaatgtacaaaaaaactagttaaccaattcaaaaagaaaatcaaataaaatatataaaaatatataaataaatattttgttctgtcttcttgcagagatcaatttatatatagatactatatgatatatatatagcacatgtttatttaaggtacattacatgttaattttatatgatgaatatttttatagtcatatataataaatctaattgtaacaaattgataggtatataacaataattaatatttggactgaattaaattgatttttaataatagtttaaaaataaataataatttgataaataagttaattaatacatttcctttcaaaaaaatttaattaatatatttctctcttttactcctcttgtcgttgcctgaatttcttcactgagctcaactctaaacaacctgatcgccgagtcagacgatgaaaatccattgtaaatattcattaagctccagaatctatctacctcacttagcccgttaacaaactatatctcctaacctcaaaaccttacccaacctagttctttgggtgcatttattggatgtccatctgtaaattgaaacaaccaacaacatagataaaagctgcaaaacaaaggattataattcacctagtcttatttatttacaaaataaaactgggtttggtggctgccccgtgctctttaaatcatgggagggaacccaagctgaatcgtggaataatctgaccaccatcaaagccaaggggcggtgaatgcatgtgatggatgatttcgtgctccgccactagacatggagaatttttctataaatatagaaaatgggttgaccttcgattgactgaggagactatctattacaaacagtataataaattacggtaatattaaatgagctcaaattgttttatctatttttgtttggaagaaaatgggcataaaagtattgttgttatagagatgcaataggtgttttttctaatttaggctaaaattacttaaaataaatatttatatcatcctaaaaaagaataaacaattatactatttactaattacaaaaataatatttgtaaatttttttattacaaaaatacggtggaagaagagcaaaatgaaagagtgaaagacacatgtacactatatggccaagtgagactcacacacaagtagagagagtagctatttactaacgcgtagaacaataatatcagaatgagacaaggactctatgactgccacgtggcagtttggacaaagtgaccttggatggggttattttttctcaatgcaacaattatgcaaaaacaactaattagcaacacaaaaacgacttaacaacaaccaaacttcaaaacaaatttattaaattttaatatatattgcattaacaaaattaaaatttataaataacacaataacactataaaagaacaactaattaaacatataaaaaatttacaaattctggacaataaataaaaacaattatgaaacacgtaaattaaaaaaaaaaaacatataaaaattacactaaattataaaaattatacttaattataaaaattacaccttattattaatttaaaaaattaataaaaatatgcttaattaaaaatcaagtagacaacaataacaaatatatatttatatatattgtatctataaaattatattcaaaataaaaataaactaaattaaaaataaaattaacttaatatttgtttactgtaataccattcgaaaactataaaatacctaaaaatagtattaacatgtgtacttataaaaacttaacatatatttctatataacatacatatattttctcttacttgaacatttaataacaataaataattaaataataatgaataaataattagataataaactcaaaattatatatgtacaaaagtttatttttaactttgtttggcaacaaaaatttaactacacaaacaacactaattatatgcaaattaattagacatcaccaaaatactatcaacaactttaaaaaaatataaacacaacacccaagcttaatacatttttaaacagctaaataacaaccaacaaataactgtataacaataaaaaataatcttaatatatgtactcatgaaaaattaaatatacatatgcatatatactttattttctcctagttgaacaattaaataacaacaaataaataaataaaaataaattcccaattgtaatttaaaattaaaaagacatcaacacattatgtcaactcataagaaacaaataatctaaaaaaaattaaaaagaacaaagacaaagtacgagtacatcaactaaaaaatatttttaatcgtaaaaataaataaacatatactcatttttttgggtggttaaacaacataataataactaaaaaaaaaaaactagataacaatactagttaaatatgtaaattagttggacattaacaaatagtgtagacaacctgaaagaaactaataaacaacaaaaaatatgtaccatgaaaaactaaaatatagactatttttctattagttgaacaattaaatataaagaaataaaagtaattgataacaacttcactttaatataaatattaataaataaataaatgacaacttcatattaatacataaattaactagtcatcaacatattgcatcaaccaaaaagaaactaaaaaacaactcataaataatccgaaaaaaaaataaaagcaactactaaatactaatgcattaacttaaaaaaaaaatgtcctcttgaaaaattaaatatatactcattttatttttacgtggttgaacaactaaataacaacaagcaaaaaatttgataacaaccctattttaatatgaaaaggtattaggcaataaaacatggtgttaacttaaaaaacacaaattatcttagaaaaacaatacaacaataatcttaatatatgtatctattaaaaactaaatatatgtatactcaattcactataatatgcaatttttttttgacaaagtgattagaatcactcatgaatttacaacacagaagtccgccaccagggctggaacctcctcgaaccaggatagctcatcgtataaccgcagagcatgcttt

SEQ ID NO: 302861 - DNA, 4310 bp, Cannabis indica
agtcgtttattctatcttatgaggtataagctttaatgggatttagaattttctaatcctattcactaaaatatcataaaggccaaagtactatttcaacttagttgacaaataattgattatacatatatagatatagatatatttctgtgcaagtcaaattggaaagcttcctgtcatcttgatatggtcaagtgtactccttaggccatacttgagcactgcttcgttacctttcctaaatccttcgccgtatgctgttgatgaatccgactcgatttggtgtttgaaaaattcaccaaattttttctcaaaatctgatctcttccccttcttggatgaactagatccaggaggagttgaagatgacgacgatgatgaagaggcgtcaataacaacatcgttccccaaccccgaatacatctctgaatccaaccacatgtgtcccaagacttggcaaataccttcttcaacttctggacttaaattaggataacctgtcaaagaagacacatcatagctactattagtaaaagcacaagttccaaaacatacagagattgacattggacaataatgattatagtacaagcgaaaacctttaagtctgagccaagcatgcatcatctcatgagctaaaattgaccctgtcaacaacctgtgtacaagttttagaccattgaactgaaaattctacttaaaaagacttgtgtatttttcattaaaagatatgtaaagtattacctagggaggccatacaagacaagaattgctgtcacttcacatcgacgaactagcttaaaaggctcggttatcatgtctatgatccggtaccccgcaccaatcttaggcctcttcaatatctgttagtatagaaagaaagttaagaagatatcatcctatgtaagcgcgcctagtcatggtaaaaaagatgaaaatcggggaaggaatatgctcttactgttgtaacagtctgttcttctgataagcaaagtcctcttgtctctggcaaatgatgatgaccctgctcacaaatgagaaaggttaggtaagaaagagtgttaactgtttgttatagaatcaaagttcaatgcattcttgcaattacattcttttctccctccatggcctcatttagagcttgcctctccaccaagagcattggaatttgctgctccactttcatattcaaaccttcatagaaatcttgtatctcgagataaagcggttggcattcatgagtgtccataatcgcagagtctagacactctagacacagcttacgaccatcatcaagtaacaaatattttgtgtcccttggctccattcgtttcacagctacaacgaccgaggagttccgatcacggctcatgggcaggacagtactttttggcgccagaatggatgtgccctgtactcaatcaaacctgctgagttggttggtatctgcagcaataaaaagaacaaattcattataaatgaaacaccaaaagatgtaagaggttgattaataactatacaaacaagaaacttacaaagctattgcaaacatcacatcttggatgatgcctctccttgtaacatgatttgtgataaggatggttgttagacatagaatactgttgaaagaaacaaaatagaaaagaattaactggtttgtataagtcaaatgaaaattccatgagttaggcaaagacatgacaattcggacctcatgatcagtaatggcctgattacaagcgtggcagcgaaagcattctggatgccaaacgccattcatacaactcaaataccttccattaccgatcgcagcattgcagccagcacaaatcctgcaagccatatgccattgatggttataattcaattgcataaactacaatctcaatttgcaaaaggaactaagaacatgaggacttgagaaattggcttataacagtagtcaggcgactgtgtttacctgtagccagatgaaaacaagaaaggatgaggcagaaacaagttgccgttgtcatgatggggaggagactccatgctcaggctttcttgaatagccctggcaagctgttcatcttcctctaattgaacacttgaaagtagttctttgtcgtcctcaactttagccggttcttcatcttcatcttcatctgattgaagtataacctgaactggttcttcaacttcatcttcatcttcatctgactgcattgtagcaatacattcaacctcctcgagttctgaatcagactcggattcggattcaggttctgaaagtagcaattgtcatgagcataataatcttataaaaattagtacacaatcaaatactatcttatctcccttcatgtgttacttaccagctacttttttccctttataatcttgttccgaaagggatagagtaagtgcaagtgcaatttcctctttgtcaaaatctgacaactcatcctgcaaagaccaaagaatagtaaccggcattgcttccattgattcagttcagagaaattgccaaaaaccaaccaaattattatgaaataaatccatgaattcatttacccctgaattatggttctcttcataggttccatgatagtgcccacgtgaggttttgtgactagaacctttaagaattttgttcagccaacccataatccaaacttgttcctgcaaatcaagtcacaaacatttttagctaagtgtcaaatgggattgagttcatacataacatggtcatgtagagaatatggttaaaagggtatctgaattagattaaagtagacttgttaatagcctttcagaaccaaatttctagaccaagaatagaaaaaacacactcaatcacataacccagatacaataccgaaaaagtgcttcaaacccaggattctaatatggtatgacaactttcaccacctcagagattcttaagaatgcttttagaatcaatcattcagataacattaaagccacatatttaaaaaagcaggagttccacctacctatactcataaatattgttattaaagaaggaaaaataaaagcacaggggtatatcccaatcttccaactagataaatagttgataaggcagatataatgaaacaagagaaagaaaacaagtagagtcagaaaagaaaccccacctacaataatagattaataataaatctgcagaagaatctgatgtatccccagatcagataaaatctctaaattccatgaatgcataatcaccaaaccataattaaaccccaaagaaagaatctttcagccatgcccagaaaagaaacttagattaagaattgaaaagagatgaagaaagaaaagtagtgagtgaatagaggaaaggacttggatccaagtccaaaagggaaaaaaggtgagaaattgaataagatcaattgcaaaaatcaatggagactttatatataaaagttgagttataaaagggtagtagtgaatatgaaattttccaccttccttaaaagccaacaaaaaaagatagagggaatcaaaccaaagtttgaaggttgtactccctaatagtagtgatgagtgttgttatgttgaattttctttctttgtttctaactctttgtgctttctcatgtggaccctcccaccaaatttcaaccacatttcacaaaatgtcaaaaaccccatgaaagctttccattctagttgcataagggaagagagagagtacagaattcctgaaatgtgatccctttgatttgagttacagttaccattcaccattagtggaagtgaataattctctcttctatgtcctgcttaaacttagattcagacccactttgacacgtggagtacttgacttcttctcccttctattttaatctcacaaatcaaataccaaattcccaaacctttttctcatattttttttatatatataattatgtaaattttaattttatattttttttcgaaaggattttaattttatatttacagcactccaaatatgttatatttatagttttttttttttaaacgtgttatatttatagtttggggcactaaaatgagttgtcattaaatcttctctaatagtaaaacttaaatttagtgctaaattcacactaaaaatttactattttaacatcaaatttttttttctattctaatcacaacactaaaaattacaccaaattttatattatctattattctattatttttattattttattataataagaatattttaatactaaatatatataattatttaatttttctcttaaaaatattatttaattattaaaaatttaaaaaaaaaataa

SEQ ID NO: 302862 - DNA, 4004 bp, Cannabis indica
gggccatggccaccccacaaataggcatagtttcgccactggagaagagtaagatttcactacaataatctgagagtgagattggtacttcagcaatccaaaaaggttgataatcctttgggaaactactggtgtgaagttggcaccggtggaaaaaataattcggttggtgagattggcacttcaacaatcttgtgaggttgatagtccttggaagaaaattattgagaagtttgagaaaaaccttggtaaaaaattctccagttgtaagggttagtcaatcccgttaacttggctcaatagttgaactcaaaactagattcatagctttgaagaccaacgatgtaggtggcttagttctaccgaacattgtaaaaattgataatgcaatttctatccctaaactctttacattttaaatttattatttgtttatacttctgtttatctatgtgattgcattaaatttaaatatttgtataaattatatttgaggtttaaaatttttgaaaatatttaaattttcaattcactcgcctcttggaaacctatcttggactaacaatatacattactataaaaagacttatgcccgtaagtttttcaattggattttttttagaaccatcattaataaagttacgcgactgtataaaatcgtctcctatagtggagtattctcgacaattttaaatagtcgtggagaatccccaagaatttaaaagagttacaagccaaaaaacaaaaataatttttaaagggcaccccgacagttttaaaccgtcaaccatagtatctcctatggattcaaaccgcctgtgatactaatatatattcttctcttttatatccagcccctcacacttagaataaaaagccaaaaaatatagatctctcttcttattttgaaggtggtggttggcagggacggagcagggatgggggttcgccaccaccgctcagttctctcttttctttggtgtttgacggggagggaatttgaagcacatggcccaaatatggggtctcgtcgaagctccttaggccaaaaggccttcgtggatgtctctggggctcgatctcaaaagccaaacaccgttcattctttctcctcgtcagattaattttttgtttggtttgatgttctttgatgtatcttaaatcacaaaaattaagcaataaaatttacatttccaaacaacattaaaattcgaaggttgtaccattagaatgagtatcttgaaaagaacaccaattgtgtgcaaacaaggatgatatgaactcgaactactctttgagtgggtaacttttgcatgtgataaataagggcaacaaaataaatcacacatgataacacaacttgaaactcacacgaaataaatgagtttatgacatttcaagtaaacagttaactgatcatttttggattaacaaacctaacctaaaataacccatttaaaagtatgtacacttacatttattacatataaatataagataatgataactagttaccatcatattactaatagagtaaataataaaaaaattgataacgaaaactagttaataccacactaatttttaaaatagctagttaccattgtaaagtttagttattttttaaaattgacggtaaatagttatcatcatatggctaataattaaactaaagaaagaatatgatagtggtacttggttactaccacattaattttttcaagtaactaaatatatactagtaacctgttaccataaagaaaaagacaaactaaatactgagtgaaaaaaatcaaaatcaaacattagcttaaaaaaacagaaataccacattttggtggcattattttttctctatatttataaaaaactctgtttaaatttaccatatttttttaaaaaaaaaaaaaaaatactagccaaaacacccactgttttcactatgagccactccagaatatgggcccaagttaagcccaaagggctaacataatattttgttcaaaagttatttatatcacatttataaacaaatttataattttggattataagctttgcactttttaactgcagatattatcttcaaatgaaatcatgaatttttgaaagaaaacataaatgtgacgataaatatttccaatacaataatttaaaactaattagttattagtgctgaattaatgaagttaaaatgtgtggtgatcggttaatatgatatcactaataaagtaaaatatatattgatagtggtaactagttactaccatttcgaattagttatgtgtaaaatttatagtacacatagttaccatcctatcactaataaagtatataatttgatagtagatgagtgataccgttattagaattttttttctcatgtcggtgttcgttatgattacacattattcctgtaaattttttaaaaaattttgaataatttatagtatcgaaaatataattgaaattttttgaacatgcgtggtaaattagaatatcaagaattttatttttgatattgtaaactactcgaaaatttttaaaattttacaggaatgatactgtaacgaatatcgctaaaaattttgacatgtgatttcaaatatagagattgactacaatattataataagaaattgtaattaacactccttttttataataataaatgattactgccacatcaaatgaaaaactaaaataaggaataaaaacaactcacatataattttttctattattttagaaaaacaaaatgtaaaaatatttactttggtaggattatctttttgtccatattttgaaaatctatgtttaaatttatctatttttttgtatagttcctttatcaaatgagccacaccaaatatgggcccgtattaagcccaaagggctttaattgtttaggctcatcactttagtgtttagagagaagatcacattacatactttttttttaaattgatgcatttattgtttagaggaaattaccctgtatcctttttatattgttctttcctagttttactttcttttttaaagtatcatttttattttttttaaaaatattgtaacaattttacctctgtcacttcaagatactctccatgttactctcttaggtcagagtatgttaggtacaatacatataaaaagaggtatgtttcaattaaatataaaattaaaggtaaatttgattaattgattaataaaagtggtatttttcaacttatccttaatttttattctttcttttcaaatctattatgtttacttactttttcaatcattttgctaattttacttctatcactttacgataatctccattcttctctaattaaaattttaccctaacttttctacaaacctacacattcatctccaaataatatagatctattatattgaaattatgtcttagttatgtgagagtataaaaataatttgggtataatatttataaaaaaagttatatttaaaaataaatttaattaatgtattaaaaatgtattattcaatttctcctagtatttcggtggtctagcatagttttttcctcaagagtaacttatatcacatttgacttttataatgcaaattgaatttatgatattataagaagaggactttttgacttttctacttaatgtagatgcaacatttgagtgtcatgtttttcagagttttatcttcaaaagattttagatgaaagacttcaaatgaaaatcatgaatactcaaaagctagctatttgatttattgtaaatacttttccacaaattaaaatagaaaaatcatttaaaaataactatgggagcttttttttcaatggtacattttgatcatcaactttgagtatggcatttggtcactacaagaagaaaaataaataaacctatcatatagaatttacaagcctatttaatgtaaagagaattgctaaaagtatgtttagatttttttttcggtgtcatactgctattgatataattaagtat

SEQ ID NO: 302863 - DNA, 1727 bp, Cannabis indica
agagagagagagaactcagaacaattacaaaatcaatctcacttgccatttaggaacagatctcctaacaaacgagacagtttatgccacatcagtataagtggctgaattacaccacaagtaataaatacttcttccactttttaactcccaacaactcaaaaaggtgtgtttcttgtatttatagttaaatatcaatttgggtaatgaattcaacttctttttaaggaaccgtatcaaagacaaagtaattcatttcagtgactaattttacaatcctgcaaattaagtatgttctttactctctctgtatgttccatccaactgacttgtaactgtatttttttgtgttaggtgtatcaatggcatcactgactgaactttctttcaactggactggctttgtcagtgcaatgatttcaaacattgcattcacttacagaagtatctattcaaagaaagcaatggtaagatctctaccaaaatggaatttagttacttctctaatcatgagtgacggctgctattactattcaagttggtttatgttttaattttactttccattttcttctcaacagacagaaatggacagtactaatgtgtatgcttatatttccatcattgccctcttcgtttgcattccaccagctttaatagtgagtctacttcttctctcggagacatgtacaagctaagtaaggtattgacattatctggtttggatgataatttggtttgattggatcggattggattggatttcagattgagggacccaaattgttgcaacatggtttcaaagatgctattgcccaagtggggctctacaaatttatgtcagacttattcttgattgggttgttctatcatctatacaatcaggtatatatgttaataataatatgaatttgttattctaactcagtcataggattggataatgtttggtatgtggtaataaattgcagcttgctaccaacaccctggaaagagtggcaccattaacacatgcagttggaaatgtgttgaagcgagtgttcgtgattgggttctccattatagtgttcggtaagcaagcatctgctctcatttggaatccatattcattttctttgagtttttattacttattagtttatgtatatctgactttgatattgatcaatatgattatattacatgatttggtaacaatggcaggcaacaagatctccacgcagactggtattggtactgccatagcaatagctggtgtggctatgtattccttgataaaggcaaaaatggaggaagagaaaaggggaaggtaattgaacattttatttatcagagattgtgattacttgatgtaagatgatgacacgcatatcattactctatccgtattacatttcaattcaaaggatttgcaaggatattactattattagtattgttgttattgttattattattctgtagaaataaagatcaagagtagaataataaattaaaatcatgtttagaaaatgttattgttggaatgaatgatgacaataatcgttgctcatcagagcatgtcagggtttggaatacctggttaaacacctatcgtaggttgacaggagcaagagtgatatctgaccttttattagttctctcttctattagagaaaatatgttctaatagttactactgttgtatgcttttttttcttctaattattccaacaactataataaaa

SEQ ID NO: 302864 - DNA, 4105 bp, Cannabis indica
agagagagagagaacttgtagaccaaagtaattaataaagccctgtcttcctaaggcacttgcagcagctctgatggtctcttcacaatctgcaacaactcctctgaaaaatatgtcagtgcaatgagtacatactggagaaatttaagtggattttaagagcatctaaacaataacaataataataataagatctcagagagaccctcacctcaatgtgactgtaaatctgttaccccagagttggccaaggacaagtccttccttgacatagctgggaacaatccagtttattagaatttacacatgcaaatatacaaactaagcatgaacagaagaaaacaacttagaattcatttatcttaccagaaatcacccactttaataccaatcaacctatcattgagagcagctaatttcttagcacgctgcttgaaaacagtaacctgaattgaaaaataaaccatccattttaagcatcatttttcatctttatctattcaaagagttatacttcttcaacttatcagttgtcctttggtaattttcactgattgtgaagaaatttattttaagatacacgtgcacttggcatataaatgtaaaatgttatacttttaccataactcagcaatatcaatgtatccacagaatcattatcttatcaacagaataactgcaagttagaacatcaccctttgagtcgacacagcacgcttatcctttgtcccagcaaacccaaatgaccttggctgcagacaagatattacttagttaaccagtatatttgagaagtttgacatatctgtcctataagcaatgtttaaattttaaaatgagtagactattctctatagaacaatgaacatttcaaccaagaacaaaagaaacctattaacatctcattcccacttgcaggaaccaacatatagttcttggtattagacccttgattcggttcacctatgctaagaggaaagggcaggttgctgctcaggagtagtttaggcaggtttgtaatgaatcattatgggcatctctgtatttcagattcagagtaagttatgcaaaaagaatataagtaggtcagggagcgagagtgagttatgcagaaattcagtgttctgtacttgcatctatagaatacaggtctctcgaatacctgcttgcttatgtactgaaaagtttcttctttaactcagacccattttttcttcttcatttctggttgctttgaatattttctgctgttctattgtgcaggggtacatcaggtgacaatataacgatattaaaatgaacactgatggacataagtagcacttcaaaaacagctgcccacatttgtgatccactgctttttatggttcagggttcaagtccccgtaaatgtgttttatttataagtatataaaagaaataagaataaaaaatggtaagatcgtaaaagaagatgaagacacagaaaaaagtacctggatgccaagcatctttgctattactcctaatgcctcctgtgaatccttgttttccttgcagatatgaaacctgattatgaagaatgaaaataacctttcaatcgaggctcaaaaacagcttaagcagttcagctgagctttcatgtatatgcatgcgtgtgaggcagcgaaagactaataataagctagtactgaatcctaaccagatgtaaatgtaaattccaggatactagggatattgtatctgatactgtaacttatgagtgcttatgttaagtacatccaacatctaaataaatggttcaataagaccaatggatgagtatagttatattacaaatttattatgtaagtgtctttaaataacatctttccatattcccatatcttcctgaaccaaaaaaaaattggaagaaaaacagtcaactatgtataagtgtgtaattcatcaagcactatgcaagaaaacagctaacaagtaatcatatgtttctgatctgttgaatgaagaagatacaatttatgcatcctttacctaaggaatttgccaatgttctcttgccagtcatctgaacctctgctatcaaaaggtttaccacctctatctttccgtttcctggagttcttcccgtgcccaccagaatctaatctcacacgaatgcactttgaggaaacatctggcccgtcaatggtatcagtgacaaggaacttaaaatttttcttaaaaaaattgtgcatggcctgaaatagttaaaacagattcaaccaatttacaaaaatatttcaaccaagaaaaatcaaaattcactaggtctagcttgagactaaaacaaaacaagttttaaccaatggaaatcttcataagacccagaatccaacttaatgaagctgaaagcaaaaccaaaccagagcaaatatcaaagtgagtttaatttgactctcaacctccgagttctcataatggtaagatatgctagattgctaaagtagagacagcattttacactaaaaatttacattcaatgacatggcatatttcataaccactcctgaatttaatggtgtcccaactaatgatggaaaatatgcaacaccattgtatttatattttgagcaatttttaagtgcccgaatactgatcattactctaatggtatataccctctattctacatttacaacttatctaaattcaggagaagtcctctcaccaggctgctcaatatttagttataacaagtttgtttctccttgttttaaaaataccatgtttgatgtctattaagattcaaactgcaaactcaatacagctcaacaaatcactcatacagaattgtgatgtctgcactgtaaaatctcataaagatacaaatatacagatattgaaatcagaactaaccgttcgatgaagtttatcagaatcgggcgaaagaacaataggtgaaacactctctttaccatcactagaattgatttgacccataaaagcttcaaagctctcagcatccgaatcaccagcaagacttctaaaagattcaaattcagaagtataatttttgctagctgcatcatttgcttctgtttctgttctaatttcctcagcaatctgaatgggtttattttttaaaaaaaaaggttgccatcatgaaaattatgtacatttgtaaagtaaatggaatgcatagtttagggaagaataaactttacttcctctggaggtgcctccatagtggtcaaatggacgacatttccatcagtatctacttcattcacaataaagtcagaatacctacacacaccaccaattataccatcacaaacgagtcaatacaaataataatatattaatgactccctccattgtcttcattttttttttcagatggaattttatacaatgcattacatgacagtaatgttaatttgatgaagctaccattttacttaagacacagcacaatgctaattctaaatttaccaaattctcttaaagtgtgtcttccttttttggatacaaattcaataacattcaacgtttctatattttcccagagaaataacaatatcagattcaagtactgcatttgacctttgtttaagaacaccgcgaaagccagggaggttggagatgtagcagaatacgccgacgtccgattcgtcgagatttttcatggtaatttggggtttgggtgatgctctaacaatggtggtgttgcagaggaagtagggttttagaacaggtaagctcaagcacccccacgacgctgccgatatagctttctgccacatttcggggttttacgaatctcaactaaaacgcaccgtttctagtcaaaaaataaaaaactaaccgcaccgaaactttgccttccttcctcactttttttttttttttttaaagaaaagagtaggcctgcacatgggttgggttgggcggtttggcggtttttttatttggcggttttttaaaatcacaacccatacctgcccaataaaagtttgggtttggcggttttttagagggcggttttatgcggttttttgggtagttgggttgcttaaaaatcaaaacttccaaagtatattgtcacaagaaaaaaaaaataactaaaaatttatacctgtta

SEQ ID NO: 302865 - DNA, 5162 bp, Cannabis indica
ctctctctctctctctcatttcccactgaatctaattgtaccaagttgtactctaaattgtacacttcataatcactacacaccgaattacaaatactcttcgaagagctctatatttatagaacaaaaatctcaattcccaactatatgtaataatgagaggtagctcatctccataccatatgtaatcaatgtgaggtagttcatctcccaatcatatctaattaatgggaggtagctcatcttctaactatatgttatcaatgagagagcatgagtcaatagctattacatagcttcattgacaaatgtggcaaataataatttccaaaactcttgaaagttgaacatatattcacgacttcaagacaatttgactttcgagcaaaatccaacaatctccaccttcgcaaaaaaccaaaccaaaaatcactgcctccacatgcaccttgggcgctctaactccgagagatgttggtcaagttcaagtaatgttgaaacttaatccatgtaaccacttttgtaagcatatctgtagggttatctgcagtcccaaccttctgaagtataacattcccttcatcgatgattttacgaacaaagtgaaatcgaacatcgatgtgcttagtgcaaccaagatggacttggttctttgccaaaaaaaatggcactttgagtatcgcagaaaatttccttttaaaaaaaaaaccaaaatccttggccaacccgagaagccaggtagcttcttcaaatgcatctaatatatttatatattctgcctctgtaatagacaaagcaatgtttctaacaacttatgttgtgtattattcctaacatctctaaattgggtagcgagtagttggtttgataaattcaccaaccaccccattatcttgtgggagcaattatccaaagaatttaagaaacagttacaggtcgtgagagacagaagactaaaggcatcctctgatgaacattaaataatagcaaggagagtctcttaaggcttatgtaagtcctttagtatagtagcaacaaaagtaagaaacttgaatgataacattcagttaatacctctctaggctggaaaaaccactgatctgtcgactataggaggcaaattgttggatgatgtgcaaggtcgcccaattagaaaaattaatgaattcaatgatagggcattagtcttcgtgcagaaagaagaagcacaaaacgagatgaaaatgctcaaatcgagctcgagagataaacccaactcaagtactccaactgtgagtattgtaacaacaaaagtggggaatttgagccagaatgggtagactggaaagaggaaagatgaatcgaaagattcatcaaaggatgagaagaagaaaaagaaacaagagaagtatgatccaatatacttaatttatacagagctaagcgagactcgtgagtacatctatctcgcaaaagagaatcagatcgcttttcaaagacctaaacctatgagacactcaagaaataagtgagatctgaacaaacattgacagttacatagagacattggacatacattaaggaatgtcaccaattaaaggacgagatcaaaggactcatttctcgaggctatctaacgccataagtaaaaaatagatggaatgaataaaacctgcccaacaacaacaagcaaaaccaaggtgtacaacctcccccagttgagggcgaggacatcctggtcatttttagaggaccacatctcatggagaacaacaatagtacccaaaaaaggtatatgaataacattaaaattaagaatcagtccttggacctaagcccctcaagcatgcgaatcttgaggaatccccaataatcttcactgatgaagatgaaacacatgtgcaattcccacactcaaatcccttagttattgttgtctagcttacgaacaaaagaacaaaaagagttctcgtcaataacaggaattttatcaatattctttacaaagaaacactgaagaagatgggtctgaaaaaggccaaattaagaccgtgcatggtgaattaatgtggcttcaccggggatggtgttgcgagccttgacacctttgaactcccactcactatgggagaactgccactatcaacaaccaaaatgcaagaattcttagtggtagatatcccttccgtatacaacatactaatgtgtcaccctaaactaacaagactgggggcagtaagctcgataaagcacttgttcttgaaattcctaactcattctagagttaggacattgaaaggcgaccaactgacaaccagacattgctatagttttgaattaatgaaacgaagggaaaatcactagccaatggtaatcttgacaaaagagaacaaggaatgcgagatagaagacttggatccaaggatccaagaggagttcaaccaactcaagccaactgaagagttggaagatataaatttagacccaaatgacccaaccaaatgtgttaacattggaaaagatgtggggaagaactaaaatagcaattaatcgtatttttgaaggaaaataaggaccaattcgcttggagccatttgaacatggtcgaaatcgacccaaatgttatttgccaccatctcagcaataatacctctaatccatcgaggcactagaagaggcgtcctttggatcgagcgataaaattctttaaaaggagaggttgacaaattgttaaccaaacttcataagagaagtattttaacccacgtggatatcaaaccacattctcgttcctaaacaaataagacatggaaaacctgcagacttttttttacttgaataaagcatatttgaaagattactttccactcccacggatcgatcaactggttgatgtgacagcagggcagaagttgatgacctttatggatgcatactctagatcaagaacacacaagctttgttataaatatggggttgtattgttacaagatcatgccatttagactcaaaaatgttggaccaacatactagcgtatcgtaaatagtatgtttgaaaaccagatagatttgaatatggaagtgtatgtagataatatgttagtaaaatcaataaagagagaggaccatacagaagacctcgcagagtgctttataattttgaaaaaattcaatatgaagctaaatttgaaaaaatgttcattcggagtgtccttaagaaagtttcttggttttattgtaaacgcaagaggagttgaggctaaccctgagaaaataaaggcactgatcaaaattccttctccaaggaagccaaatgaggttcaatctctaaatagaagaatgacagccttaagtaaattcatcttgaaatcaactggtaaatgtctccaattcttcaatgttttgcaaggcaacaaaaagttttagtggaatgaagaatgcatgcaagcccttcaagaaattaagagaaatctttcaacacctctagtcttggaaaaattgataattggagaagtgttaagcatctatttagccatctcaaaaaatgccatagtacagcattcgtgcgagaagagggcaagaaccggcaaccagtatactatataagtaagtggttattgggggcagaatcgaggtacccttcactcgagaaactcgcactcagcttggtacacgcctcgagaaaattacgaccctattttcactcgcatcccattaaagttttgatagaccaacctttgcgataggcattgtcaaaacttgatgcattcgggagattgataaaatggtcgatcaaattaggaaagtttgtaataacataccttcctcgagtagcaatctttagagaatactctagaataggaatagatcaagaagtgtggaaactgtttgtagatggtgcttcaaatgagaagggcttgggggaaaatgttataatggtatcccctaaaaacattaagtttcactatgcattaaggttccagtttaatggttcaaataaagaggcattgtacgaggccttgttagcaggactctggatctttatagccttaaaagcaaagttagctcaatgttttagcgattcacaactggtcgtgaatcaagtgttgggtgagtaccaggcaaaaggcacaaagatggccaaatgtttagagaatgtttggaagaacttggaaatttttgattactttaaaattgagctagttccgagagaacaaaactctaatgttgatgcctttgcgaaattggcattacaatttcagttagttaaattgaatctagttcaaacacaagtattatgcgagccgagtatttgcaaagatgaaaagaaagacatagaaatgatatatgcgagtcctacatggatgactcccatcattaagtacttgctaaatggagaacttctgatagataaagtcgtaggacgtaaactcttgtatgaaattctaaaatacacacttgtcgatggaaaactttacagaagagggtattccatgtctttattgcgatgtgtactcccttcaaaagccttagagatgattaatgaaattcatgaggacttttgtggagatcatgcaaggtggtaaagtttatgtaaaaagttaatctgacggggttactattgacctactatcaacaaagatacccatgagtttgtcaagaactgggacaaatgtcaatgatctacacatataccgaggataactcctaatgaactatgatgacctctccctacccattttcgatataggagattgatttaattggatttttaccaacaaggcgaggaggagcaaagtttgagatggtcgcagtcgacttcatcactaaatagactaaagttttaaaccttttttatcaatccctttgacaaaatttctagacattgtaattaagaatattatttgtaggtttgagatacccatataaatagtgtctgataatggaactcaatttgatggagattgattcactaagttctacgaaaggaacaaaattgttaaaagcttctcattagtatcaaggccacaggctaatggtcaagtcaaggctgttaatgaaaccttaaaagatgttataaagaaaaagctcaacacgactaagggaagatgggttgacgagctacctcaggtgctcttggctcataaaataacagaaaaaatagcaacgagacatactccatt

SEQ ID NO: 302866 - DNA, 843 bp, Cannabis indica
taaccatttggttagagaaagtaaaagcaaaactagcacttgggatttagctgtatgttcttcaataaaggccattaacaaagaaaagataggagttctcacctaaaaaagtacaaaaaagttcgaaactagccaagcaaaatctaatactaaaccgtatgcaaaaatgccagatcccaatatggaagactgcatattcaaacaaaaaaaaaggtcaacgtccactcttcttctagcattaaaatgtccattcaacagatgatagataaccctttttcgaccccatctccaccatattggagccagacttctcctccgcagtagctttttcatttgtttttctgcaagtaaggattacatcaaatcaattaataggtcaacatgataaattcatctaaaagtctacttatttttttccagagtcctggatgagatgaatcctcacttttgttcttaagtgagtacatttcccactgtgattgcagtttggcaaaggtagatccaactgtaggccagaacttcatttgaatccgaaggacctctattacagtatgcaggccagattttgagggtaagacattttgtaattcagattctggactttctcccagcaatacctttacaaatgggaagataagtaaaaaaaatcacctttcaagtatgtgacaaccgtactgccagaatgcataacacaagaatgcgactcttcaaacagtattaaccaaagaatgcataatatattaagcgataaaatttaatttataggtcaaacatgaagacaaacgtacataggtgaacacccagataccagataaatgttacccaaattatggcatatgtaag

SEQ ID NO: 302867 - DNA, 2835 bp, Cannabis indica
ttggatcactcctagaaggaaagcgtttaagaatactggttcacagccttctaattcttcaactagtaatgtttatgcagctcttcaggagcttgatgttgggaattcggtaactaattctatggttatacctcataaagcagtgtaagatgatcaggtgggatttttgaggtttgaataaaggtagtaaatagaaaactatccttgatatttgtagattgaataagattggttttggtgctttttttgacactaaaatttgtcatacgaaggttgcaaatatagtttcgaataatttccctaattgggatttcgattctagtactattttatctggtagaatttttattctttagcagagatgctttgtccaagttcagattatttgtgaagattctcaacttgttcattgcaaggttaaagtggttgatcataattctatttcatttattactgctgtgtatggttctaattctgctatggtcagaaatgttctttgggaaaagttggcaggttttgggtgtttgaatcatccttgggttgttttcggtgatttcaacgctacgcttagctataaagacaaaattgggcatagataaatcatggctaatgatgttctagatgctcaaaattggttagctcattgtcaagtggaaaagcttaagtatttgggttctagcttcacctagacaaacaaacatgaagtgggaaatatgatctattcaaagcttgatatagtttttgtgaatgaaccctagtgtgatcatttccctaatacaggggctctttgcaagtgggatgatatttctgaccatagttactgtacaattaaaaaatgatatttgtaatgttagaatcaaagctttcaggttttttaattggtggatgcttaacagtaactaaaaatgccaaagtctaagagaaatggaacttacctacttttaagagaggtcttagaggtgtcatctgcaaattatacaggctgaagcatgttttaaaggctaatttttgaaaggtttcacgggaaattcctactatgttttaagaggccaaagagaagctcagcatggcccaaggaaatcttggtaataaccctacttgtttgctgctgcaagaggaggaaagtttaaagcagcatgagtttaatctagccaaattgaaatatgctagctatgatcaacaactcaataaagttacttggttacaatttggagataaaaactctcatttttttccatgttttgctgaaaaagagaaagcttgagaatagaatcaaaacttttgttaataatggtgaagttattgatgactataactcagctattaaacactacttcagccacttcaagaattttttagctaataagagcagtgctactcaaagtatatcgctgaactgtttgaagtttggtgatattcttaatattcagcaactagttgccttgataagacccttcactaaagctgatgtcaaagaatctttatttgatattcattcaaataaaagcctctgtcctgatggccatggagcatgcttttataaggggctttggaatgagatttgtgaggaaatttctatcgatgttcttaattttttccaagatagtataaggcctagaatgcttaataaaacagttatatctcttattcccaagaatgataacccttgttcaactgctaattatagacatatagcttgttgtaacacactttacaaatgcatttctagaatgttgtgtgatcggcttgctgaggtgctgccttttctggaccaaaacaatcaaggtgcgtttgttaaaaactgattactgacacacaacatatttatctttcaggaattattaaagggtgatacaaggtaacatatttcaacgagaaacattatgaagattgacctcagtaaggcttatgatacgattgattggccatttgtttatgagctctttaggggtctttgcttccctttccacttcatcgattagattttggtttgtttgagagggatctcctactctcttatgctcaatggttgccttcataggtctttcaaaggggagaaagttcatcgtcaaggggatcctatatctccactcctatttgttctgatcatggaatatttgacctgtttattgatccaagcttcttattcgaaaggctttggtttccatccatattgtaagaatctgatgctcatcaacttatgcttcgcagatgacctagtgatttttttgcaaaggtaatacaaaatctattcaaattgtttaaatggaaatcaatagtttttgtaactctataggccttacaattaatatatctaaatcccatatctattttaccaggatctaaatttactaacaagtatatttttaacaacctaaatataaatttctaaaacgatgaaataaacacataaaaggtatgagaaaccttacattggttttagcagaattaaatgactccttcggctcagatctgtaacccttgtatcctttctgtcgtagagtatcaccaagatctgagcctgattcttcttcttgttgaatatggattcttcaaagtcttacatactatgattgaggactcacatgttatgggttggcatgtactcaattactaatggttgaattttggtttgtgaagaagactaaggaattcgaaaataagagaagaaaggaagaagaagaagtctcaaaacctagagagaaagaaaactagatttattgcctttgaagcattagttggataatgagactttcttttccttttataatacttctcttagggttaggggttatttatttggaataaaaaatgataaaaaattgaccaaaaata

SEQ ID NO: 302868 - DNA, 4507 bp, Cannabis indica
tttttagactatactatcaatatgtagcaatattcaacctcaaagatcttctcaatgccaaattttgagttgtagctcctagctatttgaatattaaaaattttgaaaaccttcttcgttgccctttctctctctactaactgagttgtgtattggagaagttctttgatgatacaatattttggtaagaaagatgttcaccaattgtgtgttgtttgtattactttttgttttttgattatttgaattcgaatataaaagtttagtattaaagcacaaaaattagatttgagaagaaaaaattatttatttatttttttgcaatattatacatttttatatgtgtgaaaaattgatatcacttctgaaaaaaaggatttcccaaagttggatatagtattatcgtctgtctctataactgacgcttacttgatcgtcgcaaaattgggtggaatatgcatcgatagaaaatagtcaagtacgcctattctcgattgttttaaactatcaacaataactagtactatgggccacaatttagaacaataatcgtcaaaggaatttctgaaatgttttgagagaataagtcttgggtattcaaattgtttttaaaatttttgagagagagagactagtagtcaacgatttataacaatcagcaatactatagccgcttattataaactgccttagccgacaattataaactatttgagattccaatctcatagcagtcttaaattgataggtatacttgacgactctttaaaaattataggtattcccaactataagggttggtttaaaatactcatttatttttaatacttgcggtccttcaaaaaaattattgaggaacaacgggaataattctttttatagtagtgtattcattctttcgttctttctttcttttttttcttggtgtggtaattaaagaagaaacggaaggaaataaaataggaatagttaatttagtttttccatatttccgattaagatgtgtgaggacaaaagcagattttattgaagatttacttttcaaagagaattgctattggacatcagtgatcgcgacactacaagagcatgtcgtagctcttgaagctctaatttggacagtgagcatcaacaagtcccatgcctcattgaatcccaatgttgaggcccgcatatcaacctactaaacacgaccttactgccaaattttgtccttttagctccttgacagtgaatttctatgtcgtggcgctactccaaaattttcaattcttcaatattgaaagctccaatcacatcgaattttttagatttttttccttgaatttatctccttgtaatctagcgacaagactttacttaattcatcctttttgtccattctttttctcgactttgttgtattcttcttctctactaaacctgcaaaatattaacagccaaacgcgtaaaattacacaaaatacaactaaaactcactaaaaacactttgacaacctacttaaaaataacactaataaagtcctagcaaactctgcctaacttgacctttactcaccctcgagtaaaaattgacactaaactaaaaagaaacgaacaaaaagtaagccttcatttaacaccataccaatgctacgcacaagattcaactattgtaaaccaaattttcaatgtaattgctcccgatactcaacattagaattcaaactcgaaaacgaaaatataactcacaaatgtgaaaaacaattggaacttaatatgcatgctcaaggtcaatccaacatatcaacaacttgattatcaataactttcagtatttagccttatccactaatgtcaacagcatgtgctttgaaataaaaaaaggacttaaataggtttaaaaattaggcttagctaagggtagatgaaaaatatcctttacgctcacctataccataagtttcttcgataatatcaccctaaaattttgcacaaataatcctgatatcccttttttctctaaatatatgggagaaccttttctttgataaccttacaacaactttttttttcctatcaatatgacattatattgtgtattttttctttctttctttaatcttttcaagttgttgcaaataactttttgtcttgaaattcttttaatattactcttatttttcacaacacaaaacataaactttctcccactgcaatcctcccaaactaacgatccacatagtgtatagttagggtcaaagataaataataatggattcaatttttttagctcaaggtatgtgtagaaacaaagaatagaacaacaacataatgctcaaagaagggtaaactaggattaaaactggaagggtggcttgaaaggcacaaatgttccaaaaaaaaattgcctaaatcttttttcaaagtacacttcattaaggatttcgcctcaaaggccaagtaatgcaagttctaacaattccaactttttaatcctctaaccaagtgatcatgtataacacagtccaaatagtcacatttacaaattatattaaacttttcttacaataatccaaagttaggcacaaaaaataatcaaatcaagtacatagtatgaacaagtttaatcacataagtatataacaacggatggtatttcttcaatcaataaggcttaccatgacattaacaaaaaatttaaagacaaacaattaaaacaacacaaaagtaaaaaatttaagttcacccccaaacttgaacccccaaacttgattgttgcattgtcccaagtgtgacacccaagactagaaaagagaaattaccttgggcgcctcccaagagcgttgccattaacgtcatataggtggatgttgatttcctttggagaacttcaacatggatcaagtgcacctcttgcattaaatagggccctcgtattaaatgaagaaaattgtctttcaatgctattaatgttcaaactatcaacaaccctcaattcaccttcacaatttcaatacatcaatcttattatacgacgttaaatagttcaaaatagctctttgggattcttctttatcttcttgacaatcctttgccacatcatcatacacatattttgcattgcctaatcaggcaagctcatgtcatgatctaacatttgtatagcgctttgccttatcaggcaagctaagcttatgccataactcggcaccatatcacctaatcaggtgtacttatatatcatattacctaatcaggcaaacccattttacagtctgatatccatatatcatatcacctagtcaagtgaagtcgtatgtcatatttgccttattactgtctaatcaaacagtcaataattataaaacatgtcatgccatgtggtacattatagttttcttacctcatgtgttgtttcaggtatgttgacagacctgcttggagaacaattgatgatcccgggccgtatgtcattataatgataaatcaataagtgtttagcccaaaacactacttaacggttgcaagggacaacctaggattttctaccaaatctcatagtttaaatacactaaaataaaacttatattttggctctaaaacatatattatatggtagagcttgtcacaagcttttaaaacaatatatagaatgttcaaaatggacacccgagtgaaaagttatggtaaaaatacgatttttgatcttttaagaatttctaaaaacggtgaaacacgaagatcccaaattttgcactcaccgaaacactaccgaaacttatctaaatcacttcaaacttcacagggcacatatataccataaatactaccatccttacgtatcagaaatgaaaatcgaacccttaaatgaaaaacaccattaacctttggactaagctttaaaaacttccaaactcgatttctaacacaaaattacctcaaattcaacaagtaatcgaaactagtcccatagctaccaaagaacaatcctataaggtcggaaccttcgtaactattctaattcacgaaactccctatacaaaaccaatcgtttttagcttaaaacaaaattaaatcataccttaagctttcccttttcaaggatttactatcctgctactaccagagcttagatctttaggttttaaattgaaaataaaaaaaaaatagatagagggggaggaggttttatcgaaaagaaaaaaagaaggattccgttctatttcgttctaatataataaacttataatatatatatattaaataagtttaatatatatacaaataatattgtaataataataataatagtataaataatataataacaatataaataaaaactttattattgataattatcttatcatttctaatttatacttctaaggcgctaagtcaaatcccacatactcctaatcaccccaatacatatattatcaacttattacaatattctcatcacttatatcaattaaatttgtgatgaaatttctagctccgatcgagtctccaaggttgtcaa

SEQ ID NO: 302869 - DNA, 4950 bp, Cannabis indica
ttttttttaaaaaaattatttgtcttacatatttttttttagtgaaactaaaacaattgaactctaaagttagatagatcaattataataatttggatataaagatgtaatactcttttcaattcaataatacaaaaagtttctctttttctattattcttttctttctttttattctttggatttagaatttttacttagtatcagagcattatcgtttttggccatggacaattcgtctcagcctaccacttcatttcagcaactaggagctcatcatcttcataaaatcaatcttgtagtcttttctcattctcttcctgtttgtttcatccaaacgaactacttgccatggaaacaacaagttcttgcagtaataaaggggattcgtctctagaaatttcgtgatccaagtagcgtgcctccgcagtttcttacagatgaagattgaagagcaaattatctcagtccaaagtacgaagattgggatgaacaaaacaatattcttgtgtcattattactttcttccatgtctaaatgagctcttactcgcatgattgggtgtgatagtacttcgtaaatttggactactttgagagaacgttacactgcactaaattaagctaatattggccagtacaaatcaaaagaatgagtaaggcaaaaaacttcatacaccaactagaaaaattcatccaccagatcccctagctcctcatgctggattgaaggcagcttgttgtagtcatttgctaaacgggcttcatgctcgcctatttcttttttcaccatggcatgagaaaaaaaccaacacccatcctctattaatttataataatttttattagttttttattggaaataaaagaaaaattcattgaaaaataatggctaatttgcaactaaattatctgaaccttaaggtttggtatgattaatctcctggactaaaattttgagaataaaatccttcaaacttcaattccatttaggtctctatttttctgttatttttactgttaaatatcaaatagacctgtcactgtgtacacgtggcattatttcattagtccacatcatttaaaaataatactctctctctatccctttaattgtgtgggttgagctggcacgatcacaggtgacacgagtacgacacgacacaaataaatatggacccaggcatgatacgaataatatggacttaagcacgacacgacacgaaaacacaattttcttagcacgaaagcacgacacgttagcacggcatataacacaaattcaaatccataaaaaaattatttagaaattcatctactcttttatattaaattattttatttaaatgtatttttattagtaatttatctactccttcatataaaaatatgacacgaacataatttttcttattgagattttgttgaacattttttactaaaagagattatgttgaacattatgtacaacttatgaagaaatttagtaatggaccataattatggtgatattaatttgattattaaacatgtaaatgtagcttctttttttgtgattttgaagctaattttaacaatcatttgtgctttaaaatatagaaactaatttgaaaagtaaaacaaattagcaattatttataggtccgtttaggcccatttgataaatatgggtcgatcatttcataaaaaacgggctggcctgtctaggcccgacacgggtctggcccaacacaaataatttgtgcttatgggctggaatgagcttactttaaaaatatgggccaggcccggtccatctcgttttataaaatgggtcgggttgggctcacataaaataagtaggctttataaaaacgggtaaagctgcccgaatgtacaactttatatggaatgatatttttcatctaaaatgatctattgatttataaaaaagggttatgcaagattagggaaataaagattttggctaattaggatttttaccttgtaaattttgacatgtactaaattgtgccctctgaattttttaggccatttaaaattttctctgaactgctaagattgttagattcaagaatttttgtccaattttactaaaaaaagcctgacgtggatgaaaatttaagagacattatttgatacatgttaaagttcaggaggtataatgatgtatatattaaaattcgagggtacgctttaatacattgacaatcgtcgtattaataaaatttaatagaattggacaaaaattcttgaatttaacaatctcaatagttcgagagaaattttaataatatgaaaagttcagcaggcacgtttgtataagtcaaagttcggggacaaaaatcctaattattcaaagatttttaattaaatgtcgtactctactcttatgggactatcatatttttactcatgaaaggttttccaaggaaattaaagaagaaacatagcctacacatatcattagtaaataataataataataataataataatagagaatgaggaaaatgggatgaaagactccaaactaaatacagaaaagtagaagcaaatattaataataagggcactgcctctatcctgaccagagtaatttatagtagtagtagtagtagttgtagtggtacaaacaaaactactacaagtacaaactgatcaactctgccaaccaattcaattcaatacacgagaaaagcaacacatagcaacaaattaattaatgaactagaccaataataaataagcaacaaaacacagccacaacagtagtaccaaacatgttcaccaaaacagtacttgggcctgtagatgaatccgccggagaattatcatgagatgatgatgaggtgggtgtcctaacccctgggtgtgctggtggtactgctagttccaccaccaccaccagaagaagatgatgatgatgatggggtggtggttgatgatgagccacccccagatttgactgtgacagccaacttcatcccattgccacaatgacccattacaccacaaatgaagtaatgagtacctgttgtcttgagactgattgtggttgttcctgtgttgtctgatgtgattgcattccctactgtgcagctgctgtagtcacttgagctcacttcgtccactgtgtggctacttccatagttgaaaactacatacacataaatcatatttattatacaatataacaaaaacagagatggacccattttgtaaaaaaaaattaattaattaaagtgagacatatttacctaggctatctccaactaggaaggttttgtcacttgtccaagtggtgtagtccacgcccattgcccaacctgatgtgtctccaaccgtgtaaaccgtggctgaagagattggcataaccatgtaaattactaatacaattagcaacccaatctctaagctggtgtttgccatattggttaatgaaggagaaagacagagagagagagtgagagagaagaagaattaagagaagaagatgatattgatgattgagaatagcggtttgggagtcattatatattggtgtaaaggggatttgggagtaagtaagtaagtagtgtgtttggtccactgaccatttctattgcatactttttgaaaacaactcatgcactagaagatgggatgggagggagagaggaggtactgatgacttgggttggacttcatacctaacgctctctccaaaggaataggtcccatttccctaccttactaattaattaattaaaaaaatacaaatttaatacttggataatgcatgttgccattaatactaatcatgtaccattttattttattttactaataattggtcaagagagctagacattagttgttttaatattacttgctaaaattgcattatttcatattattttcgacagaggggtgtcgcattatttaaaataattattcttttgaaaccgaaattcttgcctaactttaaaatacttgttatataaaatgtatagatactatatattaaaattaaaattatgcagtactaataaaagtattaaaactatatcgcttgtgacatgtgagacgttccttgcttaatttgacgcgtaacataatttacgacaatttagaccgacgtacgacattcagactgcaatagtttatttttgacaaaattaatagcaaaagttcatttcagattaattatgacaaactagtatataatataacataataatttcattttgtttatggcatatttgtgtatgagtggagtggagaccttttcttacctttaatgatgggatttagaattaaaaagcaaaaataaagtttatacaattgggttttgttgtctattatattaattgtccatcgattgctgtttgtgactaatggggtgctgttagacgtggttgttgtggttagaatgtttgaagattactttctttgatctatgttgataagaaatggggtgtctcaaaatcaccataaatcaatatatttaattattaaacagccaaaaagaagtggaaattgtcattattacttggaacttactcgatataataagatgcaacaaattaagtgcggtgaaaagacagcttcctaaatttctaatttgtgtaagaatggagcatattgttattaacttattatagctgacactattgtagtgtttatgagtagttagtaatttttttatataataaatattaaattaaaatatgtgagattcaatattaaattatattaataataatataatcgtcatatatatagtagcgttgggtaagtggtggcctttaatgattcttgtaattacaaaagcatgcatgttatttttgatagggaaatttgattttctatacttaaaagtttttaaaattttttttttaaaccaatacattttacactataaaaaatatgacatttttttcaaaaccccaaaaataccccctctatc

SEQ ID NO: 302870 - DNA, 1348 bp, Cannabis indica
gttattagacaccttaatgtgatgaccaacactataatataatacgttaagtagttagttaattttttattattattaatttaattaagatatgttaaatttgataataaatgcactaataataacgatattaagcactaaagaaaccaatcttaaaactacatggtatagattttttttacctacacattttcatatatattttcgcaaaaagttatctacatcaattcataatttatcttaatctgtcactgatagtagttattccacttcttttttagatataaatgtgcattgattgataaaattaaactttgtgatcattataaaagatgtttgttggaacggaggatattgataaacaatattattgtggacaatgtccactctgatacggttcaagattgatgagcaaaaaataaagttcttttatcatattatgggcaataaaattaccaattttactaatattaaaataaacaaccaacaaaataagaaatattcttttacaaaatgaaaaatagttcacaatctttcatctagtctccttgccattgaaagtattaattattaccttagagtcactctccataataataaacttaatacttaatcataattaagttatataagcaataagtagttttattattataatgttcaaaatttattgttaaaacttctttatggtaaaaaatataggaaaaatacataaaaaatttcatataaaattcattgtctacctataaagttactctatttgggtcggaaaaattgcgatgcaagatcaacatgagagaaatgctctaaaaataactaagctgtaaaactttaaaagactccaactaatcattaaaaacttgagtcaaatttcgtgcaccacagaccaaatgacctaagtaaattttaactataataaaattaaaatagagataaatttgaagttgaaagtatctagtcaaacttaatttgtctaagaatattaacaatatgaagaaacttaaaactatctttaatatgtcctggagcaaattttgagaaaggcaaatcacctcgaaagtaggagtgttcgcggtgcgggtggtgcggtttttaactattttttcaaatcaatctgcacatgaggtttttccaattttcaaaccgcacccgcaccacgaaactaaaaacccgcaaaaaccgcaccgcaaaaaatagtgcggtgcggtgcggtttttgtattttatgcggtttggactatcactaatacaacaaactttaaccataaggcttgaaaataaataaaaaaaaaaaaaattaaagtgtcaacaatacaataattagtagactttgagttgaacattcacat

SEQ ID NO: 302871 - DNA, 1486 bp, Cannabis indica
aaaaaaaaaaaaaagattgattagcagatcagattttttattttattttctttttattattatttatttcagcactcttggcgcacattagaggccacagctcgagcccaaaacttaatatgggccttcatgtcttcaccagaagatttcctgaaagcccaacttggaggaggaggaggtcgtggtgggctataactttgggccaaccatgcctcagaaagataaggccttcttaccttattttctaggcccatattatcctcttcattcttttcttgcaaacctgggattatattaaccacactagggttttttaacttatcaaatgtgaagcccaaatccttaaatccttgcacttcttcaatttcaaggtcacttaggcttcttctcatattttttccattttggtatcttcttctcatttctcttgacccatctgtattgttatgaaaaccctccactattgtgctctttggtgccctatttcttgatgagttgccctacaaaatccaaatattaagacttagaaaaatgtaacatattgtaacaaaatcgcaagataattttcgctcgtttcacgttcagagagaacgatcgtacaagttattgattacgttcaggcccgaccctgagctaaggcaggctaggcccgtaccaaaggcccacccaacccagtgccccaaatttttatacaatatattaatgtgtagaagaaaaaaatggtaagtttgtaaaattttattaaatataggcccaaacacaccaattacctctacgctttagataaaccccaaataaaaaaaaatcttagacccactttttttcaaggtcggccctgatttacgttaaacggtcgtgtaaaaagatgattactcgagcgatcatgaaagttattttgcagacaaaattgatatttttatataaattttcttcttagttgtatttctgcaaaaaccatcttattgttaaatacatacataatttgttactctattttgcaaaaaaaaaacaaaattatattagttgtacctactcttcaaattttactattattacttttgaaatatgaagcatgtcacatgttaaattaatagccttatattcaaaaaatggaactaaactatattccttccacgttaagtaaattaaagttatatatatatactcttttcatggctaaaaacaattccatgatgacaaagaacaagaacaaaaacttccaccattcttatagtgtttataaaccaaatatgaaaaataaattatccatttttacaatttttatatagataaggtatatatgtacacatatatgctatcaagacattgacaaaaaaaaatagcatttttgaaaatgtatattataaaaacataaaaaaaaggtaattttgaaaacactccaatacgaaataataaagggtaaataccattttggaccctgtgttttacaaaagttacagattagaccttgtgttttgttaaatga

SEQ ID NO: 302872 - DNA, 7566 bp, Cannabis indica
aataaaagagaataatataaaaagggtatagagtgtaatttcctcattaacttttggtctattttggtaggggtgaaattgtaatttgagaaaatgatggataattggacccttcaataaatgggcttaacagaaaattagtgggcccaattaagtaaaaagagggcccattctcattagagcttcttccttttgcagtggcaatgcaagactcaaaaaagagtgtttgtttgttttaatggttaatgccttcttcttcttctttcttctttttcttcttcttcataatctccaaaccctaatccccaaattcacacacagaagaacccaaatggaataatactatacaatcatagcatttgctactatgcagaggaaagccacccaccgcattcttcttcctttcctctcccggactccggctccggctccgacttatcgccaccaccgcttttcgtctctcattcattcttctcgcccaatcctactcttccatttctccgaccaccatactccgtcgcgagatcgccagaaaggacctccacaggcaccggcctcgtttgcttctgttgattgttcaagacgcttccttttgcttggatttctttcctctaatggttactcccataaccaacggcaacggcatcggcatcatctctcttttcatcgcagtaggttttatctcattgttctcttttgtttatttgtttgatgaaaagaattgatatttttgtgttttgtagattttttcaccagagctaaacaagttcagaggattgaattcaatgatcaacacaggtacaaatttgttagctttggcatttgttgagtgaatattggtgctgagaattgaataattaaataaaaaagaagccaattttgctgagagtaatgttgatttaccgttttgatttttggtaggcagaaatttgataagtgcttggattgttgaccaatttgaggttggattttttccacatttctaattttttgtcggttatgtgggttgtatctaatatgtaccagtcaaagggcagtcacaactgccttgtggtgcaactttcttgtgttttcactcaagtttggggtctggttagctacctcaagtcatgttatgttggctgaagtaattcactcagttgcagattttgcaaatcaggtattttctcttaattgtgtttattttatattagttgaacttaatgggattaaatgtggagaaactaatttgcgttgacattgtaggcactccttgcttatggtctgagtagctcgaggcgtgcaccagatgctatccatccgtaagtggttcatatcataaaataccttcttttttttttacaaatgtagtattttcttattgttatggtgtatcaagttggttatatttgttagaatttgaattgtatttatgttcaaaagagaattttatgagggatgagtttgtaaactataggtgaaatcattagtaattgactaattgtactcgtaaaattatctcttgagttctattgattgttcaacatgggtagtgagcacccaagagcatttaagaaatcagtcccggtttagatttaggacaacatatatatttcttttattttagtgacatgctgaattgacacttttggcattgtacagttatggctattccaaggaaagatttgtttggtctttgatatcggctgttggcatattttgtcttggttctggggctactattgttcacggatttcagaacttatggacttcacatgtaacgttttcactcattctcgtgtttgtaaattcttgttcttgtccaatatatttgtatccacaatattttaatttcttatctctatggatgtcatcagccccctggaaacattaagtacgcagctctagtgattgctggttcttttattattgaaggtataattcattattttaaatgattagctgtccattttcatgttttatatttcccctttctaaatgtttgcatccatttctcaggtgcttctcttattgttgctatccaagctgtcaagaaaggtgcagctgctgagggaatgaaagtaagggactacgtttggcgtggtcatgatcccacatcggttgcagtcatgacagaggtacttttcctaacctttctttacttccagttattaggacaagtttcaacctcttctaggtattcattcacatagaagagtatgaatggaagtcgaaagctaatacggagaatagcaggtgaaaagaaaataaggaatgatagtcagaatgaaaagttataatatgtagctacactaactagctgtttgttgggccttttagcttgaaagaaaaagtaggaattttatggacacataagataaaaacccaataggggtagctgactcgagtggtcaggcatgtgggagaagtaatggaataaggaaatgatggttgtgacaaaaaattacgaaattcaaagaggcacaacaatccaaacggtagcaatgtttcatcgagaggactcggcatttcatgcctagtttacatgtggtttgaatttaacaatttctcgagaatgatttgaacattcctcaaggcagtcatatcttaaaaatgggaattttcattactaattagaagttatgaagtcggataatttttgagtactagtgtttttgcttgaaatgcttgatcgctaagtttgtacaagtctcccaaatagtcccctgggagatgatcttagtaatcctcactaattaagttgatgtctacattgtcactatattgaagacttagaaaagaaatgcactgtgtttggtttaaagaatattgtggtggtttctgagtgtagctgttttcctttgggttggtcatgacttgtcaatcctagttgatctgaattagtatttagaaaagtgttgcagaggtgtttaatgtgtggaattttactatgtagatgagattttttatttgctgtagaatcttggtcttctctaggtcttttgtgtacttcatttttctgacatattttaagtaacatctgaaggtgtgtttcaagtgcttatagggtttatatgtctttatttataagtgtttataatattttttatttagacatgatttaacaggatttagtttgatgcagtagcaaaatggttttatagggtatatgcttaaaggttgtgattgacgtttgttcttgtactttgtttactgtatctgacagtaatattataatttccttgaaaaaaataaaaatacttaaatatgcaggatggagctgctgttgctggtcttgttattgccggagcatcactggttgcagtaaacattacagggaatggaatttatgatcccataggctcgattattgttggcaacttacttggaatggtatgtgatgtttcttgttcgtttaatctttttcattaaatgtttcaagctgttttataattttattttccgaaaacaaatttaagaaacaatataataatgtaaaagatgacaacttatcatcttagattagaaccgaaggtgccaattattattcagtatcaaaatagaagaagcttaattccctagtttaaaggaccgaaatagccacccaacatgtaattctttcccaaatgtatgtaagactgtcttccacatcacagatttctttggggaggtttccaaaaatgattctgaattttcattgacagataattttgtgctactcatgtttatgttaatttttcaaataattttttgcctccccatatgaaaaaggaaattgtattctgtatatgttgttattgattggtggagttatgaagagcagttggaaaactattgattggaaattacaacctataacagactacgtagtggcttctttatactttatattagctttacttagtaacaattctgatgataatagttcgatgttttagtggtttttgtatactaatagacatggaatgatttggatgttttgaagttgaatagaatataaatagttcataacatatatgaatgtatgtatatctatatccggtgatgtttccccataataaaaaggcttaatgaatgttgttgaccaggaagagagtagtagtaaaaaattttaccagagtgatagaagaaaaaaaatagtttgcaaaccatactgcaatttgttttgctttttaaagtatatgaaccgaattattttgcaggttgctatatttctgatccaaaggaatcggcatgctttaattggtagagcaatggatgatcacgatacagagaaggtcctccatttcttaaaaaatgatccggtatgccagattgtgggattgtgctttattttcttgattcatgttcatgtttcttaacatttagactgtaaactgttttgttataggttgttgattctatatacgactgcaagagtgaggttattgggcctgggttctttcggtttaaggctgaaataggtgatttttttcttttcttgtttagttttatctttcacagaggcagaaataccgtgcttatcattttattggcgatatattaaatgataatcgacaatataatccagtagaaagaaaacaattgtaattccaaacctttatggagacatacaaattattattaacagatgaattaacattgttcttctctgcaacagatttcaatggggtggtacttgtgcaaaattatctgaaaaggaccggtcgggaagaatggggaagacaggttagtcatcacatacaatatataaatatgtatatatgtatgcataaatacttttttttgttttttctggattgataaaaaaaaatttcttcgtgagcttttaacatttgatgctcatgcaattccttttcaccaattctctattcgtgcttatatcaatttcctcataagaaattctttgtcatgcttcaacataactgaaattcattcctattagaagtttgggtttgcgtaatcaagtcaatcatattttcttactgagtaaaattaagtcaatgatgagttgacttcagttttgtaaaatgataatatgcatctaaaggtttctctttgctctgaagcttgacaaagtagtgcctatcattctcttctgttaaattaattatagcatgaataccatgctgaatataatttttcccataacagttccgcgaagcagctatggagaaagacgatgatcaactcctcaagatcatgtcaagttacggtaagatgaaattccacgaaatctctgtattgttctatttttgatggctgagtaagtcaagtcaaccagttttctttatgatcgttgctaagaacgacaagtttttgattgcaggtgaagaagtggttacagctttaggaagtgaagttgataggcttgaaaaggagatccaatatctggttccgggcatacgacatgttgatatcgaggctcacaatccaactgatctattaccataaataatagacatttttctggatagcatcggtatgcatttcggttattatttttgcattctttttttttttcttctaattatagtgaaaacgaagattgcccaatagttaataataattaaggagattgttggtgagcttcgtttgattattttcttagtagtaaagcatgtgaggccattgtagattgtatatagaaggggaattttccattcctgagattaagaaaacattcattcattgcattctattgtaatgattttcctaattcttaaacacaaaaacaaattgcttttttctcttcttttgttcaacttggacttagtcccatgttccatgtttttgtgtacagagagagacttgtattattttcttcaaagatttttctaggtatattgcaatgagagttgaatgcttttttattattatcattagagtaatttgcggcatgagtttaatttttggtggaagacaaagtgtcaagtaaattgtcttgtgtcaatttttgattggatcagatcattaaattttttattttttatttaaaaattaatttaaatataccaataacttaagtatttatttctaactaggagttaaatttaaatatttagctgcaaattattcttattattgttattatttgaattaataaataagagaaatggtagcaccctcttacatatcaatattgttattagtccaactaagtattgagtctcatataatttaatataataatttttagagagtaccgctagccaattgcaaggcgacacgtctagaagatgttagacaccactagtgcaatgttcaataaataactgttagtggattcaatcaaattcatagcttgtttgacttttgtggcatattagagtgagttcatatggggttttctctttggaactttcctgtaattttccacaatacaaaaaagtcaagtgtttacatttctatgattattattttgtataatcattcaaagcatgtttcccaattcaacatttgttgctttgtttaataggaacacttttcagttacaacctcgaaattcattgccagcctctgtgtcatgcaactttcttgtcattttccaatgacccaaaatttggtatacctaaaacttgtctagcaatgatacataaatcttgctctggaattttcagagtataataattgaatcgacagaattaaaattcaatgaattttacaaagatcttagtgtgaacactttcaagtttggtcattgtttttgtgagtagtacataactactatatatataaaggacttgttttggtgacccaaatgaatcaaaatagagagaagaatgggaggattgcaagtgtttaatttgagagaaaatgttttgggtaaaaaaggagttggagtagtttgcccttattgtggaggacctgtcttagcatggaattttgatacccatttattgctttgttgtattccaattcatcataaacttaaaaccaaattttattgcaccatttgctccacacgattggttatttcttcttccaatttataaattgcactaaaactttatgtttattatttttattattggtcttttcagctcaagaatttgatcattctccatgtccaaacacataattactatatttattttagtgtgagttttcctattttattttgtatgtgtaatagaacattctatttgtgtaataatgttgacatttgttcttaattcttgtttggaattaaacctatgaaacaataaatataatatatatttatgtatatatatatttgaaaaatagctttagagaacaccacctaaagaagcattgctctttaaaagggccaaggactacaaatgaatatcatgaaaagaggcatcaactacataaggactaagagttttattaactattacatgaaattaacaaatcatactataagatagctagttattcctttagttactctaaagatagctattcttatttgaatttttccccatttttttgttaactttaccatgaaaagccatgaaaatgaaaatgaataagctgaagaatatctcttttttgtatctattaataaaaaatactcttatattatattttattaaattctactcacttttatgagtgggt

SEQ ID NO: 302873 - DNA, 2366 bp, Cannabis indica
cataaaacccaacagattgtacatatcttgacggtcttcgttaaacaacctggcgctctgataccaaaattttaacgtcttattgcctagggaagctacagtttttttctacttactatacatacctttgctaatcaaaagatttctaaaaaattgtctcaaatttaaacttctattattatatatatccatacaaaaagtcaggattccatctttaaagttacattcatatctaaaatatactttataaacatgttgcacatcgactacaaaagtatggcccaagtcatcacaagattaaaatttctaggtctaaatcttgacatgtacaatcacccctaagctctaaactcactgatgtccagccttagcctttcctttacctacacatgtaaacaatatatgtgagtcgacagactcagtaagtaaagcatacaaaacatgcacctgtctacaagacttaacagatgatcaataatgttcttaatagaagtatgacatttataccacatgcactaaatacttgtcatatactagtgttggtagggttgaatcgtaccccaagtactactgagtgttgtatcacatgcattatgtacttaaccataccagtgctggtaacactggattgtaccctttgaacatcatatactgtaccaatacattcagtaccgctactgtactagtgttggtagtatatgaatcaaatacacaacatgcaatttacatacatacacatatacatgtatgcatggtttataattatcttacctcgtttctaaattcaagtgtgccaatcgacctgaattgaaaatcacgcgttgaacagagatcctatgtcacagtcacataaattgggtaaacaactagccaaaaccttttcggggacctaaacttaaaactagaagtattcttatcgataaatagcatgacaaagccctatatatcaagcaaatacaaaaaaaatagacattataggaaaatttcctaaaaaatagcaagccgtttccgtaaaaatggaaagctatttttctgggtccctgtcagtaaaaacagtagacttttttttgctacagaaaaacaacaaagctcctaatcaactcaaaacaacctcaaatcttccaaaactctccaaaataattttaaataccataataaaccattttcaagtgataatactagatataacacaaaatttcataatccaccattactgagctaagtttgagttgctcaactcagcaaataactatcaaaaccacctaattaagctttgaacaatctcatgaatctttagaaattaaccgaactaaacctacgttcggatagattctaaactccaactttgcatgcttaaaaactaatgaaaaaccttcagaaacttaaggagaagagggttctagggttacctttgaactacacctttgatttatgctagaatacctagaaaattgatgaagttttgttctagtttcctgctggtcctcttgaggccaaaagttaagagagagagagagcaagaaataattttgttctaatgttaggtttttgtctaattaccttaatgataatccaacaaaagataagattaacttatcttaacattaattattatggtcagccaaaagacttagtggaataatccactcactaattaaataaaatgaccaaactaacctaacgttaagcttaaataattaaatggtttaagggtaaaatggtctaatactataatcccgcctaactcgttattccaatatcacatatcattgccccgctatacttgtgtgtttggatgtcaagtaacaattgtttatgaattctcattttcatgtttgataaatgagttagtaattacataatttaataacatcagttatttacaaatggtaatatattataactgcactgtgactacacccaattctcatgagggcatgagaattggagagtataattcagacccttcaattacctctaagtgcatggttgtagtgtaattatctagtcaaacaaacaagtcaaacttcataattattttcaattacacagtaactttccaaatgagcctttaattatggtcgtgtatagaagttataagtttgttatggatatttatgaaattatttttatcttgatatatatagaattattattttaattactaatatatgttataacttgagattaagcttcatccaaaggtttaaaattagaacaaaaattaattcaaaaattgtgtccatagaacccattctaatatattttttttttcatttaactgtaaatacgggttaggtttttttacacgacacgaaactagtacgagcccggaaggcacgagcacgactaggcacgaaaaaata

SEQ ID NO: 302874 - DNA, 3636 bp, Cannabis indica
gtaagaatatgtactactatgagaaatagtatgttgggggttcaattttctgtacttctgactcgtaaatcttatcaagtaggtggaggtgacgagagttgatttccagtgaccctgttaagttggattgtaacaattagaatatggaagagaaatgggcacaaaaataatgacagacacaagtgaagcactacctcaaatccagtccaggttttccatttaggctacttggaatttgaccagtcaggttgttgtttgcaagaagctgaaggacaatgaattaggaaggtacatcaataattgaatagaatagtgtaaaagtgcagttttttgtcgaataaaaaagacttgagtaggaaatatctcccttaggtagatacaactaacttatatgaaatccaatacacaacaatattcaactaagttactaaattgtggttaagagacattccattagaatttgaaagcaaatatataatccacaaaagacaacttgaacttacagttcacgcaagttatcaatgagcccgagagatgaaggaatttccccaataaactgattatcctccaaatgcctaaaattgcagagtaaaaggattaagaaaaccagacaccatattccacaaaacagttcatgacatgagatacagtcaatgctattggaaaattccaaacaagcaaacaccaaagagatactgattactttaggctatgttcaaactagtacatttagaggaaaataaaactaaaaaaagtgattttactttttcttgttttgattcgaacaaaagttacgaagttcttataggaaaagtgagaattcgatttgatgtaattaaagaattatacaagagattgaaaaattctcttttctttttcctagtcttttccctagcaaaatctttccttatcaaaatccaaattccaaacaaagccttatagaacaaaagaaactaccacagtctaattcattttaatgaacagttgatctaaaaaaaagtataagggttttaataacttacagtatgtctagcctctttaaaggactgagatcaggaatgggtcctgataatctgttattcccaagccagctgccaaaaccatgacacggtcaatgataagggtactctctctaaatttaaattagtgagtttcttagtgtttgaaaacttacatgccattcagggcagtcataccgctaataccagatggtacagttccggagaggtccatgccagtcaaatttctgaaatggaagtaaataaaataagttcttatatttaatactacgaaacacaaagaataataaaaaactagactttctaggacgcagcatcgaaaattgacaatgctataaaaagcgcaaactcacaaggtaagaacacgaaaccgagggccttctgaacaagtgatgccaatccatgtatactgacgaggcaaacaaggatcaccattccagccagggggaggatttttcagactgtctttcaattttttcaaagcaattactgtgataagaaatgtaattttcgttagcaaatgcaaataacaactcaacaaaacaaagagtgaacaacactaggcaaacaccaagtcatgcaatgtactagttttatttgctgaatgatagcatcataagttattatgtgggtgagctaccactcagagactttctagaaacaagtttctgagaaccataccatctcgggtgacagttcttccttcaatagggagcagtgccaaaacctcccctgcgttaactaaaggacctaagtttgatcctgcagatgaggtcaaactaatctttgtagtaccatgtagaggccaccgagatgcaaagacagcaacacctgctttagtcacttttagatcgcggtaatagggaaccccatttatgctaatgttcatcaccctcgagttctctgatgagttactaccatcagcaaagtacaacgcaatatagtactttgcctctggaagagacaacagaggccagttgaactccaagggttgtgttgggtcacttgtcagctctgtttggaaaactttcaaaggtggaagattccaaaaaccagaaacagatacgtttttagctgccaaggtatgattgttttctccaaatggcacccaaatccgatcaaattcatcgtcagggtatctgagcatataaaacattatattacaataaggaattagtaactgtgtcctactatacaattcaaactaaaaacagaattgattttagagcaagtcttaaaagaatacatggtgatctgggactagattacagtttaattgaattcacttgttgttaacaactatatagatcaaacattttcaattatcttgcgtatcaagaacataaaagaaatactttataaatattgttcagtttaaccctcgattattttttttctgcatgaattgaaagaaatggaataagcccagttcaacaatcaaggagcacaatgattaaagaaaataaagaaaaggaattaaactaagttgttcataccgaatgggaggtccgttgtacccaaaactatttcttgtagttaaatgaagaccataattctggaaatccgtggaattatacaaagaatcacccaatatgataaactctaaagaggatataaaagggtccgaatccgtatacgtattaaccccaatacagaaagtcataacattcgcctgagcaagaaaaaccccttcgtaatacgtcgacactccattagcataatccgtcgtcgtattgaccactgtccagagagttccatccaaaatctgatcaaacaccggcggcgaatcccgaccgttgatccctccatagaagtacgtcgaccgtaccatatacctagctccgcggtaagcccgaatggtgtagcaaaacttattgtgaagattgttcgcgagagggaacgatcggacggtcgagagaataggaaccgtgaccggaacggtcacattcttggaaattccgccggtaacataactttcgtcggaaatccaccgccggccttcaaatacagagtcagcaaccgcgccacaatcaatcgcaacacctaatagaaaagaacacagaaatgaaagaaaaataagaaaataaaatgaaaaaaaatcaatctttacgagaaagaagaaagaatcgaagagagtttgattcaagaaaggggggcttcacttacctttgggctcggacaaggagaagggtaagagagaaaagaatgagagaaggaaaaagaagaagagggaagccattgttgggaaattgtagcatagagaaactaaattctagtaaagaaagacagagattttagagagaaagtgggtttggtctgaattggtttgaaaagatttgaatgggtcttcgattgagtcatgcatgagaaaagaacagcaattggagttggccaagaggatggtattaaatcattataatatatatttaaataaataaaatactgaatttactatttttaattaataaaataataagtgattgaagtgaggaagtaacgcgggaaaaactgagtccaggtcagagttggtacttactttttattttatcatattcatttgggctgagtcgtttagatagttgttaggtagttttttttttattatttatttaaaata

SEQ ID NO: 302875 - DNA, 4111 bp, Cannabis indica
cacttgttgaaagtgtgatcaagctttccacagtgacaacagtagttttgaagaccttcataaaggaatttgagccatttagtgatggccaatttcctgaacttgacattcatccctcagtgaagaggtttggtgatgtcaaaaagaactcaaactctcatgaatggagtgactacatcatagagagaagcaatatgagtctcaataagatcacccactgtatcaactacaaactgggcaagttggagagatctattgccaaaaaggatgtaatgtacttgcatccaaaggggaacatagagaagttggttgggtagaagagtatcaaaaccatttgggatggcaaaaaccattagagataggtcaaaatgccatggttgtcctttgacaacccgtcagtgatccccttcacaaccaaacctcacaagaaacagtctggaagagtactcagaaaaggttaaggggaaacggacggtctaggcttccttcatagcgttgctcacccacactggtttcacaggtttaggagtaaggattttaacaactaaacagaaagactgaggaagaggatcagggttgagggaaacatggtcaaactcatgcacaagggtttcctcagtgtgagatgaacaacaacatcataatgggtgctagtattcatagccatcgagatatataggaatagaaggaagagaagaacaaaaggaatataggtaacagataagataatgcctggagataacagccttaaatagaaaatactaggagaagaatacctaagaaagggagtatagggaagtcgaggagatgccaaaaccatccttgcttgtcctagcccaaaccttgccaaaataggtaccatgatgatcaaaatctgcctgaagagaaaaaagtcggttattaaatgcatgaaaagatgcgaaggaggagaggaaccaagggatttctgagagtaataaatgaaggtgaccgcatgatatttttgcaggggagagtaaatgctgtttgatgatgagtaaagggtaaagatggaaagaaactaaaaaatgagggatagaatcacaattaggttacacatcactaaggatgaacaaaagactggacgaaagactagagaaaaaggaaagccgctagagagttccagagaatttcatccactatttaatagtaatattgatacctaagaaaatgctaaaatactatgttatttctaatttagttttggcattttatgtaaaaaaatagttatgagaaaatattttgtacggtgccacgtgtaggtagttgatgctattgaatagcaatgctctttattattaagttaaatggtatgagcgcgtacgtaaattgacacgtaatgcaaaagacccagaaagatttgaagtcactggtttgaattcctagtaaatcgtagcttctgggaaggcaagaagaaaaagaagaaaacccacagcacgtatacaatttattacataagaaataccattaaatataggaagatatggtctaccatgctgttgagacacagtacaccacgctcttaataaaagcgcgtgaatcttaaacactattagaaaattgttgttacatagaagtttcagatattgattattcatcgtccgattttcattaagtcagtccacaattaataatcctatgctttcgttaacttgttggcaaggaattaaactgtatatattacttatttacaagtgcaccaaagctcaagaaaccaacaagcagtaccaaacacaatccttctttttctcatcattttaatatatttcatatatgattacttcatcacactaatcctatcccttttcgtcttttcatccgtatataagtgaaacatttatatatataatatatagatatataaataaagtcttgtatctcaatcatatatattttgaaacccccacacgctattatattcaatataatcttcaagcatcgtgtgaccaagttcaatagttctctttaatggagtatttcaacaaagtcaagggcatagtaaagcttcggagccacctagacaagtacttagtagccgacgacgacggtgaaaaggtccggcaaagccgaaacgggtcatcgagaaaagctaaatggatggtagaattcgttgagaataagaaccatgtcatacgcctcaagggctgccacggccactacttggccgcaagcgacgtgccttttttattaggtatgaccgggaaaaaggtgattcagtctcccatggagagggacgaaaacgacgtcgttagttctgactggatatatgagtgggagcccataagggacggtttccaggtcaaactgaagagctggtgtggcaagtatcttcgagccaacggtggaaccccgccgtggcgaaactcgatcacgcacgatgaaccccacacaggttcgacccagaattggattctttgggacattgaagaaggtgagttgaccgagtccgagtccgtcgcggattatttatcgtctttgtcaaccctttcttcggtgtcagatgatattttgagcgaactagggtcgccggtcgtttcggctagatcatcgttcaagtccccgaggttttctttcaagtctcaggtacctctaatttttcaatttctatttcaaattaatattctttgtttacggccataatgaagaaaaacaaaagccttcttttataattaattaatttctgattcatgatgatgcatgccatacatgtgtttattttgatccaaattaaatttcgcataattaagaagtacaagaagttatttggttttctagattagacacagttaaatgaaatcacatgtacatttagataacaaatttaaacttgtttgaattataaatttgatgataattaggaaaacatgtacatgtggcttgttgcgtggagccacatgtacacagttaaatttgatgtacatttagataacaaatttaaaggcaccaaatcatagattttgacaaagtaggaaaacatgtttcataaaggcaccaaatcatagattttgacaaagtaggaaaacatgtttcataaaggcaccaaatcatagattttgacaaagtaggaaaacatgtttcatgtggcttgttgcgtggagcatgcaaacttcagaacttgacaagtaacatatgaaatacgtatcccatgttcttatatatggctatcttgaatcaagagggatatgactctgataccatgttgagaatcatggggttccatctcaaaaccaattggcaatgagtggagtaacccatgttcttatatatggctcaatattcttacatttgatccatgtgggacaatattctccaatacattataatgccctttgttatggttgtaaagtagtagctattttaaaccatgtggcatgaacaatccctcaaatggtagctttttgattgtgtgcaccacacaagaaagaaaaaaaaatacaaatacaaactatattataatgtataacttggtgtaattagggtttgatgaggaggataacactcaatccctacaggcatagttggtggataaacccataccaactcctccccactaaaaggtgtagaaaagatgccattacaataaagcatagctttaaaccccattaatttaacatcccttggtccttcctacattctagtcataatttcaatcctttttgcaactagctgactctgtatatcaacgaattgatgatttcattagcacactcacaatggccttgtcttagttatacatcgttgtcacgaaattctgtaatttcatccatggacagtcggtcctacccacactttttttcttttacctttgcgtgtacgactcataacatttaagagttcttgacactagatgtttaacaagtgttacctagtactatagggaacaatagtggaatactaaataaatttattactcaataagaataaatttaacactcaattttttagggctggaaagaaaaagtgtacattctaacaaaattttggtacaattaattgatttattatgtgcccttggtatctccgatggagaatttaaatttggtgttaaatcaataccaaaaaaatatattttaatactagttttttttttttt

SEQ ID NO: 302876 - DNA, 2541 bp, Cannabis indica
gcaggcgtatacatttttatacttttgtatatattattggcatttgcaaaaactaagtttttcaaagataaatatgaatgatgaactttataaactccgggggcacgaccttattgataccaaagtttatggggcaaaataaatatttatattaaaaaaataactaaagaatgaatgagttaattttaataagaaaatattaaattgcatttaagttaaatttaataaaataaatttatttaaggaggtcttctttgggagtgtcagtggggtgtggtagcaattgtgggtagctttttggttaccaatgagttgaacaatgtaagctgctatcgggaacttgacagacatatggtagatggaagagatggttcagaggttgtatagggtaggccttctgatcatcacattgtacggagacttggtgtcgaccactatgaaagttgttgtaatggtattctgcctcagggcagtgctgacggtcagtggcagtttgatcttacaacagggagccattccatcttcactgaagtcatacatgagttgattgcatggctccaggtcttttaaggaaaaactcattcgctccagggtttgtttgacaaattttttaatgatgctctgtcgtcaatcatcattctagccaccatcatgttgactatttgtaccgtgaagagcagacatggtccgaatcggattatccaaatgtgattggatcacactcaaaatgtagagatttttgaggcctctacgcaacctctaacacctttatccttggctcatgtcgtagagatcttgcataccattccagagctttccttgaggtaccgacaatgtgcggacctccaactaccacatcaagctgtcatgccattattgtaggctggagaggagcattgcctcctactagcgcttttggcctcacatactgctggagggtagcatgcttttgttaaatcaaaaactttatctcatctcataattgtttacactcattcatgtcgtgaccgtaatttttgtggtagcgatagaatttgttcatgtttctcttccctgactctttgaagggaagaggcttgcggtacaacactgttgacgaagttgccacatagatttcatctcttggggccaagagaatagagtaggttgtaaattgaggctcatagtcctttttgggcctattcccaattttggctttctttctgccagagaagttgtcctatttaccaccattgttttgtcttttcccctgtcttccctccattcccacagccccatgtgtgtctgtgttaggggtaggggattcttataatttcttctttttttttttgagtcattggcttgataaacaacttcttcgagtttgataaagccatcaactctatccaggaagtcattcatggtgaaaacttctttgagacgaaggtcttaccatagaggactcatctccttgagcccagctactagtgccataaccctcacgtcctcgttaagtattttggtcttagcagctgcctcgaagaaccgttggatgtaatccttgagggatttatcatcttcttacttcattcaaatcattgggtttgatctatcattgtctacatggagcaaattgacttccaaaagtgtccacaagctctttccaagaattgatagatctaggaacgagattaaggtaccaccgctgatctaggcctatcagcgtggaagagattctacaccgggcgtgcatctcacaccccttgaagattggtctgaacttcaaagtagtggatgtgagacaacgggtcttctttcccattgtactcgtgccaattaggattcttaaacttaggaggaatctctaaggcttagattcgatctgagagcggtgagcgttgctcttgagccaattcaaactctaacaacttaggagttgtgatccttttcacaagagcagctgaggaatcaaacttggccatattgattccacaggtggtggcgaccgagttggaacttcagctacccggttgatgggatcaccgctagaagctcccttttccaccaattgtttcttgtttagggagtcacacaggtctttctatttcccaagtcgatcaaaaatattcgtcgatcagggtttggctatagcctcctaaccatggggtcgtgaaggctgtgctggggattctcctgtatgaggactgagtcatctttaggctgttttctgcgagagcattcgtccagagcattatcatgactattcccctcaaaatagtcttccaaaaggtcacaagtgcgaagagagtttaactgattgctcaggttcaactcttccctatgcactcaagggaagtacttgtactgttggccatcatgacaaaaagcaaagtacctacacaaaacacccctttcatcacagaaatacttcatagtgtggagtgatttattggtcctcgctctccaaatctcataccctccaatttcatggtaaagcctctaggtctctcccccaaggttgactgcaggttccatctgttggaaattattttaccacgatct

SEQ ID NO: 302877 - DNA, 4899 bp, Cannabis indica
aataataataataataattggtaaattttgacaagtctcgatgatgaaggtataaaatatgacacgtactcttatgaaattaattgatcataaaatatcttgatttattacaattaaataaagttgtatatagggctttcaatatatgacatattaaaatttggtgtactgttttaaacttaggccaggccaggccgtattggaattttgaagatgctaatatatttatataaataaataaaattatttgtttaagggcattccaatttgacctttgaagaatcataatagccattactaccccaatagatcgccccttatttcttagaaattagttaaagttaattgttttttttttttttcctgaatgagttgtgtgtggagttttttcttagccaattaagtcaaaatacacaagaagaattatttgactgattaaaaaaaaagagaaatccacaacaattgaccatttccttccaatccaaataagatagtttgatttatgtgaccatgagcttttccccaatttaccatttgccaaatgggaggacttgtcctcggttgtttttcaaataataataataataataatctttaataagacaagaatttaaaaattttacaaattaattagatatattttcccccaattatgttattatatattaaaaattacaaatattactgaaattgcatgcaagatatgtggatttagtttagagtggtgtgttgcaagatctttaaaatgcgatattatatattgtattattgtatcgcgcgttaatttatggttgggatttaagtcatcttctttcttttgtttcctaacctatctatcattcatgtataatgttggagtcttcttctttatataaattttttaaaaatgtatatacaattaatattttaatataaaaaataaaaatttaaaaatttaaaaatttatatacaaatatattttaaaatttaataaattaaatatatattcatttcttaaatataatttattttttttttatctacaatttaaaataaaattaaatatttttttacatacaacttttttttatttctttaaatttgttcttttattttataatttgttattagagacatacaacaataataatttattttattttagtgttagttatgtaaaaaaaaatatatatatttttaataaatattaaaatataattaatcaaaaataatgaatttaattcgcactaaacttatgaatcaaattaaattaaatttaaattattatgcaaataaaattagatttaaaatataaaatctacatccaaattgaatacactacaaataaaattgtacatgtcaaattaaacgtactcttataatgaatgaaataaaaggcttttcccatttcagaaatgaataattaaatagacaaataaaacaaaaactatgtatgagagtctagatgtggcatccatagatgaacatgtcatgaaaacatagaaaaaaatataaataataaaaacaaaagttgaataaatacgtggaatagttaggggggttccactacatcctatatactataagtaatagccttctcctccaacttgacaactacctccttaaaaccagtcagagacgaatcaacctaaaggcaaggcagagaaatacagagagagagaaagagagacacagaaaatattctctcttcttgggctaaaccctaatcgcgtttagtaaccttttctctcttactttctctccttccttgttgtcgtcgttggttggttttctttaatcttctttcacatacatcaccccatcgatctttcagatcacgggaagcaagccttatctctctctctcctatttttttgtttttcgggaaaagtcgtcgcgttcgtggtgagtattcggtgtaatgatacgatttcttttaatggagttttatatttactttgttagttttgtttccttttatggcttcaaacttgacaatgctggtggttttaacttcactcgtgccttttgatctgtttggttgctgggaaaatgagctgaagcaataataagatttatatataagatggaatgaaaagcgtttttgatttgataaacttgctctttgtttttattttgcgactttttcctcttttgcttgataaaagtatgatgatttgcttgttaggtttttctcttttctcttttgggaaaaaccttataccgttattgcctttgctattatttactgagttaattaattatcctgtcggtgaattttcattcccctcttttctcttgcctttgatttgaatacgaagttcatctttgtggattattgaaactgtaaatgagcttttttgatcgttttgttcatttgggaatgcttgcatttaatctgttattaattcaatgagagggttttgttctacgtttcaatgttttgtgttttgagttttcttttaacattgctaataaatgtaacttttcaggtatctttcaatcatggttttctgggttttcggttatggttcacttgtatggaaccccggttttgattacgatgagaaaataattgggttcatcaaggattacaggcgtgtatttgatcttggtaagtttctttctgtgttagttaaaacgcaagtaagtaattataaatccctttgttgtgactctttttgttctcttcatttttcatgacagcatgcatcgatcacagaggcactccggaacacccagcaagaacttgcactctggaggagaaagaagggtctttatgtgtaagtatactcacatcagaccactgatctctgctcctattaatattgataattgatgtttttcttgtgatgaacagaacacagtgaactttattttcatttgaaatgtttgacttataattttttttcttctttcaattagtggggtgctgcttattgtgttcgtggtggccctgaaagggaaaggaaagccatggaggtatgtatctgtaatgatagttaaggggccattggtttaaaaaatccagtaattagtagcatgttaatctcttctcaaatctctcttatttaactcgaatctgcacttctgctgatattatttgtaatttgctttgttattagagaatttaatcttgttttttcttttaatttcccttttgtatagtatttggagcgaagagaatgtgaatatgattcgaaaactcttgtaaacttctataaggtgaggcagaattttatttttcttcatcttcatctttgcattaatgtaataaggttaaattaagaactggtgattaactttattaaggtaatgttttcaatgtaactaggacgaagactctttggagcctacgttaacaggagttatagtgtaagttatttatgttcaatgtttcttatgcacaggcaatggaaggaatattagacaaatagagaactcacagacacacatatatcgttctttgattttgcagtttcacatccactccggacaaagtatcaaacaagtactacctggggcctgctccattggaggacatggcaaggtaaaattaatcttatctttctttttatacttgttttgctggttatcttgttatgtattctggtgggataaaatatgtgtggcttatcttctcatcctaatttcttttcaggcaaattgcaactgcctggggaccatgtggaaacaacagggactaccttttcttgttagaaaaagctatgtttgatattggtgagtgtctttccgtatagttgaggaaaataaatttgtattgatactatgtataataaaatagatagagaccagggagtaagtgtgcttttgttttttcaatttaaaaacagaatcatatcatttgacctattttaaccttgtgctttttcaatataatattgaacagatcatgaggatgactatgtgatagagcttgcaaacgaagtgaggaaggaacttggaatagttgggagtggaatacccaaggagaagaagttggtggttacaccccatatcccagttgcacacaaatccaacattcctgctttacaactccatcccctgccagaagccattgccatggactcatgactcactaaaagagaaccaatggggaagccattatactatattacgacctaccttacttcaaccccgggttgatttatcatacaagatagctcttcctttttctaattgttcttttcttacgttattgtaatgcaagctcttttaaacataccctttaacccacctcatgtggaactaggttctgcactctccttaggattgaaatggataatggctaacctcaaatatgctcctccctagtcttcttttctgttctttacactacaattagcgaattgagtaatggtgaactccaatctagattatatatgaaactcaagtgagaatgttttatgtttcaatttcatatgcagacgactgattattactgtgctctataatcattttaagttgatgatgatgcagatggtgttgcttaatataaccaaactcattctaatacttgcactaaaaaatgagtttatgcaagcggcaacatattgctacgtggttaagcaaaaaaaacatattgcttacgtgttgcattggggcatcttattttgacaccttttttcctgattcaacctttttattatttaatttttttaaaataaaattacatttatctaattattaaaattttatattaagatgaagtcttaatggaaaataatataaatactacaaattactcacataagtcaaattcaatgatataaaatactgataaagaaagggaattttgattttatatatttaacaaataaaaaaatttattattaaaccaaaacttaaatcctaaaaaactatacttttttttcaaaaccccaaaaataccccctcaca

SEQ ID NO: 302878 - DNA, 1908 bp, Cannabis indica
ttggaaatagtggaatcatgtatagaaaaaaacaatgacactaacaaaatcctttactactatactcgatactaatcaaggttacaggcacattcagtagaatagctacccgaaaacgataccattttacaaattacaaagaaagaaagcactcagttactaagtatttgaacctacagtggggtaaaagaattgaagtatttttagggccgagttcgagtctacaagccatttttctatacatgattccactatttccaattagacagcagttttagaaaaaggaaaaaaaagaaagatatgcaaacaaatacgagtgaggttttaagagtgccgtacctgagagaactatctgaacagcacgacacctgcctgtcattaaatgctgtactatgtgcataaataagacttattgaatgttccaacattcaggttagtaattgcaaatctggatggccgggttgaggcgtaggaggtttaatcaatggcctcaaagagtccatgatactggcaaatgaaggtcgtttccatggctcactgcaacatcaacatttgtttatcaaacaattaaaagaagaaaatcttttagtaagtcaatatgtatgataatcagctacactcacttggcccagcatgcttcaattaaagaagcaatttgaggtttcaaatcacgaggaatctcaagccttttgcctctaaaaccaacagccgccacaacctacaaaataggcacaagtaatacgtgaactctcataaaaaagtaataccaaaaaattatataatatccaatacaagcatgggcacatagaatatggagcaataaaatagtaaatatacataactaaaaatcaggatgaagatcaaactgaaataacaactcaaatgagattccagtcaatgtatccattttaaaatgacagtccattgtgcaaccttgggaatcctgtcgatctcagttgcttaattaagataaatttttacaaattaaattgaaactctaaagttagaacctgcctataaccaaaagttccatcattgacagttttaaacgaataattttgctcccttcgaaatctgttggggcaaataaattccgaacagtctattttatcaatgcaattgttcctgcattataaagtacatatttgtaaaataatacagaaactcgtcagctccagaaaacagacctgtgctgcatttaaattagtccatggttgttgcaaagtggcaagttcccacaatattataccaaagctgtaaacatccgacttctcatttgatggctcatcacggagaacttctggtgccatccactcaggctaaaataagataataaattttcaacagtgcttaatattaaaattaaagacaaaccataaaacaccttaaattggtgtctcaaaagctcgtatccagtataatagaacttacagtcccagcagctgattttgatgaaagaaatgtatttgcctttagacgtgaaagaccaaaatcacaaacctgaaagaaaaacagattgagaggagacaaagcgaaaagcgaacaaatgtgatgcaaaacaatcaagtaataaaatgactaagattgtctgcaatgtattaaatttaatattattgtaaatacattatcttggcttctaagattttttaagaataaatcatcccattaacccaacaaaatccatcctactcaaacccgacattaaaccccgtgcaaatacaaatccccatcacacctaccttcacagtatatttcttgtcaaccagaagatttggagattttaaatctcgatgaacaattggtggattacgcctatgaagataattcattccctttgcctgtacaaaaaattgacaaatcatttggctcaatataatgaagtccaaaaaaaataagcatccaaaacta

SEQ ID NO: 302879 - DNA, 2354 bp, Cannabis indica
tttttgcacatattttttgtaattattttgtttttgttgtacatttatgaaaaaagccctatttcttttctctaatactttctttatacaacccttcttttaaagtgaacaaccttcaaacctttttgcagcacttgacatgttgtaattggttcatacaatggcagattatctaattcagtccttaaaatactcaaattggagttaaacttcaatcaatattgtgaaatgggccattttcatattgtgtttttatatacatataagttatacatacatacatacatacaaacacactttaaaagatgcaattagaagaactacccttattgaaatgtagcaagtacacagattttaatgaaacagataatagaaattaaatatagttgcctaatcaatcaagctagttataacattatcattgatttgagaaggaataatgggagaggagatcatataaggctcctcaaaaaaattatttaatcagtttgatgtgctgagataaaagatatttcaagctgcattggtagaattacctcctttcctatcgagctcttcgagtacctcccacaatttcgggtcagcataatcttttataagtaaggttggtttggcttccagaagtaaatgttctgggtttctgatggttataccaacaacaggcataccagcagccaccccagctttaatcccagatgcagaatcctataaagagaacttggattaaacttgaaactacctaaaaagggtattgatatgaaaaacaatacaaacctcaaatataaaagtgtgatccttagatgccttgagtatttctagagccttcaagtaaggtgctgggtgtggtttggcatgttcacattcattcccaattatcacaacatcaaaaaaatctgtaagcccgagacttgtgagcatgagttcagcatttggtcttggagcgtttgtaacagcagcgcgtttcagaccacgatcttcaacccatttcttcactttttcaagaccacctaacggcttcaatttttctgctgcaagtctgtttcatcgatcattaaagaaaatacttcgtcgggaacataaaaggaaactctatgtaagtgagcaatgaaatttaccggcgaaacatggcttccttgtcatctgtaaactttaaaccgcgttcaaaatcatcagggaagagtagcctagctacatcatcattgtgtttgccagcaatattttcgatataataatcctcagtaatgggaactcctccattaaatcctatctggtaaacactaaacacatcaggttcttgttaatcacacccaaccccaggtgaaattcattttgattcacagattcaaattcattaaaagaaaacttctcttataaaacaagagttgaactatgaacattgtcaagttgggatataaatacaagtgtaaaccattatggattaagctagtaaaacataattctctgacctcttgaagcatttcatagaaagcctgatagtgaaatggatctgaatcacatagagttccatcaacatcaaatagtacagcttctagtggagctaatccagcaaacacatccttgctggttcaacagaaaaaataaaatgaaaatcaaagcagctcatctcaaatttatgtaattacaaaatggtaaaggttaaagctttgatgggttttgtgtgattcagaatctaaatataaatggtcatgaatctgaatatagacagtgataaaaacacatttatttatgatttaaaatacttgactcaaatcttaattacattagtgtcaattcatattcattccaaaatgagatcttgtctttttcccccaaatatgaatttggccccatagattcatcattggacattagctaataaaagataatacatttacaattatgtgatagaaaaatgcagtgaaaaaataaacattattcatcaaaaaatgtcatggaaaggatataagaattgaaaaactagcaatacccagatgaaattaggattagaaaataacaaaaagtaaaagagaattaattacctgttgggaagagagttttgaggagaagaagctgtcattttgagttgatgaggaaaaagaaatataagaggaaaggatcgaaacgcttaaatatgagcaaaaggaatctttagagaatcatattcatcacccacacacatgcactgcagatgctatttttttttttctttgtaattattatttatttaaatatattctcatgaaaatttaatttgagttgcaaattaatttaaattaatacaacttaaataattttcttaatatttatatataaaaattactactaagatggaaataattcaatttatttcaatc

SEQ ID NO: 302880 - DNA, 908 bp, Cannabis indica
tttgttatattttctttttatttaataattttacctagctcgcctattctaagggttaacccttactaggtgacaagggtctctctctcattatatttaaaatttaacatgttcaaaatttcatacctttatttttttgtattgttgttgggatttgaactttaaaatgtgattatttgaacataattgtttattattaaatattaaagtcaacataatataagaatatggattcctattatgcaacataatctttaatataattatgaggtgacttcataaattattatttaaagtaagtgtggttcaatattaaattacattaatagtttatgacgctttataaaagatgataaacatcatagatgcttttaacatttcactattaaaataaataatcaacccacttaaattttatttttggcttcgcctctggtccacttcacttcactttcatgatcacattgaggtaagtaagcacaagtttttttttttattatttatttttttattttatttgtatttttgtttttcgtcaaaagaaaatcactatactcaatttggtcttattttccatttgcatgatcaaattaatttgttctggtacatgcatattgaattagtttgttcattacttgtgaacaaaaaaagagcacataatttggattcaatatgaaatgaaatttcttatacttgtcttattttgacgtaagtactactctcaatgtcccttttctttaattttcaatctaaaatattatatttcattatatttaaatctagctgtttgactataataatctcatgaggcccaggcccggccctaggcataggcgggtgtaatatccagattaaaataattattttttttttttttttggaatattaattgagcgaggataattatc

SEQ ID NO: 302881 - DNA, 2071 bp, Cannabis indica
tttgttggtgtagggccaagatagtaaaatcctatcttaaatttcctacagatgggaatgacatactatgtgttatgtgttagactataaaaacactatagaagccaattagtaatttgcaaaaggtgtgaaaacctataaatatgtaattgtatagttaatattgaatatggaacgagataatagaattttagttcatttggagaattgcactgtctcaaagaatgtgtttcagagatttatcctgtctcaaaaagaacttattacctatcattagtactttcattgagagaaattacagtgagaaattcactataagaactctacgccatgaagaaaacttagcttgcaaagatgttgaaggagtcaacactatgatcatgcatgctttcgagcttatcatgccgtatgatgcttaaactcatacttatttttgtaacatctttgactctaattagacaaatattaaattttagaatgctcataattcttaaaaaagcaagatcattgataatgaagaacagacacaaaacaagatacatcagaacttaatcatcaagaagataaaaaccatatataaaattaactaccttttcctatacattttacttattcgaaattgaaatataggagatgataaacacttaacaccaacgtacaaagctgcaaaagaatccatggtagcttgcttgatttgctcctcactcaaagtataggccccccaatcacaaaatccaagcatacaatgcttattgcttagctctgttaatattcttcctccacccaattcaatgcgttcatagtcataagagctagtgtagccgttacaaccatgcaccaatattaacaagttgtaaaactcagcacaagattgattcttgaccgaagctccaagttggccaacatcaacaaaattcctacaactcaatccataatccctttgaagatcaaccatgtcttgttttattctcatacctaaaaaaataagactagagaagctactagaaaaataggctaggcaaagttgggaatggtagagaaataagtgaggtgcacgagcacgcattaggcattctcccaatgcaaaatttataagagcaacgttttgggtgtatggtaaggagtatttgggcttgttctaaatgacttttctatacaaaacctactagtgttgttcttggtgtggaacgatcattagaattataagcagtattcatggtcttagaaagtagagatgaaagagcttcttctagagcgctttcatttttgatgatggttgttttgatttcagcatcattattagaacccaaacgaattgtaagagatgaagaagacataataacaaatatattctagggaattaggtgatcatagaatagaaaaagttgatagagtacatgtaaataatatgggtatatatatatattaatacgcatgtctcttcggttgtcctttagttttgtatcgattaactaatacctacgtccttccatattttcaatgcgaaggagttaaatctttttttgaaatttgtaatcaatattactaatgtgattcaagtttcaacgtgttagcttgaaaagcgaaaagaactcagagaaatgctatttttttttttttgagaaatgctaaaaggtagaggcacccacttacatgtcaatattttaagtatcggtcccatatagtttaatataatagcttttaagggtatcgctagccaatcacaaggcgccacgtcttaagggggctagacacaactggtgccaataacaatactcattttttttttaataaataacaagtttcgtataataaataatactgttgcccaataacaatattttattaatttttctatcattactctgccacaattttgaagtccattgcaattgatccgtttatgtattctgtttgtcatattggtgaagaagtataatttttttttaaattaatatttaaatcgggaaaggtaggcattgacccgaaaaaaacattaaaaaaaggtaaatgacggcaaaactcccaatactttcgttttggtttcactaaacccccacaacccaaattt

SEQ ID NO: 302882 - DNA, 1604 bp, Cannabis indica
atatttattaattatttttttattaaatttatttagtttgtttttgttttatagtgtacatgtataagatacaatgtaaaagtttaaattaatatattatttttgtgaaatgaattaacaaattaattagacaattaacattaataaatttttttcaaaataagtaattatatatagtaaaatttatgtaggaacctgtatgacaatacttgattacaataacatttttgtaaaagttgtgtttattttaatatttttattaaaatgtaaaaaaaataagagaaagaaaatttttatatgtataaaattaaatttttagatttttttttccttttctgtatatatattacttataattattctaaaaacaaaagaggaaatataattttatcttcaaaacaaaataaataatgatacataaaaatattttgttatctaaattatgataactctatattaatattttatatttattttcctatagtttttgctctttttatattttctcaaactttaataaaattatcttagtaatttaatttttttggtcatatttggggttatgtgttttattttgttgataaaaattattattattttttgtctttttcctctatcttttttttgaaatctctcacatttattttgtttcttaaaaaataatctctcaaattcttactacatttgtttttttaaaatacttttctttaagtctttctacattttttttaccattttttctcctgtgttttttttaatgagttttttttttttatttatttttatgaatcagctgaattgtatttctccacaaacagtttatacaacctaatagcacctccaaagagacctgaaaatctatacatcaactcttttagtttgtattaattacagttgcttacaatcgatcaaactactcaataagtcattttttcggcattacacatgaaatctttgttttgataattgtcttacccgctgccctataagagtcggatatgcccttgtgttgttccaaagtttgtcattcctagtctttcaaattaggtacaccaaggctgctataacagctgagaaaatgtgcttcctgaacaaacttttctcgaacctttcgatccacctcatgatactctgtaatgaaacaaagctagcattccaaacaatgttgagagaaggaacattaaaaaaatagatgagaagttgtctcttcatgagcattacacaaaagacaagtcgaaccatctattattttgaacttgaaattaaagtctttctcttgttttgagtctatttaaagtagttatccataacataaaactatgtttaggaatattcaatttgcaccagatcactttactctaataaacatgatctcggccatcattaatcattttgtatctatccaagattgtgtaatgagtaagagaaaactgacttgggttcatgagaagcttaattctctctttacattccacaattttttaatgaattttacttgtttatattttttatttatttaatagtaaatatataatagtgtaaatatttatccgagtatatatacatattatattaatttttttgtgttgtaatttttttttttt

SEQ ID NO: 302883 - DNA, 5152 bp, Cannabis indica
ttttttttataaaaaatagtgttttatgcaattatccctgaaattaaatatttaatcgagaatattgataataagcattaaattattattgttgttgttgttgttgttaatgagtactcattgttagagagtctcacattgctaatgcgtggaaagataatatataagaggaatggactactcctctcattgacaattgattttgagatgaatctcaaaattctaacactcattgaataagatattttaacatctaaatctagtggtaaaaatcattaattaaaaaataattaagagatgattgtaaaatcaaccgagtataattgaatacaatagaaacttagattaaaacacaaaaagtatcacataattgtacaagcatgaggattatcatcactaaagagtgaagcaatagcctcgtcggaggctacagctacggaataaacagatggagtatggaaaaaagtgtggacaccattggtggtgccatttttgtaagcatcatgatagtaatggttgacaatgtgagttggatatttgtaaaacgatgagaaatgagagtatcctggaaatggccatggctctgctgcttttccagttcgttttatggccttaagtacttttttctcttccaatccataacctctcactgttattttttgtgtctccatttccacttccacctcttccgcaccttaattataaaaatgaatgattagagatcttattaaatgtaactaattaaaaaaagagaaatgctaaaagatacaagtggtaccaagcaccttcctacatgtcaatatcgctattggtctaatttagtatcaaattttaatataataatttttaaggagtatcgctagccaatcgtaaagcaatatgtcataagggtgctagacaccactggtgccaatgcacttaaaaaaaaatatatgaagtataagattgcaacaaaagaagcttattggttttgattatttttcccacgtgtctttgaattgttaggttaatgtagaagttggtgttacttgttttttataccttttatttttcttacttgatttatcttttgaaaaggcataccaaacaaagctgttttgtttgtcgtaaagtcaacggaaaaaggattaatgacaatttcaatcctgaaatgcctaattcttagtgggattgtgagtggtaatgaacccaaagcaaacgccaacaaatttaatgttcctaatttcatatacttatcatgtattgatgtgtgtctaaactataaagaaagattggggttgctttacaaaaaaaaaaaaaataaataaaacagaaagattggggggtttccaaaaaaataaaaagattgggaaagagaaataaaattagaatcaaaggtaacgtctatattttatttttagaaaaaaaaataacaataaagaagaagagttacaatgttgctttagggaaactaattagttatttttacaaaaatattaaatttttagtcaaactttacaattttactactacataaattttttttacaaaagtactgtttttttataaaataacttaaaacaaccgtaaaacaataaaacataacaattaaaaacaacagtagaacaactaaaaaacaaccgtaaaataacggtgaaaacttaatacagtacacagtataaaacttacacaaaaatacagtatttttgaaaaaaattccgtcccataataaaaaaaaagttgaaatttcagtatgtggtgtaaaaatccctattgcacaataaaccggtcttcaatccatttttaccaactcaagccctggtaaattgggttagattttatgtacactaaaactaagtagggagcggaacatgtcacagttttagaaatgggcgtagccgagcctagtaaaggttcatgctaaaaaaaaaattgaaactcaatatacacaaatttatataaatattaatgatgaggattcaggaaactttgaaatataacaaacatcaaataatttagcttcttcttttcaaataaataaataaaaataatttaacttctactttagcaacaaaacaaattaagagcatctgcaaatttgaggatggagtgaattttctctctaatgcagtactagccaagcccattacgagtttactgtaagctgctactgagcactgtgtagttatataataagaagtattattttttttaaaaaaatattacaatttaaatttaaatgaccacacttatctatcttattatttatcttatattaaatgtaatataatattttttttaatattacatttcaaatttaaattcattccacatatttaaaaaatatttttttatttttattttttacccaatctacatatataaaaaaatatttttcaacatattaagaagctctaagttgaatcaagaggaaaggttggcatcatgccatagtggagtccgattgccttaaacttgtcaatgatattaagaatgctaagtctttagtttctccttatgattaagtgctaaaagattgtgttagtttgttaacctctttaatttcagttgaatgttgttttgttaaacgatctgctaataggtttgcgcatgcttttgcgagagcttcttttttggaggctgatcgtgttcttagtggggtttctttaccttcttgttattcttccttagttttggaagatttgttttgaataaagctttgattttcaaaaaaaaaaaaattatttttctattgttgtttctttttaaataaaaaatagaaaaattaattatgtttcttgaaattattgttgtaacgtcttacctttaatagttatcaaaagaaaatatctttatattattatttaagaaaataaaaaaagatgtatgatatttctaaaaataatgaaaaatactataaaattaaaaagtattacgttaaactaaaattataattaataaaaaaaaataatcttattatgttttaattttataagtatcacttaaaatattttttaataaaaaaataacgttgtttattgaataatatcaaaaataaaataaaattatacaactaaaaatatatataaagaaaatagaaattaaaaatttaacaaagcatacgtgcatgtgcattgcataaaatattaacctagtttaagatttaaaaattagtttatgttgtatgagataaatcatataataacaaaaacatattatttttggtataattttttgtgttgtgattagaatttaatcaaaaatatgacaatatatttggtattagtacaacaccttatatttgatgttatggtttgagatggcctcagtaataagtaaacatttatggttgatataaggtatttgtgtccatttggtacttttttcttccttctatctcatattgcaactattaatttttttttttaatttattctttaagatatttctcaaatctcatgcttttttctatttttatattatatatacataagtttgtttatatttttctacattatttaaataatataattatcatacacagataataaagtattttacactttataagatttttatattatactacatattattttttttttatattttctatattatttaataatatatttataatatataaataataaaatattacatacaaaattacatttattaatttttacactaataagtaaacaaaaaagatatcttaaaacaataagaaattataactaaacagtgaaacttaaattctgatatatttagttatgcactataatcatctttgtacctattttaattacttattttgagtgttctaaattagctaaacagcattgcatgttagaaataagttgacatttttcatgttagaaatagaggagacagaagatacttaacatttaataatcttaggacaacacacacaaaaggaaaaagtgaagaaaagtaatggtaaatattgtcattaaacattacaacaaaaagcttacctttgacctttaaaatagctttcttaagctttgaagcacagccttcacagtccaagtttggaactcttacttccaccatctgaaaacattcacattctcaagaatctcacttctatgtaacagtggttactgagagaaaaacaaaacaaatgctgtacaagtaaaataatatactaagaacaacacacacttactgcagacattgttaattttttcccaagagaagaaggtttattagctgtttattagcactataacattatgtcaagggattattgaagaccttgtatagatagatatatagagagagtgagagtcatgatgagctaaaacagaggagcctttggattttgaaaagagagactaaagaaagcatgagaagtagatctcacgcgtggaataaaaaggtgtgactttgttaacccaaacaccaaagctgttgctgatttgataactactttaatttcaatttttctactgctcaaacgacacgctcttcccttgaatgattatcaaaatagtgttcagtgctcacccatacgacataattaattaaaccccattttataatacgacatgtagggtcgattactaataattttgtgacatttttagtacagctaatcttggttcttcaagctttgtcgaccacttatgtcaactgtcttttgatagatgtaaagtaaatcagttttaaggcactttagcccatttttcgagctgtttttgtttcccctgtaatgtctgcaaaatgtgcagaaaagaagctcttcacgcttttttagcactatgaaaaagcttttaaaaaggctgaaccctactttactgaatatgctctgctaaaataaaagaacagttgttagaccacagaaatgttgttggctgtgtcattaggacaagctatagtcaattagtcagaactgtggggttactatgaaatgtaaaagcttctttttcgtttcctatgatttgtcaatataattatcgagatgcggtttacacaatttcagtaaacatcatcttattaagtaaaaataaataataaataaataaacaccatcttaatgatgtcatatgtttggcatagggaaatttgataaaatatatacatccattaagtttatttttttttattttttttttttcccactaaagctagcttagtggtgagggag

SEQ ID NO: 302884 - DNA, 4486 bp, Cannabis indica
ttctcatgtagaggttgaattggcatttaaaatatctggtggaatcttgatttgtcatctctgttggtatttggagagaaagatagacttaattttgattgattgatgagctgtccagaagctttgcaatagaagtccagagaacgttttagtgaaataccagaggagcgctattagctttgcaaagaatgaggctgtcatccgcaaagaacaggtgtgtgatggatggtgcattccttgtgattcaaagtccttgaaaattactaagaatttcttcatatggtagcacccaagataaggcctctaaacaaatgataaagaggtaagacaataacgggtcaccttatcgaattcctctctctggaataaggtttccttgaattttaccattaaccaaaaaagaataagatatagagttgatgcatcttacaatcagatccacaataatgggggagaaaccatagcaagcatcattttttcaagaaaaattcattccacacgattaaatgcttttgtcatggtttcattgctgcataacccactcgacctcgtcttcgattttttaaggagtgtagaagctcaaatgcaaccaaaacattatcagttataagtctctgtggaagaaaagcactctgagtgtttgatatgacacgggaaagtactagtttcagccgtagagcaaatgttttttatattaatttgtataggactgtacagaggctgattggtctatattgtgagatcagagttagctttttgacttttggaatgagtgtgatcaaagttttgttaagtgatgttgggtcagctccatggttcagaacattaaggactgagttggtgaccatttctctaacaatgtgccaatattagtaataaaacatgacataaaatccatcaattcctgggctactgttggtcttcattgattatagagtcccatatacttctgcaaaagtgaaagttctggtaagagcttggttatttttgtctgtgttgacagtaggtactgtatgaagaacatgtgcaatggcattcggatccgctccttccgttgtgtaaatatcaagataatgttgctggattattcttgaaattttagccttagaagaatgtattataccagtagcatcagtcaaacttttgattttattattgttcttccgtgtattggcacgttgatgaaagtatttagtgttggagtcaacggcttgtaaccaatcaatgcggattctctgttgccaatattcttcttcttgtgcaagtaaattgtccaagatattctcagattggtgaagctcagagaaatgggatggagatgtatcataggagtcttgcaagttctgaaccacggaatgagaagatttgatttgtctaggcagatctccaaacttctgatggtgccaggattgaagctctgaagaggtggctgcaatattctgcagtagggtgttggttgtaagatcagtcgcttgtttccaacagttagaaataatagcttcacactcaggttatcttagccataatttctcaaagtggaatcgagatttgaatcttggtggtgcttcctggttgttgagcacaacagagacaagcaaagctctatggtcggagctataaaagtctaaatgcttcaaagttggcagctgaatttgagttgtccatggtatatttgagaaaacataatcaaggcactgcttgacattagcattggattgagtattgttatgccaagtgaaagtttctccaataaaggaaagtggcgagagtccacaatagtcaagaacatcacgaaaatcttcgatttgtttggttggtcgtggggggcctccaaatttatcatcagcagaaatgatctcattaaagtcacccataattaaccatggaagaagtggggcagagtcatgaagtcttttgagaagtgtccaagatagatgccttgaagatgtaatgggattgccataaaaaccagagaagtgccattgcgaaccattattacacgacatataacagtcaacaaagtttattgcataattgagaatggttacattgatgtgagatttccataaaaacattaaaccaccccctaggcctgccctaggaacttctatcccattaggaaaatgtaaaacattatgaaatttaaagagggaaccagcttttaatttggtttctataagatattacatcaggacaattttgtttaacgagcagttttagctgacgaaaagcacgaggactgcttggcagcctgcaccaaatgtgcatccttggtgtcatccttcaatgagagatcagagaactcaaaggtcagattcactgttggttgctgcagagtgttggtggtatcagcaagaggtgaacttcgtgtgcgacatctttttagtacttgtctgacatttccactagaagaaatcagctgtctttcagagaaaacagatgccattcgattctcattagcagtagtatgaatgagattagggagtatagtcgaatttgtctcaatagcagcaacattgcttgaagtatttggcttaacaataatgatgtttgagtctacaacggttgctgatattttggggcaattggtgtttgttgtattttcaagatgcatgcaggccggtggagtgttgattgagagtggcactgattttgcagtggataaaccagtggttaaagggacatttgaagatgctactatagatttagtgatgggtgtattatcagtagcatttgtaggagtcatgttgacattgttttgcgagccatcaatggcaagacatatactcgatgaggcaccaagtgtgtggtgagtagtctcggaaccagcagacattattttctcaagaggaaaattcagatgtctgttaatgatatcattttgtggcaggacaacaggcggagaaatcataacagtttttccttttcctttaggggagagatgttgagtaagtgctgatggttgtattgggtgagatgtggagggtgcgacagtgaggttcttatcttgtggtggcaaaacagtaggggtagaagtgttgtgattggaaatcataacagatttacctttttcttaaggagtgagttgttgaggaagggctggtggttgtcttgggtgtgatattatgggtgcaatagtgtttctatccagtcgagtaataaaaggccaaggtcccgatttggagaaatcttgaccatatcggtcatatgcattccttgggagagcacccccccccccccccctccaaccaaggtccataaggctaatccggatcaagaccattgccaactttctctaataattgaggacatttgtcaaagacatggcctataatgccataatcatagcagaaatcaggtagacgtttgtaacgaaaatctagccataattcatcatccaaccaaggaagagttattaattggcctcaaaaagaggcttaaagacatcaatttccactctgattcttaagaagtggcccgaaccctcattcaaggaatcctcaaggactttaacaaaagtaccaatgaggttaccaataaccttagcaaggccttcagatttacttagaaatggtaaacgaaatacttgaacccagaagggagtaattattaccgattctattatggcattctccagagcacttggaagacataagatcatatgaagattgtggaagtgccatggttcttcataaagaactcttctcaaattgccctcacaactgaatgtaatccttagagattcacattcataatcagatatatccactgcaaatctaccctgccaatgtttggcgatgaagatcttgagttgcttcgggttataatcctttttggagaaaattttgcagaaaagcctatgaagtgcaggccttggagttggagcaacaacatttgaaatattaaagacttctctttcttgtgtagtaagagcactgagaatatctgggtgaaaggattccataacagaatcaaagaggatgaatcttagagcagttgcagtcaaaataaggagaagtaggggaagaagaaggagtggtaggagcagtttatggatcaaaggttttaaaaaagacaaagcaagggaagaagaaggagtggcgggagcagtttattgatcaaagtttttaaaaataggaaaggaaaacagttaaaaagaaagaaatgatatcatctgccacagagcaaatttttgcgcagacaagctctcatcgagataattctagaatatcgacagcttcaccattactgaccacagttgaaattgttagaaattttataaataatacgaagcatatattatcatgtatgacgtgcagaattaaatcaaaacatatatgtactataaacaaaggatcgatatatttttagtcattgattcttttaactttagtcctacataaaacgttggatctataaaaatgaaaaaaaaaaaaaaaaaaaaccctagaactaagtagtaggtaatcaggcttccaagttctct

SEQ ID NO: 302885 - DNA, 4212 bp, Cannabis indica
ggacggcggtgtgcagagcaaaatggagtcagggtttaggtagtttagccgccaatattttaatttttgtggttgtgttacaaaccgtaaagttcaagtagtttagccgctaatattctaaaatatattacatatgtaatgaagtatcactcataattttgttagaatctcatattttttcaaattgaattttctttatctttataatgaagttattattattattttaaaaaaaaaacatattacacactaaaattactaagaacaaaaccatctagcattgattaatcaaatcaatcaagcaagaacaacactagtacagtagcaatggtgtgtataggaataatcaatcataagagacatattactagtaaagtaaaaacatgtacaaatcacatgacaatcacttcaattggtttcataatgttaaaaaatgtttaaatgaatataatttttgtcccctaaattaagacattttaaaaattttgtctcaaattattttgtttttttgaaaaaatttctctcaaaacatataactacgaaatgcaaccatgagaggaaatttgcaataatttctatagttcgagaagaattttttcacttgctgtggaagactccaattcaattgctccagcaaatttgaatacttcatttcatgcagctcatctcatgattttcgagttttgacttgaaatccaacaccaacacgaacacgagcaaccggcaagcttattttcttcgattgaagctgtactataaatcggccttatgtgtctgcaagtctcttgatacagatcaacataagaaggtgtcaattcatatttctatcttggcaacaaaaaaactaagaataatttcactacaaaaatattattagaaacctctacatatcattaattaaagcaattcaagtaacattgtcactaaaaatatctctatgattgagtacttgagttttcgaaatagtataaaaaagaaaagcattactattactattaggcaccataatatttagcgccactttgaaatgatgctctataaatggttagtgattttctataattatttattaaagtaaaataagtaagactgatattgaattatacactggtagcaatatgacacctcacaagggtgcccttaacatttggcaaaaaaaaaaaatgtttcaaatcattgctatttgactctgacctgtatcacaacgtgttatgagcgtaaaatagggtggacctcaagaaatatgaacagatcggtaaacttgaaccttgttcctaaaggacctgatcaattcgatcagacactcgccatttatttgactacacacaacatactatggtgtgtaagccaaaagctctttgacaacacaagaaaaaaaaaatcattgttcaactttttgacaacatgaaaaaatcaaaagctcgccctaattgactacaaacaacatactatggcgtataagcctaatctaaattcaatttattatgagtttcccatgaaattttttcaatcatctttagctaattatgctaaaatcaatacagcaatatcaaataaaatttgatcttgatgtcaagaccaataaaactttaatctctatatgcatccacattgtttaataaagattcaaacttgtattattatcaaagaaaacccaaaaaaaaactatagtaagaagaaaacaagacttacaaataaagttcatattaagggaagtttaggaatttggccttttcttaggagagaaagagtgtgctcagctacatcaatgaggtcagcaatattgtggaccgatcgctcttcagaagccactaagaagatggaccgagcctccgccttctttgacagtcgtgcagcccaagtaagtggtagctcgggcgagttgaggctccttaaaatttgacgatacagagacagaacatgtcccttatttcgagccaaatcatctgctgtcgcccatatcagacctttcgccattgttctctcaagtctaaatcaaccaaagctaatcatcatcaaaccaaagaagaaaaaatcaatcagattgccataaaagagaaacagtgtataatatatgctacaacatactttagttgattgatcttatcaatatatgatatctaatatctcgaattcaagacaaaagcaacaacatggtctactatggtaactaaatacttgtgtttcaactcaaagaattcaatcaaagactatgttagaatgctttcttgtttggtttctaatctattttctgcttatttatcttatgcttagtgttgagttagataggattggatttttagtaatctcacaaaaagaataatatttaagcataaaagaaagggtaaatattatttgaacttgtattttgtaaaaattattaattgaactatgtgttttgttaaataataaattaggccctgtagtttctaaatattaccctgtaaaacttaataataattagatataaaggtgttatgacaaaactagttatgttttctacaattgttcctgttagaaattgtcttcaagttagttatattaaaaagagattatcgaaaattgagctcaagattctatttgtactattttagaaaatacatggtccgtccaagtataaaccctaaaagagaagaatagtcttaaaaccaaaactgcagcttagtttattgagacaaaattaaagaaacaaagctaaaagaaaaaacataatttagttgatcttatcaatatatgaaatataacaactcaaattgaagacaaaatcaacaacatggcttaggactaccagtgtttcaagtttcaaatctagttgatctaatcaatatatgatatctaatatctcatctcaaattcaagacataaatggtacataatatagtgtttcatttcaactcaatgaaacaacataaaacataataaggctcaaccaaatgaaaacaatcctcagttctttcaacctacaaaatacaaaaccagttattgctgaaactaaactaataacaccaaagctactaaattttcttccttaatccttattagttcaaattcaaaagagcagctagtgataatagtgaaaaaagactaaatctttcaatcaaaatcaacaactaagttcataacttcagatatacaaacacaattacataaatatatataaatatatatatatatatatatatatattatatataaatacctgctggtcttccaatagccgtggagctaactgctaagggcaaagaaagaaatggaaatgagaggaaaattgagtgattatgatattgccctaaaattagtgggctgggctttgcacatacaatattttgataaaattgaaaactttatatgaaaagatgatctttttgaacaaaaaaaggaagaaaattgagaatggggttttgatgagaatgggtaaaagttaaagactttgtataaaaaattgatcttttcaactaaaaataagaaaattgagaatggggttttgatgagaatttaaaactttatataaaaatttgattttttcaactaataagaataaaattgagaatgggtttttgatgagaatggataaaagtgaaaaactttgtataaaaatttgatcttttcaactaaataaagaaaattaagaatggggttttgatgagactatcttgtgggtggcgactaaggagtctatcgggtggcgactaaggaacttcagtttgctgactctcttattggggaagcggcgacttgtttattagctttggagacggcagtctcaagacatcatccttttgttatagtggagaacgattctgagaatgtaatcaacaacctaaaaggtggtgacaccttgtgggggattgagaagtatactagacaatgtaaaattctctctgcttttatgtcttgctcaaatcttttatcactagaaactgtaattttgtggctcataatgtggctaaatgggcatttgccaacaacattaacggtatggtagaaatatctactatcccgaatgctatcctttgtaacgaccatgatatctaactctttcttttatatataaacgcttttattcaacaaaaaaaaatgcgaatgtatataaaaaaaaagggatattggcggctaaaccacctgaactttacggtttgtaacacttaaccaccaaaactgaatttttggcggctaaactacctaaactcccattccgttttgctctgcaca

SEQ ID NO: 302886 - DNA, 1331 bp, Cannabis indica
atacactgaacttatattgctcttggtctggacagcgcattaacgttaacaagtcaaagatttttctgtcaaagaactgtgagtcgaaccttggtattgccctctcggatttcctgggatttgatatcatggaaggtgacgaattttttctgggtaacccgctgtttgttagtggtaatcgtgcgaaggatttccattttatcattgacaaagtgaggaaccgcatggaagggtggagggccaagttactctctcaaatggctagaactgtccttatcaaaaatgtaatctcggctattcctatttactctatgtcgattttcctactgcccaaatcgattacagatgctcttgatgcccttgtaagacttttctggtggacaggtagttcgaaaggggggagattcttagccctgctaagttgggataacatatgcagaccctcatgctgaggaggccttggaatccgtaagttcaatgatatcaacttctgtttgattgccaagttgggttggcaacttgctaagaatgggaactcgttatggtgccaaattatgctggggaaatatggtcaccagggaagtttttggggcaggaatcttcctagaattgcttttggagtggctcgtggaatttggaaaacaaaagactttatcaaagataacagtatttggattattggaggaaattcgagggtgaaactgtggcaagggtcttggtcttgtgctgatggggtctgtattaacccgtgtgatctcaatcctggcgtagtaaatgatattacagtagggaacttaatttctgatggcgagccatcctggaacatcagcttaattgaaaggctgtgtcagcccgaagcctccaacaaaattttgtcttcctatatctctattctgcctgacagggactcgttgatgtggaaatcctctccttctggggaattcattcttaagaatgcttactgggacctccattttgatgacttctctcttgacaaggattgtaggctcctatggaagcttcccattcatgataactcttcatttggaaatgcctcaaagggtgtctcccgtttagctctcggctgggaatcatttttgggaatatcactggtaaatgtgtcctgtgtaatgtagagggttctgattttgctgcccattttctgtctcaatgcccaattacccaaggcctttggcttgctagtaaatggaagttgaagatcgaaagtatccctttgcactctggtgcagaggtggttaattggttatcttgctatgcatcgttgtgtactgggggtgtaacgccctgaataaataggcacgctacccaaa

SEQ ID NO: 302887 - DNA, 5645 bp, Cannabis indica
aattaagttttggaatatgcacctcccattcccaatgccttaaattattaaatttgaagatatatccacaaatctgactcagcatgttatcatcccttgtggcttatttgaatactttttaaattgtgtttgtacgttagatttatatattatatataaaaattacatatatacatgcattaatcttgaaagtgtttggtagattattataacacacaacattaagcatacattttataatttgtccaaaacaaaaaattaaaaaaaaaaaaaaatctttcttttctctctctttctttctcctcgaacgaaaaaaccagaccacttctacggctctaccattcttcttcgattcgattcccttcttcttcttcttcttcttcgattcgattcccacttgctgatctactaccagttggtgctctacattcattgatttactattaacacaattacaaggtacatatttcttctaggtctatatttactctccttttcactattttttttttatttatttgtttatttctgagtttgttgatctaagtaaatctattagataggtttgagtttgctctgagtttgttgaatttgaataatttctctaatttttagaagttggaacaatttagatttaccatggtctagcaagagaaagcttgtctagaagctattatgcctaggttcgttgctgttaatatttatgttatgtggcttttgaagcttgtagccttaatgccttttctttcattttcactgaattatattttcattccaacaaaaaaaaaaaccaataaaatttgatgatagtgacgagtaatgtgaggttgaaaaaaatgcccatccatgtggtctttcaggagcccctatataataattttctatcacaaaacatagtatcatttagaacatgatgatgacatataatatgtatatgaaagggaatcgaagaagaagagattttctttgggcgtatgaacttattaaagtccatcatataaatataacatgtatttagagatacagaatgccattatatatacatgattttattcttcaagctgctattcatatttagactaagggaagactacatgctatatatcccatttgtataccttttttttgtggtatatattgtgaatcagtcatgtttagttattgtatttatgtatttgttttgtgcatataaactgtttgatttagttataggtttagatagtggctgctgagaggattgatgacacgagtgatgaatatcaaaatcaggaatagccttaggcagacaagtgtatcccaacctgaaacttcactcactgttcgtccctgaagtgaagtggtgggataaaaaaattgcccttcaatgggggtgatagcatttatacccctttttggtagaagagtagcccaaaaaaacacacttaagagcacgtgggtcaaattttgagccatttggacctaaaacaagcacataaataagatacacaaccaaatgtcttatagggaatattagaaataagatgtgtacgaggatgagttttaacactcgagaaagcgtatgatttatgaggtaaacagtggtgagaatggcttctcccaaaaataattttggcataggagcagtaaacatgagtgttctagcaatttccaatagatgtctatttgttcatttggtaatcccgttatgtttgggtgtgctgggacaagaacttgtatgaagaataatcattatctgtatgaaagactttcaggtttgcattaaattgatttgtaatcatacgatcaaagttagtattattttttttaaggaaaaatgcagaaaggacgggagagagaaagttagggcttgttaccaaagaggtcacaccagatcactgatccaccacttaatattagttttgtaacctatacataagcaattttttaataagcgattaatttagatcagtacacaagattgcaattcgatttaatttatgcataacatttataattaaatcatttaatttctgctaataaattttgtagagagagatgtcatacttgcttccacatttacactctggatgggctgtagatcagtccattctcgccgaggaagagcgccttgtcatcatccgatttggccacgactgggatgagacctgtatgcaggtattttgaatttatcctaattccccaatcctaaattccaattctctttattttatttttcttgatctactaattgtcttttttggggggggattttaatttctgtttaacttttgtattcctttagcttaatgagattgttaattcagatagttgtttcatccagatcctagtaaagggtttttcccattctttgtagaaatttcttaattttgaaactgcttgcgttgttatttttgcacaacttgctgagggtttttggtctctttataataccaatccacaatataccagaatcaacagttagagttcttggtctatttataatacttctccactatataccagaatcaacagtctttcttttagtgttcttattgtatgttctgttttattgggttttcttttttttccttttttttggcatttacatccatcatgtcgaagttcaaatgtgtacagcagagagaagagaagatatgagaacttaggttgaaagtaatgtgtaattttatatgttgttggttcttcactttgctcacataattttctcaaattactaattgttttaaaaactctgctatgtttctattgtgggtctcgtatttgatatgattggtctatgtctatatgatatgtgtattgggatttaattctcataatttcatgtggatatcagttgtagcttctttcatggagtctttttgcaatgtacaatttgtttgtggacgtatttctttatttagtttttgaatgtattgttttgttgctgaacagatggatgaagttttggcatcagttgctgagacaataaaaaactttgctgtgatataccttgtggacattactgaggttccagatttcaacaccatgtacgagttgtatgacccgtctacggtcatgtttttcttcaggaacaagcacattatgatcgatctcggaactggaaacaataataagatcaactgggcccttaaggacaagcaagagttcattgacattgtcgagactgtgtaccgcggagctaggaaaggacggggtcttgtgattgctcccaaggattactctaccaagtatcgctactaagctcttatgcaaatctatatatatttgttagaattcactgtaacttgtttctctaagaatctgtcgaatttctcaaagctttatttctcccaaaagtcaaagttcttatgttaactatttggacgctaagtgcgatgtccagaagaatgaaatacaatgttacaacttgattgaatggtgtgttagtacatattcttatcttctaatggtttaaattatatgaatttcaattgaatttggtttttgagcacagttatcactaggactgaaaattttggctgggattgactcggacttggccaacctgcgcagaccgattcgaccaacccggtcaattgagaaaacccattccctagtggcgggtcgggtctaagccggtcaattctttcgggtgggtttgggtctaatttttgctgtgaacccatttgactacttattattttgtgtataagattttagtaaaaattatatgtatatgtaatgtgtaataatgaaagtaaaaattaaaatataagtatgatttttttatatattttataaaaataaaaggttatgtatgtgtatactatactagagtataattattatttatatttataaatacttatgccttatatcatatcgatatggataatattggatatattattatcatatgtaaggatagactatagtgaacaataactagtacggaatgtatggatgggatatggtggacaataattagtacgaaatgtatgaatggactatacagtatggattttgaatttttagtcataatttattttgacacttttagtttttattatcatgttcaccattcatgattttcgtaaacaataagcatcaatttgatgaattatttgtttggtttaggattattggatttaagtttctactttggattgaaaatattattttatttttctaaagaatttgggtgattgaaaaaacaaaaagttgaccgagttgacctgaccaatccagtcaacccaaacccacggacccgcgaacctgaaaccatttcacgggtcgggtccgaatacaattttttgaactcaaaacacgcgaagctgatcaatctgcataatgttcagtcctaattataacacctcactaagtcgtctcgtggtttaatcaattttattctattttaaatgttctgcacatcaatgattagtaataaatagattattgtgaaaattggtgtgtgcaaataaatatagtcaaattataataagtaaagagtatcgttttcataggaattgtaatttgtaagttaaactttaacgcaacaactaaaaactaaacaatttgcaagaaaatcaaattaaattgattgatgtttttaactatccctacttgagaatgtgtataaacgctcaaaagtaattgcaaaataaaaaataacttcttttttcagccactcaacttgagacctttgatgccaataagtttctttttgttctaatagcttctcgagaatagcttttgaagattgaagttgttaaaagcgttgtggagattcgtcattagagttgttaaacattgtcacttgttattgagcattattatttttcgcttgaagctgccatatttatagaagcgtcactgttgtaaatcaagcgcacaagagccaattttgtatagggtaattagaaaaatacggttgtcggctttgcgtaataatgtgcatacttttagaatctttcagccatagtttctcaaattttaactgaaatctttgagtagttctttgttgaacatgtagcagcgggagcactaacagcgagggcatgatgatcatagttgaaaaaaaaatctattaagtgttgcttgttgaaaggttgaattccaatgattattgaggaagcactattttaaatttgtagcataaatacttaagtttaactccaagttgtaaataaatacttaagtttaatttttagcggtaataatacttaagttataattctcgaacttttgtagttacctgactgttaagtgttaagtaaattgccacgtgacaattctttatagttcaagtcattaaatatttatttttttaaaaaaaattaatttaactataccaatgaaaaaataaggataatgacttaatatttaaccgttaagtgcttaccgggttcaaaaaatataatttaagtattagtattgccaaaaattaaacttaagtatttatttgcaattaaacttagttatttacgtcgtaaattactaataattattatattacaatcaaacagtataattaaatttacgtattatcctacataaccaaatacagtttatacattttctacaaggaagaggtttcaatggttacatttttattgtaaccatcatggttacatttttttaagccattggattactattaaatggtt

SEQ ID NO: 302888 - DNA, 2424 bp, Cannabis indica
ttatttttattttctattcttatttgttttctctccactttttgtctctctccttctttttcttcatggggcacatatccaactcatctatggctatggcaaacccaacaattgagaggcccaaaaacaagctgttcactgcccatcccaatctcctcaattaactgccttttttattgttattattttcaatccctatgctcatcatttctctctttctccccctttcaccatcattgatcgaaaatggaggttggctcgtcgggcttcaaaaatgtctagatcgaaatcgtggaattttttttttaatttttcctgtactaaatgaagtattttcacgataacaatcattgagaataagatattagagttttgttgattaatttttggcacaattagttaaagtttcgataacctacatttttatacaacttttttttttttttttaaatttttcaatttgagcaatatttaaaaataaagttgaacaagaaattcagaaaactgaaaaaatcgtttagacctatctaccgaacaccgctaaaattgaaaccattaaaacaaaaaatcgaaaaaaccactaatagtgcaaaccatccttgaacgatcgatttaattttagtgccgcaccaaccgaaaataccaaaaccgaccgattaaacacttaagattatatatatactttcttttttaaaaaaaatcatatataatgtttattaagtttatatatatatatatactagaaaaaaaattacgtgcgcgaggcacgtatacttagttttatgttaggtgttaactatttcatttaaaagtaatacaataaataattgaagaaaaattattattagttattgtttgagattatttttagaggtacatttatattgagtagtcaacctctgattaaatgaaatgaacgatgcaaagatgtatactaaataatgcccaaaaacaatgttaaagtgcttcctttatcacattcacacaagtagtttcactttctttgttgactttgttaataatatatctatacatatttagaacaataactatttagattttccaagacaaaatgagttctccaaagctcattttcttcttcttcatcatcatcatcatcattattagctaataataatataattgaagaaaaattattattagttattgtttgagattaaatgagttctccaaagctcattttcttcttcttcatcatcatcatcattattagttgtagcttctcttcaatttttgctcaacaaccatatgtgagagaagacacaaccgaatgtgacaaaaaggataactcaaactcttctcttggctacttctgcaatggtctaaacagaacatgtcaagctttcattactttcagaggtgtgcctccttacacaaccttggcagcaatctcaaatcttttggctgcagacccttctcagatttctgcaataaactccaataagacaacctttgatacgaacaaattagtcataatttcagtaacctgttcctgttatggcggctactaccaatcatacaccaattggcccaacaatagcaataatagtagttattgaaactattctcttttccggctccacaatatatatgaattgctaatagattgttgttgagcatagtttttcctttatagaaaaataaaagtgattacctaaatcaagtggccaagtcgatattagcctcattcgaaaccgtcatgttcttatgaaatagacgatcctcccatagcaacttcttcgcctccttcaacaatttcaaacccaaccattaaaaattcctttgaaaacaacaataagaaaagaaaaaaaaaatggagaccaccaaaatcaataaatacaaaaaattgcaaagtaacccatatcaaaataaaaacaatagcatacctagttctggtcaaaatttgttcttacacaatgctagagttcaaattgtattcgatgaaattaaataactaaagtaaaagagaacaaacatattagtgaaatttaagaatataatagaaatacaaaaaaaaaaacaatctcatattctcgaataaaaaaaaaaccctaggtaaatatataatgttaaatatataataagattcatttcatttaatacataatatataattatacatatatagagagaagaattgttactgtaatttactgtcgcaatgagagagagaggttttagttcttacccagaaaattgaacacctccgttcgtaattgtcatcactctcaaaagcttgctcaactcttcatcgtttctcacagccaattgaatgtggatcgcaatgattttgatcttcttgaatgaggacgcacggtagggaagggcttgaatgattttgcaataactctgaattcgtatttcagaatctgtaattaagaaaataatttttatttaaaaaaa

SEQ ID NO: 302889 - DNA, 3408 bp, Cannabis indica
caatcagcagccagtcacgtgtctatcttttagctaagctagcatatgattattgggccttcagttaagtctcgccacatattacagctaagtttaggtctatgagtctttgtttgcttgattggttccaaattatttattacagaaggaggaagaaagagaagaagaagaacaagcaagaattaaggaatctaagggtagtcaggaggatgtggctttgaaagagatgactattccaacagcaagagaagcccaagagcaagcgagagcaagatcatcagaaaagcaagaacagctgtgtgaactcagtcgtgcattagctgttttagcttctgcatctgtaagactagatactttaagctctcctctcctttctttttgataatttttttgttgtattaaatttttacttgtttcatgcagtcggtgagtagagaacgtgaagcgttccttgggcttgtaaataaggaggtacattgctttctttttatcttatagctgaacttttatataatagctgttgtgtgggcctcaggtttatgcatgctaacagctattaaggataatattgatttagcaaataaacgaacagtctgttttcagtcttgatctggtgattatgttgacatttagtagtaataacctgcttattactttgtgctttcagattgaactttataacagcatggtggagaagcagggaatggatggagaaaaggatgttctaaaggcatatatagctgcccgagaagaaagtgagcctgataaggaggtagctgaaggccatgaagcttcatcagcactaattgagagagtaagtaacttatttgtattattctgctgaaaagattctgttctctcagagtatcaacagttttgaccctgccttccttctttcaggttgatgcaatgcttcaaaatcttgaaaaagaaattgatgacgtggatgctaaaattggtgatcgttggcagctacttgacaggtgagtaattgtggttctcctttatttctaatcaaagatacttataatattgccaattcaaaataattacaattggattttacatgcttgggactcgaggcacgatgaaacttttgggattattgtttgaagagcttaaccacattgcttgtaccgagtaaattttttttgcatgtttgatgattgtattaactgagcaatagcttcatgacaatccctaactttcttgtcctgtacgcctttcatttattgcgtgcccacgaggtataaggaactaagattctttatattggattggaagaaactaagtcctaggctttgacttatgaatcctccacctatctactagaaaaacaaggttaaaagggctttgaagaatgccgaaggtgacaatgtacggtgaaaagggcaaaactgttaatttgatgaatcctaagggtgacacccacaaatgaactcttctcccagaaactttcatctcggggccttattgtaaaaaagagaaaaaaacacgtgaaatcctctccgcccaaagaacccaggaaatgccaaaacctaggatttcctcaacacctttccacaacaccctacctcttctactaccttctcctcaagcaggaaaatagcaggagagagtacagcaattaggaaattaaggcataaatagacttgttttttgcaacatgttaacattgatatgagatgttttattgggagaagttcacttccaaatactatgagaaggcttagtaaaaagaagataaaagggttataaactaaataatgaaagaaagataaatttcagaggatttctcatagatagttaaattcatatattatttgaatgtgcagggattttgagggaaagtgactcctgaggaaggcaggtgcggcaatgtacttgaagaatacattaggaaaggagggtgtccaggaacttataagcagtctttccaaggacagaggtcagtcatttttttcaatttgtcaatcatcattggttatgatataataaaggttttatactattatacaccatgtgattaggccattatccatttggatcctgtgccttaaaaaaataagctttggacttgtcttttgttggattgacttcttggatcttgttatattcaaaaatatatttttttttgactaaaattgggtccaaaggcttatttttaaccattctacaaaacatgggttcaaaagccagtttttaaaacatagggtccaaaggagtgatggtttgagacacattgtcccaaatgctataaaatcaaaataaacaagctagaaatcccataaatcaaccattgattaataacaacttaataatgcactaaatcctcttctgataatataatttctttgacaactttatattacccttttggaattgtgatggtgatagaaattaaagctatactataatgtgaaactacagaggggaagattcttgtagaagatattgtgaagttggggagtcggagtgaagattcgaacacagcctgatggagcaacaatgtagagtaagtagagaccgggtataaatttttgtcggcgcagagttttggttgacaagaccaaccacctttataagaatatttttttacttctgtaaaactcaatgctctcatagataagggaaaaagaaagcgcatgaacatgtttttgttactccctcctcgtccctcttttaacatttatgctttattttggcatgagagatttttggatggatggatggagagaattgttattccaagggagaatctctatatagatgatatgtacatatgcatacacatactactaaactcaatacttttattaagtatttattatttctttattgctatttatataaacaatttaaagaataaatatagatgtacgtttctataatttacaagtactagatatttgttctatattaactttctattttttccaggtagacaaaaatacatataataggatttgtggtaatatgtattttgtggtcgcacacgcggttttgttggaagagaacatgtagaattttttagagtataaattacaaataaatttctctaatgatatttggtattagggaacatggttttaacactaaatgccgttcaaaattgcatttgcagcctctgatttttcaagttcttacttcttgtttgttgatagacatttgtaggtgaaccactaccaaatgacctcataaagatatacctaatactcatatccaaatataattgaatatttgcatgacttggaaacaagaacacccactacggcacatacatatgttggccttttgcatgtgaatatgtatgatgcaataatgacttttaggtggaaacaatatgttaaaatattatgttgccacacgagaaaaaaaactacatcaagccatagtagttgttaagca

SEQ ID NO: 302890 - DNA, 2305 bp, Cannabis indica
cttatttggatgtgcaaccctttatacatagattatgataattaataacactctttgtcaacacttatttgacctcataagtgaaagaacctcgaaaattattgatggtagttaggggtagttatggttcaattgtgtgcattatattacttatttttgcattgagaattccaatgtatcataggcctatatatatatctatatatattataagaaaacaatgaacctttatgttactgattattggtcattatatgtcttttttaatctccagagatttgtttatttgagattcctttgctagatattaaaagaaaaatattggatcccaaagaaactaaacttgttgaacaagaacttcatcattaaacaaagcactaattttctcttattatttaatgaaaatattaaagaaaaggtaaatatttatttcttccaaccactgagactatggtgggggagaaaagtcatacattaggttgaataattgagccgtttatggtacaaatattattcatagtagaactagtaattaattgcctttgtagtgaaagtgggaggttgacttgtaataatactgcatttatttatttatagaattggactagatatgttcttcattttgttgtttttaataagccaaaaaaatttagaatggctgagaaaaatatcttacacaccaagaaaaataattgttacatgtttcttttttctttttttttgttacattacattccaaacccaatcattttaccttttttttttcaaaccaggctgaaaaggttttctttttattgactttaaaataagaatttttaattcacatggttagaatttcccaaacatgtgtgtcttagattttctgtatgagaagtggaaaaaggaaatgaagtgaaaaacaaagacacagaaaacagttctcttgattgctttcctatagtactcatgatttggatgattccaaagaaggaaaataatataggaatgaatggggtatggtaaatctttcttattattttaagaaacataagaagcatatgtagagtagactgatgaatttttgcacttgacaaattcaagatatgaataaaaggcttaaatataatcaaaactaaaagaaccaaatcttcaatttatataaaagtcctgtacacatgaacaaaaagatgagaagagagagatgaagggaaagagagggagagagaaagagacttattaaaccatgataggccaacaagcagttaaactatgatgataaatattatttgtaacctgaaattaattagagggtacttatgtatatatgagaaccccccaattagctgctaattaatacaatgatgtggttgttgatcttgagtatttcttggaagaagatgaattagaagatgaggatgatgatgatgatgacaaatcacctgatcttctcctaagcatctgtctcatcccatcggccactcgaacggcggggtttgatttgaacttacgacaaaaagacatgtgagctttcacagcttcttccataccaaaagaaagactactttttcctctgctaacctcatctcgaacagcttctgagcataacccacatagccattttccatcgaatttagacttcacatctgtgatatagtcttgggtacaatcttctttcaatccacagcactcacacttagccaactcaatatccattttgctcttcccttttgtaatttgatctctactagtctctgtttttttttattctgatataataaaagattcgatgatgtgaaagaaacaaacactgctcaacttaccaagtagtagtataagtagtagtactaatatattggatatattatatggctacttttttcctagttgaatttgattgcaatgatggttatgcaaagtgggttttcttttgtactactactactcatctcatctttctttttttctttcttttgtttcaacttcttgttatggtttttcttttctcacttggtgtatggttttgatggctaatttatgttgcttcaagaactaggaagtgcttagtgttgtcatgaaagagagagagagagagagaagaagaaggagaagaagtgaggcttccttgccttggaaggtttctttctaaaacaaatgaagttttccatttttttttattcatttccttccttaaataaataataggcagcagaaaaaaataaaagaagaaaagtcaaaaaaggttccattgaatttgctaatctacccctctcacataatttttttaaaaaaaaaccttaggggcattttggtaattttactaattccc

SEQ ID NO: 302891 - DNA, 4383 bp, Cannabis indica
aatcgtaccttttttgaaaaactttcttaagagttcacactgattctaagattatttcatggttaaatgcacttaattttggaaatctcaagtgataagtcaccaaaaataagaatgcacatcttttgtataaaaatgagtacccatcaatctatttaaattcttttaattatatagttttatacctatatactggcagactattaactgttacataacatatattaaaatgtaatatttattaacgaataacattactttttaatggttaagctaccttatcaataaaacttgcatgaattccttaaccatatagaagctcaacttatattgttatatattatatttaacactataaaaatttaagttaattatatcaattttaatagattttttttttaattttattattatatacaaaaaataaagtataccatccttattccttcaaaaaaaaataaaaaaaaaaaaaaaaaggaaaaaactcaccccttaacttaaaatctggttccggcactgtataatataacaatggtcccctttttttatgtgatatttgaatatatatttataaatatactttgaataattctatgcatgaacttgtaagttgtaatatataaaagtgggtcatgatcatgataaaaagtttgtggtttttaaacagtttacgaagcaatatattatcgttattgggtttgagattgaaaagaaagaacaacttatattttgtgtgtgtataataaattgataattaatgaaaaagaaaaaaagaaaatctaaaagacgacataataataataataataataataataataataataataataattggaggaggtgatgagtttggagtttggagtagtgattctatataatctggagttttgttttattgtcccgaccaatccttatgtatcacacttattcaaatctagctaatatatgttatgtttttttgttagtttcagtttggagtttcgacaccctattattgcaacctttaactgtgctttccttttgtcctattattattataactatataacaatatttgggcaaattttttttaacatgcaaatgttttttaacatttctaattgttacacatatatatcaattttaatcaaaaagagtaacgacaaagtattttattttacgattttgttgcagtcgtatctttttagttgtcaagtgtcaattaagttcgttaagtatcagcttaaaaacacatgacgacatatttctttaacttatttaatacatagtccaatgatatgtcgtcacgtgtttaacgatcaaaaaatggtaagattgcaacaaaatcgtaagataaaatacttttgctgcattttttttttattaaagtcatatatgtaacaattataaatattaaaagagttttaccatgtgctgattatatatacattaattatgattaaaaaaatgcactagttttaagctctaagtaaaaagagaaaagaaaataggtgcatactctgtaaccccctattttatttgtgtagtctcatacttacgttactttttggctacattttagaatgataattggctttataaataaatacaagttttttgtgcatgcttttttttttatttgtatgctttttcagaaaaatttcttagaaagttacctatcctaagattgtttcatgtcaaacaagcttaattttagaatttttaagtgatgtactgcctaaaagaatatgcatcttgtggatttaagtaatatctatcaattcattaagctttttttaactgtgtagtcccacatatacaatcataaaatcattacatttaattttacccaagtgtgatgtggggtggcacaacttacttaatcttttttcttacagatcacgggagtctgattatgttattgtactttatattatatttggtaatttacaaaaataaactttcaatatttttggtacttagacatgttatgttccttcgtttttttttttagatttagtgttaaaatatttttatagttggtacttggtagagctaatcttatgcattggtaagctagttatgtgtctagagttctactttttaggtgctcatttgaaaatttaaagaccttactatttaactattatatttaattacaatcacgagttttatatagctaaaatgtgaccagcatagtggtaatctcagagtataagcttttctcaaaaggcctgagttcaactctaacaggtgcataatagtattccacttcaagcttttattaggcatccaccacgaacttataacttttatacacggtactcttttcagtatgttttgtccttatttatacgcttagttttttcaagaggtcacccatcgtaagactattctaggtcaaacatacttaactttagaattctcaagtaatgggattgcacaacttacgcgatctttcttcttgcgaatcaactgttacatggagactagctacctagggaaacagagctggcaaagtgctaatagatgatcctcatctagtcaagaaagcttattgtccaacctaagtgtatattaagccaactaatcatcatggagtcgcaaaattaaaggtgcgattgacatgatgagttaaaattacctctaaaaatttagacaataaatatatatcatttgctaatagctactcacttcattagtataatcagtactgttattcaaaattaaagcgagtgaatccgaatgggttactttttttataaaaaatatttataaattaataaaagaatgtaagagttacggtcattacataagatattacctggtatggaagaaagctaaaccatgctagtaatatttttggcgaaattccacttagccacattatggactgcaaaattacaaattctaaaaatgaacgaaaaattacaacttaacaaaatattagaaagatgtctgtattaacatagatagttgtcaataccctaactcgaataaactttcctttagcgttttgataatcatctcaaagtcactctcaatcgtcacaaaaagatgtttcatctgaaaaggttgcttgaatataaaagcaacaacttttgcttgaaaaaccaagattctggaaaggtaagaccaatattagtaacataaaccaaccatatgggtttatattgtaaatatcattttataagaaataatttgacaaatgccatgttttatataattagacctccaccatatgggttaggcaaggtatatggtacattttcccgttgaatatttattcttttaaatttgttcgatcgttgatacttgtttattaagaccatcggagattaaaaattgtgttatgtttagcaaaaaaaaaaaaaaagttttgtggtaaattcatatagaattttagtattgtgttctaatacacaattaatctaatttatatatttttattaaaaaaataaaatttaataactttattatcaattttattattattttaatatataaaacaataaaaaataatataaatacttcataatttaatgctatagttaaatatattaataaaatagtacatatgacataaatataaataaaaaaatagtacatttattgtgacgtaaattttacatcatagtaaacattgtgtcaaatttggcacaaaatttactatgtgctaaatttacatcactttttgacatactattagaacacattttttgttaaataatttatattttaacttttcagtatttatttgcatctccattaaaaatgctaaaaaaaaattagttcataattgagctgttgtggtaataatcaagttacatttttttaacttgttttaggctgttaaaaaaaaggctttgttttaggctgtttatttatatacatttttatgagtaagataaagataccattttagcctacctttaaaaaaaaaaaaaaacattttagcttaatataaatccaaataatgatagcaatatctttcaaaaaaaaaaaaatgataataagaaaaatctaggacgaaaattttcttgcgtagatttaaaaacaatatatattattaatttgggcctattttgctttgtcattgggctttaataggactttaagctcagtcatctttattatggggaaattaacaaaaatactagaatttagattaatttttacaaaaataatgtcatacggaaattttttcaaaattactgtgtttttataaaacaccagtaaaaaaacaaagcagaacaattcaaaataacaataaaacactagtaaaacaccagtagaataccagtgaaaatttaacacagtatactgcagtatgaaaacttataaaaaaaacaacagtaaaaaagtaaaaaaataaacgcctaagcagatttttgtaaaaaa

SEQ ID NO: 302892 - DNA, 2729 bp, Cannabis indica
aattttttccattaccacgtgtcaagacatggaaattatgcaaaagttggctccaaagtaatcctcaccaatttgaatgtataaattattaatatgagtattaggtgggtttcaaatttcaactcttaaattttgcagatatgggatcgcaaattacaacttaaaatgtttatttgtaccataactactcacttcactttcttttccagctattagaactgctgaattatattatatatttatatgtaattgtttagatatatgaaaccccatattaaaatgcacttagtattatttctctttattcaaccttattatttaagattgtaatactaaattgttagcaatgataaatattttccttaaatcttttgaatatatgattgaccactattatattttacctctcaaaaaaaaaaaaaaaataagcagcaagtaaaaagtctgaaagcaaaattatcataatttgaatggtataacgactccaattttattgttgatataataagtaaggcagctggtaagggaatatactaaataaagtacatattacatttattaatttattagcttacatgaactctcatacaagatatctatattctataacacactcttctccatctaccttatagatataaaaacttaaaaacatataattaaactgaaactgaaaataatccccagttgaaaacacagaatttcttccaaaaaaaaaagataatgcaagattaattaaagtgtaattaaggagtaatccactattgacgattggggccagtctggtgtcgtgatttctctttctccttcacttcactcccctgcgttttgtcatactcttcaataaaaaaaaaaaagcacaataatcagatgccaatcttagaatttgaatcaattaaattaaatttaaaaaattcatgattaacccacaaaaaactaaatacatataccagaatggttgggatcaataacaggatcattttggggcttgagagactgctttcccccatagattccaccaaatccttcttcatcacaccttgtagaatacccttctccaaaggaagacatcacgtctctgagattatatatataaacatcaaaacgacatagatcactaattaatttaaataaaaagtagtacacagactgacccagtttcttgattactagtgttgatctcttcctttcctttgtccatatctttattgtttggttgggtagaagtagaaacagagtgagttgcttgtgtgaatccgatcgcagaggatttttgaccaaatataggtactggtggtgttgaagttatgtttcttagtagtgtagtgttgatcatgatcctttgccttatcatcttaatcatcaatttagagttatagtatttataaaattatctactacgtgtattgattgaaaaaaaaaaaaggccaatatagcatttcttcgatcgaggccgtttctacttaggtcttattgtgatgacacgtagtaataaatggcaacgtgtctttgttatatgactttctacatgcattatacgtataccctatgctttgtcacttttgcaccgtttattgaattgcagtagcaaaatacaagatcaaattgcatttaagtttaaggaagatcggacctgaccaaaaaaaaaaaaacaacttccaataactataaattaaaaaaattgagtaattctaattttttattaaccgaaaaaaatacattctcaaattttgtagaagattactatctttgatatttttggagttgatctataaacctttgctcttgatatcatttattcagaaaaataataaacttctaacgcaacaaaataataaagaaacgaagtaagaaaaaattacttggtttggtaaagtcattaaacctgcaaagaaaaatatattcacttataattttaaaattacatacactcactatctcgaatctcaaaacaccttttgtttcttactcattttctcacattcacttttattttcacaatttactctttttctcacacacacctcaccccgacacaaaaaacatatttataaaaataataaatttgggtaccaaaacattccaaaactttctctaaaaaagacttcaaaacttgactaccaaaatatttcttttcacacaattaataattaactaaaaaaattataattttacaaatactaataaataaattaataaatgatttgagtcacatttcacaacaaaattatatactcagtcaatcctattgattataagtcaaaaggtttttttagtataattataattaaaaagtttgaataaaatagttcaacaatatttatattactaattatttgttttgcaaaaaaggaaaaaaaaagaaaaatttattcacaaccgtaatcataaggcttcgcataaaaaataaaaacttgtagtcataggcttatacaactttgtctttgttaatctctaacaccataacaactttgttattcatttaagtgtaaataggggcataagtacctaaagttttataagcggtataaacctaatgtttatatttagcggcataagtacccaatatttgtaaaaactgtaatttttctttaatttcgttattacaaattctgttattttcttgaacagaccacatatataaggtccagattcttgatcattgggtctagacagaaatatgtagtatcatctactaggagtgttcatccgatccaatccgcactttt

SEQ ID NO: 302893 - DNA, 2005 bp, Cannabis indica
aagacaaaaattgttaagaaaaaatttatcaagaaaagatttgttaagacaaaagacatcaatcttgtcctaaagataagggtagacgcctatggcttgttcctatcctgatggagtttgtctttttacgttaattaattatttgattaattcaataatatctaatttgaaaaatggttatacatatttcaaggttgttgagatattctctcaaatggttgaaagattctctcataaatatcaataaccgaattatgttataattatttgtttatttaaacaattaaatatattttaattaaaaagaatttaaatactataaataggagcttgatttgagacacttttcactccttgttattcgcgtttccgatattggacacgtggattccaagtcagcattcaagacccatcagtggggccctcatcaataataaagtaggccaagcccacctggatatgcctttccgggagttgtcttggttttgtactcacagagctctccgcctcggtagatcaagcccagaagatgcctctagggtcatgagcccagaggagaaagatattatgttcccagaagaccctttcaatttctctatttattcctgaatataaataagaaaatactaactgtcagattgcgccattatatcatattgtgattaaaggggaacttcctatgattagcgtattatagttattccagaataactgcccaccattagtggatgtgattttgacccgatcaacctaattccaatttgcctagtcagcagattatattcttcatggactggacttcatgagaaagcccaaaggcattgtttagctgtaaactccccagtaaagggaaaaaaggaaactctaatgtaattctccaactactataaatatcccattaatcttatggattaggggttgaactctcttacgtatttttctcaagcaaacatacgaagatactccgtgtgtatttctcagagcatttacaagtaaacagttcactgaataaaattgactcgtggactaaggctagttaatgccccaatcacatgaaaaaactatttgtctcttttaatactttatttttttgattatttagtcttctgttcttattattttattctgtttccaaaaatctcaaaacagaacccaatctggcctttgttataccggccctagtgctagagctggaggtcctgaagactcccaaaaggtaactagttgctagcagggtcattgggacgaagagatggatctagacgctcccattgtgtaggcgccaagcacgattaaaaaaaaactcctaagggtcactatagtgaggcgccaagcacgattgtgtaaatgtctctaaacgtgctaggagcgtcactatatcataacaattaaaaaaaactcatgagcgtcactaaatatttagcatttatatataaaataaataaatgaatattaagaataaaaaaataaaaagataaaaaaggcttactttagaaatcctaattttactatcttatttttattttttccgcttcttcttctctctctatcatattctctacattcatctcatagctaggccagacaggcatctccagtgttgtaatacccaaacagccaccacccctagacgtaacacccctcaaaacattgttcctttctcggtcattcgtgttcaaccctctacgaagccggacggaagctcttgtctcccttactccatcgacgacttctttgcctccaaacacccatggtctccttttgggttaaaatctctctctgactcttattttttcatgtgaattgtctttgaaggtctttgtggatctagttgtttgaactttgtttgcggtctatggtggtggggtttgctgtttttttcattcgaacgctagtggttttggttcttggtctatgatggcaggttttgtggatctcgattttgaatgtcgataagtctgggctcctggtttatggtggccgcgtttgtaatttttttgttcag

SEQ ID NO: 302894 - DNA, 1293 bp, Cannabis indica
aaaaaaaaaagaagagagagatgacagaagacagtgtgaaattagattaatgatttttaaattatttttttgtaattagatggcatttttggtggttgcaatttatttatttttaatatatgaaaagtaggaagccaagtaaaatagcagtgatgaagaaataaacaaaaggagccttaagaaaacaaaaggagaggaggaggcttaaatatgaattaagtgaacgttaaggaaaacctaagacgcaattgacatcatcacatcacattcacatggttcaattttgaccaaaacataacaactgtataatggaaaagtccaacaaatctcaacaagaaatgaggtactttccaacgcaaaggaaaggaaattgtccaatctggcatcacattctagaagaatgctagtctgttctgcttaggtcaggattttgggactgcttttaggccgtttattattaatataaattttccacttggagagttagagtttatatttctgattattaattaatggaaagtttttatttctaattattaatttattaattaatggcattgttatcggtgatattgttattgtgcggcgtgggtagggacccacccgaatcgaaacgacgaatctagttaagaatacagcaaagcaaatattgatttaatttaaatatttaataaaggaggcgcaggagcgaccacaaacacggcagcctttagtatctagtagaatattccatttattaaactaaatcagtagagtatcgaaagagtatcttcaattgtaaaaaatcgaagaatagttgcttcggttcaagattatgtggtaaaatattaaaatgttatactattataaaaaaaaaatgatattttagaaatatgtgttaatgttatacagtagtattgatgttattattagaattttgcaattaaaataaacacataatttttataaaaataagtactaatatttacggaaactccctgttatcaaaatatttatattcaggactaaaagtgcttttacaaaataaatttattttccaaaatacagtcaaaatggaacatcctgtccaccgggtcatggcaccgcgattgatatgtacattgttgtttcgacctcagactcatagcttcttaactttgaccttccatttacctgcatcatttagcacctgcgagtcacaaaaattgagcaaaaaatgtgattaaatcaaaagacaatataaaattcatttattcacatcatacgaatacatgcttaaacatttacacaattttggtacttcataaagtaccc

SEQ ID NO: 302895 - DNA, 1142 bp, Cannabis indica
ttttgtctttctagttagtttaataagttttggattcacaatcacaattctcaaaaagttcattaataaactctatcttcttgccacgtgttccacaaaacaagagtattgtatgatgtagtagtagagattggttttattgatatcctttcttgcttgggtcgggtttaaaatccacctacaacctcttctttaaagggatttgcttgaccattaaggttaaaacttactatggtgacacctttattgcgaattcttgaagggatatcataactaacacataatctttgaaattatcaaaaagatcaaaagaatagtgaaagaatctccacgctatcccctttaatttgttaattaaagagaaaggagcatagactatagacgcatgttagagagcctcattaattataattagccccctattaattaatgaacattgctataacaatattctatcaaaacgttattattttaaaaagagaggaaatgagatgagatgagaagagaagaagagtccaaaagaaggagcggcggcagcatgaccatgtgccttatttattcttactgatttataaccgtttttgtccgtttttttcgaatctgggtctgctctaatcaatacgacaaacttcaatggaaactccactgtttttgagctatgccattggctagtctctttcacttttcacattacatctctccataaccaatacaaactcatctcatgtggctcaaccaacccaactatccaatttttattaatttttaaatgaaattttcaaatttagcaaactcttttaattataaataattaaaagaagcacttagttggataaagaggcataacaagtcaaatgtcattttagaaacaaattgcattttagttgtttaagatattcttagttcggcatttctatttttagtctatttgttcaagtttgtcaatttattttattttctttaagtaatatttttattggtcatgttaaacgatctgctaacaaagccgcgcactgtatggcacgtggtgcttgttattggtcaagtcgtcgttttactgagagcgatgctcccgttgctcttcaggcatttgtattagcggatgtttctatctaataaaaattattttcattcaaaaaaaa

SEQ ID NO: 302896 - DNA, 3694 bp, Cannabis indica
ttttttttttttgtaaattatctcatatgtatgtatgactgcgcataaatttgtgtgggctatataagggtctagtctaagcccatattctaagcttgcctaaggcccaaaatataattgatcagcccaacctgcccatacgtggataaaatattctcaggcaaggtttttttctttgtagtattatatcatgtaatgtaactaagcttatctcaactcatcttcaagttgtcgagtgcacaacttgaagagcatcaatcactttgtttctcaggataaactagcttatatatattaccataatatacgaatacgatacccaaatatacctaaaggtacttcgatattattgcaactaagtattaacacaaactatattatcatgaaaaatttaagtatttaagtacgttcgaacttatatgttgttaaaattttaatatgtaaacttacgtgagtgaagtcgatcctacaaatactgtaatgaagtatcaaataattaaatctttatttttatttagcaaataaataattaaatgttgaaaatagcaaaaataatagaaataaacatataagtaaaagaaggaaataacaatgatttagaaatataggaaattagcatcaactttctatgataaaatacaatctaattactctttcaatttcatgtgatagcggattaaaattcaatctatattcttattaggacatatagaatctaaatcatatgacaagatctcctatatatacttttgtggtaaattatacatatgatttgcattaaacgaaaaaatcataattgttacatagatcatataggtacttttgtccaatatcgaaatctatgtttatttcactgtatagcataatcaatattcacttttcaaattttgtattaaaatcataaataaataattggtaatcaaataattataaggattaagtataaataaaatagatgcaaatgagaaattaaaaaagaattagaattgtattagaaccatagagaaatatcaagtagtatccattaacacccctaattaaaaattaactactcattgttattgtgaacaattgattaaaactaattagaacatgcaataaaaagaagaagaaaaaaacccgttgataaacaatggtgatagtatttttcagccgctttctacctccaaatccgtcaaatcacgcaagaacaatgcctaatttacacaagcgggtcgcgacatagccttcccaaagtcgtggcctaagtggcccattttcgggcagtgaagcctcttcacaccatgtctcgacattgacttcccaatatcgaagcctgccaatttctcttgaaattcgccttttctatccatttttagcacaagaacgcactggcattgaaattttcatgccatgaatttactccaatttcttcaattcttcaattttaaaaattctgattgcaccaaatattcaaaaatattctacggactgttcttttgccacactaatgacaaaacttcaactaaatcttaatcttttacactatttttcttcaacttcttcactttcctctttataaactaaacctaaaaacacaacaaattaaagcttaaaattaaacaaattaaaatactcaaaaataacataaattagaaccaataggcgagttaagcctgcccctatggctcactcattttaggggcccaaataaaacaatatcttttaaaaaatatacataattttttaataatttttaaaaaaacaatttatcattatagtaagagccaataaaaaaaatttatctataactcattttaactcaagaccgacctcattatacttaaatattatggccacaaattaccgttctaaatattcatatcatatgttaaatattctaccatattattaccactcactaatgcttatcaccatataaatatagtaaaagattaagtaatcataataaaatgagaagcatgatgacatgtcaattgtcaagtgtcaatagatcaccgctaaaacaaaaaacgacaattagaggaagcaatggcatgagagatacgacaataatattaaaattaactaagacaacacagtatatagtatatatatggtagggtaattgaaattgggtaataaatgagaaattatacaagaagcgacaacatgatctgtgaaaacgacactgcccagctacccacgctacgatacgaatacaacccacaatgcaaaatgacaaataacaaaatttcactttccccttttaactttcaaatctctcacttttgtcctttttttctcactttaaaccttccattgtaaaattctcttactttcttttttgtttttttattttgacattcaaatagaggttaaggttatatatgaaatgcatacattacactaaataaattatattaagtttaagtttctacttttttcttatctgttacaaataatttaaaatgcaacaacggtaatactattttaaatattatattttacaaaatttatagattgaaccctctattttattaaataataaaatagatcctatattttttaaaatagtacaaataagactctgagctcaattttcgacaattttaatttaatataactaacttaaagacaattcttaacacgaataaataggggtattcattggaccacatccaatatttttaagactatccagatccgatccaattatttattagatattagattttaccatccgatctgatcagtcatccaatcgatccaacatccattggatgttggattgaatcgattatatccattagatgtgtttcatatatatttattgatttaatttgggtttattcaatattttagacttagtattttttggatcggatcggattcaatattatgggtctagtatatattggattagattggatacatccaatccaagaaaaaaagggaaaattttaatgttaatttttatatatgcatgtatattctacatatagcaatataaaatctaattactcatccaacttaaataaaaatactaattagttcaattagatgttggatgtactggtttttggacaccctatccaacattcgatccgatccaattggatatcaaaataacatccaatctgatctaattacaatgggatatctaatgtttagcagtcggttgtaattggattggatgatttatgcacacccctacatatagatgtagaaaatttaaccagttttgtcataacgcctctagatcagattattattaagttttattttgacaaaaaattagttcatggtcatatttgtaccatttgaaaaatacagggttgattttattatttaacaaaatagagggtccaatttataactttttcaaaatatagggtcgaaaatagtatttacccttgattcagattgccattttttaagttttaaggactataaagcaaattcgtgttagattttaagggataaatatgcaaataactatttttaataccctcctttctcaaccagagttttatttgcaccccaaaaacttatatatatacactctcattttaataatttttattttatataatttatagggtgttgttacaatgcaccctcttgagagggaaatccattgatacaccctctactgtttcggcattcagaaaaaaaattcagtccaattttttttatattcgtgtacgttata

SEQ ID NO: 302897 - DNA, 3983 bp, Cannabis indica
aaagtaaaaaaaaaaattaaaaaaatatcaagagtaatttttaaaaattatttaaattcatatattttttttaataatatggtgtatttattattttatggagtgtaaatagaactctctttataagaaatgttgtagttccaaaaaataataaagatatataatgttaaattataaagagattttaaaaatcttaaaatgaaagataatatctgtaaaaaaaaatacaattttaagataaaagtagtagtaaataaaataggaaaaagataaaagaaatgaaaaggaaagataacaagtatcttcaacgtgacatttgcaaaaaaagaaacaaaatttgcttggaaaaagactgctagtataatgaaaaattatattgtcaaaatcataagaaattaagaaacaaaccgcggttgtattttatttattgtttagaatctcatgagtgttgaaattggatttcttatttgttttgtgtaagatggagaaaatggtaattgatgacaatggtgtgaggctttttcctcagcagtaccaaacaaactaagtttcaagtttcaacatgagaagtaagggccctgtgaaaggtatgaatttttatattttcttttacactcaatataaatctggttttttatatgaattttatgcaaaatagatgtaagattattttaaaacttattttataaaacaaattacttgtacgttagaaaatgtttatcaatataagcactttatttcttcttaaaccaatgcctggccaattttcatttagactggacaaaaacgatcaataatcagaagagaaaaaagacacagatgaaatctcctcaactgcattattacaatggccactgagttagcattatttagtcctttacaacttataaacaatttcattatttagctgttctaagctatagctacaactcgaagacaaaggccaaataagaacatcttaaaagaccatggtttgaagcaccgatttcagtttgacatctgcatagtagtgaaggatttggcaaagaattagacctgccttagttaatttatgcattaaacctattagccttttcaaaatttgagagagtggtgagaataaatttaccgagaagcgcttcttgatggaagcaactatctccttaggatcgcttcgagttggtttgtaaccctcaactttgctaatctcctgcaaaacatgataatattgaacagcctgaaactcgtttacaataaacaaccaaactaaaagtgtgttgtggagcttatgagttgctgatcaactgggatctatgagtcccatatgcaactgatcaacagctatgtttggacactctttgcagtttcagtttcagggaaaataaaactcagagcacacttcactcttagagatgcacttccctacccttttgtgctcatctaaaagtactttgctatcaatgcttaggattattagacttggacttaacttcaagagaagtctcaaagtctggactatgcaagcaatggcagaactagggggacagattgtggtaaaggatatattgactccctttcaaaaatagatattaaaatagtttatatatataaaaaaggtttatagtagaccctcctaaaggggtctatgtctatccctttgttttagtatcaggagagatttttagtctaatttaattttatgggcgtgtatattgtattatttagagtcacctgtaaattttgagaatattttgaatagtttacagtatcaaaaataaagttcaaatattttgctgcatgcgtgactcttttttcttatactcgttacgcgtggtaagcaactgtttgaactttatttccggcaatgtgaaatattcaaaaaaaaacaaaaatttacaggtaatcctaaataggtacaacgtacgcaaccattaaaaaaatagactaaaaatcttgctaaatgtcaaaacaattaaggagatctactgaaacaatcctttaaagtgtatactatagatatttccatatatatggatatataatatatatatatatatgtatattagtataattcttgttgaaaaagaaaaaatgttggccccctttatattttaaccttggctccatcactttatgcaagtgacagctgaagtttgagatatatgctttgttttactgcataaaaaaaaaggaattctactttagatacattcatacctcaatccaaactttcaggttaggcctgcctgcagtgatgtcataattcatgacttcggctaagaaaggttgaaatctttcaatgaatggtgcataagcaatgtccacctgaagattaaaaaagaaattagtaaataattcatgaaaagagtaatgtgaactttggtttaataaaagggagattgaaatgtgtgccacattaccagactgaactgaccaagaaagaatggtccatcttcaaatttggaaagagcagtttcaataaaatcaaatgcagaaactgttgcaatatataataaccaggttaaattgtttgtttccaagtcaaacagcatcaagaaaagaaaaatttgcagctcaccagcttcattcacatctcctttgaatgaagaatagacagatttattgaatgtgtcagtatgagaaagcaactcctctgcatactccttctttgcaggatcctgtggagtttgcatttattcaatatcaaaactaataataatgataataataaaatatgcccttcagcttcaaactctcacatattcaggccaaagtgaaggcccttcaaagttactgtcaagatatttgatcaagtccaaactctctcctatgacttcatttttgtgttccaatgctggcacctacattacaattccacatcagaaatacattgaagagaaaagaacaacacaatgcctatagttaaaagcttttggtggttttgaatttctcaattgggttccaaacagtattggaatatatccaagaaaagcttaattctttgtaccttgttaggtgggtaaactttctccttgtaccaagcaggcctgtcttgtagatcaatgggaacaagttctatcttttcctgcaattcctgtgtacccaaaaaagattgcaaccccaacaatacaaaatttcatagataagaaaacatcaacatttcgtttggtcactcagaaaggaacaaaacccatatcatagtatgtgttgaagttgaagacaaccttacagttgcgcgtaatccagacgcgctgtgcatatgggcatacataagatatatacaaccttcatcaatacagcaaaattcaacaaacacatcaaagaatgagtcacacacacacatagaattatattaaaacacaataactgaaatagtgtgtggtttttgcctaaccttgttttgccatcgaagattgttgggggatcagagctagaagtaagagcaggtgtacgaacctcttgcacactccttcacaatcccaaaaaaaaaaaaacaaagcccacatattattatgcactttatttcatatgggttcaaaacttcaaatataaaagagagaactttcacatacccagtagccatggctgcagaagagacccaagttcttctacttgttttaccaccaaaataaagttggaattgaagcttgggagtgggaaatttgttgggttttggaagtttgatgaatactgaaaattggatgttgttgttagtagtggggatggatgatattatcagaggagatgagcctgatcctaaggctgggctagtagtagagctaaacgtggccatttgttaatagtaagtagttcaatattattggttagtggcaagaagaaagaatagtttttagtcgaaatgaaagagtatggattggaaaaatatttcgataattttttaaaaaaaatacaaaaatacaatttgtacagaattttcaatatttttttacgattttcagattttatttacataaaatatgatttttttttttttatgttatatt

SEQ ID NO: 302898 - DNA, 3388 bp, Cannabis indica
aataatacaacatacattgtgttaaaaaatttggtcgtaataattaatacaatacattactttatccaaacatggtgttatttattatttaatacaatacgacccttatacaacgtaccaaacgagcaagagagtaattatagatggatgtcataaattcgaatgaggaagtttctagatgttaaaaattatcacaaaacatatttatatcatacatatatatatgaatatatgttaaaactttttggaatgagttggttgagaaatgagccttgaatctcgaaataagtgtgcagatactatctcaagcgacatgtcacctaaagtaatacataaagggttcgttttgtacccacaccgtaaaagcatcgaatacgcatagtaaacttaagcagagaaatttaaagcttgttataagtaaaaaattaaaagctaagtaagtgcatgcatactttgttagacataaaaaaataaatctaaatacttacatgtctagcaaaagaagaatgtcaggattaaagactgcctgattggttatatgtccaaagtaaaaggccttaaggccaaatataagtagtgttcgaaagtaaagggccaacaggccatacaagaacatgaaactaatgtgaaatataagcataagcataagatactaacaaaaagtgtctaatcatgtgcaatagcaaggggaatcgagttgaaagttgtagcatcctaatctccaagaagttggccgaccatggcctttgtataggctggccagcaataagattagtagactggccgaccacctcctccatgggttggcccgctatggcctcatcaaagtgaccagactaagtcccttcaatctggctgataatttggcctgccccctagccagcttggtctgcctacatcctgctctcatagagctccttaccctgagtgagtgatctctagtgaaaaggagaccctttatactcgaggttgatattgaggttgtgcaagtaaacccttacaagacctccaaggacaagcccaaatactcgtccctgatgtcttgttatccatcaagggctagttgcttttcctgatacttgttctcaagctccatctccaacttgaaggcttcaatagaaagcttggtcacttcttggttcctgaaataaagtaagcattctaggccattgttcatgtcctgggattttctcaggcgagcagacaagtcaatttgtgtcttagcgtgtgcatccttctcaactttaagctcgggctccaacttcttcaggtgaacttcaaaagagcccttggcccttgcatgagtaaggttgaccttcaacatggtctgaaatcaaaagaaaaaccaagttagaagcaaaataaaccctcgccgcccagcccttagtgggacacttctggccgaccagcttcccattggtgcaaccctagctggtcatttcctgattggtgcacacttggctagccagcccctctcaaagcaaaaatttgagtaaaatcaaatatacaacttagagatgatatgtcctaaagggcgctggatgtcaggaactccaattcctcgtccttcagctccaggggccccccgttaatgataggaaaagccctactaatatagttttgagcagcctcagcagtcttctaactaatggatgaatagggtccttgacaagatatgtcgggtcctttcccgaaggcctatgtgggggcggagtcctcctaaaaggagggtccataacagggccggccctgagttagaatgggcagtaggcaaaaaaaaaatggacccttactataaagataaatggcatttttaaaaattattaaaaaaaaatatgtatctttttttaagagatattttttttatttaggcctccaaaatgagtgggccctaggcgcgggcctagcccgcctatgcttagggtcggccctagtccataatcaccgattgatcagctagagcaggcactagaggagggggaagtagtggaaactgagtggcatcataagatctagtggttcgggccacctaagcctaaggacaacctgaagaagcactgcctgaaggctctcctgtaagatccctcatcctggaagccatgtctacaaaaagaaagtaacaaagtgagaatacaagttattagtattgaatgcaagaaaaagtaaaaagttgtaccatcaactagagtccaagaaacaatccttggaggagggatcatttgagttgctatcactaatggctgccttgcccttgcctctagaagcagacgggcagcgagcaggcctggcaaaatcttggcctctaggcctaatcaacaaagaagtatcactagcagtgcctccgcgtgccaaacattgtcggagagccctatccctcctatccatggtcttggcaagcctagagaggggaacatcatcatttggatcaattgtatgccttcccccaggaaaatctcttgtgtcaccggggtgtcatctgggccaccagacgggcctgcagctccctcaacaccaaacacaggaggatacaagccatacctttgaatttagcctcacaagccaatctaagtatgttcctcctctcaacaaggaggacaagaagtaattagctctatccctcatctaaagagtgggaatggagcatgtgtaagtcgacaccctttgaaagtggtaattgacttgcggatgttctaggcgataaagtaagtctgagaatatcctccaacctttgataaagctttgctattagtgttgctcaaccactagtagcccagctggctaaagtagaagtacctgtaccgaccttacctcaaaatagacttcagatcaaagaaataccagatctcatagggtgagggttgaggctagcccaattctgcatagagtacaaacaatgtcaaaaggtactttatgcccttcggagtgatctgagttggacacaacctaaagtaaagggctatgtcttggaagtaggggtgcaggggtagcatcgctccctacgcaatatgacgctctaaccaggccatccacttgaattctaggcaatgtgctagttggtctctggtgggcctatcacacccaacttctcctactagtcatccaacctttattttgatcaatttcttggcaaaaatagaagaatggggaaatatccaccggtacagttgatccccatggccgaaaaatcaagggtcagcagccttttccaaaatatagtctatcccgaccttagagagatgaccaagactattcaaaggtcgcccgacctcattgtaagaacccaagaggttgtttgaaattatggtacaagctttttactgccttagtgtaggcacaactgttgggttttatgccctaaataaaactctttacaatctgattagttatc

SEQ ID NO: 302899 - DNA, 1917 bp, Cannabis indica
tttaattaaaaataatatattatttatgaaaaagtaatacatcaataagtgaggcaaattttatcctttaaagaggaccatcacttgctagcagatcttaggataacaaacaagagatgcttcatggcaaattttatcctttaaagagttgattgcccccatcaccaaatccatagtaattagtgctctttcctcttctgaattaaactgcatgtttcaaattatgtaatcaagaaaacaaaagacataaatgaactcaaaaatattaaaacaaactaatgtaaaaattgcacttacatcttcctcgattatttttttcttcgccatggacattattacataaatctcgcaatcaaaactatttttttgttgtgaaatagaatctttgacacgaattacgaagtcgatgaatgcccaatcattaggtacacaacctttaatgtcatctttaagcaaaaagtctaaccttgaaagctgtttaaatataataagaattaagaaaaattccatcactacaatgtttactcaattaacagtcatataaataagaataaaacgaaacttcggtttctagaaatacttcagaagggacaaattaatttccaactacaaaaactaaccacaaggttggcgtatttggaaatatacacggacccgcacccatggcatgaattatatacgtcaatgaagcgattttgaacaagcacaacaaaataaacccaatgatgtacctcttccaagaaaacaggaatatttatcttcaaaaaacaattagataatttcaaaacacattgcaaattaatcttttaataaccatactgtaacatacaatcaaaagaccttacccgtacgcacgcgtttaggttgccaaaaaaatattgacgagcaaaaatttcaagacctcggtcagacaacaatcttccaacgtctaccttaacatcctgaaagattttgaaacacatttcacataaagccttcaaatataaatgaatatggcaagacaaaagtataagactaaaaaacgtaaacaatatcaacaataaaactgaccgcaaatcttgtactaagataccaatttgctctttgagtaatattcaatggtgttcgcaaactgagtgtaagaacctcacacataacattaataacctgtgatcgagaccaacaaatgagaaaatcaaatacatgtgatcattcattattagtacatcctataacataaaacattaacaaaaataaaaagtcaaattctgaaacacaaactagaatgtacctctccagtcacccatgcaccaggacaaagcgattgcaggtgtcttgtcaagtagttgaaaggggtatcgactactagcacaataatgatttaaacaaaagatataatattgtcatcacactaaatcgacaaaaaaataaaaataaataacaaataaatttgatgcaattgcataaatcattaatttacttactccaacaatgttgaatcttcaaggtaaatatactccaatattctctcatactcttcactaaacaatcctttcatgatggtgaatggcccaaccttgtgatgttgatctacaccagaggttgaggtaactttcgtcaagtcacagttaaaaaatggattagagtcaacagtagatgattcgtggcgtacaccacgcttaggatgaacattctttaatcgctgtcctatatcagtacaactaacagttgttgatttatttgttagactttttatttgggcttacattaagttttattggttttattaaaacttgggttgattggatagttctttgctgtgttagcccatattgttggtgatcacttgttaatgggcttagcatctgtgtgtaaagtctaggtgaagcagaagtgtgggcttttctagttgactgaagcctttgaggagcaggccca

SEQ ID NO: 302900 - DNA, 1806 bp, Cannabis indica
aaaaaaaaaaaaaacctcaaacgttataaaatagttcttagaaatcgaagcatggacacatgacatgaaagtgtcattttattacacaaagccaaacaaaggataataattggactctttctctttctcttggttacaatacagccaaacatgatattcgagacaaacaaacacccctcattttaaccgtttaatttctctgacagaatcttttgacgagtgtccggtttagttgcaccacatatcaatccatgcattgagggtaatttagccatttcatcacattttttttaaaaataaataaataatttacggcataaatatttaaatttaatttttagttgtagataaatatttaaatttaattttttttatacttgaatgttgagtgtcaggtcattatacacatgtcattttttatacatatatttaaattaatttttaaataaaaataaaaaatttaatgacgtcaaccaatcaaagagtgtcacgtaaaaatttactttacacttaacaatcaagtacctatagaatttctagaattataattattaccgtcaaaaattaaaattagatatttatttgtaaccaaaaattaaacttaaatatttatatcgtaaattactcaataaaaatatacaaaatctcattaagtatacataattttaattatataaaacaaatcattgaaattagatacttagtctttataattgaggtgacagtttaaaaatggttaatatttttttataataacattatcaagtgtacaaatatcaaagtgtatacaacttacatttgtgtgtgagtgaacaaaaaaaacaaaaaaaaaaatatatatatatataaataataataataataataaataaaaaaaacttattttcataatctttaaataccactctatgtctatccttcttcacaccccacaaattaatcacacaatctcactctttcttctttctcctcaaacttctttcaaggtaataataataataatatcacatttttttttaaattcagtttttattttgatttatttaacctattaatttatgcttaaaggtctacctttttataattaaacataacatcttgaatttcatatttatatatagttcaattgttgttgtttttttttttttttcattttttacttttaattttctcttgaagccaaagattttatttttcgaaaatataatttatttttgggatatgactacaatgcagctctgttttagtgttgttgttattttattattattattattattttttaatttgatgggtttagtgattttaataaattactttaattagatattattggcacatggttaagaaagatgaaactggtatgcccatttttattttgtgaagctttcttttcatttgttttttttttcttaaaaaaaaaatgacaaacaatatgttgagtttgagtttgatgattatgtataattttgtgtagtttttttttatgttattttcttttatcgaaaacaacgttgtttgttttgggacttgacaaataaaacgacaattttccttaaaaacgacatcttcttgaatagtattatatataaaaaacggtaaccatttaaaaacgacaatattattaaaaacgacattttattagaaaaacgaacaatttctttcaaaaaaaaagttgcccattaaattatctttaatctataagataatacagtttttttttaaatacttgattaatgcaatgaaatctcttgttgtgtttttttttctcttcttttctagtacagactatatatgccttttata

SEQ ID NO: 302901 - DNA, 1601 bp, Cannabis indica
aatatttaattttttcaaacaaaaatttgtaatctttaaaaataaaatacattcaaaatcttaaaaagaccaaaatcttaaatgaaactagcaatacgtggctcgacacgtacattcacctagtataatataaagtacaaaccagatgaagagttttagtacggtgcagtgggtagacacttagaccaattctggcggtgctgccttcatccataactgaatactctgtaattaattgtattatcaaaaataaaaaaatgcacaaattataagggaagagatctattgacaaactgggtcttatataacttattggatcataaataagaatataatttgagaaaatcaaccaatgaaattagtaattcttactttcaatgaaggaagaatcaatagaaggaaagaaacaaagaaagctttgagttttgatgattgacttctctctctgtattttaatggggctgttgaactttattattttttgtaggaatattaattaacaatgactttaagcttttctctgttttcaaaattaggttgtattggaaaattaaaagtttaattgtattattgaaactttaaatttttgttgtattgtttggatttaatgttgtttatgttttataataataataataataataataataataataataataataataataataagagcattgttatggggtaccagtaatgttcaatactttttatatgtatcttcttatcattatcattggttggcgatatttcttaaaatttatttttttaagtcatatgaaattggctatttaattatactaataacgttatgacactaaagaatgtgacaccaatagaactctttagtaattctctaataataataataaattatgttgtttatgtttaaatattgttggtagtgtcatgaatattactaaaacatttgacattagttgtaaagtaaccacattgtgtattattatgcgatttgaggtcatatgtagatgcaaattgaagtatggctcaaactccacatgttaaaaatcgcattaatataacataattaaatttaatacaaaatatattataattaaattttacactataataaattttttttttttatttaccttttgccattgatgtattatatttttaattatatatttaatatagtttttatatacctcaaataaaaatttaatatttttattgacttttttacacttttctatcaaaataaaatttattttactcttagtgtattgaaacacaattataaaatttgagcccaacataatatttattcattttttgaaacaaatttagtacaaaatttacccaatctattagagatggtgtaacaccacataaagaaaagagaggaattttcaaacatttttttttagataacatgttaaactctttcagtagtgttgtttttgtaattcaattttcttttttttttatatatataatgggcctttttggattggggacaacgggccagccttgttaactcttgcaaaatgaaaagggttttttatcaaaaatttatattgttacatttaaagattttttttatatatttttacagttttctatagaaacaa

SEQ ID NO: 302902 - DNA, 2197 bp, Cannabis indica
tttttaagtaattttagttttatctaattttttcaacttacaaatatgtagcatttttcattttaataataatttttaaatattaaaattataaatttatttttaaagtttacttggattttgatttcaatcacttagaaataatttgtttgttattatatgtatcatccaaaaaatatttgtgtaattcaatgataaaaagcccaaattattacaacttaagttataaattatcccaccactacaaagcagtacatcataactttaataattaagcatggaaaaagcccataacaacaagtattacactgctgccactcctcttactggttaccttgagcctcatgtagcggaggcaatgacctgtgttatagccttttccgattgtctacgtatggttctcgctgtcaatgataaaaatattcattataatgaatttaatattgttcttaatgatatttctaatgtatgaaaatattttcaaagtatttccttatctcattgtaataggtctaagaatatcattatctattctcttgcaaagaatgcacttgctttatatgagtcccgtgtttagtgaccgagactttctataaattttgttgtttaatcttttgtgttttacttgtactttgagattttttagactttgtgtctgttaatgaattatctccgtttcttctttgaaaaaaatgaagatatcccctaactattattttctacatatttttttttttaatttaagcgtttatatattacaactatgctttacttggactcgaacccaggacctccaaaacacacacacccacctatggctacttgaactagcctcaagtgtcgattttctacacatttcagaaacttggaaatctacaaaaggcaagttcccaccaaatctcaactcaattatatacatccatatttcagtatacacacgcatccgaatctattttctcaagaaatattcagcaatatatatacatacaaatttgtcaaaaacaataataagcaatacatatttaactattgtcaaaaagaggttttgttccatatggtgtggagtggagtgcatgcaccgatctttctgtacaaataacaaaataagtctcacctattgtaataaagagagtttgttttgtaccatatatgcatcttaattagaacccaaaagatcaaaacacaaagtgaatttttcaagggatgagaaaatctcatgatgatcttctccaaaatggctctttaagtcctattaaagtacaaaactttcaaagacaacttaatggtcaagctacatatgtttggtttttgggattgttaaatttggtgtataataaggttatgagaatataaagacagacatacaaattagttaaatcaagagctgtagaatgagagactaaaatcaactctccctctcaatctcaatctctcttttgtcttttaaaatttgctatcaacagtctcttcagacattccaaaagcattgccagactcatcattatcaccattgttgttgttgttatcattatcatcatcatcagatggacaagttgagcatgtatgctttgcattagcaggaccaaatagcaactccaagcaaaatgcagggccacatattgatcttcctttgctcccaactttgtccaactcccgaacacttaactgttacagttttaaccataatgtttgttatatacacacatatatatataagcttaatttacacacacacacacaaaagtatgaaatagttgtacttgtagaaggctgtttctaatgaaagctgtattgaagcaaacatagaagagacgcccaccattcattttttggttaaatataacacgcacatctcctgtaacctgtctcaccaaacatcattaaaacattaattagtgttctaaaaattaaggtacattattatttgttggacaccacaacacgtcaaaaacgtaattactttattattgtaaaagcaattacaccaagacttgaacactttaacttgaccacaatacacaccaagcactcactctttattttatcactagacacctttactacacacttgtgtataactcacacttttgaaagattttagggacactttagaacacactctcactcttttgaacacactttgaacactcttgttggatgcacaacttgaagacccatgacccctatttatactact

SEQ ID NO: 302903 - DNA, 2791 bp, Cannabis indica
ccgagcatatatgtactggacactccaggtgtactggttccaagtatcccagatatagagacaggattaaagcttgctcttgcaggtcagcccttttggattagtactctttgtttttatattttgtctatactaaattaattgaacatttgatgctgtaaaatgtaataagtacaaaatctagaatcggttaaactgtatattgtagattagttgctgtgatattggctattggttttgttgatcaatggaatagaaaatgaattaatatccttcaattcttgctttattccctttcaagaggaccttgtatactgagatgtgggcttggagttattcatttcatgctgcggatgcatggccgacaaaaatataggaaacttagtatgtgctcaaaatgatataattcttatcaaaactattactgtagctgaagaatagaatagctaaaaattacatgtagattctgaacagaacattgacagagatagaaaccagacctgtctacagagatagaaagttataatttgatttcttttatttatgttttacataattgtatgttcattagttgatatatcttttagagttgtggtatggtattgcttcttcatttttacctgaaaaaagtttgttgactttgcatgtagggtctgtgaaagattcagtggttggagaagagcgtattgcccagtacttacttgcagttttaaatacccgacggactccttttcattggaagcactggaacaacaggagagcagaagggattcaatatgatgttgctgaaacagtggaacacagccttaaagatcttcggtcacgtaggaaaacactggataagtctagtgtccggtacattgaggtaaatacttgtatttctgctagagctgcaatttctatggttataatccgaagtcgctactttttgaataagcttggtagtgtttgtacttgttaagataaaactctttaaataggatttccttatgcattatagtagattttccttaaaaacccctcaaaactgatatgagtaaaatgtaaaatgctgccatttgtgtacttatttaattgccaatctacaatttcttcaaaaaaatactcagaaaatctcttacaagtctctcactggaacatacaaattgcatacattttttctttcatcacgggaatctaacaaagaacatcttcatattttgatttcgccatgatacatcgagtcgcacatcctcgacaaaggatttcatgtaaaatggtctaatagtttaaggatttcatcttcatttatcattgtttgtttatttttttcatatttctagttttcatcctatatcttttgcaggatattgttgcagaagtacaacatgcattatatttgagtgtgtcggaatttaatggcaatgtggaagatgaaaatgacttggagtgtcttatagagcaacagtttgaaactctgcagaaagcactgaagataccccataaagcctctgaagctcgtctaatggtatcaaaaaagtttctaacacttttcaggactggtaaacttggtccttttattcttgatgatgttcctgactcttaatttaatatgcttcatcaaatatatagaatgtagtttctttgaggttctttctttttttttctcctttgttaatattattgtttgatttgatctaatttagataaaaaagacactaacttagtttaatcaaatatttacactctaatttgtgaatggtagagctaaaacacacttataacattgtgctagcacaaatataacattgtgccaaatttggcacacaataaatacacctttttatttacaatgttgctattaatcattaattagtatagttagtacatattttataatcacaatattgccattattttttaaaagaaatatttaatttattgttacaataattattttttctatcaatttgcattttttttttgttttgaaatgaaatatcaacttcattgaattaaaagcattctgaatacaagagagccttcaaatcaggcctgacattatactcaaaaatgctacaaccagaggaaaatcgagcatgcctagcaatagcataagcaactcaatttgctaatcgtttaataaaacgtaacttaacatcaattagagacaacaataactcatgacagtctttagtgattaaaccaaaggtggagaaatattttggtcacttcgaatagcttgaacaacaaggaggctatcagtctctagttcaactttttgccaatttgtattttaaaataacgtatcacagagctaaaagcttgacacaacttaaataatcaataattttttcttttaaaattctaatccttggcataagccctcatggctttgctcttggggttatatttacctataattacttatacaaatggagatattattcatgcttatatagttgacaacactagatggttttttattggtttgtctttgaaccaatagaaaatacttgttgtcttttactgctcatttttttttctttttaatatttctactagtatatgtttgctgctatactgcttctattaggttgtgtgctctttctatttggttgtttaagttgaaaaaattgtagtgataatgtttgagtgcatatttaggtgcatatgtcagtcttccttaaccacatacgagctgtctttgatcataaatcaaagagctcatttatgaccgtagatatgctctaccgaataaatatgccattcccaaccgtcgatggcaaccccatttattccggcccaaaaa

SEQ ID NO: 302904 - DNA, 1925 bp, Cannabis indica
aataatatataaatatttttaaagaaatttatctaataatatttgataaactaaagacgtaattattattttttatacacttttaaaatgtcactaaatttaatattttgtgtcattttttacaaacgtcattactgatatattttagtaacattttttatatgatattaaaattaaatattacaaattattgatatttttactcaaatgtggcaaaatatccttatagtaacattttttaaaaatgccacaaattaaaatgttatatattctcattaaaatgacattttgaccaaatgtcattaaattactattattgtaacatttatgacaaatgttactaattggaatgtcacaaaaacctagttatagttatattttttaagaaattcggccagggaacttttcaggttaagagaatggatggattaaggtccctcacgccttgaatgtagaccacttacgttggtactaccaataggcaaaggtgaccaaaccttgataaaatcccgtaagctttgtgtgaatattgaagtaattaccttcttcagatacaacctacaggtataatgacatgaaatagaaatagtttacatttgatttcacattatatatttttattttttaaaggccacaagttatgttttaaacaagtgaccaggaagttggagacatccaaacttctcagctcacttggggggtactatgcctagcaacgtgtgcccctaaaaaatgtacattgtgctatgaataattaccttaattttaaatatgcatggttttgtgatttacattcaaaacttgaaataagatatgttttcaaccaaattcctccaaaggaaaagtacgcttgaattccttcttaaggttagatgaatgcagacttagaaagtaaaagcgtttccagccaaaattcccaaaaagggaaaagactcacctggaatccttttcataaagttttaatacataacttaagttttaaaactgttggaattgttcaaattgatataatggaaaaggcctcgcttgaactcttatacactttagccttgtcttgtttgtacgatatcgcctaaagttcatagtatgtgaaatcggccacccaaatttatggataggcttcacgaccttaaaacattataaaagagatttagatgaaaaatatgcttaaacactaataagattttagcccagtacctaagaaaggaataacgcatgaaacctttaacgtgtttaaccatttttcctaaagcacaactccacgggaataaaaattagggaaatgcttggaatgcgtaggctcgactcctctgtaagaaaacaaaccttgactaaaccttcaaaaaacactaaggctctatgaccatataattgtccagaaacagcctagaaggaaaagtggtgtttccacgatgtccgatcaacttaggttggtgagcttcataaaaggctaagattgaggtgaccctacctaaaaacaggaagcaaacaagaagcaagtatttttcaaacatttcctaaatcagcagaggggtttagtgtcgaataaaatcgaaaagtttgaaattgtggctattggaaccacctatttctgaaacaacctaagatgacagtccttaaaatgatctagcaagccaatatgtgaagatcgaagctaaaaattgaaagtaaatgaagcatgaagagttaaaaactattataatgtctcccggaccaaacaaataaaattgtctttgtgaaaggaaaaaaggtgctatagtttttgagaattaaaaatgaaggccccgtggaccgggcttataaatacaattccgcgaataaaaaaaatttcctaggaaagcatggaaaatgaaaagaaggataaattatggattatttgaggtaggagcatctgattgaatggttgtgtaatacccggaattaag

SEQ ID NO: 302905 - DNA, 2366 bp, Cannabis indica
ataattcacatataagacaaataagacaaataatacccctagagtttaatgaaatctccggaattgagaaattacaactctaatgctcatttttaataatggggtccacaaataattataaaaataacagaaattagtcctaattgcctttactaatttaaattacttaagcggtcattacataaagccccatattttcataagttgatttgaaaagaatgttcgaagaggctctattattaaccatgcacctagcaaccatcatgctccatattcatgcagttatgaccagagggtcattatgagggaacctgacctgggcaacatctccttctttaaaggatatgacaggctctccaagcttgagttacttggagtccctttcttccacaacccggatgtcacttttttctcatgatggagggtcgagcatagcgatccctagctttacttgtttcgtctgctatgtggggttttcctattatgatccctaagtgtcctgccactggtggtcgtattaggtccccattctggacaacttgtgccagagtttgatcattttgcatataacgtggtagattggattatctttcttgattaggaattcactttctcttttcaaatgtagacacttgtttgtatcatgaccaaattcattatgcaatcagtagaacttagaggtatctcgcttactgatgtcccttcttgatgggaagaggcttcttgtataggatagcagcttgggtggccatgtaaattgtcttacgagttttggttagtggcctcagcttgggtggtaagggctgattattaggattcaccaggttagcaggatcaactggattagcagtattggtaggattttttagattggcagcattagtcaaattagttagattagttgggcctcccgaggtgggggaaacacgaacatcgggatcatccatcataggatcctgaggaaaatccaaagaagtggaggtagtggttcttctggttttaactatggtgattgatcaaaatcaaagtcaaataaagttatcaatgaaagcaccaaaatattgaccttggatttggtcaattgacagtggagccttatttactactgataaccaccgcgtgtaaattgtaataacaaataataaaagcgacacaacgatttatagaggtttggcacccttgtttagtgggtaatgacctactatccttttaattgtattaattctagagataataccacgcagatcacaggcttaaaccttgtaatttctagctatggctctcttgaacattacaatagtgagaattgagtattatagattcagaataagagtgattaatgaggaaaataggctaagtgtctaatgaggaaatgaggaggcgtgagagaaaaaattaatggcgtggggcttgaaagacttagagcaagtccttttttaccttgcctaatgccctttatataatgcagggcttacgaaagatcatcattcaaaatatataaatatcccccctcaaaataggaaaaattgattttttttatcttatatttaaattacaaataagataattaatatccctaaagaataggtagatattagcttgaagaagatcccctatttggggcttatttacatgtgttggccggccaaccctatctttagggcctggctagcatatagatccatattggctgacaagggatgatccggccaggatcccttggttggctgtttcctcctagtttagtcttgcttgattgcttggaacccttaaaaattggcatgttgtgcaaagtgactttgttcacccattgacaagttgtattccacgtggtcttaacttttgtgaatgtggacatgccacgtcaagtggataaaaattgggataacaccctcaaaaagtttgacacctgccagtgactagccaatgccatatgctattaggtaatatatgcttcctgggaaagagatggaggtcataccatgtcgcccttaaaacactcaagctcactctctaagctccaaatttttttgctaagcatagataattttaccaggtggcgtatgcgctccgccctttgcctatcataatggtgaaatgggtcctcctctaaggactcaaaatcaaatgaggatagcgtaatatggaaattgcctaggaggaagcgagaagccatagatagaaaacaaaactgttaatttcgcttttagccaacgacaatgagtctttttgataagggataaacgatatgtcgtaataagaattcgtagtaaagcaataataagagacagaaattttatagaggttcagcccccagtagttcggtaatagcctaatcctcgttagttgtattgacttaagaataa

SEQ ID NO: 302906 - DNA, 1921 bp, Cannabis indica
ttatcactattattatttttaaatggagattagaggataagtaatcctctaaattttattatttatttatttatttttaagaaacacaggttgtagaactcgaatcaaagcagccaacagtaggcgcgtgagagcgcgtacctactcataaatatatggtactttaaaccggaaaaaataacaagagcagcagagctcccaaaaactgaacttttattatgtaaagcgtagaaatgagacaacaaaatcttatcaaacattaattattagttctttcctgtccatcaccatgctccggcaggtatgggaatacctggttacttctaacgggtcgggtcgggttagaataatcgggtgaacagtttgaatatataatcaaacatcaacctcttcaccaatctccgcctcaccggaatcacgcttccggatttttctccccaaaacaatgagttttcttcgacccgacccggatcatctttggagccgaatttttttgccttgtagtttttttgaggcagagccataactttttttttttaacgtatgagttattggtaatggtatgggtagaggcagagcattgttgactcttaatatactagttgagcacgtgatacgcacgtgattaagaaggtcactatattatatggaccatattgtcttaagatgttattttactatgaataatatattatagttaacagttaacaaatatggttagttggaaatatttactaaatcaaaataagtgaaatatattattgaattatattaataatatgcttagcaccttaaaggtatcccttagtgtttttttatattttatacataagataatataagtacacctaaactcttctgatcatactcaattgaaaaagtgtatcttttcgaccaacactactctctatttagttgttccttggcttgaagggccaagatgtaatttaaattaattttattgttagatataattaatttctcatatattaaatccacacacactccctcctacaaggctacaatatatcaaatgatcctatattactttttttctttcaataatatatatccaaaaatgaaaaatattattaaaaacatatataaatacaatatttaattaaaacccacctacaccacactccttccctcctaaatttgataaaaggcacacttagctaggaagcttcctagagggaacataactcaatggaatttacagtttgaaaaggcaaaaaagataaagttctttttgggatactttgtactatataacttgattgtttacactttacatagctagtcaaatgatgacccccaacatagctataagcctatatttgagcataaatatatataattgtctctaataataaacacgaacatcaataaattttgtggtttctttcagatgaagtaataaatttacttatattagattagattagattttgtattatattattttttatgtaagtttatgttaaattttaatttatattaaaataatatatattatattataataaaaattaatcctatatatatgtatgtatgtatgtatatatgtgtgccaccaaacttagtctttgagagggtgatgcctatgagtgttgagtgaggcttctaaaattagtcttcgtggtgttatttcccataaaagtaacatattgttccctcttacatgatcattatccaaatagtaagtagtaaagtacattagtatgaagaaaattaacttagtgctattgcatgtatggaattatataatgggaattgtgatgtaacataatagagcaatttgcggcgaaaccccccctatgttttgatttttatacacttaactcccttatctttatttttagtggcaaaacccccttattttttaatttttattacacttaacccccttatctttttt

SEQ ID NO: 302907 - DNA, 5851 bp, Cannabis indica
agggtcaaagtgtgacctttgaccacccaagttatggatattacatatctgccacggcctaaggctcgggtcgtgacataaagaatttatcttgaataactaagtgacactcatagtcacataagtaactataagtggcttgataaccctgcttgttcttcttggagatattggagaatcattagtggcttgatttggagaagttgcagcaagaatatcatctggtgttgctattcttgttcgtgtgtgacataatcttgatctttaatgtcagtagtattatcctacactaagtcgttagtaatagaatttctaggatcaattataggtaatcatggacaggggtaagagagatattagaagaaagaaacaccatagaagagaaaggatcagtattgttaatgttggtattaagtttatgaaaaagataatgttttcatgaaagacaatagtcctagatacaaaaaaaattttagtgtttatatcgtatagtttatatcctttgataccatgcgagtgccctataaagacacatgatatagctcttaaggtaaatttagttctttgtgcaacaagagtagatgcaaacacaagacaactaaagtttttgaaaccagtatagttaggaggatgatcaaacataagttcatacagagtgttgtcgttgaggttaggtgtaggtgtacagttgataaggaaaacaaccatcattacacaatctgtccagaattatgtaggtaacttttcttgaaaatacaaggcacgaccatatttaaaaggtgttgatgcttcctttctgctacaacattttgttcgggatattttacacaagtaaagccatgcattataccattttgtaaaaataagtctttaacacgtagttcaggagcattgttagatctgaatttcttaaagacacatttaaatttagttttaacataggataagaatgtaggtataatggttaaaacatcaaattttttttgtagcaaatatccaagtaaatctagaataatcaaccaaagtaaaaaatacatgtgatttgaatgtgagggaatgtgatagggttcccaaatatcacagtgtatcaaatcaaacttttgaggagcaaagttattattacaaggaaaggataatttcttttgtttagctaaatgtaatgacctcttagctttattttgagaatttgcatataattagggcatattgtcagaaataggctttaaattatcatttttgcaattgcagagatatatttgaattctaagtgtattaattatgttatatataaaattttatgtttttcatattatatgtccggtaacagtggaatgcgatgtttagcctataaaagtcacttagatatggtatagtatcttagaaatagcaggacaatataattagatatttgaaatatcgggattactcagagttatagttttggatcattttatccttaagtgtgtaggttatttcttagtgaagtaagggtaaaaggaacttttacccttttcttgtctttagtgacttagtggaagtttaatgtttctttttatgtttaataagctgaagtaaagctaattaagtcacacttagccaaaaaaaaaaaatagaaattcaagtctctttttctccctttttttgttcggccacaaccaagaccaagaaaccctagattccttcttcaattcagactaaattcaagggaaatttagtaggaagctaggagttttcatagctaagctaaggtaagatctttaccctttgttttcattggttaaatactaggtttttacttgcaattttaagtttgagttgctgcttattttggggttgcttaaaattattttcttgagttatacttgagttattcttgatgatttatgctggtttttatgcttgttgttgagaaagaccaaagcttgagcttttaagcttaaactaaggtctttaatgataacattggattcattggttagatgatacacaattctattgaattatgttggttatgtcccaaataggtgttctggagcttattaaaagatttaggatagttttgtgtgtcaaatgaggttctttaaaaatttgtagttaaaaatggcaggtcgtttcttagcactcaagaccagggaaagcggcttgccattttttggggtaattttcctgaactcttatttttcggtatggttgcacctattaaaaattcgcattccaatgttgccaggcataaaacatgcaaaaatataaaatttcatatatagcataaataacacacctataatttaaataaatcttcataaattaataaatcatatttagaaatctaatttcataattaagccctaattacctgctaatttatcatattaaaattaagcgatctttacattcacactatttgtcaataggaaaacttttaattttgagtttagatccctaaaaagtgatttagcgtatcacttgtcagctttacgtatattgtgacttgggggcctataaattgccaagtagcaatttttactcaggttgaccggcacatctgaattcagaatcaaggtaagactagtataatagttgcatatgtggttatatatttagcgtgcatgttttatgattgcctaatagataacatatcagtaagagcgatattagtgtacatagagttacactgaataccgacggatatatgtttggcgaagtacggattgatgctatcacattagtacgactagagtaccgagtataggctgatgttatggttaatcgtgttgtcgtatgaacgttccagaattagtacatgttggacgcgagatagggttgcaattaggtgtatgggtgtctgattataatctgatttatgtttatgttatgattatgcttttcttactgagtctgtcgacttacatatatggtttatatgtgtaggtaaaggaaaagtaaaggctgaacagtagtgagctcgagctagtgaagattttacatattgggacagttagacctggagtgtttgatcttcaagacaacagtctttattttgatagtcgctaggcaacaacttttgtaactatagcactttgtaaaacttttgtaactgatcacgggatctcgaattatgtatttatataagtttcaatttaattgtgaattctttttaattgttcacattttcctttaaaccctttaattagtataggaatacacagtaatataaaatcatgataacgtgcctaaactagtagggtgttacactaaaggacaaatgtaacaagctttagtatgtgtaatgtatcaaaattgcaactgagtttattgctaagtaaagatagatgcttctgtgaggggtggctgagccttgagtgccaaacatcagcaggaatagtaagaatatgagcaacattaggtgtcagatccaacatgcatagagcccatttgccattcactttcttgttgtgaatttcctggatacaaaacttgttagaagtgaagtttacagtgatggaatcattaaaagacaacttattgaaataatgttaaatttaaaattagccacatatagtacatctttgaggattggattatttatggcaatagagccactatgatagacaacaaaataattattattaggaagaatgagtttagttgcagtaacaggacacgtgaattgaaaaaatttagcatcattacatatatgcctagtttctctagagtcaagaatctaagatttattacaggatgtaacattatgacatgttaaaacgatacctgagttacctgatgaagaacataaatcaatgacagtcgcacccgattgctggttggaaagaaggttaagaagttgatggtattaagtagcatttaactgaggaagtagagtttgattttctttagggctggtattgatctctgtgctagtttaaacttgattggcaacaactttttttggtttattcttgttaaaaccaggaggatatccatgtattttaaaatatctttcaatggtgtggccaagaatgttacaatgggtgaaaagaggcttatttcttttaggttgattagtcttggtcccttgctgatctggtttattggtaccacctttgttaccatgaaaagcaaaggccatgttggcattgggattaggtattgcactagagtttctcttttgattttcttcttctgtaacaaggtggagcacacgattgacttttggaagaggatccattaacaagatactaccatgtacttgggagaacggatttgacaatcccatgagaataaaaatgatgtactccatatggtggtgttcttggaacttctttacaccttcacagtacaacaattacaagtacaagaaggctcgaaagttcttcccaaatgattttaagtctagtaaatacatgctaacattttggttgtcatatttcgaattcatgagatttgcctaagattgtatatatgtggcccgtttctctgatgaaaacgaacctttaaatcagtccagatagcagtagttgattcatcataaagtatactaaaaaaattcctttaaaacagaattaagaatctaagaaatgacaatgttgttacttttaacccaagcattatagaggatatagtcaaaaggagagggttttggaatataactatcaagaaagcccaacttatttttgacagaaatggaaagctgcatccagttaataattaagagacaataacattacctggattatctctatggtgaaaataatacgaattcgtgggatcttcaagtgggctcttcacatttgccatctgaagactcagatttccttgtgtaatttgaatctgagtagttgagagagtagattctcttattcttgccagagacgagacttgatcattacttgacatggtagaagatcaactggaatgaatcgcagaacaataagatagatgatgttgagataaaaaacttgggaagaagaaaaagaatagagaagaaggaagcaacaatgtcttcactagagcaaggagcatgatgagaaagcatggaagaagaaattagattgattaaggaaagcatctctttcccgctgtgataccatattgcacaaaagaaaaaaaataagaaatctatgtattgaattgaatgaataaattatagaaagagtacgactatatatataggtaaagtaaactagttaattctaactaaacttccaagaatagaactaacctaccagattaatacagttaggagttggttaattgaatgaagttaattaactcaatataatagacataacaaactgatcactaactaatactattacattagaaattctgttatgtatattaaaattattcattttaaatctttaatgttgtatacacaaaatatatacgtatttttattgggtaaaacagagtgggatgtttgtagagtgagataagagtgttctaaagagactatcacatgcattgatcattttaaagattttcttctatgtttcagattgattaaagatggtatatatttgctcatagagaaaccattaatgatggaggtatttgtgttttctaactcaaggtatactttgatatcattattacaagattgtttggcgagcttaatcttagagatattgtataatttgtttatggtactcacaaagatctacagtacaagattgtttcaaacaaattgtgaaagatcagctgaaactaggcctagtagttaattgcaaaacttgattgaatatgtcctaccttttttttttgctttagtaatagtttattttcaaaaaatcattatatttcttgaaaattttatttgagtttgcggtaatatgcaacatatcttttatag

SEQ ID NO: 302908 - DNA, 4725 bp, Cannabis indica
tttttttacaaattagacaaaaatccttaaatttaacaatccaatagttcggggaaaatttttaacggcaaaaaaaattcagggagcacgatttagtacatatcaaaatttaggaggaacaattactaattagcgaaaaaaattctaataaaaaagttataaatagcttataacagtaaaaaagtaacaattataaaagaacaatacctcgtgtaaaactttttttttcttatgagaaagtggaacctttccacccaaaattctgatttttgagctggtttgagagctatttttttttttttctttatatatataaaatttcatttttaagtaaaagaaaatgattccagacaaggcacaatccaaattattgtctcgccgaatcgagttttttatttgccagacagttctctttatttcatacaaagtgaaataccaaaattattcaaaaatggagatgcggggtatcgatccccgtacctctcgcatgctaagcgagcgctctaccatctgagctacatccccatttaatggttatatatgattttattaatactaaaactaaaatgtaaaacaaaaccatctctcccctcatctaatttatgctgtgctattctaataatggtcccaacaaccaaccccactctatattgtattttatatccatgtatcaatctgaccactgttcatatccttccttacagaaatttgtgtttcattataataaggttttcttagcccggcccgtacaccaatcattttgccgtggtatgccgggaaactatattcctactatctctcttgcaacttgcactttatcgtgtacaatcaatacgaaaatcacaaataaatatctattaactatcagcttaaagtgcaatggttagtttgagactcttttttttggctcgttcaacatgtcatgtcatctcatgcaggcctctaaaagtctaattaatgactaacgtccaagaacttttggcacatgcattttcatgcaaaattatctccaccaaatgactatataaacacaccgtcgtcgtcatcatcattatcatcattcatcatctatatgtatataaattattagaaaatattttcattaattagctaaaagtgatcattattagatacatgatgatacatacatataaattttagaatattattagagatatcaacaaaaattaatttccttggattatttattctttaattagtaataaataccaagattattaatcgctagatctctactatatttattaagtgtgaaagcttgttgatatgtacttgtaacgagaagcccaaaagagatagtgcaagaaattgagtgcactaaggatacaacaaaaaaccagtaaaacctctcaaggtaataatgattcaaattcgcaccagagagccatggagaaccgtgacgatatttacttgtgactccattaacgactgttacgagaactgaactgagatagtatcccatagcgagtgatgcccacgagagagccgtggccagagatctcatccccgaaggagcttcggtgaagaaaaactccatcattccagctaaagtaaagagatcagccgaacccagaaacaaatactgtaatgccacccaaagaaaagtaatgggcaaaggtttgtgaatcgaatctacaagcccggattgaattgccacgttctttcgcttgatttcgactagagcagcaaccgccatggccaagatcgaaagaactagccctgttccgatgcgctggaggtgagtgattcccatttcggttttggttagttttctgaaacatggtgtgaggatgtggttgtatacaggggcgaggatcatgatgaagaggacggggaagactgggagtgaggctggtgggattttgaaggagccgagcttggtgttcatggtggctgcttgttggactgagaaggtggagagttgagctaggcaacagttgagcattattgctgacatgaaaattggtagaattcttatcactatcttcacatcttcgacttgttttattgtgcattgtagatttggatgagaagggttgtgtttcaaagctctgtttaggaacttaaggctctctgtttgagttgagatgtttttgttggtagtgttctctttatttccttcgttggtttcgattgtgttcatgctcatgatggcattgtttgagtttcggggtttgatggaattgcatatagctgccaccagaacctgttttacaaaatgactaagttagtttcgtttataaaaaaaaaaggaaaatactttgggtttttgagtgattattacttgtatgatgttttagtaaattttggtcaaaataatttgttatttttcccctcataaaaataatcatattaagtaaggatatattaccttcaacatggttgtgatagggcttcctgttggaactttgctcctgtaaaatggggagcctaggaggaaaagtggaatagatacaagtattgttacagtggcagtcccgaaaccccattgccaacctttgttatcttcaatccaaacgacccaagtcactgcaattagagctccacatgagaggcagaagataaaatagttgaagaattctgatctttgcttccttccttgtggggtactttcatcgaactgctgagccccatgtggaggaagtgagccttttattcccccaactccaagtgccaccaaataaaggcctaagaacaacatcactctttcccactcatcaacttcctggcaatgactgaagaagctttttactgaagcacatgttgagggcttcagagatggtatttgagcttgaattgtgagtattaacagtccctgtttcaattcatcaaagttgtttttagtgtcagataacatttgacatattggtagtttcatgctagctagcttgtaaacgttaggattggtcaaatttattagttatatatgtttgtctttaaccaacttgattatttggtattatcctaagctttcttttcttcacttccactccactagctcaagatgtcaacttagcatgatattgtcttctttagtagttagtgggacgggactagaattctacatgtgggacaagacaggtcatacccacaaattctgattggccaatttctactagtactatcatttggctgcattcaataccttcctactggtcccaaacttttaatttggaaaatgacagtaatatgatagtgatgccaggaaggattgctatcagatatagtgccaaatttaatttgtatcatatttctacagtatgtctttcactaccagcatacctcaaccataaaattgttataaccaaccgtccatggataaattgttttgttgtatgcttattcatctttattatgaaagaggactcctaccatttgcttaataatactgttctcgaatgagacctcttattatagttaatggctaactaataaatcttgtctaacacatgccacaaatctcctgtatcacatgcaacttggttttgaaacattcttatattaacaatatcatgcttgatatagtattaccattttgtattttctggatatgaaagtgaattgagaaaaaaaataataataataaaagcaatacaagttcaatcctttgtttgttactcaccataaactcaattccagcacttatcagatagattgagtaagtggtgaagaaagcatctgctagaaagccaccaaggagagcaaggaggaaggctgtgcccatgaaattggtcaccgttgtggcagcagaggaaggagaaaagtgcataaaccttgacaggtatagcacgaggttgcttgcattagccaagaatgctaagttctccaatatctctacagctgtggttggtttgtaacatagcaaagtgagtaaacttatgctacaaatgctaaacacactacacatgcagaaaagaaaagaaagaaagaaaaataaagaatggttctaggatgatatgaggttcactaacctaacacaaaggaggctgcagccatgccaccatgatggccttttaaggcaggtctgtttctccaatccacaaagccttcccatgtgtttgactggtgtgcctcgatatcctacattcatagtcattttgagatgaagattactgtttattcaataaaattatagtatgagaactacaaaaattaaattattaggtgtaaccccaccatatgtttaagacctcttttgaatccctagttatggaatgtctttgacgagagataaaatattctcttttgaggtgtgagggaggtaattttgggagatgatggactggtttgagaagaatttggttgagaaataattaaatcacattgagattgagcaatggagtggtatttatagattcataaaacagtggtccaaacatattttagaatgatctaggctccatgaaaatgactagtcattctacaagctctatttaaaaatttaaatcattgtgttttgacaggttttaccccacaataaaatagagaaaataaattaagggaagtatttaaagaagattcagagagtctaatggagaaccaaattgttatttatatgttctttacaaaaaagatgcatgattaggaatgatgcagagagagtaaaatgaagaatcaaatgataccattaataaaacttttactgggttgtgataccattaataaaacttttactgggttggtttggtatgccgcattagaccg

SEQ ID NO: 302909 - DNA, 7645 bp, Cannabis indica
aatcacgtaatacgcctatgctagttagggtgttacaatccaggtcttagaatattcttcacgtgtcactcagaagaatgtcgtgttactttgtgtggaaattaggataacaggtccaatctagtcaaataaatactagatttaaaatattggatggatatgatccgatccaatctaagaaaactaggtctaaaatattgtataaatctgaaccaattgaatagatatatatgaaatatatccaatggatgttagatcaatcatatgactgaaattaattggattggatcaaatctaaaatctaatatataattagatcagatctggataggtctaaaggctaatgaacacctccagactaaatcctatgactagattgagtgaaatgttttaagaatttctttggcaaagatgagatttgataggaggttggttcaattgattttgatttgtgtttcttctatcaggtataaagtggtcagtggaatctattgttccttatcgaggcttatgatacggggaccctttatctccttatttgttgattttgtgtgttgatggtttttttgctcttatgaagaactttaaagcaaaatgtttgctccaggtgtgtggtagcttgtagtgctcttgttgtgtcttacatgctatttgctgatgacaactacttatattttcgagttatagaagatgaagattaaaatgttttagaattgctcaatgtgctcaaacatgcctctaatcagaaaattattcttcaaaagtctttcattttctttagtactaactcgaagctaagggttaggtatcatgtttgtaaagacttaggattgatgcttgtcgcaaatgctaacaatacaaacttaggtttgccaagcatgatgagatttaataaattaacaatcttgggtttccttaagttaaaaaattgtaaataagttcaagtgtgggatggtagacttttgtctagagcatgttaagagatttttttaaagaagatggcttaatctacttcttattatgccatatgggagttttaattattgtaagggaactctaaagacatggaaagaatgatgaataatttttgctgaaaatcatcttcttcccaagtcaaaggcattcggtggatgagtagatcagccttttaagtataagcataaaataaaaatgtactagttttagaagtattcataactttaatcttgctctaacatagaaagaagggttcaagctacttgtgcattacgttagggatctttagtaattggtttatcctagtagaaactcttaaaggtcatattggctccaatttgagttttatttgaataagtgttttggaagcttaaagttgggtgaatgaaggtctacatctattggaaaattgtatcatgagagggtgtgactatttgaatgagccttggttacttgataatattaacccttaaaagatttgtaggtattttgggctggtgaattttaagattattagtttaatgaaagtggggttgcgggagtagcagatgtgttggttaaaaaaatcaaaggttggtgttgggtattcctttaagtagttagttaatgggttttttcttcttaagttgttgggtgtgtactctattaacaatttttaccagattttgcaagaattaattggtaaaggaaatatggaggacaagtctaggtttcaaataaaattttggaacttaaaactcctccaaaatgcaagaatttaactttgaaagcttcttcaagttgtttacctattgaaatgtagttgcaaactaggcgaatggaggtcaacagtgtgtgtcctgtgtgtcatgatgggggaagaaactgttatcctagtcttttgcgatgtacttttctgctctctgttatttatgcatctcatattggtatttctctgggctgaccgcaagctggtttggtgatgttcaagaggagcttgataaggagtttgtacttgtctttatggagagctcaccttcctgcttcccaaaggtctgtctttttggaccatgtgtctcgcaattattactgattaaacccattattttgtcaaataataatttgagccctatatttttttttttaaatggtacaaaagaaaaacaaaactcctcacctcaattttttgtaaaaattgaacatcataataacctgattggaggtgttgtgactaggttagttacatttttttgcaactattcatgcaaaaaatggctttatgttgattatattagaaaaatgacaaaaactgatattagggtattactttctactattttgaaaatacagaatttaaattaccattaacaaaactaaaagtttggttgataatattcataaaatacaaaatttacaataatatttactatattaatttgatcccaatattttatttaatttatcatttggcctgtgcacaagacttaaggagtaagagattagctaagccagttgtttacacttttataaaatttcatgatatccttctattttagaataaagaatccattgcccaaatttatcaataattactacaatatcaagtaattttgtcatataattaatcccacctaaatgtatttacaagtgagagttgttttttcaacacagtcgcatctctttttagaagatgatattatttgcgcccgcccaatatttcaaaaacatttctctctttacaaagcctttacttttataccaaatgacgaaaagtgaatatatttaaaataatattaattataatattattaattactaatattcaagctcatcctaatttgttgaagtttattttagtagttatttttgtgtggttgcaaaaagtaaacatccccctttagttttcttctactattggaccctatattgaaagtgccctcatatatatttaccatgtctaaatatgtcaaaatccttatcataagacacacatttatacacacatttatgtatattttcagacaaacaataatttttaaaagataaaagcattctaagataatttcatcaatttataagtttcaaatcagtgaactttttttttggtcaatcggatgagtatatcttccactaaacaaagttttacatcctagtagcatcaacctgccactttttacaattgttaacaattgttcaaaccattctaaattctttcttgtcacttttttaggcattacactctgaatactactcttagcatcatatttgattctttttaccaattgtataaatttttatattttaaaaagcttcatccctgcaccaccatatgtggtatgttatcactgctaatgttgctgaaaaaaaattggcactgaaatttgttcattttttatttatgcagccactgtagaagcctcaaaatcgatactagtgtagttgcccaattcagccacctttttatctcaaccaatccttggaaactcgagtgacaattgaagaataaatgctctctaatttctttactcaatccacaaattaggcattcctcatctaaacatatattgtatttgaataattttgatttaaatctcaatctatccaaaatcaaaagccacaagatgaatctatgtattgaactttttatttcaaatattttataaaactcatggcatatataattattatatgccaatagaaattaacattattgtgccaatattattatattattcaacgtttaattaaaaataactctttttagcgatagccctaaccctaacactcctcttcttaacacaagaaccagtcacaagcttattattattggacaacatcaacaatgtggatgaagcttccatctccataactctctctttcaccttgtcatcaagctcatccaaactctctttaaacttctcaagttcttcgaaaccgagctcatcaatcttcttgcatccgcgaccaatgacaagccctttccctttggctatttccccatcaatggcttcaccacggagcttctcctcgctcagctgcttcacatgattgtcatgaagctcattcatcgtctcttcataagcttttgctccaacggacgagttattcgccattttcttgtaaagattgggttttagaaacctatctatgatgtatctcacattagggtttccaaaagagtatggtttgccaccaggagagaagacgataatcccaacctcagcgccacacagtgtggcgagctcattggctttcttgaaaaggccggttcgacgcttcgagaaggttacttgacgacaactgctgtctttcaccatttccatctcaatctttcttcgccccattaattatttttttcttttcgatctttcctgtttggttgcctagaaagttttcttttgtttctaggaaaataagaggttttgagtgagtgagtgaatgagagtgagggtgaggtgaatataaagagaattatttatacacctctttatagggtttccgaaatcgttttgcttaccttttgtttctaatactagattttaatattattttaatttttataatttaattttatgttttttttataaatttttaaatttattgtctaagatggaaggaatttttttcttttttctttccatttgttgattttgagtatcatttgtagataaccgttgcaaaattaataaaattagtcacacaaacttaatacatatctatttgtaaaataaataaataaataaacaaacatctttatttgagatgagtttcacttattaaaagtctcttgttacataagtgtgtattaagtttgtgtataatttatacttgtgtttcttattacctacactaattacacatatatatactcataattaatagaatgagaaaaaatgtatgtgtgtatatatatattagacacttattagcaatggtaaatatcccacaatatacactattatatgccatttttacacataaataaataatgctataaaatcatgagatatttacttgtgacaattttaaataagagtaatgctagagacatacatacatattgtatatagaaggatttgcatttagtttttaccttgcataattatatattggaaacatgttttacttttaattttaattgtatgattgagattaattatgcatttttatatgtagagatatatacatgtaatttgaatatgttacaatcattatttatctataaaaaataaattactacaattattttcgctttgtgactattgtgtaagtttgttttggtttcaatgaagaggtttaaaagtaatcaatattagtaaaactataatttttgtctaattccgtttataccgacttagtttttgaatttattaaaagaaaatagaagtaactgatactaaatgtttctatatagatcaattgatttagaatcttttaatacattaacgaaataatttggactcataaaactggacaaaaattacaattttactaatatagagtacttgtgctgttaaaaaaatatagattcataccgattagaaagtcaaaactttagtacttttgtcgcaactatctctttccaaatcaaaattaagcttttttgttttgttttgttttattttgggtgtgagagtactagtatcactacaaaaaaaatcatatgtgataactttttaattacaataaaattacttgtaatcaaaacatattatttaattatcaatagtcattgattaatcacaattttttcatttgtaacaaaaatattgttgtgtatatataatcttctttatatatatatatatatataaagttcttaatttggcattagttggataatttcataattaatatatgtgcacggctggttttttattttttttatttattttattttctatgtatataaaattaacatatatagacataagaaaaagttagtaaattattagggtttatctgaggaaggtaacacctgcatagttgttttaggtatattttgtggtgataaaaaataattataaaaggaagaaagaattgtatgtatttatataatatcctatttccattattgctatgtaattattattacaaaagataagactatagtgcacgtacgttatataacaattaatgtatatatatataaatattatatatattgtttacaattatagctaggttatatatatattccatgtataattcctactttacatatatatgtgtatatgagctgtatattcttcttataacatataactgatgataattaatgaccataaatataatttgtaattattacaaattcacaatttgcatgcccatttgtattttattttaagtatttatttattactctcttttgggtattatttatatatatatttatataatgaatcacacgtgaatactcacgcacatgcatacatttatgtatatattaatttataacagtccaaagaaatattcaaaaactgtattttttggtaataaaatcattaaaatcgtaaaatattcaaaattccgtacaatatttttataatttttgtgtatttaagaaataattccttactataatctatatttatatatttatttgagtcggggtctggaataagacgagctaagcttgtgtctaaggtccgaccatctagctcatgagcccaaataaatatttttttttcttaaaaatatacatatatttcttttaataatttttaaaaatatcacacatctttttaataaaaagcccatatgtaactgagggcccaaataaatattttcttcttaaaaatatatatttttaatcatttttaaaaataccatatgttttttttaataaatgacctaatagtatatttttaaaatcttgatatatttctaaaattttatacatataagtgctactataaaattggggccctaaactagggactaccttgcttatagtaaaactctactagggactactctaaatattgtttttagactcctctatatcaaggatagaaaattttctttcgatttggttattttattttatttaattttactttaaattttttatcattgcttttagctgatattgaattatttagtgtaaaaatctacgtggatacgaactttgatacttgtccttgtattacttgtttgtgattgtatacaattgcgcaattataaatcaataaaattttcacaacaaatactttagttgaacactaacgagtgtaagagtaaagaaaaaacttattaaaattttccctaaacagaagaacattttcaatttttgaattaaggggtcatttaatcaaatttaacgtgaaaccaatcttcatattcatgtcttagtagtacgaattcgatgtgaccagtgagaaaaaatattctaagatgggtccgggccacatttcacaaaaggaaccacactatcaaaaatgtgagattttaactgtctcaattaaaatgattgttagtgtggttaattaaaaactactttttctctcaaagtgaacaatagaaaactgatgcacatcggtcttggctttgtccttgtgaaatttcacatttttgagatgtgtagagtgattttcaattagggggccatttaaacaaatttaaaccaaaaaccaatcttcatattcacgtcttagtagtacaaattcgttgtgactagtggaaaaataat

SEQ ID NO: 302910 - DNA, 592 bp, Cannabis indica
gacctggaatggaagtcaggttagatggaaagagaaagacacatgaatctgctttgttgaaatagactgctcaaatctgtatttatttattgattgttttccctcttttttcttctctcttttaatcccatgtagttttatttatactataatcctccatctcctcctacttttatgattactactactacatgtaatttccaatgacattggcaactcaactcatgtgttaaatgttttaacatttatggtcttacaaggcaagagtgctttacttaccttgcatgtgaatgtactaattgatctgttctaaatatataaatatatatatataaatatatatatatatatatatttatgttgtttgaagtttcttgattggacttgagagcataatttaacttgatttgttgtattgtatgctgtatgtatgtgttcatggtatttttttgagaggtaaatgcttgagtcataagatatttacgaggattatatctaccgttttctttaataataccaacctttcgggggtaagttgaaaaatactatttttattaattaattgatcaaatttacctttaattttatattt

SEQ ID NO: 302911 - DNA, 3159 bp, Cannabis indica
tttttattataagtttgtcatatgatctttttatatggtcaaaattggatttataaattttttttattataaattttacttttatataatcaaaattaattttctaatgaagaaattaatttcttaatgaaaccactagtttcataatgaggaaactaatttcttgatgaaaaaattaatttcttgatgaagaatctttggtgattgattttgatcgtatgagaaactaagcaatttgaatagcaggagagagaaaaaatcttgtatggctggagagagtagtttgatttttgtgtttttcgagcacttttgttttactggaatggtgttgcttcattttttttttattgtgttttatctttttttttttattataagttttgtcatattatcttttaatagggtcaaaattagatttataggttttttttattataaattttacttttatatgatcaaaaccaattttctgatgaataaactagtttaccaattttttaattaaaaaactaatttcttgatgaaaaatcagtttcttgatgaatactcatatattttgaaaaattgattatctttttaaatattttttttttatatagaattttctatttaaatactcatatatttagttagtttggttataaaatgtcatatttagtgatattaattttacatgccatatatattaaaacttctatctatttttccatatttttgtaaatatgcttaaaaagaattacactaaaataagtctaattataagaaaacataatgatatatacattttggaataatcaattttattacccacaaacttctgttaccaagtaaggacgcaaatctattggaacagactctaaaattgaaacgaccactagaatataacagcaatcttagtaaaattattgactagtatatcatcatatcgtttaataaaaaaaagataatactatttaaactagcaagtaaattattataattttgagtgattagaccaaataaaaatacgatgctcaaagaacttcataaatcttacaccacacaaagtcattaataattgattaatagtttcaaaattttaaatttaaaattaggaaattttttaaaaataccattcttttttgttttatataattatacggcctaaaatttttaattacaaaaataatcttataaagttttaacattacaaaaatagactttagtaacaattaaaaaaaataactaaaaaaacaactagaaatcactcaggacaactataaatcaaccataaacaacatcatgacaactataatgcaactataaataaattataaaacaaccaaaaaatggtttattatttttaatgaagaagtatttttgtatataaaaaagtttgaagagtaaaataaaaaaaaattcgatattaacgtatttttgtaattttttttttcaaaatttttgtatttattatgtaaatttttcttaaaaattaattaaattgtaacgttggcaattagtagtgaatattagtgctcaaattgattgaatgaagaagtttttttttcctaaaaatatttttcaatgtatatcactcatattatataaaaaaaattgtatattacctttaaaatgtaagcctgtgaattcttaggcaattgcttaagttgtcttatgcttaagccggtctgagtgagaaatgtgtaactcttatattgtagacttttttttttctattttaatattttgaaattaattttttttttttttgttatatttacgaaaatttacataacaaaatttaaattactctaaatttaagcaattagcatagtaactaccgaaacaacttaaatttcgagactagagagatttgtaaatcggagccaaagtgtgtcaagtttggcaggaaattattaacagttagaaagcatagtgggccaggtttggctcccaaattatggggagatagtagtgaagttcaaaccagtttcaaaagttccaaacacaaagtttgaatgagatcactatttggtaatataataaggaactttctcaagtaagtccacatcatttaataattaaaaggaaatacaaatcaagtttgttattgatgtattttcgccgcacccaacggaggagaaaagtccatataatatttcattattacttaacggaaagcgtaagtgctaaagagtaccacgtttccactcctaaacaaaaataatgataacaagtttaaatcatagtttttaattgagacaaaataataagtaagtaaaaagaaaatataattggacacgattttgtcggtgatgtactttcacgtattctgtggtatattagatgagtctcaacatacgttacgattttttaacttaactaccccatctaacggctgtggtacatcacgtgatacatttcgtaaaagtacatcacgaggacaaaatcgtgttcctataattgtatatgacgcaacaatgtttaaaaatctaacacttatatgctgattatttttaattatttatttttatgttgtaagccgcacaagagtattattattattttttttttttaaaaatagattttattaccaagacaaatcgtcaaacattgtagacataaatttatgaatattacttctattgaaaataagaagctctaacaaatttatgagctactttgttaataaaacgatatacaaataataaagtaactccactcatacaatcaaataaatatttactgtcattaacaactaaatttgttttgtttatataagaatgtttgttttgttttttatatgtaaatttggataattcttaaatacttagaataattttacaataatattgatgtaatacataaggatgcacacacgcggggaaattggtgggaagtgctccccctgtccgcatccctacaccaccaggaacaggggaatcccataatggggtagggacagggctgtgaattacctaatataaaaataaagtttgtttaaaaattcaaatgtataaaaatattaaattacatatgaatttaaatattacacattacacattatttattattcaatacactaattattatacaaaacataacttaaaaaatataaaaagggtaaataccattttggaccatctgttttacaaaagttaccaattggaccctgtgttt

SEQ ID NO: 302912 - DNA, 1790 bp, Cannabis indica
tagtatgtaagactgtgaagaatccaaacaattgaaggagtttcaggcccagatcttggtgatactttgcgacaaaaaggatacaagggttagaggtctgagcggaaggagtcatttaattccgctgcaactaatgtaaggtttctcatactttttatgtgtttattttcatcgttttagaaattcatatttaggttctaaaatcatatttgttagtaaatctagatcctggtaaaacatattctaatacataacccattaaaacttggtagctatatgtttttaattatgctataaatcaagaattactttgaatattacttctaagtgactgtgaataggtgcacattcatatcgagaaggataaaacaaaatagaaagattttttggcataaaacagtcttgatttgatctcttcaaaatcaaaaccactataataattttccctaaattcttacttttcactccatgaaaattcgttcattctcagtgttacaacaaaaatgatggaagtggttccgtacatatatatatatacacatattaagaaatgcatcaaacctaaagaaaaaaaaatctattagaaaacccaaaaatagaaaatctatcaggaaacccaaaggtgaaatgcttgagaataacttcatagctatcagaaaaatactacctcaaccttacgccacttgaagaaaaaaaaagttagttaataactaatgagaagagaaaaataccagtcacagttccgatcacctacgctggcttctgtccggtacgtcgtctgctcaaccgcaatgacgaaggggcttttgtgagactttgttatttttataatcagtacaaaagacaataaatcaatcacataaatgagtataaatttagcacccaaaccaccatcagtgaatattctccaaaatcattcagtatccaccactattattcaacaataactcaacaagaaaattgattttctatcatcaaaattcacatgtattccaagaaaatctccaaataaattccaaagtaactccgcgaatgaaatctcaattcaagaataacaataaaatattcatgcatggaaaaaaaaaaaaaaactgatctaggaattatgaacaacagatacttaagacagtgagtggaactatatttatatagacatgtacatgaaaattgattgctaaatttagagacaaagcttggctgtcatggtctttgacttggagcaatcgacgactaggcgctcgacacacttggagacgacgaagctgctacagtgctgatagaaaatgcacctcccgactaagattatcttgacaaataatgggtgctacgacatctaatggccacatctcgacaaaggaaataaaatatggcaccagattggaacatcaacagcttgtgatctatcgtgggtcagtagcatattgacggtgtaaaaaaaattcgaagcctccatacttttctagtttatatatgcacaaaggaactaggatgaagagaatcctaggtgattggtatgtgggttctatttcttgttcttgggaacaataaacggacctgcggaataagtgagtgagtaagtcgagatgtgataattaatctttttagccctatatccaacggttttgaaccgtcgggcaaagtatgggccactgtttaaaactgtggctaatactttgccgatggttcaaaatcattgggtatagtgcattattttaaaaaaaaaaaatcctgcacttttaaatcgtcgcctaatttatacaagtgttaaaaattgtcgcctatagtatagt

SEQ ID NO: 302913 - DNA, 1866 bp, Cannabis indica
aatatggtagttcttcttcttctcaagcttttctaactgaaattgattgtccttatgatcctcaggcattaacaactaccatgctacctgatattggtgacgatgatctctggtatgtggacactggagctacgaatcatgtcagttgtggcactaccaccttggactcggctacaccctaccacgacacagagaccttggttgttggtaatggtaagcaattactcatttcccatattggtcagtccactattccttcctcaatcaattcttctcctttgcacttacacaatatgttacatgtgccctctattaagaaaaaccttgttagtgtttcccaactcactaatgataatgatgtctatcttgaattccacaaatcttgttgttttgtcaaggacaagcaaacggggacagtgcttcttaaaggcaaagaaaaagatggtttataccaggttggggatgcctccagtccagctatacagtgtcaccttactactacttctagggaaaacaattcttgttgtaattgtgtttgtcattgtcattctagtgtaatatctaaatcttgtaatgttcaagaaatgaataaaaacacttttgacttctctgtttctccacaagccttttttgtttctaagtttaatgatattaatttttggcactctaaacttggtcacccagcagagaatactttagtcaaactcttaccacacattccctatactggcttattaaaggcattacagttttgtaatgcttgccatcaaggcaaaagtcataagcttcctttctctatatcacatgaccgagccacacaacctttaacactaattcacacggatttatggggcccctctcatattgtgtctaaagatggatttaaatactatgtctattttcttgatgattacaatatgtattgctggattttccctttaacacaaaaaaaccaagcttttgatgtgtttatcaaatttaagagccttgtagaaaacatttaacttgcctatagaaattattcaagccgattgggaggtgaatatagaccttttgctcgcttcttagccgatcaagggatacattttcaacatccatgtccaaggacaagtgaacaaaatggccgtgctgagcgcaaacacaggcatattacagaaacgggtctcactttattagctcatgctggtcttagtattgagtattggtggtatgcaatggcttgtgcagtgttcacaattaacagacttcccactgctgtgattggaaacatcagtccttatgaatgtttgtttggaaaaaaaccagattatactatcttaaaatcctttggttgcagctgttatccacacttgagaccctataacactcataaacttgagttgagatctcatgaatgtctgtttttggggtactcctctcaccacaaaggctacttgttgaacatcctagtggacgtgtctatgtttcacgacatgtcactttcaatgaaggacactatcctgctttatccagcaactccccacaaaaccaggtacataatcaatattcatctccttgtttcagctttcaaacaaataatactccttcaagtactgactttggttttgtgaacactcattctatgaataatggtgcggctaccgagacaaatgacatgtcgattcctactatttaccccacacgagtgaccataccttctaccaccccttccactttaaacatagacacccgtacccactccccacctatcataccatcacatacaaatcctaaacccactacaacttgtgacagtcagtagtcccgtgatccgtaaggggaaacaccgggtaagttgtgcaatcccacaccgcctggggaaggtca

SEQ ID NO: 302914 - DNA, 1083 bp, Cannabis indica
tttgttgagcataactccattgattaagattacatctagctaatgccaaaatataacgagaaggcctagaaatacctttccaaacttggtcatttcgggcatgccaaatagcccagcagagcatgataaccaacctctgatcatcctcattccatcgaccagctgctgctacaaaccagctgccaaaagtttgatctgcagcagttcccgtcgacaaatcagcaacagtgcgccagagaacacgaccacagtgcatgagaagcagtttcaactgcattcaaacatctaggacaggtcctttgcacactcacatgtttagaaatgagttgcacttttgttggtaaacagttggtcaatgctctccaaacaagattaagtgcttatggtggcactttaatcttccaaaacctctgtcaaaaccgtgtatcaacatcaacaacactttcatttttctgatcttgctgaaatttataagctgaactaacagattactcccgcgacttatcaaagccccaataccatttatccacaccaaccgaattaaacaaaggaatactcaaaattatctcagcatctcttatgttgaaaacatcccttacaagttcttcgtcccacttcctatctcccaaaaccattagtgaatcaacatttttatcaacaatagcttgactcaccgtagttatatagggattagagctgtcctgaagccacaaatctttcagaatgcttacttccacaccaggtcctattgcaactcgacaacccgatttaaccaggtgcttttctcctaataaactacgccagataaaacttgggttaggaccaagttcagcttccaaaaacgaccccgtaggattgtaccttgccttaaacagtcagcctgccaacgattgaggacaaaccagcaacttccaacattgtttacccagtaaggcaatattaaaatccctgagatttcgaaaaccaaggcccccccgatcctttggaatgtacaaacggtcctaactcatccaatgtatacagttagcctttttatttgaagtacgccaccagaattacacattaactgctccatttcttgac

SEQ ID NO: 302915 - DNA, 3074 bp, Cannabis indica
ataaaatcacccatgtctccaatatcacttttctatttttctcttcctcattgaattgcattccttgtaaaaaagaaaatacatattttacgaagaatatttggttaatattaatttaatgaaaatagaaaaatagaaaatcattgttaaaatataaatttccaaaacaacttcatggccgcttcttagtgtataaacaatgatgttattttgctaattcctgtgggcgcatgtgcccctactgaatttgctccaaattgttttaatatccaaggaatcgttttaatcttgtaagcaatcacatacatttcaatagccaaggacaaaaattgagaagcaaaatgtgttcttatcattcctatcctatcctttgggcaatcaactctaccgaaaattgacttggttttcctattgagcctgctaactaggatttcaatttcacttacaagaatctaatatcagtattaaatgtctaaaattctaaccgaaaaacatgtaggaggaaaaaagacaagtaagatacgatacctgatagggacgaagggtagagagccggcgaacaagagaatcggcggaagagagagaattaggagtttagtgcgaatttcgagaaagaaacgataattttgggcgcaaatggaatcggagaggagaggaagagaagaattccagccccaaggcagggacgctatttttaagtttctttctttcctgtccacactcaagagaacgaaggtataagaaataaataaaatatttgcaaacttacacagatttttatatctatccaaaattctaccctgcacttcaacattcatatgcgtgctttttttttttttttttcttaccctcttttaattttaattatactccattttattaatttttattttatattaaatatatatattttttttatcaaaaagaaaataaatttcattatgaatgaacgagcaaatacaaacactaactatacaacacaaaccaccgaaactccaagcgagacagctccaacaaatcactcgactaattacatttgtaatttcctatctcttactcattgtaatcttcctattatttgcaattaatactctatagtattttttacatcattgacaatataagaaatcgatctagagtagccttcaaacacgcagcgattcttgttcacccagactcaaacctagaccccaaactcaaacttaagaccccgggcccgaaccctatatccagatccaggcttaggaccaggatccaaactcgaacccgagacttagaccaagaccgggacagacccaaaccctggacctagacccgaacctaaaccaagacccaagacccgaacctgggccggggatccaaacctgaacccaggaccggacccggacccaaactcaaactcagactaagaacggggacccagactcggacccgaaacggggacccagacccaaacccgagactcgagacccgaacccagaccctaactcagacccggacttaagactcggacctggacccaacccatagttggtgttagggtcgagtttattggaaatatattatctttacacaattattaatacaagtcaataccaaacatagtattttattaaataatactaatacaaaattaaaatagatataaaattataagtttagatataaatttaaaattctttaaaagaaacgggtaggatccgatctgatccgaataagtcgggtcggatttgatctgaataaaatcggtcgaatctaatccaatttaagtatttgatgtagtggggcggagcagggcgaatccgtacataatctggatcaagttagatcatagctagatcaaatccaacccaactcatttatactcctcactacgaaagagaaagaagtgaattatcatttaagtgttttaaagctttctattaagctcaatactcatctaaaataaaatggcaatttattatcctaccattgaacttaaaaacttacataaaactaacataagggaaaaatggacattatcataataatttccataaaaacataaattctaactatccataataaattttcattacctttaaaatactaatttatatcaatgtgaagttttgattaatccgtcgaatgttcactgttactaaatataaaatattaaatcacacccaaagcatatatagtacatacataatccaataaaatctttataattgagaaattataacatattaaatattttgaatgatttataatattgaatatattatttataatttaataataattactaattaatcattgatctccatgttttattacgagatcattataattatcctttcgttaaaatgatttcgtcatcaaaatctaacacaaataaatctaaatattgtgtcctcatgttagactttaacttgcaagtagcttcctcaaccttgatgtttctctaaaatacttcgaccaatgagatggtcttattttcattgatgataaatatataaaatattttgggtgctattacaatacatccctaaattgaagagtatactgatgcattttctattgtttcatcagtataatttttttttatggtcatgtacattataattatttaagacatcttccaaaattttaagaaatttagaataatttacaatacagaaataaacaagtcattcgtacaacagactatttgaatcattttttcggcacaatattttatttttaaattttttataattttacaggatgcctatgctacctataacttacacgattataaacaataaattggattaaaaattttgtgtaaaaggccaaaacaaataaaaagtgcattcctctaaaaaaataaataaataaataaaaagtgcattagtatatgtttttaaggggtgaaacataaaattttctaaatattatggttttttaatcattagcacatttggtgctaaattagcctcaatactaagatgtattgaattttagtaggaaaatttatatggtatactaacttttgtcatttttttacaaaaatactaccaggcgctattttttacttttttactgtattt

SEQ ID NO: 302916 - DNA, 1496 bp, Cannabis indica
gagagagagagagagagtagtagtaatagtagtagagaatagaaaagattagatggagagtgtgattatggaaagaaagatatgaatctatttatagtaaaattttcccaccaaattgggatgtcaaccctttaatttgttaagtgtgatttactttgttttctttcccttttccttttctatgaagtagccgttaaggtgttggacggtgacacattacaattttaaatttataataaaaggtcaatgctttttgaggtgcattactattggtagcccacaacaaaagcattctctttcgagatgactcacctcataatttttcacttaattattatataataaataatatctgttatatacttattatttattaccatttaacccccttttcctaagtaactacttattttatagattatcccatataatacattagataacattttatctttgtttgaatttaaattgaatattattattattatttaatgtggtgttgagacactctaatagattaattaggaataaaatccttaaatttgtaatagctagatatttcactgaataatactattttattatatatcatcttaatattaatttttatgtagaagtattattagtacgaattgctaaacgatgaaatcaaaagcatttggcaacatggtatatgtgggctattatattatagctgaaatcaattaatgggtgatgaaattattatttcactaatattaatgccatatgcacattacttgattccaagtaatgcatgatattaagtgtcattcatgtgcaatatattcgcctcatttttcttgcccaaagtttcttatttattaactcaacatcttcatcttaaaaattataaaacaagtaattactagtatatttttactatactttaaaactctgccgactatttatagtaatagtagttcgacgaatcattatcatcatcatcatcatgtttgactaatttgtatatataaatatatattatattatatactttgtacagtccatattaattgctttgacttcgtactgcagatccatcgatcgacatgcgtttgatgaccaagtactgattaaatgtattaaacttactatacactgatttttaggcatattttaaggatttttagtccatattaaatgtattaaactcttaatgatgtggtaataagataaatattaacacacttgaaagttactacagccatttccaaaaaaaaagtcttaattagtacaaaatttaattgaattattctagtgtaggtcaaactatatatatatgtcatgattaaataaatacatggcatatatatataaatagggatatgattttgtcccgtgattgtactttcacggaatgcattccgtgatgtacgacagccgtcagatgaaggacttatttgatctgacggctgagattgatttaggggtaattaaagttaaaaagtagaaacgtaccctgatactcatttaat

SEQ ID NO: 302917 - DNA, 2573 bp, Cannabis indica
gtatttattaccaattgatcattgatagttgaaaattgaaattatatcccttacggaccaattaagcatatcccattgcctgtccttttttaaatgttttttttttatgcaacttccatctcatagtcatatatatgtattatttatataattaggactctacgactacaatcagttgttataaaccatgcaattatttgataaaaaaacattattattattattagtctcttggaaaaccaattaagtcaatcatgatagcaacagatgacgcatgtggttgtaaaaatgatcataatattgatcgaaattgacaattcagttaattttctttctctctctttgagcatatatctatatctataataaataaggttataaaatgattttatgcttacgtacatatttgacaattgccaatggtaattgtatttctttgatctctaccaataatttgtttatatatatatatatatgtattatctaaaatatttgttttcttttcattattatcatttttcaaaacatgtgcttatattaattataatttttctctatttaccaaatcattttttcttctttgactaaaattcaaaattagaagaactaaaagctcggattggtctaggaaactgattcatttaattttcgtttaataacctcccgcacagtagaaaagattcaaataataataaacctgatagtgcgtagtcgaccaatttaattattagtgtgttttcttctatagcttcgttttctttttgaaaataatgaataatatatttaattaaaaaagacagtgacacaaagccgaaagagtcacagacaacacaaaacgattagttttggagaccgggaggtaaacaaaacaaccaaactcgagaaacaatatttgaaaataaagtaatagagttaaagaatgagtcataagttaacattataaattccattacaatcaaagaaaaaaatatttaagaaagacagagacatttttaatatcatgcacaattgtaccaaactcaataaaattcttatcaatacttgaaataaatttgcactaaaattaaggaggcaatcagataacaccttcataattaaatcatttttattgagaattattcttgtatttatttagactcaataagttttattatttctattttttcaagtgtccttgaggcgagctatacatgttcctcatatagtttattgaaaacttatttaattagtttgagaattttttaatataataatattttttttagcattttaataatttcagtgaaatagtgttgattgtttttttttttaaatgaaaaaactaacaaacaaatttattttttatcttgagaatgtgaacaagaatgatcccgtgtttattagtactcctgtaacagctgatttgatttaatgtgatacatcctttcttttcaaaaaaaaaaaaaatgatcatgtctttatatatagtgtagtcatgctcaatctcaatatcaaataaaaaaaaggctaattaggatttttgtcctctgaactttgacatgtaccaaatcatgccccctgaacttttaaggccgttaaaaatgcccctgaactattgagattgttagatttaaggactcctttctaattttagtaaaaaagtttaacatagataaagtacacaggcaaaaaattagtacatatcaaagttcaaggggcatgattttgtagatatcaaaaatctggggagcatggtttagtacataagcaatcacttaaataaaaaattgctcaatagttcagggggcattttcaacaaccttaaaagttcaggggcatgatttggtacatgtcaaagttcaggggcaaaaattctaattagcctaaaaaaaattgtattaaatctaataggatttaattattttttttttaaatatataaaattttatttgatttcaaatttatttataaaaaatatatttaactaattttattaaataataaaataagtaaataagtttatatatctgaaataatataattaataaatttgttataaattaaattaacatctaattcaaatttaaattaaactttttatatataaaaaataattatttaattttattgatatgtttaaattaaatttaataaatattcaaattattagcttttttaaaaataattaattaatttaatggtattaattttaaacgttaattttaataaaaaaaataaaaggatcgctaaaacaacaatttttgtcaaataagtaaatagattttgtttagaaggtcactctcgcatatttaaaggactattaatattttatttttatatattatgtccctatattatcccacgaggacgtacgataagcagggtaacttagtcaatgcgtttacactttgagatagaaaccaaaaccaaatttaagattttactcagtggccatatttaattattacaatgcaaaagtctcaattaaatatatataaggaaaagacctacaaatatttattctatataaagtgtgcctatataactaaattcttggtttatgagaaattaatgggtgtgactttttatttata

SEQ ID NO: 302918 - DNA, 3906 bp, Cannabis indica
ttatggttcatattggataaaaaatatttttatcaaattcgctttcacttttctaactctgatatggaccataaaaaccaacagtcgaacccttttttcattgcatacaagccaacaaccatcttcaaatgctctttgtctttaaaaaattttcctagatgtaactcctcacctggtgtgccacccataaatgtataatgactattattctcgatatcttctcttgtaaatattttctccttaaatttaccgtaacttttcaaagaagaaaatgaatcattaaatctagtatcaattgtccccctagcagcactagttcttttagcatcactaggacctctaccatcagcagtccttctagcatcacttgttcttacaacatcactatgacctctaccatcagtggtcgtttaacattactagttccgtctggatgtctactactagtatcagatgtttagaaatcttctccacgggatcttcttctaggtgttggttgcctgggtatttagtatgatattggagtcatgttcaaagctacatcagggacctctgtctcttggttgtctcttacattattattgccatcaaaattccattcaaggtttggaccatcaccaaaatcatcgtgaacgggcatttgtgctacaatatcagcctgacagcatcataatgtttaattcaggtaacacatcgattgccaacaccttcggatttgtttctagaacggaactcccaatcttgccatgagtatctttaatagtacttggtgtaggggtaggatcaatacagacattcttcttcaccaaagtcacaaataggggagtaaattcatctgacatctttgcaagcatagacaaatataaccttagacacttatcatttccaataacctcagagtgatacattaaccctttcatgtacttataattcatttctaatttcaagtcatactacaacttgtcaacatcgagttcttcatacaaaagctcaacaaaacgtgagtacgttcgtatcaatctcaaatgtcaaattttcagcttggttataaatccaatctctacccccaagctcacaaataccattatacataagcaacgcaaaaacagttgaacccgtcatccacatacataaaaaatagtattaagaaaaaaaaataatcatataggataaatataattcatgaaatgagtaatattgcccatacatcagaccaatattgaacctatatcgacctcaatcagtccttcaaacagaattcaaaactgaatacccatcagacacataatcagacccccatcagacccaatcggatcctccacactagcgtcaaaactcacacacaatcggacaccaattggcccacatcgaacaccctattggacccaaacaagtcctaggccatgtcggacaacaatcgaccaacattagacaccctatagacccaacaggtcctacaccatatcagacacacatcgagccaactattagacccatcaggaaatcatccctgaccttagatctgagtttgccatcggactagcatcgaacccctatcgagcaccattggattaggcaaaaaaaaaaaaacttaagaaaccagaaaaaatgtagtattcacaaacaacaactatttcaacacaaaaaaacaacaacaatccacagatcaaacatcaaaacaacattctaaactaaatataagaaccaacaacaaaataaataaaaatatcacttacccattgattgttcccgaaattggttaagtgccctaagaaaagcttctcacgctaatttttcttacttgtagtagttttttttgtttttgaaaggttacttgtagtagtttggagaggtgaaatgtatactaaattttaaattttaatgtgtaatagttaaggagaatgaaagaagatgaggtaagagagaagatagagaagagagaaagagaaggaaatgtgatttgctgggagggaggggaagtgtatgaaaggatatttttagtactccacaaaatatacacctattttccctttctccaataggtattaacttttgcctaatttttaattttccccctaatgtatgattaaaattcctttgttattttctcattcatttcagctgattggcatgggatgggaccaagttatcttatcatcatcacactaattatattaataataataataataattatgtataaatatttgtgttttgatactgtaatttaaagctctgaatttgatgatatagacatcaccacttcataacgtaatcctaattcaatgttagtccaattttaatacattcaaatatggactgcgtttacttgtagttgacaacccagccatccattgtccctaccttccaacccaatttatatttttgcctacttttagttttaatattaatattcttaattatatattttataaacatttcattctcaacgtgaatacgtgaacacaataccttttatttttgaatttaattaaaaataaacaacatttatcagccttttttcatattaatgtttttggtcattctgtttgttgttcagttttaataatgatattaatatcgaaaataatgtaatacaaatgtaaattacttttacttttcttcaatgattaaaatcctatgacagaattatttatttatttttgctaaaagacagaattaattttttttttcaaaaggaactacagaattttcacatattcaccactttcacttttaaattttatatgcaattatataattaaaaatgtgtatgttaaatttaaaaatattaatataattatatcagcccacacttaaaaaatgttttggtgtgtgtggatatattattaatattttttaatatgacttcatattataatagtgtttttcatagtcttttaaaataaatataaaaacattatggacagaataactaagaaaaaaagaagaagtttcttccctaacaaatctgtaatccatagcaaaccacatcatttacctactaatttgtatttataatgacaattaatagaacgaaaaatagtaataatattttgtcaaaaaagaaaaagaaaaagaaaataacaataataataagttaagtacagtattactttttcttattttgggacaccgaagaaaagagaaacaaaaagggaagccaactaacaccaatttttgcgcgaatctttgctgtttattgaataccatgtaggcattggttaaagttttattttttatttttgttttcttggaaatactttcggtataattggtgtcgttttctctatcaatggccgactttttggcagtgtcggcttatatttcaaagctaattaaagctaattaagattaagtgtaccaaattatgtctcaaaggtcattaaaaatattttttgaattttaaaattgttaaatttaaagatttttgtgtaattttaataaaaaaatttaacatcgataaaagttcggagcatgatttagtatataaacaattattaaaatagtaaaattaaatgaaattagaaaaaaaatccttaaatcaaacaatctcaataatttaaaaaaaaaaaatttaacagctaaaaaatttcagagatataatttatgacatgatccagctctatttatttatttatttttaattttcatttttataatcaaaattgtgaaaactacgtgcacatctgtgttggaaagcttcaacctttcggttgtgctttgatttcttttcctttctatttttcaaactttttctcattgtaacaactttggcttatttgttaataatcaccaatttggcaaatgggtttctctgatttgaagcttctttgcatctgaatgatcaagtttttctcttctttttcacatgaacaggtaagttaagtttcttttttttttttt

SEQ ID NO: 302919 - DNA, 1325 bp, Cannabis indica
agtatagactagttaaaaaaataaaaaaaaacgtaaaaaaaaaccgtaaaccctactacttaaaaaaaaaaaaaaaatcgcccccctcaacttaaatcctagatccgccactgattagagatatatactctaacatgcatgaactatctccttcattatatctatatattattttgagatggaaacatatgcatcttattaatcttatattttctaacatttccaacccaaacgagctactcaacaccttaatcctaaatcttaacaaagtcatatatctttagacgtacatatcatgatgagaaagaatgctagctagtcttctcccactttggattgaaagctggctcatcatcactgatatatattttgtctttgttaactttattttttctttcccttctttttgagtcgcatgggggaccaataatatgccccctaaaacagaaaggacttgttctatatgtaatctttggctaatattttaggcccttattatataataggcaaaagtgttatggacataaacatagaaagggaaataaaggccagagagggaaccaattataaacctgatcatcagaattgctttatgatgaagattaacagagaaattgtataatttgtgatcctatcgatggcaaacctttaataattgcttttatttcatagcaggaatattcactagctaggaattatacttcttttcagtatggcatatataaaagtgagtttttgcatatacttatctttcatatataaattttataaatatatatatatatatgtatattcttcgagaaaaagaaaatggtaacattatgtcctcaaacttacaaataaattaattaactacctagagcttgcattggtgaatggtgatcatagcttttcaacacttatatgtgatgtgccaagtttatttccttttcatatctagctccttttttttagagatattctagagaactctacacaaccatcatagaaaatatcaaagactacgagaatatatcagtcaaagaaaggaatgctaagatacaatatttattagtttgacgtagttgtgctgttcgaaaaagcagctatagctgtgctgtgagaaaaaacagcttagtaaaactgtagaaaaaaactaagatgagtgtttggtaaattataaatttcaaagtactgtgagttgttataaaatataatcataatgatataatctagtttattataatattaaatatagaaaatttattttatataatattttatttttaatatatttttaatttttttttttaaaatataaatttatatgcatttgataaaaatat

SEQ ID NO: 302920 - DNA, 3917 bp, Cannabis indica
cttaccataaaaaggaaaattattttgtcacctaacttgccaaaaaaggactttacagataatataaggggagagcccaattttgatggtcgtgtagattttgtttattgttctcgagagtttaaccaggttgctcattgtatagctcagtttgtttgctctgagtgttgtaacgaccattggcctcattcagttccgatttgtgccactgtaggtttttctttagtgttgccttaggcattttgccaaataaaattatcggttgtgaattgtgatttttaataactcgcatgtagtcaatttgcttatacttatattgttaataaatttttttttgcttatattatattaatctagatttttgataaaactaaattggtttcttatttaaaaattacatttaatctccaatagtgaaaaatgaatttaaaaataaaataattattcctaaaaacgaataagattatgataacaatattttatctcaaaagaaataaatacaaattatgattaaaaacattatactttaattataattaatcctctttcaaaaaaaaaaaaaaattataattaatccaaaattttttaattaaaaggtgctgaaaaaaggaccctaaacccattgcaattttctgatttttatgattgtcatcttcttcggagcagagatcaatggcgtggaacgtcttcaagttctgcagcgccctgcgagcgctcggctccatcatgatcttcttcgttctcggaatcattagtctaacttattacgtcgtcgttttaacaaattacggtcccgctctctttctcggtggcgttcattctcttgtcgctatacttgtcttgctccttttccatgctctggtaacagccccttctctctctttctttctgttttattgatccattagtaaaatttagcttaaatgtcatagctttttaggtttagaagtttcctttgactatgttaggttgagcttttgaagggtagtgtagtgtgcagtgtaggtatagaaattggaaagtaaaagtttgttgttcgtgctattctatgaattgggtattgggttatgcctaaaatgaaaagaatagaactgaaccttttttttttttttggcatagaatagaactgaacttagtatacctaatgagtaatgaaaatttatttcaatttatgtgattacttgttgaattgaaatcattattgtttggtagtttgattgcttgttgaaatcagattgttaagactcactcttgttcttagtgtccatatttttaacacgagactgtgttttggctatgttatgtagctggtgatgctattgtggagctattttgctgttgttattactgaccctggtggtgttccacccgactggaaacctgtaatggatgaggaaagaggcgaggcggactctttggtggaagctcagtatgatgcttcagctttagcatctaaccaattaagtgatataaacaatcaaacagtacgattttgccgaaagtgcaaccagtttaaaccgccacgatgccatcactgttctgtctgtgagttctttgaactgatttttatttgtctgttcagttttaccttttatattattgtttatcaatgaagaaagattaaattttgcatctgttgtaggtggaaggtgtatactcaaaatggatcatcactgcttgtgggttgtcaattgtgttggagcgttaaattataagtactttctacttttcctggtatgtttaatattcattatgttttaaattttgtggcagacataagtttttcactgttttgaacttgttgaaattgatatatgcactctaatttccttccggatgttcttttatgtttggaataatttgtcatccttctgtgtggtcttgttaggattgtcatgtcatgcatttgtgttaaagaaaagtttagatttcgcaaataatttatttagcacatttgatgtgatgatgtagccggaacttgtcacaatttccttttgtattgagttccatggggataatgttgtttagttgcgtttaagcttttttattgttcagtagtaatccatgaagagaatatttgaataagaaatttactcattctagttcaatcttgatgcagttttacacatttcttgagacaactatagtcagtctatcattattgccgtattttatagcattttttactgatggtgagattggtggaacagcaggcacccttgcagccacttttataacattcagtgagttatattctttgataaaaatcatttatgttcatgtaactatcgttctatcttactttcctctgactcacatcgatcttttcaaccaatgcagtattgaactttgcattttcgcttagtgttctgggtttcttcatcatgcacttatcattggtcgcaggcaacaccaccacgattgaggtgatcgctttcactacttgccatcctccttatttttcatagaatcaagcttctgacttgcttttttgatcaggcttatgaaaagagaagaacttctaaatggcattacgaccttgggcggagaaacaacttcgaacaggttagctcctgcctccatttttcacgtggtccataacctttttaatccaaatctctgcataacataggataggaatgatctagagtgtgaaggttggttgagatattgagtcttgttcatttcaggtgttcgggaccgataagagatattggttcatccctgcctattcagaagaggattcaagacaaataccagcgcttcggggtcttgaatatccaataaagccggagttaagttcactccaaccagtatgacaattaacaaagggcaaacagtatagtttggtttgtagttcttcattcatgttggtacataaacatactcagattcagatattcaaggcatggagaattcacattggattacccttatttgttcacttcagccatggagaattcttcagccaggagattttcgttagtggcttaatgggtgaagttgaatatatatatttatacacatatataactgatattttttgttgaaatggaactgaaagttggggtttcaaggatttgtttatttatttatttgaatagaagaaaagaggttgatgtacatgtatgaatgaactgtgagtagtcaatagtagttgtggctgtgggtataaattagtaaattttgatagtcgtcaatttattattttattcaaactaaatatttactttttatctcataattcggaaacttgtcaaatgttattaactttatagcagtatgatcagcttctccattttattcttcaaaaatagtggtgatgactttttttttgagatgaaatatcaattttattgaataaattagcattctgaacacgaaatatgtaagagtttactacaaattgaaatatcagaaatgctacaatcagattgataacgagaatgtctaacaacataatgtgctactcagtttgctgatcgtctaatgaaaaataaattaacatttgggaggatagataacaaaagttggcagtctttgattaaaaggccgaaagtggacttcattacttggttgcttcgaatagcttgtacagaaacaagattgttgtttcaatttgaacatgttgtcaattattggtctttacccaactgagagcttctttaatccccatggcttcaatgactttagttgcatatcttccaccatggcaaccggcccttgctgcaacaaggtgaccaagatggtttcgggcaacaattctgaaaccatacttattgtcgctatcaaagagtgatgcatctacattaatcttgattgtgttttctgcaggtttaatccatgactcagcgccatcaccaatattttccagacagattgatgacaacgaaattttatcctgagctttattccag

SEQ ID NO: 302921 - DNA, 1324 bp, Cannabis indica
gtgaaaaaactaaaaaagaaaagataaaaatagtcatgtgtgcaaggattatttttcgcactgctattaatcccaaaaatataaaattaactgaattatatacatcgagtcctctaatataaccaaatattggattagtgacattttttaatttaatctagttgagtcaatcattgagaaatgtaatctaatatcaatgttcaacagacactctagtctattttattagttgtaattttttttatattaataaaatctataattttgtagctcataatatttggttaaataaatttttactcataaccattgcttacttatttcttttattccaaattatattttttttgtaatcgtgaggttaagttttttttttttttttggtatgtatagttgatgcacgcgctgataggaggggtaagaatgtaagatacatgtgagtgagaggggagagggaatactgtgcggtagtgatgtgcataggaacctacctatggtcacaatcatctctgttctctctctgccaaacttgtcctattatggcaaaacacctcactggcctcctctttactacttcaacttcaaaaactcaaaactctctctctccttccaatcacaacacaacacacatctgtcaattaactttcctcacttattagagacttgagtttctgtttctttgtttttctctttacccttttcctcaaaagagaaaaacccaatattatatattattattattattaaaacactcccagaaaaccttttctcctctatcagattttattcattcacctaaaataactactgcagttttaaaaggtttccccccttcagagaatatatatatagatcaacatcatcaatatccactgttttaatttgtttcctaaaaaaataaaaaagtattaactatttatatcctaattatttcatcctagaagtaatatttagacacaagtgtaggtgtgattctccttttcctttatattccttttctatttctcaccaatcaccagtcacactttaacttgtttatttctctctctttctctcttaagtcactactactagctaacactctgacaaaaagatatatatggaaaccatgcaaatgcaaaatctagatacagcagcagcagcagaaacagcagttttcttttgttcactactatttactattctcttcttctaaggtagttctttcccaatccatgatttccacttttagcatcaaatggcagctagattcactgattatacctccccctcctcctcctctactatctatataatataaatatatatacatacatatataaga

SEQ ID NO: 302922 - DNA, 1976 bp, Cannabis indica
tacagtgggaatgcataaactatatatgtatgtatgtgtatctttcgcatctcatttatgatcatgatcaatattgtatatgtgcaaatcaaggggggtgtttcctacttcagttatacgtccgtacgtatcttcgaactgttcttcagtctgtacaagtaaggcatatatatatatacatacataaatattgggatatttatagttcttcaaattttaatatgcttttaattaaattgtaattttcttcatacgatggattatttgcgagataattaatgtttgttgtgagcatatgatcacaatttcataattatatacaaattttatatgcatacatatatattgtgataaatttataaatgttattgcgtaagcactttcatatatggttagttgttattattatatgtatgttatgtaactaataagctaattagtgcatttcttttttcatattgtgtatgcattatatacatatacatataaaagaggaataaattatatatatgctgaaaaaggagacagtgattatatatattgcaaagtgatgaataggattttgaatggtcaaaatgtgaatcaagtacagaagcttcttttgcagtgcttttctcttgcattccgaaaaagtgaacagaagattttcataatgctaattgaggaattgattgctctcttatatagcaaatagtttcatggtatggtataataccctttctaaataaatatatacagttattatatacttaatttaagtttgctttttactaaattaaagaaacattactgatcaaaaagctgaagaaaaagggtcacacatgcatattgatctgtcatagaagtacgatccatgatattatatcgtcaaaaaatgtataaacgaggtcaatttttttattcaatataatcactttctaaaagttcaaaataaactaacaattagttaggcatcctaaataattatatacttccatacaagaagaacaatatatagtagcgatgatgaattgttgtgtgtgatatctctaatatatatatatatatatatatatatatgtataaatatatattaattgcaatacattgagttaattttatacacaaaaatgaacctcattatatattccactctcatcactttttgaattgtcgatctcttatattaaattataattgtgatttaattatatatgaattggcttcgacaaaataatctcgtgaacttaaggtacttagtcctgcttgtgtgtgtgggagggggttgccgggcttagctaggtttttagcaagatatatatgcgtgtataagacgcgtcagtatatatataaagtctgtgctgattaagaactacaatctaataaatcttatacatgtatatatacatggtgttttattgtatattatgcatgtgtacgtatatatgttttaacatgctttggtacgttcttatatatactcatcacatatatatatatggctttaaaattagtatatgattttcaactcatgcatggtttgagacaccaggactacaggaaaactcaaacttatatgcattggcaaaagtgagtaatgtaaatatatatattaggggtgctgatcatcagggtgtacgtatattatatgtatgcgttattacaacacaccactcatgtaaaaaggcatatacaagtaatattgcttagggtttactgaataattttattctttccaatatcatatatataattttatataagaatataaatatatatatatatataagattaaaattaggtgcaatccgcatatatttagatttattcttatttttttattttgatttatatatttttaattatataatattttcctgtgtggatcaacaaaattattttttattaaaaaatatttaatttcagcgttatatttataaataaaaaacataataatatttaaaatttattattaattataatttttgtttaattac

SEQ ID NO: 302923 - DNA, 1230 bp, Cannabis indica
agattgggtgttctacccaatcatgaagccatagatgagaaattgtctgcatacgcaacagtaggatccactgacacgtggcaaagttctgctttgaaacaaatctttgagaagcatccaagattttgtgaggccctcttgatctttgttctgctagggacctctatggcaattggtgatggagtactaactccagcaatatcaggtttctagactctattcttatctttgagcctctttactaatattcaattcattaaacctgcaaattttgttacttaaattttcaaattcctagccttacactctaaacgaactcaaataagggcatgtatgaaaatcacacatgtccaaagtgtgcatggaaattattcttataagctatcaatatgaataatggaaactaaaaatctgaggattaaagctcttcttaagaactgtataatagctaacttcatctgttttttgttctgcttcatttcatctgattactcagttgagttataaatttctaattggatattgacatttatataatttttcagttctttcagctgtctcaggcatcaaactcaagttgacagggcttcatgacagtgagcaatcctcttctttgttgtatatcaattaactggttttgaaatgttatttaccagctcttaatttctttcagattatgttgtcatgatttcatgtgtaattttggtggcgcttttctcccttcagcaccatggaacacacagagttgctttcatatttgctccaattgtcacagcatggcttttgtgcattagtggcataggaatatacaacatagtacactggaatccacatatctttcgagcactctctccgctttacatgttgaagttccttagaaccacgggcgtggaaggatgggtgtccttaggcggagtagctctttcaatgacaggtatctcctcttaacttctgatgcagttagtagtaatttacttactcctaaacagaactactgaaaactagttttgtctcaaatcctatctcaggtgtggaggcaatgtttgctaatttgggacatttctcttcgctctcaattaaggtaaagtgggaaatcctaattgttgtcattaattgttgtatatcatcttctcttgatgtttataatagggcttttttcataaatgtacaacaaaaataaaataattacaaaaaatgtgcaaaaaaaaattattttaaaaatttatatat

SEQ ID NO: 302924 - DNA, 2338 bp, Cannabis indica
tatttgtttcacctctattcccaaaaaataggctgaggatcctagatattttagacaaaattgatcattgaaaactaaaatgatatttgacactacaattagatcactccctgtgattaaaatatcatttgcatacacaagaataagtgtaaatgaattggctgaatgttaaataaaaatgagtgatcaaatttagatgaggtaaaaccaagagtgcgcatgctattttgaagcttttcaaaccatactctagggccttgcttaagcccatagagtgttttgtgtaatctgcaaaccaaatcatttttaccggggtcttcaaaactgaaggttggaccatatatagatcttcttacaattctccattgagaaaagaattattaacatcaagctgccttatggaccaacctttagataagcaagagtcaaaaccactctaatagttactagtttaaccattgtactaaatgtctctatgaaatttaatccaggctgttggtgaaacccctttgcaacaaacttttccttgtgcttgtgcacagtccgatcttgatttttttatcctatagaatcacttgcaaccaatagcttctcatcctggagggagtatgacaagaatataggttttatttctaaccaaggctaaaactcactcatagctttgttccacacaacttgattaagggcctcttggagagatgttgttcccaggtaacacaaaggctttggttttgtatgccaaatttagatctggtcacatgtaggtatttgtttgattgatcaggagtaggtggacaccctgaaacaacagcaccttgactgtctacaacaataatatttggacaaactgaactagtaggagctgaagcaacatctgcaacatcagagtgagaggataatatgaagatgatttaaggtaagagttcttcatgtggatcaagtgataaatctggtatattgggagagctaaaaaacatagactgttggtgttgaattatgttgattatcatggggaactttaagcaaaacatcattaatacctgaaggttcacctacattaaaaatagatggttggctagctaggacaccaactattagtagtaggagaattttagaattgacattgttatctagtaaaacattttgctcattcccaagggtggtacttagtaaatctgacatagaaaaagattgtttgtaatgagagatgataggaataaaggcaaaaactaggaatgatgtgtgtgtcaaaaatttgctcatagggaaaggaaacccctcaaaaaccatatccctaaatatgtaaattttaccactagcatccaaatatttgtaccctttttgattaagactataacctaagaaggtgcaatgggtagatctcaagtttagcttgtgtttattgtatggccgaatattggaaaaaaaaattacacaaaaatgtcttaagggttgtgtaataaggtgtaatattgaacaacatctcaactgggggcttattatttagaattggtatggggattttgttgtaaatgtatacaacagtcctaaaggcttcatccaaaaatttaaagggtagagaaacttgagcaagaagagcaagaccattttcaactatatacctatgtttgcccttagctaaaccattttgttaatgtgttgtaggataggagtgcctatgatgaattccattatcagttaggtacttagagaatgatctaaattcaccccacccaatcaatttgtaaggtttttagagttttctcaagttgtaactcagcttctggtttgaaatttaagagcatcttaatagcatatgacttattgtttaataggtacagccaattaaacctagaataagcatcaacaaagtgaatataatacatatagccattaaatgaaggtgtatgtgaaggtccccataaatcagatacaacaagctgtaaaggttcagaaataatagtggtgatgcatttagaaaaggaaatttatgaattgtcccaaggcaacaagctgagcaaacaaagtgttgagacattttattgctaataggtatattacatgattgtaggacattttgtacaactttctcagatgggtatcctaacctattatgccatagagtaaaatcattctcaatatttgagtcacacttgatacaatttgattattatgagtaactacaaaggtactcttagatttagagagacaatcactacttctggtatgaagctctttagagtgtttagttgtctcgggttgctcagggttttgggacagaaactaaagttaagttggatcaaaagtatataggttattcttgtgcatctccatcaga

SEQ ID NO: 302925 - DNA, 5323 bp, Cannabis indica
aatagaggcaacccaaaaaaaaatacgggaccttgttgagtatgccatccccaaggagacacaaggatgtacaaagacttaccaggttagtagctaccctgagtcgctttcatctctcgtttgattgactgacaagtgcataccattcttcaacatcttgaaaaaatgccaaaactttgagtggaacaaagattgtgaggaggcgttcaagaagctaaaacagcacatggcccaaccaccagtgttgtcaaagcccattcatggagaagacttatatttatatctagccgtctctgaaaacgtagttagcacaacattagtcttagaagaaggaaaagttcagcacccaatgtattacgttagtaaacacatgataggggaagaaatttgataccccgtgaccgaaaaactagctttctgtctcttaattacatcaagaaagttgaggccatactttcaggtgcactccatcaaagtatttacaaaccacccgcttcgacaagtcttgtagaaacctgaagcctctgtgagactactcaagtgggccatgtatttaagtcaattcgacatacactacatcccccacgtctcgatcaaaggccaggtgctcgtagatttcattatggagtgcaatgaaattgaggctaacttcaatatgctagatttagatgaccctacgtggaaagtatatgtcgacagcgcatcaaataagaatgggttgggagctggagtagcgatgatatcccccgacggactaagactacaggccgccctgagtttcacatttctgacttctaataacaaagctgggtacgaagccctaatagcaggattaaacttgactaaggaagtaagagccaatagggtagaggtatacagtgactcgcaactggttgtcaaccaggtgtcaggagaataccaaactcgcagagaaaaaatggccgcttatgtttcagctgttagggaattgctaaaagaattcagggattacaagattgagcggatcccttgagaaaaaaacatccatgtagattgtctggctaagttagcatcagacagcaaggtagaaaagctgggggtggtgccaattaataccgcacggagcctagcattaggccaaaagaggaagcagccactaacgagcaaatgtcaagttggatggaccatatcgtcaagtatataacaacgggagaactgcctcaagaaaggactatgtccaaaaaggtgcagtaccaggctcaccgatacttgatgatcgatggtattctttatcgaaggaggctgagcatgccatatttaaggtgtgtgttcgatcttgaagctagatagattgtataagaagtccatgaaggattctatggagataaaacctgagggtcgagcctctctaagaaaatattaagggaatggtatttgtggcctaccatgaagaaagactgtatagactacgtcctcaaatgtgatccttgccaaatatttccaagcatcccaagagccctacctaacgaaatcaccttaatgactagcccatggcccttcgcggtgtggagaatagacctcattgggtctctccccatgggaaaatttggggttaaatatgcaatagtggtggtggattattacatgaaatggacggaggttgaacctatgaagattataactgccaagaaagtcttggtgtttgttataaagaacattgtgtctcgatatgggttgcctcacaagatagtctcagataatggtaaacaatttgattgtgatgaattcacagacttcggcaacaaacacaaagtcataaagagcttctctacggtcgcgaggccacagacaaatggacgggcagaagccgtcaataagatacttaaggtcatccttatggaaaaactctagacctacaaaaacaattggcctgagagttgtcacgcatattataggcctacaggaccattgcgagaactataattgtgtattccccattcttaatggtgtatgagtgcgaagctatggtcctggtagaggctatgattccctcccataggagaactacttacaatccagcaatgaatcaagccctattgaagaagcattggacttggtggatgagctccaggaggaatctcaaatacgcatggcagcataccaaaagaaagtggcaaaatatttcaactccaaagtcaaaaataggaagttttccattggtgacccggtcctaagaaggatctttttggcctcccaagatttagaagtgggggtactcgaaccaaattgggaaggcccatatgaagtcgaagatcaaataggctctgggacctataagttgaagcgaatgaacggatccatagtaccttaagcctggagtgctgatcatctccaaaaatactaccattagtgaggagctcagtattcaatttcatctttacattttgtaagttaacatgtggtagacaaattatgtgcattatctcgcacaaatttaagctaagtgacccaaaaagtcctttttaagtcacttaaggggggtactaaggcataaacatacacgcaaagataggtatagcagatagataaagtacttaaaatataagatgtcccaaacataataataataggcctggggtaaggccataaagatttctcccctgacagaaaaataaagataatagaaactaaaaattaaaatattgtcttgagggggagataagtaagaggaaggtgagaaaggataaactaatcaggtctgggtggaagacgaggacctctccgctcagccaagacctcctccaactttttgttcttttcccaaaactggaccattgtggcctcaggatcaggcaggaagtggaggcgaggttcaaatttgtttgatttccaacacataaaaactccatcatcgaagtgcttctcgcagtgcttgcaggtaaccggatttaataaagccttccacacagcctttgcagcttccattccagtttgctctcaaaactcgtgcaacgccttgagttcaacagacatactggcggtggtttccaagtcagtcttgcgtaactcttcaagagacttgagcttcacggagagtttgtggatttcctcttgagcgtcccagaggtccttcttcccctgaggtaatgacatctttggccttcagtgcctcatggtcccgcaacctgagagccttctttgctagaacatcatcgctaagagtctccatccaatcctctgattccctgagcttcctcatcacaccatccatgccacctaactccgagaggggaaacccttggtcaattaatgtcttggtaagttgaccgacctctacagcaatctgacaagtgaaataaggttaggtcttcaaaaaataagatcgaaacaaaagaagtatgggaagtaaatactcaatgaggttagtgcaacgctcatatcctggatttgatagacgggattggaggaagcacaggctgtgtatctcttcgttggaagttgggtcaggttggcagcaaagtgacttaccagctcaaaggcgaatgatgccaggtttgggcccaggaagcgcttaaaccattcaatcatggggtctcggttcaggtcccatatcttcctagtgtactcccctcgaaagggtccgtcgtgggcctcccttaaccatttcttcaaagcctcagcctcagcattgcctttggatagctcgtccaccgcgtagttgtgcttagcattacagagttgtatcctctcttcgtcaggatgtggggggttcaagagaatggttggggagcggcgaagtctttggcctcagtcagaatcctagagtcagtgctaggaccggggaaggctgcttgcttaagttttaaagaaggctctggcaaagaaacaacacccttccatttccaatcgagtgcgggaacctcttcctcctcttcttcttcaataagaaccacctcctgattcccaggtacttcctcggttggtccccccggagtcacacttgctcgaggaagctctagcatctctggctcaggactgtgggtgcgggcaaacaaggctagcaggtcctccatgggttttgttgttcaaaataaacaaagagttaaaaaagcactaaaaaattacaagttcaagaataatacagcaaggctaattataatatcctagaaaatattatggtatttaattgtgcatattttattaaatatgcaaattattctggtaatgaagtaagattatgatcttacttaggttaattaatgtgaatttaataaatgattaaatagagcgtaatgtattaattacaaagattttattggattatgggagtatcgtagataccatttccagaataaaatgttttcgggcctagtgaccgtggaaactcgatggagcggttgaaaatgtcacgataataaaatatggatcggaataaaggttatactagactagtttacagtgttaggttgtcggtttggcagattggttagaattaccaaaatatccctagattttacatagtttaagttttgtcaagaagggtaaaatagtcatttcttgggctagtttattttttctttcagtgtttaataagtctaaaatttttgatttaatattagtatatagctgaataatgttgggtattatctataaacctcaaaattaagaaatacaaccaaaaagggatgttttattcctctccccttcgagcaactaggagctgaccaagaccaggaaattcttcatcaattctctgtggtttctagcagatttttccattcaagttcaacctagaagcattaacgtaagtccttgccatgtgaattaagaatttttaagttttaagctagttttggggttagggtttaaaatttcagggttgtgttgttaaataaagtttagatattgttttctatcttgatttaaggttttttagagtttagtttcattgaattaggtggttgtggtgttagaattggagaattgggttttagaacttaatttcttggttttagcttggtgatttgtataatttgttgaattgttgtgaattgatggattgaataccttacttttgtgttattatactattctggagctgttgggcaagtttggagagggtttgaatttggggaagaaaacccatggtgttttggtctgccagaaccgatcgaccgattggttctggtgcaccaaagccggtcgaccggttgtcctacagggggaattcttggggttttcttcaagttctattttggctcgaggtggtacctagtatttgatttgggttatttatgttcaatttgacctgtgtgagcctatatgtttgcttttgggcttagat

SEQ ID NO: 302926 - DNA, 1129 bp, Cannabis indica
agagagagagagagagagagagagattgataatttgttaattattaaataagttggttagtggattgggttgtattaattaattagtaatgcaaacaaaacaactgtcatcatgtgttgtgttgtgcatagtcttcttctcatttagatttaattaattagttttacagtaatttttttgtttgttgagatttaattttgagttgctatatattaataatatattgttaatcaaattatggaatcaacaatgtgaattaagtaatgcaaacaaaacagctgtcctcgtgtattgtgattatttctgcagtaattttatcatgttattccattttccctttcaaataatattataataataataattatcataaacttggtatttttccgtctattcaatatactgcaatagtaatacaatatcagataagaaccgaaaactccaaactcaaaaagtagtaggaaaattgaatgagaaaagctagttacaattgatggaagcccttaggcccctttcctttggtgcaaatagcgctataaaccccatcataaattcactcaaccaattgtttgtgtaatacaccaacaacatctttctggtatgtatggccttttctcacctgcaacacagaaatcataacaaacaaaatgacttcatcaatactgttttctttacgagaagactaattaaagggctaactctcaagactttgggctatctaagacaaatacttcaactgctcaaataaaaagtacaaattccgctgtgatttcaaggtattaaagtgaaaatgttcacacctagttgggaaaatgtttactcaaatgtaattgtttttactctctgacatagttgctgcttcatcgacaagattcctaatatcagccccataaaatctgactgtacggaatacaatcttaagagtccatttttctggtgaataattaaataaggagcctgcacagacatatggcagaagaaattgttatgtttgggatatattgttagactttttatttgggcatttattaaaatttggattgattggatagttctttgttatgttagcccatattgttggtgatcactagttaatcggcttagcatctgtgtgtaaaatctaggtgaa

SEQ ID NO: 302927 - DNA, 6481 bp, Cannabis indica
cctatttatacaaatacaagagtgaaatattaagaaactaagaaaaaaggaaactaagaaaaagatgaatgttgattacaattaatggtaataaataaaaaatttagtcatctacataattattaatatttatgacatatgaaatatttttttttactttactataagctcattttttttaaactttttatgatatcaaattaattttaattttccattaaaaaaaataatttcaatttggatgtacaacttttcttttttaataaagtaaataaataaggaaacacaaataaagaaaatgaagacatccacaaagaaaaagttcgtagatgaagatagaaagcaaatgcagtaggggcattctagtaattttccgaaattaaactttttctttaaaaaattaactgttacaagacagtattggtttcacctatatatgaagaaagctcaaatcgacagaagaaacagtactgcagagacgaacttgtacgggaaaaagtaattttgattaaattattatataaaactaaaaagaatacatagaaaaaggctacagttcttgagtaaatggcgagtttaccccaatctcttacacttccgtttggaggaggaacgagtgtgtctgcagcaggaggaggtggtgctgaacttagcagagaaagaaaaatggcttccgcagaacagttggtacttgatctcagtaatcctgatctccgagagaacgctctcctcgaactctccaaggttttttatttattatatatatacattcattttcgttgtttaaaatcaatcaatttcataactttacattaccagtttcggttacgatgatagaactgttgatttcttctttcatttctgggtttgcttatctgggttttgatgtttttcttatggatttcgattttatttttatttcgtttggtgtatcaattccaatagttgcgaaaggttttctctttattagttagagcagtgaaagtgaagttgtgggtcaaatgggtttatgctctgatgcatcaccttcattgtgtttgttgtatcagttgatttccttggtttcattcttctgagttttggttatttcgttagtttcaaggtttttgtgtgcccttgcttttttttcttttttttaatcaattagaactttcattaatcaaaacttgcgcattgcatcaaaatccggggcattaccccttatactctgtgaagacctacaggtctttaacaaaattcagagcaaatctatccttcttagacaacttgctctcattaacaaaacttaagcgagccttaatactcaccttaacaatgtttttttcaaacacacaattgtttcggttaagccatataccatagacagcaccacccatagccgcatagaatatatcattcattaaattgttaggcctcctggtattcagccaatgaatccaattgtcaaaatcactaggccagaggaagctccctaactagcctccaatttgttgtacgactttccaagagaaagggcatgagaagaatagatgagcccttcttcttcttctgttaatctttggtggaaagtggaaaggtggatataaaagtgtagttttttttttcttcaaggaatcaattttgaatattttcttcgttataatatctactcggattatgaatggtaaggttgtttcttagattgtgatgctttggtgttttaattcttcattcgtttaaattaaaaaacaaaggtttggttttggtatatcagctccatcactttcgagaagttatttatgtagtatgcaatgaaaaatttacggagaagctcaccaaagcttccaaagcttctttttcttttttgttacagatactacttatgctaatggacaaaagtgatttgctttagggtcgcttaagcatctatatagttgaacagaatttttgtgcctttcaggacatcttagcatgaaaccacatgattggatgatttaatttgtttttatgttcattaggaatcacttggtggaattgtccatcgtggcatgcttcggcatgtttttatttgtgcatttgttaagaaggaaattgtagctagatgtgctttgagttttcttaattgcttgaaagtgttgctgcactatggaattgacatggacacaattactacatatatagaacaacagaaagctttgaataatatcattttaagtgatgattatttcggtaatgaattctctatcactcaatggtttcaatcttttaaactaatttcaggatgacaaaagcagtttctcatctatattttggtcctcatgtgtatgaggttttatgtacacataatcatatgtatatgtatatatatatatattaagtttgctggaataattaaattgggctctggatagtatgtaattgacactagtactttgagaaatgttttagcagtatattatttcatttccattccatgcagccacttttttgggacagttgaccttatgtttcttaggtggcccaaaaaatatcttggtatacgcgcaataggtgttgatgtaggaacatgttaactggatttgtttagaacttatggtttgacagggtggatggattttgaaaggtctataggtcaattgtgttgattgtagccttagattgtgtctagttttcctgggtaaggaaggggaaagacagatggagatgtttagttttctgtagaataagcatgtggatcaaatatattagtcaatatcttttttttttgctgttgtaatattgttctccattttggatatttatgcaattttctgtttcaatattggtatgtttaaatgcataattcatttggttttatttttatttacgaacaaggagttcttaaagatcttccccctttttaatggattatgttttggtactattgctgaaatcatacatgaatgcatggtaacattatgtttgtttcttgtttggtagaagagagaattatttcaagacttggctcctttactgtggaattcatttggtactattgctgccctgttacaggtatgtctattattgattagtctaccactttgttcctgttattacagttctgaaatccttccaaaggtagccagttcactttacaaccttttattgctattaacgcttttaccaagttcttacacgccatatatatttggaatggtgatccttagtttcccaacggaagtaagtttgagctggaaagaaatggtagagtagaaatgtagtagtaatcatacttaggcagctttgcccattgctaaataattaatctagtttcttttttgttttggattttatttaaagttatttattgtggacaatcttgtgggtcacaaacaacttacaatactcctgttgttttattaatgttatgcttttgtagagttgaaaatttcaattttgaatatataattcctagtaactgcttgcaatggatcgatatctgattttgattgtttttttttaaatatctgcaggagattgtatcaatatatcctgttttatcacccccaaatcttactcctgcacaatcaaaccgagtttgcaatgcccttgctcttcttcaggttacatgatttcctctttctgattcatatgtcattgaaacgatggatatcaaattttcactattcattgctcatgttagatttactaccatctaattgattcacatgtttattaaatttttaattttttcaacttataaacatacgacactaaattgtgttgaagtggtctgaaatgttcggattagtcatattgattaatgctaatctagttatgttttttttgtttttttgactagtgcaagtgatgtgaaacaagtattttaaaaatttaggatggaatatcaaatgattttgtttgccttttgtggctgacataaggctttcaatgattcatgatacatgtgtacatgtaggcacaagcacaggcgcacacacacgtatgaatattttaaagagcattatttgtcttaattttgtacttttcttgtaacttgcaattcgtgcattcataactattttttttttttttttgggtaaatgaaacaacatcccacgagttattattggtagtttaaatttagacatgattgtacaacattttattgtctttttgcgacagacttgatgaatgcagactttaaagcttcttttttttttactttctttccttcttttcttcttccttaatttgcgtttcttgcagtgtgtagcctctcacccagatacaaggaagttgttcattaatggtatttttcttcaccttatcaaactactaacgtatgtatgtcaaaatcgtgtaaaattctttgcttcattatctcttcttctgctcctcatttcctgccgtggaggttttagcaccttgaattgtctgaacatactgacatcccaaatagggaatttttgtgtcattgtcaaataagtcatttacctgtattgcaaccacaataagcactagctatagaagctataggtcttgcatctaacataagaagtaaatcttgggccatatgtagtattttgttttccatgccgcagaaagtggtctttcaatatatttatcatccattttattattgtactaagtttgtcaactaaaaaagttgtatcacttcactcaagtaagagcagtgtagaacaaatttcacctttcttaaaaaaatacattaggatgccatacacacatgcaagtcaaatattaattaataatttctctgcggagtcccaagaggtagctctaatggtcaggcatgtggtttgctccgacaaggtccaagtttctagtccttcttaagtacctacctagcaattgctatagtttccttgtccccaagtattgtagggtgaggcggggatcctagtttcaaaaaagatagtttcactacagtgacataatattattagtcgaagaatggcgttaacttaaattgtaatttagccagcttgacagtacattgttctttcttcctcattttgcctcacttagtactttgccacactcatcagtctgacactccattcgacttcaggctgttaggatttatggttttgctgattacaatttttcacgtgtttagacatcatggatataagttgttctaagtttctgggatcttcggctagtaacaaattgttctagtattattaaagacagttactattatgaatatcaatctttatatttatgtatattgctatcaactcgttgcttagtcctcagtctgcccagaggcttatgcctcacctagctaaggcaaactagggagaataactactatttagtgtagaaaaagaataagattactacatagcatgtgtattaagtcattaacttgtgccggaaaagtaatgaccagtaggattttattaggatcaagtacttacttttcatatcataactgcactttatttttactgttctgaaaagatcctgtgaatggtatatatatacacacatatgtatatatatatttattttttgaaaaagacaaaggtcaattgacccctcccaggtttattagggagccttggcagaaaaaaaccattgtaacaagataaacataagaaattgaagcataaaatacaagtgtaaattttcagtataaatccctatacaattagaactatctctatatcccaagatggaggaattagtgcaaaatgggactccattctctaatcagatattgaaagatagaccctcaaaaccttttgtcttgtaaacccactgggaatggtagagagagaatgagggagagggagagggagagggagagggagaggagagggagaggaaagtagtttacgtggtaggagatgctgttagacaccgatgttaggacccaaatatattcacacacaaaaactaaagaccactacaaagcaatacacctcccttggcatatttaaatatgccccagtatagactcttacacttcccaataaaatgtaaccaagcccttaaaaattctttcactttccgttacttaatttatgtctattgtattgactattcggtgcataacaacccattctatttacatattctagaagaaagaatgtaaccatgtgaaggattagtgagaaatatataaagataactaataagggggttagctacttgtttctgttcagttatgagggtatcctaggagattcagaagagggcagttgagtgtcgacttgttagagtcttgcacttgggaggttacccaggactactgaaattcctagaaatgacaaccagcacaagagctggcacagataaatagacaaacaagttcagtgccatagtggatccatcctactatgctgtatggtgtttatttattgttttcataataaaatatgttctggagtatatttctagatttcataaatttacagagggtaacaaatgcatatgttattattgttttaattccaagtaactaattcgttctactgaaactttcact

SEQ ID NO: 302928 - DNA, 1313 bp, Cannabis indica
aaaaacccctctcttctaaaagagttttgagctctaaaacaactgattaaactaactcattattaactgaaaattgaatctcatctcaaacccatatcgatgcaatctgggcctgaccaaatcccaccaaacacggcccagattcttccattttaatctaactcaaatttattattattattattattattaattaactaattaattaattaaattttcatttcatttctttctttctctctctttagtctttacttatgttcttctttagttcttcttacaaacaattaccaagaaaaactgaatcttcagttataaattagttagttatgtctgagatgagaaggagtagtggtggtattattagtgggcccaacaaaatagacagcccaccggttccgaaaaggtccaaaaccattgccggtgatgggcctaaccggaggcccactacaactcaacccttctccgccgccagaaccgatctgcgcgtggtaaccactcaccacaacgatgatccaccttcgaatcgtgactggttctacccttcgttcatggttcctcaaacaacgaagcgcgtggctcacaaactcccttcctcctccgattcgcgaactcctcatcggatctctgctccgtcgtgtaagaagagtgagaaggtgaaactcgttcctaatcgttcttcttctactgagtcgactcagtctaagccctggtgtagtaggatcacctggattcggaagctgaagttcttggttagttactcaatcactcactcaaatttttgtatataatataactatatgtttatatacactgatgaatttaatataatgggaaaagcaatgaaatattaattggaaaaaataagtaaaaatcaagctaatctcttcttaaaaattaagaaaattctacacattttattttgaatctgtatatgtgtataatatatatatatatatattacaatatatattttaatatattaatttgtattttgtgctgttttttttattaatacatgaaactactttaatgtcttttttcagagatgaaattctacactaatgagcttaatagtaagaaaaaccatgaaagattaattggagaaatatagaaaaaaatcaaactaatctcttctacaaaattaagacatataaatagcttattaggatttttcttgaattatttagattgttagattttaaaatttttgtgtaattttattcaattttattaatgtgacgattgttgatatactaaattgtgccctcgaaagacttttgacatgtaccaaattttattctctaaacttt

SEQ ID NO: 302929 - DNA, 3939 bp, Cannabis indica
aaatttttttttaaaaaactagtaataattttacaataacaagtaaattaaaattttaaatactttttattttaacagtagtaaaaattcagtatttttttaaaagatttactctagtacctaaaagtgcaacatgatgaaatagataaaaagtgtactaaatattcttttaacctactatagaaatttctattattattattattattattattattattattattattattattattattattattattattgtaaacagtaggtagaagttcacataagctttgaattggatcgaagtcgaattggaagtcctttttgaggataaggcatcgtatcacctttaattttttcatcagggatgattagttcccactcgaacttgtttaccacattatgaatgaaggtgagaacagcaagtctagtgtactcttttcctgggcacatgcgaggcccacctccaaatggcacaaatgcaaaagctgcaggagaactacttgcatcttcgtatcgtgatggctcaaatttctctggctctggatagtattgtgggttcttacttgttgtactcacagtccaatataactgcatcatatgtgaaatcaaatttaattatttagtttcactttgaaaaaattaagaaaattattaattattattaccttccatcctttgggaacagtaaaaccggcataggtaaaatgagtaagaacctctctgaaaccaccttgaataggaggagtgaatctcataacctcgtaaaccacgttccatgaatacttcatcttttttatgtcatcccattctaacaattctcctgccttttttgattcccaaatctccttttgttctgtttcatattcccatgcacatcacaattaaaacaagtacgtatctatatatgtgaatctatatatgaatttcacgtccgttaagtctgaatcaaatataacaaaaaaatatatatttattttattttgaataataataataataattattagaatttttgtgccctaaactatgtaccaaattatgaaacttttctaatcgttaaaaattctcttgggatattaaaattgttagatttaaggacttttacctaatttcatttaattttactatttcatttaagttaagtctgaatccaataaaacaaaaaatatatatatttattttattttgaataataataataataataataataataattagaatttttgtcccctaaactatgtaccaaattttagttcctgaacttttcttgttgttaaaaattcttattgggattgttagatttaaggacttttgtctaatttaatttaattttattatttcagtgattatttatgtactaacatgtgcttctaagattttgatatcaaccaaatcatgtctctcgaacttttacatatactaaattatgtcccctcaactttcattcatattagactttttttattaaaattcgacaaaaatctttaaattcaacaatctcaatgattcatgaagcatttttaactattttaaaagttcaaagagcatgatttgttacatgtcaaagttcggaagacaaaaatcttaattagcctaataataataaataataataataataataataataataataataataaaattaggtaccttggagaaccttttggtaaacatgaggtgtttgagccacatacttgatgaaaaaggccatggtagtggcaacagtgtggtagccagcaacaagcaaacccatgaccttatcagcaatctcagcctcacacatatacttcccagaagggtcagtggccacaatcatatggctgagtacatcattcattggaccaccacgactaatggcttccttcttctcttgaatcacaccattcaactctctcctcaaaatgctagcagccttagtggctttataaaatcttgtccctggaaaattcaccaccatagaatgcatccctacagttactttatcgaagttctctagtagcctagcgatcctctctggctcatcaatacccaagaagatttgagaagctaaggtcaaagtcagaattttcgttacatggtaagtcttgacttgggccttcccctcccaatgagccttcatatgttcttgagtaatggagtccattttcgccacgtaatggaccagtgcttcgggcttcaagaaccccggggagcgaaggatcttcgcctctttctcacgatcgagctggatttgggcctttcctgagagtttaagaataagataagttgaagaatactttttttttctccattaatcaaaagtacgctcatatattatattttttaaaaaatatatccacttttttgagtgggttgtctaatatatcctcactctctatttaaatttagtatataatttacgttaaactaacgagtttaataaggatatcatctataaaagtaggtatatattaaagaatatgaaaatggaggttaaattaaaacgattaaagtgggtataccatgtaattttttctcgtgggattggaacatgcgcttcatggagtcaggtcggaagttcgtgaagtacttttgctcgttcgagaagaggaatttgaggcccttgggcccacaaatcacaatcattttctctccaaaaagattggtcttgaatatatctggggaatactttttcattctcttcagcacgaaattttccggcgtgcaaaataggaactcgatggtttcaccgattatgggccaccccatgttgcctggtggaagatcatcattggaaaatttgaaaataactttgtaaagaactaacaaaactggaactatacagaggatgaggtaataaagagtctccatggtgttttactttcaatgataataaaggaagtgtgctttggttttatatacactttccattttagctttgtaaatgaagttgataaaaaaaaatgggtatgagataggggtgtttgcggtgcgggttgtaatttttttttaaagtaaatgcagtttttgtaatttcttaaactacaatcgtaccgcaagatcttaaaaccgtaaaaactatattgcgaaaataagatatggtgcggtgcggtttgagcagtttacactatcattataatcaaacattatagtgaaatttaaaaattaatctataaagttttaacaaaaaaaaattattaaaatattcacattataacatgtatactaattatcaagtcattttattgaattgtctttaaaaaataatataatatatacatatatttatttttatatgaaaaataataaaaaatcatattgtaaaaattaataactttataatatatattgcgatgcagtttgaattataactattaaatttaaaatcacaaattgtattgtaccatgcgattaggtaaaaatgcaaactataactgtaccataaaaaatttcaaattgtattttttatacggtgtgatattgtgatgcgctacagacaatttatggagtgtgacggtttgataaacatccctaatgtgatataagaagccttaatgaacaccatatatgtggtgtcggatgagttaatgagataagctttgaaactctcatagtccttggaattcaaatacataactttgcaccaccattatttcccttcatgatatgctaatctctttggaagttgagcaaaaatgtggttgtagattttaatggcaatacctggtttgacatgttagtctaaaattacatgagtcatatatgttttgatgtcaaattctgagtataacacatttcattgctactcatcctacttttttttttttttttaaaggaaaattcaactttatttatccttcaaattcaacaaccacactaggaagcaactcagttgggatatttcccatactgaaaacacgatcaggatgtaacatagaagctctagcaaactcatga

SEQ ID NO: 302930 - DNA, 2059 bp, Cannabis indica
ctgtaaatttgaaaaaaaaaattaaaaaatagtatatggagtaattcccctaatatttttaatatagataaataaagaaatttttagtgactcttcaaactttaagtgacacacattatggaacgtaaatgtaaaagttttactgtccaagaatgtgggtcactaaaatttgcttaaagcatttagtgaccgacactttttgtgcgggttactaaagagtgtcactaaatgtataaattgtagtagtgcgttatacatccttacaagattatacattctccatatgaataaaaaaaattagatattaaaagctatactcttataattaatgtatcattttttttatataaatgtattttatatatgatatattatccattaatgacttacttttagggcataaatcctaacaaactcatctaatgcaaactagatcgaaatctaaaatatcttccagcaacattacttaaactaaatgtttgtcttagggaaccaaccttagtcaagtatgctatgaatgatcctaagttgaacaatgcaatgatagatgagtatcaagctttgaaaagaaacaatacttgggtgttggtcccttatcatcttggtatgaatgtggtgcaaaacaaatagatgttcagggtcaaattcaatgttgatggtacagttcaaagactcaaagctaggctagttgccaaggggttttaacagatagttggtgttgactattttgatacctttagtcatgtaatataagctagtaccataaaaattttgttcactctatctgttacttatggttgggacatctaacaagttgacatcagcaatgcttttttgaatgtggacttacaataaatttttatatgcaataacctcaaggatttgaagatccaaattgccctacttatgtgcgtaaacttccaaaatccttatatagattaaggcaggccccttaagcatcgtatgacaagctcaaaacaacattactttcttgaggttttacaaattctgtttcggataacaatttattttttatttaaaaaaaaaagactaatctttttctctttgtattggtgtatgttgatgaaatacttattactggctctagtctaaaggatgtttctcatattatcgcagctttccaagacaaatttgctgttaaaactttggggtcagtaagctattttctttgatttaaggcctccaaagttggtgataaactttacttaactcaatcccaatatgttgtggacatcctaaagatatccaacatggaaacttctaaatcctattcaactccaatgtgtcagggatacaaactgcatatccaagataatgaagcatttcaggaccccacattatatagaagcattattgtcagtttacaataccttcctttgacaagacttaatcttgtatttttagtaaataagctaagtcaatttatgcaacaacctactattgcacataggaatgcttgcaagagggtcttacagtatatcaaaggcaccactcaacttggtcttatttttaagcctgccataaacctcactttggaagtctttccagatacagattgggtttgtaatctaaatgacagaaagtctactacaaggttttgtgttactttggtgggaattttatctcttggggctctaagaacagaagtcagttgctcgatctagtagtgaatttgaatattggtctccctctaccattgtaattgaggtagtttagattataattttttcttgttgaacttgagattcaaactgttgccaagtctatcatctagtgtgatattcaaggagttcaacagcttgcctctaatacagtgtttcattacaggaccaaacacaatgaagttgatgttcattgtaaagaccgcttagtttaatttggaaattagctgttaatcacgtttaattatgaaaattatttatagctatttaaataattattatactgttattattgaattcagagatgcatttctatgtcatgtagtagttttaataattttgcattccggtgctcggtattttggaactcggtgttt

SEQ ID NO: 302931 - DNA, 3751 bp, Cannabis indica
tttctccttaattgtgtgggccccactaatttctcccattttaaaatatagtaaacaaatgaatgggaatcaatcctatacaattgattcccattcccctttagtaaacatgccattagtgtagagtttacaactcatctaaaaagaactaattcacatattaatgatcacaacacttccaagatttcaacacacacaagaacatttatggaaattctctgagtttctccctttattgctattgaatacaaggcttaaaaataataggtgaacacattctattatagaagtatagaccggttcaaaaacaaactatgtacaaaggttagttataaggactataactaacttcactgcctagaagattaactaaggcctaactgtattacttgccacctagacatagaataacattctccaccttggtaattaatagacctaggattagaacaataggcacaaccttcaattttggttaacctgcaacagctccaagcagtggttgaacttgaactttgcagttgtgagggctttggtgagcatgttagctgaattctctttagtagaaacttttttgtagcttgactttgccttctacaatgatatctttaatgaaatatagtctcacatctatatgtttagtcctctcatgatatattttttggtcctttcttaagtgaagagcactttgattgtcacacataattaattggattattttatggtataagtcgagttctcttgtgactacttcgagccaaagagcttttttgatagcttttgtgcatgccatatactcaacttcagtggttgagagtgctacacaaattgtaggttagctttctaacagatggtacaaacatttaacttgaaaacaaaacctgtgtgatctccttgaatttatgttccctacataatcagaggtcacaaatctagtaacaccaccttcacttgaacttccaccatagattacgccaacattagatgttccctttaggtatttcacgatccatttgatatcacacgaatgctctattctaggatttctcatgaatcgactcactatacttgctgcatggtacaaatctagtctagtgcagaccataatgtacattatgcttccaactatactagtataaggaatcttcatcatgaattcttttccttgttttgtaaaaagagcttgagtatttgacaatcttaattgctgatctattggagtgcatactggtctgacttcaaagaaaccaaatctgtctaagactttgctaataccctctttagacaacttcaatcttcttctctgtatgtctctaatgatttcaacccccagtatcttctttgcagatccaaagtccttcatctcaaactcctattcataggcatctttactttctcaatttcaccaaggttcttgtaagttatgagcatgtaatccacatgcaacaacaagcataccataacctttgagtttctaacatagatatacctgtcatatgcacttcttttaaaccctactttggtaacaaactcatcaaattacttataccactgccttggtgactactttaagccataaagagacctttttcagtaaacatacttgatcttcttttccctttttgtcaaaaccctatggctacttcatgaggatttcttcttccaagtccccatgtagaaaggttgtcttgacatcaagctgttctagttcaaggcattctatagctaccaaactcaaaagaattctaattgaagtatatgcttaaccactgaagagaaaatctcattgtaatccactcctctctgagtaaatctcctagctacaagtcttgtcttctctacccctggaattcctctttgtgcttgaaaatccttctacacttatttctcgtcatggttgtttgatcaccaaaatccaagtttgtttcttctaagagagtctattttctgatccatggttgattccatttatccttatctgttgaacacatggcttcttcatcggttagaggttcatctctctcattttcttctataataagtgcaaagtggattatatcagtaaagccaaattttccaagtggtttgattttccttctacctatgtccctggtcagttgttactcatcatacttttctccctgaacttgatcttctcgtgtatcttcttcttttggtaagtcttgcaactttttagtttgttttacttgaactggttcaggctctccctcaaactgatgtccatctagtgtagcaacttgtgtcagtattcatgtacaccttttgtaatgccctaacccctagggacaccacatatgttcttttggaacatagttttttaatttctaagggtggaatatggaaggcggtgtgagttgaggaagatgatattatttcctaagttggaagggtttgttttaagttttgtagaatatttttttcgttttatttaatttttaaaacttttaagaagacaatgtgagttgaggaagatgatataatttcttgaaaaatgttaaaggacacctatagtatctatagcactattatgaggtgtaatatcactgttggtgtaactcaatattgagtttcacttgacttgttttactttaataaatattataaaaaattactaaccatttgtggtgctaaacaccatggatgcctcatagcaatgctctaatttctcaggttaaaacagtttgttttaagttctatagaataattatttttgttttattttttaaattttcaaaaaaatataaataaaataaaggtacttaatttttcttatattttattattttgaaaaattatgatatagacaaatggttattcgacacgtggcatttttttgttttgctaggaattaacaaattggtattagtattagtgtcacaatttcttaaaattaggtatttattaaaaacaaaaaacataaaataagcatttgtgttgcaaattttcctccttaattttatcattgtggccaatatgaaatacaaatgttctagattatgggttgattatcattacaccaaaataaggaaataaaggagtaaaatgtgtcttttctcttttttccttgtcttaagaaaaggtttgaaaccgtgttttaatttgttttgtcttttatttaaagtctaggcaagccaaatcaaagcataataaatcataattaatataatctcccaaaaagtaagcttacattaattatttggttttggagttaattaattaatattaggattattagtttttgttgacaataataatgaaaatattacccaatatataaccttacaaattttaagatccaagaaaatattgctccaaaagcaataatgctatgtataattaacctaataatgaataattatagttaatacgagcttttccatgagattatctcgtttaccatggatgttaattagaaaacaatataattattatttattataattataattgaactaggatagaacagatttttattttgagaaaaacaattgatgggttaaaaataattattaataactatacctaccacacatgccaatatcaatcataacaccatctctaatggtttcactaatatagtgtgaaatctatactagtttagtgtagaattttttattttttttagtacaataactctagtaattagtacactaaatatcatataaatattctaccaaataaatatatttatttaagatctcacatttatattatttatattaataattaa

SEQ ID NO: 302932 - DNA, 1396 bp, Cannabis indica
taaaaagaaaataaaaataaggtgtatatatatttagcaatttcattaatattcaatttaaattaattttaaatattatgagttattaattttcttttctttttttttctttcttttgggaattttatgttaagtgatgatggataggggaaaatagctagttagagaaaagggtaaatgagtaattttcgtaatattattttagaagagtagtaatattgttgatcataattcagttttgtcttcttcttttttagggtcttaaatttgctgctcatttgattcataattccctagaagaaaaagtcatcatctgatcgaatatttgtgtacactatctaatggtctagatcgatatattgggtggttagaaatctataccaccaccactctactgatcacttaccatacattttttttcaaaaaaaaaattaatgtaatttttattttagggaatgtacaatacaatttaacaaaagtgcttttatgagtttttttttagaaggaaaaaatagtagtaacagtaacggcgcaaaaatatctgactacacatatataacatatataacagaatttcgtaccttaatagttgagaccagatatagacatgtggacgaccaaagacgactaggatagcaatcacttcttataattaaaaaaaaaaccgaggttttttggcttttaaaatataaaaatatattattttctataaaactaattgataaaatatatttattatttacgatgatgagtgaagctacgtgtacaagttattattcacttgtgattgtaggggctagaaacatggattaggacgttatgaaaaataatcatgtaaagaatttgtcacttatatatttgtgtccaaaaacaggtacttttcgaattggtgatcttgcaaatctctcaaaatatacttaattgtatatatatatatctatctgtttcgtctatcaatgtggtagtggcctgcccaagttgcctcttccctctctccaagttatatatattttcatgtaataaataatcaacaataacaacaattatgttatacatttataatacaaacattctagggtatgacctttgatcgagatatttatacgataggtttgttttcttctacctagctagttctagtgactaggtaattaagaattatatatattattgttatttttagccattcatttattattaaatatgtgattgtgcttgagaattgtggtatgaaaaacaataaattaattaaaaaatatattatattacttgtccaaatattacacaacatgatccccttcttcattcttgactcgttatcatccacgatttgcttttcggaagcaagaatataaaattattagaattaattagtttgtttttttctttttttttt

SEQ ID NO: 302933 - DNA, 2903 bp, Cannabis indica
tcacaataattgttgtaactaaattaaattagtgagaacttatatttagaaattatattttaattacaaataaatttttattaccaattaataaaaaaaaattatattatcagtaaaattagctaatatttataatgtgaccacttctagataagacagaagaaaagcctctaaacctgctatacgtttaaaggctgtttttagagccttgctttgctgatatgatagagtcataaaaactaactatctatttaacaaatttttgtaattgtcttaattgttggcaatatagaccaatagaattctatgtactaggcgggccaataagatctgatagagaaaaaaaggtgctcttggcagtcaagagtctctgaacttctctccatttctatcatttccaatacccgcgacatcttaccactttcaacagtaaatctcttattcccattagattccttgccaagttaaaagaagagtatgattccttatttatttttaggatattagaggatcttcaataaatgtgtaaataagtattaaaaagataaaatatagctcatttaataaaaaatgtaatctaatagtgtactaaaaagtgatgtaaatttggcacataccaaattttgtgccaaatttgacactataatataaaatttacaccacaataaatgcactactttttcatttacatttatgtcatttctattattttattagtatatttaactatgcacatcaaattatgaaacatttatattaatttttattgtcttacatattaaaataataataaaattgattataaagttattaaattttatttttttaataaaacattaataagatattaaatagtgcatcaaaattttaaaattgtgtatgggagcacaaagctaaattttggtataaatttactacaaaattactttttgtgctaaatataacacagtttttaaatactataaaatatcttgctttcagctagtattgacaaggaatttattaaaatttgcatgcgtttgtgcactgtattttaacttcaataatattaattgtataaaaacaaaatcttgtattaagaaaaagttcaaatgttccttatctttgcaatacaattagacaaatttctgtctagaaggcaattttaatataaaatgcatgtgtaaacaaatgctattctaccttagagtcttggaccatatattatatctactctctacacaaaaatttccacaaaaaaagtaagtatagcattaatataatcagttatgaccttagccatcacctatcacatcctccacctccacaaccacatggctcatcatcaaagggaccacaaatcactaatttaagtaaataatccaaacatgatcccattgtgataataagttttctttttcacatatttattctttcgaagaaaaactgttaacactcatgaaactcatacaagagaatttaatacacaaaaaaatgaaaatctgcatcaagaaggtcaaacgaatttgtttaagactgagtgatgagtatatatagaatgaaatattcaaatatggatccgaaagtggtcaagcaaatatagacacgaatttcttcacacttttacgaaataaataaaaattaaaatttacaaaaagtataatcgatatgtataatttactacttctttttcttattgttcttacccatattctgtatcacaaatatttttctgaaagctctaagaagaacagccatactgttcttcttacgatgcctagtcaatttagtcctaatactaatactactactactacaactactactacaattattattgctaatattttctttcaccatcttcaaaacttgatcttccgatccaccattaccagccgtacgatgatcataaacatcaaaaataatatcatcgctacgactagggtaataagtaatataacgactactgccaatcattttcctcttattactttctctactgtctaaagaagaaaccctttgaagaggccgtaccgttacaatttcattctcgttgaaatcttcccacagtgagtccattcggtcctccgagtcaagatccggctccgtgtcggagtggctcttcatcgaaacgaaaattccattggagctgttcggttcttgttcgtctgtgatttcgtcgtccgggtaaactagagacgagattcgccatagagaaggagatgatgatgagagtgtgaaaggagaattttgattggtactggccgagcgtttgttgtcgtttttgttgctttcttcgtcgttgtcctggtttttggtggttgtcgttgcaaggagtgttgggaagctgaaatcttccgtgaccgccattgttatttttaaggattttctttcttacaaaaattgtagagtactatatatattttattatattgtaattagttgggaatatatttatatatatgtggcaacaatctgacggtgtacatttaatgagggttggttataatccacagctacgtactcccagattagttgccataggatgaagatatttgtgacgttttgggaacgattaaggcataataggtggaatgtgaatggaaggttatgaccttaatttgaattttgatttattggcaataaaaggaggtttttaaaaaaggaaacgaatttatttgaaaaattgaaattagcaactcaatataagtgttatatattcagcaaaaaaaatatataaagtgtcagagcaagtgcaaggaggcactaaaccttggatttagtgtgtgtaatccctccaacgtagcagcaaatggcacattatatatgtcgtgtggttacagtgcacgacatatatgctgtggcactgtagttacggtattctttttttttttttgtaataattattattatttaatttatat

SEQ ID NO: 302934 - DNA, 7963 bp, Cannabis indica
tcttcttcactattaaacttgaaaacattaataaccaaaagcgtaaaatggcacaaaacacaactaaaaaactctaaaaatactttaaaaatctacttagtattaataaagtcctaactgtaagtacctgaccgttaagtgtcaagttattatttacatgccattttttattagtagctatttaaattaatttttaaacaaaaaataaaaatttaaggatctggaccaatcaggaacaacaacgtggtaatttactttacttacttaatgaccaaatacactaaaacacactaaaaacactttaaaatcttacttaaaatagtactaataaagtcttaactgtatgtatgtggccgttaagtgtcaagtcattatctacttgtcattttttattggtagttatttaaattaatttttaaacaaaaataaaatttaaggatcttgaccaatcaagaacgaccacgtggtaatttacttacttaacgatcaagtacctacagaaatttcaaaattataacttagatattatttataaacccatagaagaataataaaagcccatagactaaggtaaagactaataagaatgtttgtcccataaaattttgaggtcatttaatttgctcttgaactattgaaattgttagatggtaagatttggtagatattttgaaagagcatgatttagtatatggacaatcgtcgcattagtaaaattgaacagaatccaacaatctcaataggggaacgtttttaactgcttaaaaagttcaagggatatattttggagatatcaaatttgtaaaaatcctaattagtcatatttgaaatgacaaaatttaaaaactaaggacttaattgcaaagcaagtgaatttattttaattgctgtttaagtcttacattgaggttaaagaatcaagtctcttcatccctattctctttcgaaaaatctcaggtttatcttcttcttcgtcttcgtcttcgtcttcttcttcttcttcatcatcgttctctttcttcaaacatcgctggataaaaccccaaaattatctctcttttccgccgcctccgctggcttctcaggccaaccgatttcaccgcttctgtacccttcgtcgctatcgggtattttatctttcgtttgtatatttatatgtgtgtgtgtgtgtgttttgattaataatctatgtatgtatatctgcattttatttgcgaagaaatttttgaaatgtagttcagagcttaaaattagattattgtaagtgaaaattgtaattctgggtagtattcttcgtatgaaaagggttgagtctgtatatttaatgctagaacaagcttgatattggtttatagagacattagattgtttgttttaaaaaaaattcgataaaattatgactctaggggtttcattactgcaaagtaacaatgaatagttttttccatggtcgaaaaattagctttacaaaaggtcaattgaaatgtgtaggagtctattaacaattaatgccattcaataatgaggctttttcttcttaataatgctgcaatcattttgatttgactaacttattgcattttaaaacgttgaaattgctttctttttcttcttatgctattttacttaattttggggtttatctaatataacatattatattttgtctgttatgtgaagtttcttttcattgagagaggtctgcagtgttggttgcacagttgggtcaactgtttcagaaatcatggggagtgcattcaaccctcaaattttagtggagaagctggcaaagctcaacaattctcagactagcatagagagtatcctagtgactgatgaaatatgaactttaaatgaattgtattaaaatgtttgtctcatctgatttgtgattttagatagtaaattttctttttttgagtatcacaagctcatattttttattattggacttcggtggcaacaacaaatgaattcatcttgtcatttactttttctgatataaaattctgtatggaaaatcaattgtgtatcactactaaaagttcactttctgctgtttttttttttatttgaaacaaggaccccctgcctcaccctacaatatttggggaccagaaaactatagcaattgctatgtaggtacccgggaggcacttgaacctcagaccttgtgggagcaaactacatgtctgaccatttgagctacccctcttgggtcactttttgctattgtttactattctaaatgacatcctttttgtggtttaaatcagtaagatctgcttagaatgtattttatatttattttaaatggtgattcaaaattaattaattctcaattgttatccttaatgatatgcaaagctttatcacattggtgtattttccacatgaataaagcaagacaagttgttgaaacatgggatagacaatttcactgcgctccacgcgaccaaagattggcttttctgtaccttgcaaacgatattcttcagaacagtagacgcaagggctcagagtttgtcggtgaattttggaaggttcttccagatgctcttcgtgatttaatggataatggagatgaatttggaaggactgcagcacaacgactggtatttttatctatttgtatactaatatcatactttagcagttacatgagttgtatatttcttcattctaatgctgaagtatttcattataaccatggcaccatttattcacttcatctagacctttttttattccgaggataccacatttttctgacttttgggaatcatcttgctgtttaacatgaaaagagaaacaatcacactgttgaatatgatcatgtaaccaacacattacgacctggttacataaaggacatatatttatacagttttacttcatacttggtccttatgttgaacactgctttagtaggcagaaagtcttaacatattgctagggtaggttttcatgaagaaacaaatgccaatcctaatggaaataaattgtggttttgatcacttgatctatcttctgtgtgtgttttgcgtgtatattttaaactagtggggaagaaaactatagcaattgttatgtaggtatctgggagggttttgaattgtagactttgtgggagttatttatatgcctcagtatttgagctaaccttcttggacattccttgtgttttgtacatggggcatataattttaacggggtgcctagttaaattgaaaaaaataagttacttatttagttttttcttgtaaacagtaatggtgtatagtttacacatacatggattatatgctaaccgggtcttttgataaacccttctaaatcagatcaattctatttctctactccctttgttagctctaggacccatcatctttttcactagtatgtatgatcaggaaattttgcttttatttggaaatatttggataacatatgatttttttaatcctttttcctgcttttatcttgaaggttaacatatgggatgagagaaaagtttttggttctcggggacaaatgctgaaggaagagcttgtgggaagacatgcagaaaataataatagaaatggaaagcagatgaacaccaaattggtaatgcaaaattgcaaattagaatagcgattggatgatgaaatggatattgtaattatgtatttcgtttgaggattaactatattatttgtttgctcaaacagaaacatcctgttggaaatactctggacaagctagtttcaggttacaaggttctttatgggcagatcgatgaagatgtagttttgagcaaatgtaggaatgctgttaactttgttgagaaagtagaaaaggaaattggtggtgatatcaattcaggtaaattcttgaaattgtttcagtgtgaccattggtcgtgatgatgtatgtcaatatgtgtacacataatcacttttacacttgttatatttgttctgttctgttagtattatcgcaagctttaacaagcacaatcatttggtacaccagtatatagtattttattgtacaatataatatattataaattgaattatatattatattgttatatagtactatatttggtattgatttgtatatgcatatatctacaaacgtatattttgatataaattattttttcatatagtattatagaaaaatagttatacaatacaatttactataatactatacaattcaatatgatctaatacagcgtaccaacttatataatttcaagttttacagtaagctgttgtttgttttaattatcctaacatgtgtgaatgtgcattctttggttgcttgctattcatgccatcttaatttaaactggctagactttttatgaagacttcattctaccaaatttactttttggagcagggcaatttcatggatctcctattgtagaggagctgcaggggcagcattcgattctgagggactgtgttcaacaacttacagcagttcaatcgtcacgaagtaatcttgtctctcttctgagagaagctctccaggagcaggtttgtaagctgtatgttttgtgttaacaaatttttggtataactttgacttctatacaaaaatgccaaaatgaaatattatgtaaaactgatgtgggttattggttatttatatttttaattttcacaggaaattaagctggatcaagttcgtaatcaacttcaggtttggtcttcctcaaattcaagaatgtttttttttctttatcttctttttcaatcttataaatttttccctttgtgaaattgatgaaggcataataatacaagaacaataataatgaaaaccacaagagtgattatttccccataaatttcaacattttagcgttcacaaaatatgaacttatggtctattgacttgaacatttggtgatcctattcattcttttggttgcaaaattttagtatattctactttttgttatatccttgtatttgtttttcaggctgcgcagtcccaatcagagcaggccaataatatctttcgtcaattagtaggtcgggacaatgtgcacgcactaggtgaccatgttccaaaagaagttcacacttcggtagctccacatacctttatgggaggggataaggagcaatctgtaccagtaatgtatgcgcctacaacgtcttttgctgaaaaatctggacacatggaggaagacccccggaaatctgcagctgcagcagtagcagcgaaactaactgcatcaacatcctctgctcagatgctgtcttatgtcctatcctccttagcatcggagggtgtcataggcagcactaggaaagattccactggcgactattcatccgaaaaaaggcctaagcttgataatgatcaatcagcatatgtaccatcatctcagaatactcaaccactgcaagttccagcatatcctcgtcctgaatctctatcacacaacgtcactaccacaaaccaacaatttaatccgagcgaggccccacctcccccatcatcatctcctccaccgctgcctccactaccacctctgcaacagtacccagtgcctcaattcatgcagactgctgggtccataggtaatggaccttcattcagctacagtatgacacaacaagcaccgtcctcaatgcctggttatccgaacgttgggggccctcctctaaacggggtgtcgccctacgcgacaaccccatcaaattcttatcagagtttccagggtccagatggtaacttctacaaccaaccgtcgtccatgccaatggcgccgatttctaggcaataagatgacttagtttcatatagctgctggtagaaagggagaaggtgctgttgtagtgccatgaagaagacaaaaaactactttgtgaagcttcattgtttctccctgctttcatttttagtaattgctctcctctcatgtgactctcttgttatacatcacctcttagattttgcacatacatagttaagttagtaatgtttgtaatttataatcttagctttaactgctgctgatttatggattttcaatacaaatctttgcattacatttgtttgaattgtttgaggatgataaattggattattattttcatcttcttccctttaattttttttagtgttgtggtctgtcaatcattaggcccatttggggcttctggtggtagtaaattttgggcctatctaagggtagacttgactcattatatattgatttgctcatcttgagaaatggaaggaaatagtaaattactaattccaatttatttcatttaaacatttatagttttgaaaaattctacaattcatccatttgggagaatattttagtttaatttttttgtatggttgtctttgttgtagttaaatgggacaatctttcaaaattttgagaaattttaaaaaaaaatttacccgctaaaaattagattcaaatagtctattttagacgtgtgtaaaataaaagagttttgcgtgtaacaaactgtttgaaccttattttttagtgtgttaaatttttttgaatctctcaaaattttgcaaaatattttaaataactacaacgtaaacgaccatgaaaaaatttagactaaaaaattctctcagtgcattgtagaagtatcctgtaggtcttttctttttgggaatattatattgggtgcttctacaatgcacctcttttaaaagaatgtactaaagtactctctacgtgttttaacatttagagagattttttagcttatttttttttcatattcgtgtaagttatagttaaataatacaaaattttaaaaaattcaaaattatttataatataaaaaaccctatcaaagagcaatacactcaaaggagtcaaggactagaataaaaaaaatatacttttgttaagcaagaatactataaaaatagcaatttagtaaaaattgactatctttttttatttggttacaatttaaggtattaaatgtgatttatattgttttgttctacattattcatgcaggatttatattacattcataattatcaaacctcaatttcataatagagttttggtaattgaattaatattatttgtgattgaaatctataaacaaaagttgtgtaataaagctattgtctaatattttatatagaatggtataagaagcacttttgcaatacagaataattttcaatttgttcccctcaaagaaaaaacaattttttcttttaaaatttaaatctattaattaataatcagagtttattactatttcacacaatttaacatattttttagacatgcatgcatgttcatatgttcttaaactatatatagcaacattcaactatatactatattgtattgaagcatatgcaatgcactaatatacttgtactaatgaggacggtggtgatgaaacaatcacgttagcattacgtgtcactaagccctaaataaataaaaaagaaaacaatgtttttcttttctctttatgagaaaaaaaaaaaagtagaaagcaaaagtattaataagtattgaaagtagagtgagtgagtgagtagaagaaggcaatatcatttggcttgggactgatcctctgcctcttctcataaaagcttatcacatcatatatatctctttttttagtcaaatgaacaaagagactaactagagtactaatgactaatcctatgcttttgggatttgtaataaacttcaccaccaatccaaatctcattatcaagtctccaactaaactaattaaggtaaccatagtgttttagtgcaaaatatgtgtacacatgttatattactatacaaatacttacattgagatgtacacaaaaacatataaacattatactatgcatctcatcactataagacaagacggtgctactttttaattagttagtgatgttttgtaatatttattaaataaattatataataagattt

SEQ ID NO: 302935 - DNA, 1816 bp, Cannabis indica
tgtagaaatgagttagaaattttgacatttaactgtcagtttgaagtggaagggaatggttacaagttcagtagagttttggtattttgtttgaattgctactgctttgattttgaatgtttgtgcagagaagactgaagagtgatactaggttccatgagtaaaatggtttttataggtttgtactttcaacagattagacattgataaacccacaaagttttaaatggattatggtaagtaaaacactagggcagacaaatagtaaaatatcacatcccaacaaaagtctacctaaacaatataacttagttagtttaagaattttgaagacagtcctcttttttaacaaatcaatttaatatttattttattttaaaccaaacatcggtttgtttaagaccaaacgattgtcattttaattccttttttagattcctaaagtaagggtatggctttgaatttggtgccattatagtacttgtatcatgtccatccacagaacctatctttcgaaagcagagaaatctagtgtagcaagaagagtcatttgaaggattgaaccttagacctcataaaatgagcagaccacacaacctaccactcatggatctagaatgagttttcacgacagactttaaatctcaaagagggacaaagattaagtaaagcaacactagtgatgatctcagtaattagtgaacgaggatagctaagtacacatacatcatacctccctcctaggtagtccggctagagtaagtttgacactcatttgttgagcctgaatagttgcaagtgtaggtgctgaccggtcgattgggtgatggaacttgcatcgctcaccaaacttacattctccggtcttcatgtaatgctacagcattaaaaagcaaatagtttttaacattcacagttaccatgagtacagtaattcattaacagggcacataatcagttaactaccgctcccttaggagtaaaaccagctgacagttaaatagattctatgtacaagcaaagcaaacaactacttatactgcacacaaagctatattcagggaaatacgttttacttttctcattgataacaccaaaactaaaaaactttcaaactaaattaaaaaaaaaaactagccaaaatttactccagaaaaaccaattactttagctgcatgtgtcacaatattcaaatacattttatttacttatctcatcagaaacattacaagaactcaattgtttcctcaaattaacgatgctactttcataggaaatcagcaacacagaaaaggacttctacaagaagaaacagataagctgaactgaacggacagtttagatagtgaacagttattccatttctatggtaactatgcagaatcaaggtttgggatgcaacctatcactgaatttattgaaaggtataaaaaacagacaaggaaaatgaagattgcttacatcacactccatttgcccagggcgttgggggtagacagtgggacccacgcccatctgcaatagaaaaataaataatatgcatcatttcacaatagaattaacacaatgaagttccaaaagaggaaggagatcataaacgtgacacagctttaaaaattaaagcacggttatgaaataaatgtatttaaggcaaaagaaggacaagcttccaagtgatcagacataattacataagcagattaaaaaactacatttggacaaatatagtaaaagactacatgatgcacccatatgtgcttgcttatacatgtgtgtgtgtgtgtgtgtgtgtgtgtgtgagaggagagagagagag

SEQ ID NO: 302936 - DNA, 1542 bp, Cannabis indica
tgttagagaaattgagtcatcacaagttgatgatgtcaccaatgattgattattgattgctgatgattgagggcagtattggtatctttgaatgaggcaatcccaagacagatttcatttaacaaattctgttatttctttgttttctgtgttgcatacgtgttgatctgtaataggctattatgccctctctgtctgtaatgcctttttctatttaatggaatcatcagcactcatgctcattgagctgagttttcattcatttctattttctctaaaattaaacttggtatcagagcttctcctagccctcttcaatggctactgaaggaactcaaatgtcccaagtctcaccagcaaaatccagttctgaaaactctccaccaagctccagtgctcagccaaacaattcaatggcagcacctctggtgactccctttagtaatacactgagtcaaccattttcgttaaaattggatagaaacaactatccactatggaaaacaatggtattcaccatcatcagggggcacagactcgaaggatttctcactggtcagaaaatgtgtccacccgaatctttcacagttcctgcaactgatgaagaaggaaatacaaacacacaatccatgcctaatcctgaatacgagtcatggatcgtacatgaccaactgctgatgggttggctgtatggatccatgactgaaggcattggatctgaagtcatgggttgcagatctgctgcaacactgtggacagcacttgaagaattgtatggagctcactccagagccaacatggatgaactacggaccaagcttcagaccactcgcaaaggagacaaatcgatggctgaatatctcagacagaagagaatatgggctgacactttggccattgctggagatccttacccagaaaaactgttaagaggtaatattctctctggtttggatgctgaatatttgtctatagttgtaccacttgaggctcgtgcagaactgtcttggcaagagcttcaaagcaccctcctaagctatgacagtcgattggaaaggttgcaatctctgtcaccaaacagcaagctactcaataacccttctgctgctttggctcaaaaaccttttggtcctgggaacaaaggaggatttcagggaagaggatctggaaactccaacaatggaaacaactcaggtcgaggatacactccacaggggtcatcttcaagaggaggcagtggtcaacgtggcagaggaagaggtggaagaacaaactcaaagccaacttgccaagtatgtggcaagtatggccactcagctgctatatgctataatcgttttgatgaaagttatatgggacaacctccttcatctgacttcaattacaatcaggacagacaaaatcctatgtctgcactggtggccactcctcaaacactcaatgatgacagctggtatgctgacagtggagcaacaatcacctaactcctgattctgacaagctgaaaacaagtggagtatggtggtaaggagcaaatgatag

SEQ ID NO: 302937 - DNA, 1650 bp, Cannabis indica
attaaaaaagctaattaattattgtgtctttggttcaatatataaaattattttattgtatgaaactgggcaggttgatagtacaatcaaaagatggaagtactactccggtccttcaatttcaaagatgaggacgaaaggtttattatagtaatgctaataattatgatacattaatatatataatattcttgtcgatcatatattattttctaaaaaaatttattgaaagaatactatatttttcaataattttctgtttaaagttattctgtcaataagaaactttgtaatatctcatggttattcattattcaaaaaataataataactatttgtagtcatattttgattaaaattaggttaggaggttatttaatactttgttaaaagaaataagtttgaaaaattaattatatagtaaaaaatatacaaaaccaataaaaatataaaaaagctaattaaaatttttgtctaaactttttagaccgttaaaagttttttcaaattattaagattgttaaatttaaaatttttgtccaattttactaacagaagcttaacgtgggaaaagttcaaagagtacgacgatttgatatatgtcaaaattcgggggtatgatttggtacatcgattaaagtttaggggtacaatttagtatatgaacaatcactgcattatagaaaattgaatagaattgaacaaaaattataattaaatttaaccatctcaatattttgaaagaatttttaagggtttgaaatattcagtaaacataatttaatacttattatagtcatatttgtaagcccgcacacgccttctttttctttgaaaattttgatatacaaatgtcaaatatatagcaaaacttaacactatacctcaatacttttctaagacttagctaacaaaacggtgcctaatcaaaatgtataatatacagaattcgatgtatatacacaaatatatgtataacttaaattatttgtttagccaagaagtgcatgcgaggtgttgagagaggagcactactagagagtcttgctacccgagactaattcgtttctcgtccaagttgacaaagattattagtaggacacaaattggagatgacaccatgtgattattggagctagccgatggaactcgttaataactatatgttgttacatattcacttatttacctttaagttaaattaataccactcacagggtttgacaaatatactcttacatcagatacaataaatatcaagactaaagaacataaagattgtaaagaccgcctatgaataatactttgaattattaattatttaagaattatgtattaataattatggaatgcatattttagaaatatattttaaatatcatatgtgtttttatgctattttatatttaattacctaatttctctgattgtgttcggaagctgtggaaagcgacgttgggcctagagagttgcattttataatttagaatattatcggggtattatagttaggttttagaggtgttgataattggtcgggaatagtaatgtctaaaatgcccttagtagtatttaacctttagtttgagaaaaagggcaaattagtaaattgccaaaggaaggtttttttttgtcttatttggctttatt

SEQ ID NO: 302938 - DNA, 2721 bp, Cannabis indica
attaaaaatatactaaacttaatctaaaattaatactaaaaataacctaactttattccacaagcaaagtttgagttgtggtttttttttaaggtaaatggaaatttttattaataggtataaattggatatagtccattacatacatatgttacacatgatcaataataataggctaaccaagacgtttacgataattagaaaaaaaaacctaacaaaatcttcaactaaataacccataagtcactagctgtgaaacatcaaaagagtgcgaagaatgctatatttctatcctaaatgaacatgtgacagatcacacctatagatgtatattaaccaaagatcttccaataaaattacgtagggacaccctaactgttaaaactagaataaatgagaataacaaaaccaaccattccaaagacaaacctaatgaaagattgatccatagagtaagtggttattaacaatccaggaatcccccaaatttgaccccagagtagaaaaaccttactaagaataaaaactactactcatattgaaacaatggaatggtggccaaccacaattgttataagcataaaacagtaaaataaataaccactcaaaaatcaattagggaaataaaaatacaaaagaagattaatggaagaaccaaacaccaacacaccagattttgggaggccaccactaccacgaggaacaaccctaccaccaacaccataaacccaggggataatgccacgacccacgagagacccaccaaacacgaactcagatgaaactcccctcctagatctccaatattaagcccaagtccaacgaagctctgacacacatataagaatgcctatccaagactactacgccataggaagcgaaaatgacttccccaatggacgaaagccaaatacggctgccagacaataatgaacgaacccccgttggtgaatcccctcaccccagatcatgaccctccctatggtacctacctacactagaccgggccaaagttgatctcgaccaccaagaagaaaccctaaaaactaatgaaaaatggcgtcgatcctccatcaaaaaaattcttcaaatgtacgtacaaaaaccccttaaccatggccacgaacaaacccatagaaaggccggtgagccatggtcggagaggataaaaaacaactttggcagtgaatgactcttgaaccctagagagaaaccctaggcatgaactttcttaagttttaatagcacgaattggtaaggttgattattgagattagtcaacaattagtcttaagaagcgagatacatcaactttaagagtcggccgaggaatgactgagtcaacgcatatgacccaggactgcttgaccaaaccctagctcgagtgatcacttggccagggttgacaaaagactactcgtccataagctttgagatgtcactcaaccatgtgcttcagatgtcactcggccatgtgcttgagatgtcactcagtatgagccttgagatgtcacttggccatgagtttgagatgtcactcgaccatgtgcttgaaatgtcacttggccatgacaaagagaaagtcactcgaccaagccctagaagaaacatggccaccaaggtaaggaagagggccactcggtcatgaccaagaagaatgtcactcggccaagctaaggaagaaagtcactcgaccatggccaagagagaaagtcactcggccatggccaagagagaaagtcactctaccatacaaccttaaagtcactcgaccaagctaagaaagagggtgacttagccatgcttggccctagatcactcggccatactggccttaaggtcatacgacatgcatgacttgaaagtcacttggcatgcatgacttgagaatcactcgacatgctagcttgaagctcactcggcatgcactcctcttcaacccactcggcatgcactcctcttcaacccactcggcatgcacttcatgacatactacttccacgacgatgtaattatacttagtgaaattttcctaagtatggaaaatgaaggtagcaagagtacgaccacaataaggacaaggcgtgcatgtgaaatgtgtataaacacgtcctctacaagctctaaaggtaagaaggtacgagtaatggtggcaccacacctgcaaggtctgacagcttgaccaaaggtacacaacatcaaccactcctgtaacccgagaccacctgataccagactaaggtacaaggcgcaagatcactttctgcaacctgcaacttgcaggtcatggatgtcaccatgtcccttgggaccactaatgtaccccaagccattaaagcctataaatatacctctttcagatgtgagaaggggttgaaaaattattgtaatactttatgcataaaaatataagtatttctcttcttctattattgctctgaacatttctgtaagtttttgaattttcaccttttcatcttcattctaagtctagtatttgagtctcgattttctgaccttaagttagttgacgaattttcactgtcaatattttctttttctaaaaaaaaaacatattttataataactaataatgacttttaatattaacaatgtttgtaaagtagttataaaaataaaacataataatataataaaaaaaatattatttctagagtttggcattttattggataattctattttttttttttttcattt

SEQ ID NO: 302939 - DNA, 1952 bp, Cannabis indica
agcggggacgttacagttttgtcacaagtaatttttttgttatagacaagttacatttagtcacaaaaaagttatattgtgactaaaaaattatcactaaaagaaactattttttgcagtgtcactattgaaatcgtgtcgctgagatgaaactcagccctgtttcttagaagagatctaaagttcagaataagaaggaaaagaaaatccattttgtaacgacaccaaaaattttaggaaaaagggaggagacgatgggaggcatgtaggaagatggatttgtcttttgttgattgtagttggtggcaattaatggtgattattatgttgagagaagaagaagaagaaattaattctatgaaaaaagaaaaagtgaagaagaaggaaagaaattaattattttaaaattatgtagagaccactaaaattctaatatgtgtatacctgtgtacactatggtatagcaaagtaatagtgaataccaaaataaaattgaagttttgagtataataaaaataattatataaaaaaataagttgataattacaaaaaattataatattatttgttattgtaattagataagatataaaaatatcttcccttaccaataatataattagtatatatattatttttataatattctcttaacatatgataaaattacatgatatatattatccacttcaatatttaattcattaaatcattgttaaggttggcacaattatatatggtgatcttcattcacaatctaattagtcttctctccttttaaaatatatatacattaattaaaataaaatattattattaaatattagtggtatcaaaaaacaccattcaaatgtaattaaattaaaaataattaaattaaattatatgtgatcttatatatatatttaattagtattgagtaatactcgtaccttataaatatatatatatttaaatatttatatatgtagatgatgatgttgacaaacaaaactccaaaaagacttctaatgaaattatgaaagcatgcatgtatagtgttaccaatcatgtctataggttttgggaatttgagtaagaccatatatatattgattattactcattaaagagaataaatctctcccaaacccattggttaattaaaaggtaattaatatttaataaagctatctatggctatggttgtagctagctataggcattacaagagttaaaactataaatatataaatatttataccacatcacattcacatgcaatggtatattgtaaaaatgagtcatattaagtccaccttcaatctttcatttgtttgaggaaacttttggaacattgcttttggtccatataagtaaccatattatatattatatgtttatatattaactttttatttgaaaaggaaccaagctttgtacaattacaatagatgatgatgatatatttatataactaattaattagtgatttattgttaagttttgacaagaggcggctataaaataattatttacatcaatcaacttcaaaacatctttgtccaaactatatacaaaacaccaaaaccctaatttttttaaagggtccaaaccctaattaataataacacatttattctagttactatcttggtttcattcaatatattttgttttaacatttttaatatttttggttccaataaaggttttgaggatatattgagaaatattaaaatgtattagtggtgcttagcacgcttcaatattatttgttgatgcaattaagtatcatgtcttatataatttaactaggaaacttcaccgcgcgttgcgcggttgtttttagaaatttgatttttttacattttttatttagagatttataaaaatataattaattatgatattatattttaatattttttacttatttttaaaaataatttttttttttaaattgttgtatt

SEQ ID NO: 302940 - DNA, 1808 bp, Cannabis indica
ataattagtacaattttttttcacttttaatcacaaattttattatgactaaaagttaaaatttttgtagtgccactatctctctctctcaattttcctcaatctcgctttctctcactttcccacctaactctgagtctgagaagcccaatgggctaaaatcaccccaccaccaaactccatccaaaacccaatcgaaaccgatcaccacgaaatccatgaaacccattcgacacatatgcgcgccaccaccgctcctcaagtcgttctcagtcaaactgccaacacaaccaccactaaatcgaatgaaaggtaccatttttttttaaaaaaaaaaatagatttttcattgttctaaaatttgtgaacattctggtgaaaattttgaacttttaaatctgtttatgtggtatgtgtaattttttacagtgttatcgatatgatattgattaaaaatcacttggttagttgaacgttttaagttaactaattttttaatattttttaatgtttatcgatgagaaattaacatattatctgtgatttgtcgatggatttgttagagattgtggttgttaattaatttttaaatgtcttgagtttgttgtcggatatcgacattttatctatggtgtatcaataatttttgcttaggttttgttttttaagaattttgagtttgtcgataggatatcgacattttatctatggtttatcgataattttggctaggttatgatgtttttaagaaattttagtttgtagataggatatcaatattttatttatggtttattgatgattttgattagattttgatgtttttaagaattttgagtttgtcgataggatatcgataatttatctatggtttatcgataattttacttaggttttgattttttttttaagttttgtagtttatcgatagtatatcgatattttatctacggttcatcaataatttttcttaggttttgaattttttaagaattttgagtttctcaattgaaggaaaccattacttatgaagaatggctcaatgtaatgcaagaagaatttaatcagtttgttcgcaacaaggtttggattttggttcgaagaccaaaaagtatcaatgtgattggacaaaatggatctttaaaaataaaggtgatgaatttggtacaattgtgagaaacaaagctcgattggtggcacaaggctaacataggtagaaagtattgactttgatgaaacttttactccagtatcaagattagaatctattcatttgttattgtgtattgacttttgggaaacttgactttttcatttttcttatttatgatttcggttttcccttgtttagagaagatcatataaactgtatttggcaggtttgaagtccaaatttgtggtcttggtacaatttggaaagttttctttctgatcctgatctctgctgctgtagagtccgattctaatgctgtaaatcagaaatttttttaagaaagttttgtacagctgggaaattgtttttgtagctgtctctagggtttctatgttctataaatagaacctagagagtagctaaacgatttacctaatctagtttttttttttttttttttgctatattttcttatttgtaaggagagtagttcttttgtgagacctagttgttcagtctaggttttagtgtttatgttattgttcttatactgctcttaggtatcggttgaagaacttgattgaacaagagaagtgtcttagggagaagactagttcaagtcctacgttcgggagaagtatgtactcactcaatc

SEQ ID NO: 302941 - DNA, 2015 bp, Cannabis indica
gattaagctataagaaaactagaaaataaaaacaaaaccaaactacaataaacttttacttgaaaatgtatgaatatcatgctttttgaactgaaaaattaagaatgaagtccttgatttcatcactttgagctctctcaattgctgttcttccatcaccatccttgacatcatacttagctccagctcttagtaactcctcaatttttggcttgtcaccttctgaggcagccatcatcaacaagatatctactgggtgaatgtttaagcttagaagagcctccattttatcatatgtaccctcaacagccagcattcccatgtagttgaaatactgtgaaaaacaaaaatgacattcaattatgttccctttttgacactagtttccctcactacaaccattaaatcatgatttaagaacaacagttctgccaatgaccacaccacaactaaatagcatttcgaatattagcaaatggggtttgaattaaaagcacgacaagaccatgtaaagtactgaaccacaagttcacaacacaaacaagttctcacttttcacttctcctcacactaattccataaccagtaaattgatttgtgttgccacttgttagagagtggaaacttaatattaatatcatttataagatgatgcaactcgatttattgcttataaattttgagatataacttaattttaattttaacaatacatctactctgcattgacccaacaccatgataaagataacaatttgttccttctattttgaaagcgaacaatattcctgagataattgttcatacgaatcctcaaatggagtaagtctctaacaatatcagatagttttatgttattttctgaaatttcaatcaaattacatttaagaaaaaatatagaattaatcttgaaataggcttctcaagtttcaacaataataaaataacaaacagctaagaaaacactcaagagagagagagagaacctgttcaacatcatctctatcaaaatcatcccgggactgactgccataaatgccagcaccttcagcatcaacaccatttttgccaaatttgaaccaacacttggctctggacccgttggagggaccaataaaagaggaagatctaacccaaccaagcctactatttcttcttctacccacaaattgggagttcaatttggggagagaagtagataaattaggagttaaggtgaggttggtggtggaagttatagtccacgggattgaagccataactactctgagtcagttccttccttccttggaaaattaactggaaaatccggcttttattatcctatccagtatcaactcacttccaattggagagttgtactacagtgtgggtaggaacattgtaaaatatacgatgctcgtttctaaatctcaacaactaatggatttgggctacattgggcgtgagagaattctttgggataaaggtgaggaatatgtctgtttttgtatccattaattaaaaaatgctttcatattatatttcgtgagttgctcaatatatttcacataatttatattaagttaaggggtataattaggacattatctacacttaagtctagcacataatttacattaacctaaggggtataattaggacattatctataaaagtgagtatatcttaaagaatatgaaaataaaagtaaaatttaaaacatgtaaaataaagtggatgtacaatgtaattagcccgaattcttttgttttaatgggccttattaattggtaaatgagattttttttcttcataaatatggaaaaatagagaacattatactctatacctttttatattgtcctcttttatttttaccctcttttttaaagtctatcatttttacctctttttttaaatattgtaccaattttacccctgtcacttcaaaatactttccatgtgactctattatgtcagggtattttgagtacaatacatataaaaagaggtatgtttcaaataaatataaa

SEQ ID NO: 302942 - DNA, 2790 bp, Cannabis indica
gcattttttccatgcactagaggaagcattgttttgttcaaactgaaagagtttatagaactcccctgtttgtgtaaaagtccatgagcataaaagtcttgacaaaaagaagtgttaaaactaatagaagcaaaagattgggaagaagacatacaatgatattggccattccatttccaacaaaaaccttgtctattatttctctatcaatgctactagctgctactgtcataagccatggtgctgagcttagcatagttccaagagaagggccactatttcctgcacaatttaaagttaatattcctttctccatggcgtggaaagcgccaatcgcaatcgaatcatcttcaaatatttcaagggaataaggatttatcgatattgtaatgatgtcaacaccatcagcaattgcatcatcaaatgcagccaaaatagctgctgaatggcactttaaggggttgcagactttataggcagaaattcttgaagagggaactcctcctcttgcagtgcctttggcaagtccataaaagcttgcaccttttacattgttcccggctgctgttgaggctgtatggcttccatgaccttcagtatctcttgctgacacatctgatgtaatcgatggatagtaacgagctccaatgatcttgctgaaaaacaaggattatacacagaaacattgtaaaaggggtatcaaaagcagaatgatatgtacttatttactttcaattaaaaagataaaaatacttgttacaagtgaaattttggccgcctgcacatgctcccttccacttctttggaggaggaccaaaaccttcatcattaaagctctctgactctggccaaattccactgtcaataacaccaactacagtatcactctcaatggccggttttcgagtaactgtttcactgagccccaaaaagtcccatgatcttgttgtttgagtttgataaattttacttgggaaaattgagactacctcttttgaacctgccaagtgccaacccccaccattttacaaaattttctatcactatttttacttggttcaaatggaacagctatgagttctagatgacttacttgcgagcttaagtctttcttgctcagtcagttttgctgcaaatccattaaagctccttttgtaacttcgaactaatgaattcgccactgaactgtaacaataacacatatagtttgtaagaaactgataacaaatcagaaaagggtaacattcaatagatgtaaatgttaataaatattcaaggctaccttaccttccctcaacaacactctgtagaatactaaggtgatgagaggctggtgagtaaaacttgtctttaagtgcccccatatacacaatataaatctgtaaataaataatggtatttttattgttcaacgttcatagaataaatatggaaaagaatagtgatttcaagaaaaaaacttgtacttgcctctctatcttcattggctttgcaggaaaagctaatggtgagaatgaaaatagacaagaaatggtaaaactgaaagcttctatacttccccatgcttgagaaactgatggtaaaaccaaaagagctgttcattacaagaatagtgcgtatactaatttataggtaaatcaaaaattcaatacaataattccttgttcaaacaaaaaagtagcataataccatcaaaatccaacaataattccttttacgacaatattgtacattgtatgacaacaatacatatgaggttaccaaacaaattcttggctggcttctttactgttattactgctattgttgacattgtttttgttattaatgttatttttataagggataatactgctataaatgaaatgcggcaatttcactcaattatggaatatattccattcattttcgatgttattaattttttaattgtgacaaaatatatcctgagtccttatcgtgttcgcaatgaatgtggtgcggttcttaactaatatattagaccacactacatagacctcaaaactgcatttcaaaaataaagtacggtgtatgtggtttgtaccgatcaacaactaataataattaaattaaatatataataaaattttacaatataagacaaattgaattcataatcaaaaagtattcaacaaaatattaaaaataacaatgaattaatatacaaaatacatgacatcaagaatagaaatacataatacataaacaaattagaactcaatacacgatataagagtaagcattaatgacactccttgattcagttctaataaacaatataaaaaacctaccgttggtaaaaaaaaaaaaactccattaatccacgaacattgaactgacccattactggaaaaatagttaaaggaagtaaggaaatgcaccatttttttggatgtctactggtagagtcttgagagacaaaggagagagacggtagaaaagatggtgaatgcatatgcatggttcctctgttttgaaacttcttcggctattcagtgtcatccattgttgcttttctccaagcttggaattgtttcactatattttagtactttgtatttttatttattggtaggtatttaccgaattatataaaacaatcagtcaaaaaaaaaaaaattaaagaaaaacttgtgtttaaaggaaagaatgagcttgtttgtaatcattctgaaatattatgaaaatgtttaataagaaacagctggcataatctaacctgaaggcctttttttttctttttttttttttttttttagttaataagta

SEQ ID NO: 302943 - DNA, 1704 bp, Cannabis indica
atgagtcccttcttgtctctaaagtgggtggatgttctttggaaattacaattgcctcccaaagtaagaatttacttatagctcatgatatctgattagacctttttttttcttttgaagaatgatggtgtgtgatagattgaatgtgcatgaagttcttcaaaagagtcttctatggtcatttcccctagttcgtgtgtactatgcagaaaagataatgagaacagtaaacatctattcattcattgtgacatctctttgagattgtggtacaaactattaaatgagtttgggatgctttggggaacccccgctggttgttcaggaaatgttgatgttctcgattagaggatgcaaggaaagacaagttctatgagtcactgccatgtcagctattctgtgggctatatggctggagaggaagaagatgaccttttaagaacaaagcagcgatttggacagcttatgggaaaaataaggttgtgggtaggggttgaaagagattcccttctctgttttattgagagtttagaatgtcattatgtaatatatgttatgtttttctttattgtcttgtatgcaagtgtttctgtatcgccatgtttacgttgtccagtggctttttcactcccttgtaatcttcttagaaattaaaacacggcaaatttgtttcaaaaaagaaaaaggaaaatctgaggatgcccttaaatacttttattacatttgattcaacaaacatcacatatttattaataaatgtctaagttgagttactagctgtcatctaaccctagattcttttttttttctttatctttttttcagtaaatggacttaccttacttattgtctcagagttctgcagttaaaagtgtcgataaaaatggtataagatgtgtggcatatgattaatattcaaaataaaatccttgcaagcagaggaaactaagacaggatacttgactaatagtaatcaccatcctaagcttacacataaatacagcagaaaataaggaaagaaatcagccatcctttttcttgattgaaaatctagttctagctcattctatatttctttctgtaatcaagcactaattctatttctttattatttgatgcaaattaatgctcctactatcttacagttagaaatttgctaataagcaattgcctgcccatgctaccttcacttcctataagccaaaataaaattatctagttcttcaacactacctatggcaatctacatgaaattttacgaacttgatgaccttatcaagacacgtctccagggtttctgtattaatgtaaacaatatgaggttctatcaaccatttatttctgcattgcaagttctcttcgtatagtgaattcatattgcaaattgcaatggtgtatgccacagtgctgtacagatttattgccttttgatgctttggctggttttgctagacaacttatgtggttggtggaagccatggaagagttggactagtatttttttgtaatctagatctctccatctaacccctacaatatttggggataatgaaactatagcaattgcctttaagtatccaaaagggactcaaacctcaaaccacgtaagagaaaatcacatgcctaatcatttgagctactcctattagtgtggcgacacaggtgtatgggttgaaagagaacatttgaaggatctgacaaaaa

SEQ ID NO: 302944 - DNA, 3191 bp, Cannabis indica
gggcaacaaaacccaacatccttaacatcaataccatttttttttcttttgtcatcgtgactctccacaagtaggacacgagtatgcatctgaaaaactatttcggtataatatgcaatcattaggccatggatgtattttgtgataatccatacctaatgagcatattgtttttttggcctcatagaatgtcatcggaatttcattatcattaggcaataaatctttcaaaaaactccatgaatctatcatacttcaatcactccatctgtgtcttgctttcaaattgtacaacactagaattgctgataattttgtaaaatttttgcaaccagggtaaatctgtttcttagcatcactaaggagtgcctcaaaattgtctggttctacatgggttctaaattgtgcatcatcaatcatttcatctaatggatcccagttcacttcttctctattcctccttactttactaattatagtaagggagtcatctaaatttatgagtttctccccatgattataccaaacagtataacttttgtcaatcccattgaaaaataagtgttcttttatcatgttcaaactcaactttctaacattaaaacacttaacacatgggcaacatgtataatttgggtctcccccattctccaaactaaacttcaagaaaaaattaaccccgttcttatattcttcagataatgtattagtcaccatccatttcttatccatgtcttctttttataaaatttaaaaaaaaaagataaataaataagcatgtattgcttattagaagaataagcttacactaacttatttcctaatcatgatgcaaagtgttcttatggccttgcataatcacatgttcttctcatactggaactttggtcctaggagttttttgatcgactgtcatactggtgttctcaatctcctgtacgcctggagtgaaccaagccagatgggaagtcactttgtggcctaccgttggtggttgtgtattagtttgttcaggatttttccctggtggtcctttcgtattttcaggagttttcacgttcaaatctgtcaccattggatcatcttgatcagttaggccccccctttgagtttctacaaccatcatgttagcctgtcaagacattaagacaaaagcttgtgttttagctctcaatgaaagcacgaaattattgaccatgcttctagccaacaacagtgaatgaagataaataaattagataaaataaataatagaaagcaaaaataataaggtaaaaagaacaccaagctttctaaaggttcgaccctgtgagtatggtgatagcctactcctctttttgttttattgacttgagaaaaagaatgaagtgttcttccttctctaaagctcttacaattcatatctaagttattctctctcttagatcacttttctctctttagtgttcttctcgattaattttgtctcttctctcaagtggggttacaccactatttatagaagattattacatgaagaatgatttctcttaatctataataaataaaataagaaactatattaattctataattacaatgtaaagaatgggaaaccaaggcatattgcctttattctctaacttaatcccataagtatagggattatcttcgtgtcttggaagcaatgtgacttatctttgaaatctccaactcacatatcctacatgatgcatatgagttgatcatgagattgtactttgttcaaatgtcttttttttattgagctcatacatcctgttatcgcagacatttatatcaaccttcaaggtcaacttgatatggcactttttttttgttatcctattttttgcactgtgacgtggcatctagcttgataacacgtgtcctacacttctcaacgtaggcagataattacactcctagcagcctctaaggattagtatgaaggtcgaagttatccatgcatagtaggatgtctgggaagagtcactaagggacctccaaatcatgttttcaactcgcatgcattgaccaggaaatgagagttggaaattttaaagatggagatcgttatttccaagtttgcatgtcacagagacaatccctacatttatgggataaatttagagaataaaggtaataagcatagatttccgaatctttgcattgtaattatgaaaataaactagtttcctattttatttgttatagattaagggaaacaattcttcatgtaatgagccctgttatccgtattctcaaattcctgctacatggcaatcatggaaaggtgccacctcgggctatgcgcatctactatgtatcttctgcttattagtataatggaagaagatatattataagagtaagtcaaaggttcttcatatgagcgaagatgggataaattccatgactcccactattcatcctctactaagaaggattagagtcccccaaaggtgcgacaattccaggagggtagcaggttagtgtgatttgggaaggatgtcacctgatgatcttagaacccattcagtcttatcccgtatggagctcaaggcaaaggttacatatcttctaacaccaaattcgatcttgtcccctccgtcagaccatggtagtgcatgtacgtgcctctaaagcctcttttttttgtccaatgtcttgtctagaaaacaacttctcaaggtgaaacctttgagcgacatgtgtctttattcccacaaaattccttaaggaaatcatataccacatgatgggaaagctgttgagatttgtatcctaaataaaacctatttcaatataatcagatttactaattaataaagatcagaaatcgcttttatgttgcatggttcacataatttatttcatgattatgtttaatgaataaattctattaagtccaaaacatatgtatagaaatatatatatttgttcatgattatagtgtcttcagcacagtgaaatataatcgctattatatgttcaaaagtttaattctcatgatttctcagctcactagatttagactgacatgataatcggtgataaggtatacttacactttggataagtgttatgtcatttctagggcattaacaatgtttaccagtattagatgtatggagtatacattaaaaaggactgatattgtgttgggttttatgccctaaataaaactcttt

SEQ ID NO: 302945 - DNA, 2314 bp, Cannabis indica
gctacctctggaaaggtatcccgggaggagatagggaggagaagatgctggtccggcccaaatttccattctcggttccaaaatctagagcccctgatgcaagcactttcaaagcctgtaagtctcctttgaatattcacttcatttcctctgccccagactatgctaacttaaggccaatggcatttgataaaagattatataaatgttggatgccccgttcccggtggggtgataacgccaaggggttttatctctccaatttaagtcatttcttgggtcggtctcggatgggccttggtcctcctgtagcaatccctttggatcattcctccttcatgacttcgagttggtttcttccttcaggggatgatgacgctagctttttaatttataagttttctagggctgagttagaccaccagggtaggattagtcttgttgcactatacttgcacttataatttttgatgacattctgaccttttgctcattttgaatagcaaaacctatggaggatctccttgacgccctagcccagacacatagccctgagacagacgcactgaagcaccctccaaatagcgtgactctggggggtcctactgttgaagctagtgggaaccaggaggtggttttgattgacgaggaggaagaggaggttgtccctcctctcgaccggaagcgtaaaagtgtcacttctgagctggagcctttcaagaagctgaagagggttaacacccccgaccctagtgtcgattcagggattccctcagaggtcgataattatctggcccctccaggcatcattctgacttctgcccatcctgatgaagaaaggattcaactccgcattgccaaaaacaattatgctatggaggaactgtccaagggagacactgaagcataggccctgaaaaagtggttaagggaggctcaagatgggccttttcgaggcgagtataccggggacatttgggatttgaatttggatcccatgacggactggttcaaacactttgtggaccctaacctggctccgttttcttcaaaaatggtgagtcacttttgctgcagatttaacccaactcccaccaagaggtatgcagcttgtgccttttccaaccctgtttaccaaatccaggacatgagtgttgccttgactttggtaagtgtcaattttctgcgcctcttttcatgctttattttcaaagttccaacctcattatttttgttgcaagattgctgcggaggccagtcagttttccaaattgatcaaggtttcaccgtgtcagagtttggtggcatgtacggggtgatgaggaagcttagggagtcagatgcccttcgtgatggcgctctggcgaagaaggctctcatggagagggatcatcaggcggcactgaagggcatctctgggaagggctcaggaaaaaaaggatctctgggactctaaagaggaaaaccagaactcgtcatgaagcttaagtctctaaaagagctgcactggactgacttggagacaacgagcaatctgaccattgaattcaaggagcttcatgaattttggtaacagactcaagaagaggctaccaaggctgggagggagtccttactggctccagttacttgtaagcactatgagaagcactttgaggatggggtgttcatgtgctggaaagccaacaagttttaacctcgcctccccttctttcccgatcctgaggctgttttggctcagttttgggaaaagaacaagaaactggaagttatcctggccgagcgcatgggcccccgtcttcctccatgagctaattgattaaacctctcttcttttattcttttttatataattcgcttattccccccacccccttttaagagaattttttgtatttattatctatattttaggtaaggggagactattatggcccgacccaaggcctttttttatttacattttggacaacttatattataagtttatatctattttgctttctttatgtctggcctatttctgcgcgtatttatgccttagtaccccctaagtgacgtaaaaaaaaactttttgggtcacttagcttaaatttatgtgggataatcgcatataatttttctagcacatggcaacttatagaataaagaataatttaagtactgaactcctaaatattgataatacttgcagagatggtcaacattctaggctctatgtactatggatttgttcattctcttgagtttataagtcctgaagcctattcatcgtcaatttcgtatggaccttcccaatttggtccaagtaccc

SEQ ID NO: 302946 - DNA, 1494 bp, Cannabis indica
atatggggtaattccctaaaaaaaacttctatatgaacaaataactaccaaactcgtattatgctaaataagtaactaaaaaactggttctggttcataagcatagagaacaaagatatagttgtagattacaaagtgtaataatgaaactcttccaaaatgaccaaataactatcaaactcattatgcacaattcactataacaaagaacctcgttaaaattgaaaagaaaagctttgacaagttaatggaaatttcccaattcgtctttttttgatggaaataaaatttcattaacaagacaaatcgtccaacactatagacgtaaataaactcagtaagaacatcactcccaccgaaaactcgaaaactcgttctggaaaagaacagaagctctagcaaaactatgagctactatagcaaatcgatacacaaacagactccaatcatacaatcaaataaatgtctatagtcattaacaactaaaccatataatagtggttggttcttaaatcaacaaatataatatttttcaaattaattcatattcatacaaacaaaaagtaattagctgagaaaatatcaatcaaatattcattaaaaaaaacacactttgaacttatctaccaaagccatacaaaaagcatacttgactctaaatttactacattgaacacaaatcacagggtcttctcaatttcagatacatatgacctaaatattgtgtaaaaaaatcgttcttttcaacgtttagtttggtaaatcagcctaataatcttcttaaactgataataattataaaactgagaacctgaacatcctcaaagctccatcgattgaaaagcttgacttcatgttgttcctgaatgattgcttccgccatggctgagaggtgagagtgtctctctcgtcgtgattctgaggcgccgagggagagagagaaaaacactttgctagggttttagtacttctatgggtcgttggggtcaaattataataatagaaaaaatagtgttaaaatttaaaatttgaaacttttgtgattagataaatatcatttttatcttatttaataacttttttttctatataatttaatagagttttttgcggttaaattctctcaattattactcttgtacttaattaagctcaaattttgacgataaaactttttaaattactaaattgtttgtaaatttaggttatgtgtacactcttatatacatttatatacatgacacatttatattgatacacttaatattattatttataaaatataaaatatatttcaaattttataatattttttactttttttaatattttatttttatttttataattttatttaattttaaaaataatttttcaataataatattcggtgtatgataactctatgttatagagttaatttttatgcttttaaactagaatattgtgaggagagtaatgaaaatgtgtctattttgcttaactttaattagt

SEQ ID NO: 302947 - DNA, 1802 bp, Cannabis indica
tattttggtaatttttttcctttttgtatttttttgcttttttccctaatatataccattttttagagagaaaaagaagattaaaagttcttaaaaaggaataaccaagagttaatgttaaataaataaaagagaaactcttcccatttgtaaaataaaataaaaaaatttgatgcaatatttacatttacgaaagttggaaaaaattatttattttatattatacaaccatgagttgaggaaatccgagcgacggatgtggagataacggagacaaaggcggaacactgaaaacccctttaaggtcagagtcccaagccgtccaatttgacggcgttaacggaatatccctcaagtaactgagagagttatcctccgcttctgtgaactttatcttcttctctatcacaactggtttcgcttctgtttcttcctcttcttgacggcgtcgtttcatctcaataaccttaacggtaacattctcctctctctcgtcacacttgccagcttccaatggaaaattaagtatggcttttgagccacgcagcttaaaggcggctctgtcataggctttagcggcttcaatagcggtttcaaatgtacccagccaaaccctggagccttttcggttcgggtcacggatctcggctgcgaacttgccccacggcctttgtcggacccctcgataatgcttcttctcctcatgaaccacggccggtttctgaacctgaacagccggcttcggagccccgaattggatccattgcgctggggtcttggccgggagcgaaatcttcaacgacctttttcggctcgagggagagctcgaatcggtcgatttaggattagaaatttggggtttcgactcgaattcaaatgaattgcagctcgcttcagagtttgaacgtctgagatcaaaaactcgaggcttcgattcgaattcaaacgaattattattactattgttattattattatcattactcatatttaaaattttaggggttgtgagatcgaccacttcaggtttcgattcaaacccagagaaatcagagcccaagtaatcggagacttggatcagagattcagatgaagaagttgaacaatcaccaaaagggaagttactcaaaggagaagaaaggtcaccaagaagatgttgtttaatgaactgaagctttgaaaattcgtcgatgttagccatggatgatgaaactgacctcaaacagttaattttttctagagagagagaatgtgaagaggaattggtttgattgagtggaagataagagtgaagaaaggggtatttatagagagagaaggcgcgagtttcatgggataaggaaggagagtgagaggaagtatcgttgcttgcacacttttcaaagagtcatatcaacttttactaaatactgtcactttcgtaattatttcttgctttgttgtcccttgcaccgttggattaaattcaaaattatacatctacggctgaaatttgattctttggatatggtaataagatgacataatagtggtcagtcattcattttgctactgtagtgttatggttcggcgttgcttcctaaatatccacgtttgggattaaaggctttaaatattacttaaatagtcaaatccttagaatcggtaaaaacaaattgtctggttttgacaaatcttgtacgtaataatacattttttaaacgaaaaaatgttaattccaaattctttatttatttattactgtagaactttatctttgtattattttattaatttttaaaatttttacatcaaaaattcaa

SEQ ID NO: 302948 - DNA, 1651 bp, Cannabis indica
tctaaaaacgggacccacaacaaaataaaattataaataattataaaaaaagtccattattaatgttaattacctttactaatccatattctatcatgcagtcattaaagtatattattggtctcactagagaactttaggtttcactaggcccgaaggttccaattccctgcttcaaacaacgaggttgaatgcaaagcacttctcgtgggtttgagaatggcaaaagtggttaatgccaaggcgcgcaattcattgcctaagtgattcacaattgattgtgaatcaagtcctcaaagactactaagcgaaagggatgaaaatggctaagtacttagaaggagttcgaaaaaacatggaaaattcaattattttaaaattgaacaaattctaagagaacaaaactctaatgcaaactcattggtcaaatagcatcacaatctgataaaaatgacctcaatttagttcccatcgaaaaattagcagaaccaagtatatgtgagatggaagaagatgtggaaatgattaatgttacccgacttggatgaccccatcatcaattaccccgtgaaaggcgagctttcgttagacaaaaatgaggcaagaaagcttatgtatcaggtgtcgagatacacaatagtcgaaggaaagttgtactgaagaggttattcaatgccattgctttgacgtgtatcaccaacagaagatgagaacatcatcaaagaaattcatgaaggtttcctgcagcgaccatgatggttggtaaagttttgtcaaagataattatccatcaaggatactattggccaacaatcaacaaagatacacatgagtttgtaaaaaaatgtgataaatgccaagggttctcacatattctgaggattccaccgacagagcactgtatgatgacctcgccctacccatttgtaatttggagaatagatttaatcgggtctttatccacaaggcaaggaggggtaaaatatgcagaggtagcagtcaattttttcacaaaatggaccgaagttgagccattggttacgatcacttctaaaaaagtcttagacttttgtggtcaaaaacataatgtacaggtttagaattctaattaaaatagtgttagacaataggacagggtttgatagtgacctaactactgagttttgcgagagaaacaaaatcatcaaaagcttctgattagtctcgcgacctcaagccaatgggcaagtttaagcagtcaataaaaccctcaaagactctataaagaaaaaaaacttgacctgttaaaaggaagataggttgacgaactaccacaggtactgtgggcccatcacaccataaaaaaagggcaacaggacataccctcttctagttggcctttgggtcagaagctgtaacgccctcacaattaggcgtgctacaattttcgataatcataacctaatctcgtgattactaaaattaaaagcagaatttaaactttaaattattaatgaaataaaaataaaacttgtaactatttaaactttaagaaccattcaaaaagatttcttatgtttcgagatcccataaaaattttcacaaaatattacaagtaaatttttacatgtcgacctaagtgacaaaattgagaatacaaaatgcagcagcc

SEQ ID NO: 302949 - DNA, 717 bp, Cannabis indica
ttttttttttttttgtaaaaggtataccatgagattaataatagtatatatatatattgtctattacaagtataatttcatgtgacaaaacttataattataataaggttgaacaatacatgcatgtccatcacttttttatttggcatttatagatatagatatagatataaatatatattggtgaagaattaaaaaataaaaatggtgataataattaatgaatttagttgcgcctatatatgaagtcctcattggtatataagtctaatgggcgcccatgagtatgttgtattggcctagcattagtatccgaaccctgccaaaattattaccataattacaatattaattatatatatatatatattacaaaatcaaaataaaaaaattgaacaaaaattaaaaattaaaaagtggtatataaagtaatcctttatttttcttaataaataatagaattataatcaactaaagtaataatctactatccaatcaggacatcgagacactatcgaaattaaaattagaaagaagacaagtgaaataatcaacacataagaaatgacaaatcatatggttagaatttattattttgcactttaatttcaattgaaagacaattaaattaagaaatattaaagaatattttaagatgtcaaacacgtaagaagtaaataaataatataaaaaaactgctaactaattataaagtgt

SEQ ID NO: 302950 - DNA, 4235 bp, Cannabis indica
aaatttaaactcattataagtttttttttaactaatatcaaatttaaatttttttatcttaaaaatataattttccatccataaatttgaatatttgacctattcccacgtgaaatagaaaaagaaattgacacgtggcttataattattgagagatttgcggtttaaacagagattatttttaggattatctgattttaacagcctataaataccccattcagtttcattgtatccattatccaaatttaaaaatctgaaacccattccaaaattccattctctctgaatcgacgatcggaaaaagatggcgttgaatatcgttcggattgcggcaatggctggaactactgtttcgggagaatcgggatcaagttcatcggtaacggcgatgtggaaatctcccgtgactagtcatcgatgcaggattattcagatgccggttgagttcgccgacggtagaataacgccggcgcggagtccgtgtaggtctaggcaactgagtccttgtcggactccgccgcggagtccggtgtacggaggaatacgggcggatttattatcggttgcgtgtcaggcttatttggcgacggattatttagaaccggctccgccgtatgtggtggaggagggagatttgtctgaatacagagaaggacgtggtgcgcatggtaaggagagtggggtgccggtttatgtgatgatgcctttagatagtgtgacgatgaatcatacggtgaatcggaagaaggcgattaatgcgagttttcaggctttgaagagttctggtgtggtggggatcatgatggatgtgtggtggggtctggtcgagggagactcaccgggatcgtacaattggggaggttacaatgagttaatcgagatggctaagaagaatgggcttaaggttcaagccgttatgtcttttcatcagtgtggtggaaacgttggcgattcttgcacgtacgtattattattattgttattagtattatttgctttaaccttttgttaattattatttgacatgaagaaactgttttgtaaattagtcgatgaaaattttattaagcaaaataatagctaagcaaatagcatcgtagatttataagtgaggttatttcgtaaattttagtatttcacattattattatttaatatttaatgctctgtttggcttggcttttttttttttactgcttctctaaaagaaaaaaaaacaattttagaacttacaattatttttttttttttgttttggagtgtttagcagtttaaaattagtttttaagagtcaacacaaagtttcttagattatttggatttttttgaaaggtttacaaattagtttagtaattttgtagggtcggggtcgattggttacttgtacgagtagaatttaactggtgtcaccaatttcctttttatttatgtaattaacactctttctattatttcatttttaaaattctgatggaatccgtttgctgatgattttgattttgaatttaatacagtattcctttacccaagtgggtggtggaggagattgacaaggaccaggaccttgcttatactgatcaatggggaaagaggaactacgagtacgtttcccttggatgtgacaccatcccagttcttaagggtcgcactcctgttcagtgttacgctgatttcatgcgttcatttagagacaacttcaaacacgttcttggtgacaccattgtggtgagtaatgtagccgattcttttgttcttataattattattttggtcaatttactttctttcacggattctgttatcaattattagagagttttgtttgactgagttttgcatgtttggttgttatcaggaaattcaagtgggaatgggtccagctggtgagcttcgttacccttcatacccagagcagaatggtacttggagattcccaggaattggagctttccagtgttttgacaaggtactgtttttaccattcagaaattcattcatagagtttgtattaggactagttcacatatgtattgtctatggtttgttaagaaaccaatcataagtatttgttatgtgccaatgaattgacatgaatcttgattatcatatgcagtacatgatcaaaagtttgaaagctgcagcagaagcaaatggcaagccagaatggggtagcacaggtcccactgatgctggtcactacaataactggcctgaagatacccccttttttaaaaagaaaggtggaggttggaacagtacttatggtgaattcttcctcacttggtattcccagttgctgatcgaccacggggagagaattgtctccgcagccaagtctattttcgaggacaccggtgcaaagatctcggtgaagattgctggaattcactggcactatgggaccagatcccatgcccctgagctcacagcaggctactacaacacccgtttcagagatggttacttccccatcgcccaaatgttagctagacacggcgccatattcaacttcacttgcattgagatgcgagatcacgagcagcctcaagacgccctatgcttaccagagaagctcgttagacaagttatcatggccacacagaaggcacaagttccactcgctggcgaaaacgcactgccccgttacgatgattatgctctcgagcagatcttacaggcagcatcgtttaactttgaaggtagcaatggagaaggagagatgtgtgcattcacttacttgaggatgaatccatatctgtttgaggacgataactggagacgatttgtgtgtttcgtgaagaagatgaaggaaggaaaaggttccaataagtgttgggaggaagtggaaagggaatcagaggattttgtacatattactgagccatcagtgcaagaagcagctcttgatcttatacactgaaagaaagtatatataacttattgcatttagttacaataaaaggcttgtttgtttagtgttttgtatacacaaacaaggaacttgtattggcattattagttcaaccaaaaaaattactggttttctttccacagttctttttcttatgctgtggattgaattgaaatgggttttgggatctgtattttgaagtctaaaaccccataaactttgttatacaaaccttcattaattaatgaaacatattagttttttcttttttttttttttttcttttttttttaaattgttgcttgtgtattgctgtcaaatttgatttggtttttaactgttaataatttacttatggttttttcttataatttacattactaaaacaaatgcattaaatcttactatttatattcaattccatatgcatactctttaaagtttcggagttataccttaggtggggattagttggaaagaatgaaaaaaataaggtggtgtttagttgggagtaatgaaaatataggaatggaacaaaataaaatttaaaatttataaaaaattaataataaaattattattttttttcgcattggaatgatattttaatgctttaatatacaaccaaataaaataatagaataaaaattattttctttctattatattttattatctccaatcaaactccacatgagagtagatataggaatggaatgaaattaaatttaaaatatatacaaaaaaaaattgataaaaaaaattattaaattttttcatttcatattggaatgattttttttttccaaaataatgtaattatttcacaaaaatgataaaaatcatttcattaaaatgacattccaatattaagatcagttctgagactaattagtaacaaaattatcaagccattttttaaagaaaatttggtgatttaaaattaataaaatatatttttatttttaaaatattttcttttattttaactcaggactttgacaatatgttaaaatgtaactaaacaaaacaatagatgaatattattttctaactatttcattatctccaaccaaacgccaccttactttatagtatatagcatcttataaaataatgcatattattgatagagtttttggcagctaaaccctcccaactatcgtttcacttgcacttaaccatccaagctcaaattttgacatgaaaaccttctaaattactaaacagttagcaaatttaaggtgtaacgaccaccatagactgtttatgtgtacactcttgtatacgttgacatgtttatatcggtacacctaatatt

SEQ ID NO: 302951 - DNA, 2948 bp, Cannabis indica
ctttctctttttcaaaaaaaaagtaatctgtgtagaaataggattgatgtatatttataattaaaatagaaacaccgtaatgtcaccattccaactttccaagatgttttatctctacttacataattatatttatcaaaatcgtgccccaaaatagatggaaaatctttctgtttttaaatttatgatgattccatggaactgttctactgcctttcaacttacaccacctctcttcttgttgatgtattgcaggtgtctctgaaactgtcgtcttaaacatgtctactcttgtttggtccgtggtgactactgttgaaggccgggttcctgttgcgagtgaggtattttgctttgaaaaacttctgtaagctcaccacaatcgtctaaaagtttctgttatagcttgttatatttgcaacttaccagaggtgagccaaggaaacaatggaagtcatgcagttgttttatttgtagggcttgagtgtggtcgttgggtcttacaatggggaagacatacttgtatcttttgggggctataatggacgttacagtaatgaggtgaggactatttttatgaaattttctggcttcatcttttgttttagaccctaactttccttcccgtctcatgttagatcaacgttcttaaaccaagtcacaagtctaccctgcaatcaaacatgattgaaactcctgttccagatagtgtttcagcagtgccaaatgctaccaatgcgactagagatttggattccgaatttgaagctggccaagatggaaagattagggaaattgttatggactcgccaatggtttgtcttattgacataattggtgtttattgtgattatttgaaatgtgcataaaagatagaataattggtgaaaacagatcttttttcatatcattttgctaaatcagtttttttttaaattaatttcaaaatgacctttctcatatggtgagtgtatctggaaaccattttgcgaagaattataaaaaagagactattaaagtgatcatatactgaaaaaagggtatcttgcctaccatcggaagggatatctgcaaattttggtagtgtgcagatgtgtttcatcatgtaactatgaatgcatgcacacttaacaaactttataattacctccttgattatcatattttcattggataacttttcttttcagaatgctgtttatatagttttcttgtattataacccacttttgctagtgactaaaattacatttctctgcttgagtttagggtttagggtttatattttttttcatcagttttgtctttctctgtccaatcattcttcccattgccttcttccacctagatatgtttcagtgctgctcaaatcctcgtggtcttgtcttttgcatttgtctactatgaatttaagcttttttattcttttgcagaaatctaaaggtgagaagagcagtgaccatgttttagcatccctcagagctgaaaaagaagaaatagaatcttcactgaacaaggagaaattgcagtcattacaattaaagcaggacttggcggatgctgaaactcgtaacactgacctttacaaggtaatatgatgataagctgtgattttgattaacttgcttggatgtacaaaattgtaatttcctcagagaaaataccctttttcaatgttaatttatatacattgtaggagcttcaatctgttcgtggtcagctagcagcagagcagtcaagatgtttcaaactagaggtattcacttgactttggacaactttttcatatgatcactgtaagatccgatattgtttgatctaacaaattcattgaaattacttggccatttgaatgcctgtgctggccaatgcaatgacactacacctaaaatatttaccttctggtggttaccgtgactttcatgggttgatatactaaatgaatcaagaggtttttaacatgacattcgatcacagaagtataactgatattcataatacaatagagggaatgcttaatcagcaggctaacctaaatccacttaagcccgagatgaaactttggtatttttcgatgtgacaaaagaagaaagaacaaagtaaatgaagatggatactctgctaattgcttttgaactactacaggttgagcttgctgagctacggcagaaactccaaacaatggaaactttacaaaaggaactcgaacttctccagcgacaaaaggctgcctctgaagaagcagcttcaaatgctaaacagaagcagggttctggtggtgtttggggttggctagccggaagccctcctccccagtaagctgacaatgtcagaatgtattggccaggcctaagggaaacagggttgctggatgtgattctcattgatccattttttgcccaaatatatattttcttttctttttttttttttttgcattaacagagctctctttttccgggatagaataagatatatcaggttcatattggtggagacggctatattttgggattttgcatgaatacatatctgtactgtcaaatgcttagctttatttgttagtgagatgattttaattcccctgtttatttagtcaccaaattattcgatgtttgtattcgaagtgaatatatattgagtcaagtaaagaaaatatctcaaagtttgtaaatttgtccattgttacatcatggagtatatgtttatgtttttctttgccatttatcgagcaatctatctaaatagcaattttatttttacatcgcaaaagtttattcaattattattatcattcatcttcattttcggaccagtgtaaaatgaggagtttctgccattgtaaatttagatagagtacctaaaatcatataatatttttttttttttgggtaaatagcattttggactctctgttttacaaaagttaccaattggaccctgtgttt

SEQ ID NO: 302952 - DNA, 2678 bp, Cannabis indica
ttatttatttattgaaaaaaaaaactcaacaccttttacaaggtgcggtatggaagtattaagggaaaaataagatcttgcatttaaactgctataaaattgcaaatgagtgattggagttaggaaaatgtggtcattaatgtcattttttatgtgtctctttaatagttaatttttgcaatttgaatttgttcatcaggtttttaggagctgttgttgttatagctgcaaatgctggtggtgcatggactccaattggtgatgtcaccactaccatgttgtggatacatggtcagatatccacagtagagacaatgaaggtctaaataaaacatcatataacacttctgcatctattagcattttgtccattttcctaatgccaatgcaaaaagaactgggtttgatttacataaaaggaggaaaaactacattgctcaagaaactacagtgccttacaattttcatgttaaagccaagaactgaaaccaactggaatgttgcatggatgtcagaaaccttttctacacagattgatatgtttcaaaatgtttaccactcttgattttgaatgactattctttatttgactgcagagcttggttataccttcagctatttctctcgctgtaccgctggctcttatgtctctgaccaggtactcttcaggctttaccagagcaaagcaatgagcatttggtagttacaaatttacacttaatggattatgtgcgttaataatgttttgcaagctcgtctatgcagtgaagtaagtgggagtggccaggacactcccaatgttttggcatctgaacagatggctcctcgaggacagcttgttttctctgtagggattggagctttaatttttgttccagtattcaaggctctaacggggttgcctccatacttgggtatgctgtttggactgggagttctttggattctaactgatgctatccattatggcgagtctgaaaggcaaaggttaaaagtaccccaggctttgtcaaggattgacactcaaggagtgcttttcttccttggaattcttctgtcagttagcaggtgactatccaattgttaaatgattgtagcatagattttagagagatatgacaattcagaaccatgtctcacaggttcgaaattttactcaagcacacaacttgtacaatctgcattatttatatttaatttgttcttatttagcctggaagcagctggggttctacgcgaattagcaaattacctagattctcacattgcaaacgtcgaactgatcgccagcgcaataggagttgtatctgcaattatagacaatgttcctttggttgctgcaaccatggggatgtatgatgtaacttccttccctcaagattctgaattttggcagttgattgcattttgtgccggtactggtggatcaatgcttattattgggtcagcagccggagttgcttttatggggatggaaagagtggacttcttctggtactttcggaaggtaattaataaatcactcagctgataatttaactacttgaaatttcatcatttttcttgttgggtgactgagttcactcctttccattgcaggtgagtggttttgcttttgcaggttatgctgctggcattgctgcctatttagcagttcataatttccacttatctctaccaactactatagcagaggttcctttcctttatgggttcacacactaagaaccaagctctggatgcctcgctagcttcggacaaggcggtatatacttcaccaaaagagtcaaacaattctaggcttctttaaagtttcttcaaaaaaagtaatagaattagtaaattgaagtttattttgtaacttatgatggaatattgccctagtagtccaatagccaaccatgttactgagcattcattaaaataaaggtcaagggttactctttacaccgttacacgttttcatatgcttcataaaattgtaagaaagtaagaactgaggtggtgtttggtttagtaaaatgtaattgtatggttatacgaatagtaaagaaatgtaatggtagtagtaataagaatactattacgatgtttaatttattttgtaatgagcattgtaattagaattcttttgtttaatttagcacggaaagcgaatgaaatatgtggtatagttcctccaaatttaatgatctctaaacgttatttcggttatagaaagatagatgtcttttggaaggacattcttagaagtctaacttgaccatttggaagtagtctcgtggaatgataggtgccattcggaagggctttctcaaatgcctattatggctacctagaatgagtttttaggaaaggtagccttcctttggaaaggagtttcggatggccagttgtttcctcctggaatggagtctcggatagttgactatagctgttgtctttcctatctgggaagtagggatggcaattatactcgcgggttcgggtacccgcccctaatggggcgaggacgggggttgacttttgggggcggaggcgagtatgggtttaaatattcatactctagtcggaaacgggacagggcagaggaatagatacccgccccgatatgatatatgtacatatttaagttttaaaatcataacttctagtctactacaattaaaataacttca

SEQ ID NO: 302953 - DNA, 1364 bp, Cannabis indica
agatcctggtaaaataaattccaacagagcattggtgatgaaaggtttaggcattaagggtgtgggaagatatatgttattagtggagattgttggagtcaaaggtgggggataagtggcaacaaggaagataggtggcgatacagacccaatatcaggaaagaaaattcttggaaggttgacaacagagttagatatgttgttatcagatgcaaacctgtgttgatgagagaagttattggcaaagttaaaagcagaagagtgagaatttggttgtaaagtagcagatgttgattggtctagggaaggcctaacggggcctggatacaaagagatgaagaggactcattctctagtatagatgtaggctgtggttgggcaggggagttcaatcggggaatggcagatttgagaaaggtgcgcgcaaggcgagttaaaagtggccatgcattgcctttggcaaaattagttcaatacttatcatagcctgttgtaggaagtttagcacccttcatccatggcccataaggcagatcatcatcatttccattatccattctttccataaactttacacatttctcaaatgggtgtccaagtaaacctcattcaaagcaaaatttaggaaggcgctcataacgaaagtcaatccaaaactcatcacaaatttttggcaagcttatcatgcagccccaagggagaggtttaaacacaggaagtttgacacgaatgcgaagaaaaggcccctatccttcatcaagtgagtcctcatgaacgtctatgtactcaccaattaatcctcccaaagctttagccaatgcttttgatttactgagaaagggcaaacggtagatttgaacccaaaaggttgtacaattcagatcacttattgatatattgtgcagattatttagagtgaacatcacacttaagtgattttgaaagtgccacggctctttatttaaaactctgagtttgtctccagaacaatggaatacaaccttgaacatatcatcaccatatgcagtaacaacagcaggaaaacgcccacgccagtgaccagacatttgatcgataaaggtaggtggatggacataatttttagtaaggactttagctaggaaaaagtgttcaggaaggctcagttgggaaggtgcaacatcctcagagatagcaaaaacattgcattcctcttcagtatgtgatagttgttcatttagagaattcattaatggatccatttagtgtaagcaatcgttaacagatgatacaaaccaggaagggcaaatcaatggagtgattgaagattgtgaatgttgggttttatgccctaaataaaactctttacaatctgattagttatc

SEQ ID NO: 302954 - DNA, 1339 bp, Cannabis indica
aaaaaaaaaaaagcaattataccagctgcagtgcatcatagttatcatcccaatattcatctgctttttgacctaaccatttttccaaaattgcataaggctcacagtcctgaaatccttgcttgttgttaagcacccacacacgcccttttccatcattctgttaggagatggggaagtttcgttccacacatgcatcaaatggcaaaaaaccacaatattagaagcccaaacattaatcttgaaaaagcttcacaagattatagttaaattgtagttgaatgaaaaatcaaaattagattctgttagctgtatattaagagttaattctagtgtcccaattgtataagttatctaacatagattcctatatttgtatatatatgtgtatactatttcaatgaaatacagcttgattttttcttcacaaaacacatgatatcagagcatatattagaattcaaaatttgaattagggtttatcacaaaattggtatttgaaactaggatttgaaatttaccttttttagggttccacttttcggaagcgctatttgtagagggttagaatattaattgtagattagccagaaaatagggtcagttgtaattatttcttttcttattttctctcctttcctagtttagtttctctaagtttgtataaatatatgttatttacatgaataaacacacaattcaattcaccattttctacacagagcacttggactctcacagccgataatgacggacaagcactaacagattgtccggtcgtcgatctacaaaaccacaaaattttgtggccagaaacccagggcgtgatccccacgtgccaccataagttcaggcaacgttccccatgcgccgccatagagtatgagaaagcatgttgtattagtttccatatgtttattggtagtttataacttaggagaccatgtttatgactctgattagagtttttgttttattttcaagttttttgttaggactcaaatattagcgggtctatcattttcccttgttctcatgttacaaggttttcctctgctaaagcctataactgaagactatttaataaactcgggaggaggtcagtcctagacatttgacctttgtctctttattaaatttaaaataacatagttaatgatacaatttatattatttcatggaaattgtcaaaacaaaagaaatgttaccactacatcggtaacatcaatgacgcctatgacaccacggcccatatctgcattatgaatcgccccaccaactctcttgtaagcctgcaagaatttccagtgtgtgtgtatttatatatatagatatatat

SEQ ID NO: 302955 - DNA, 1155 bp, Cannabis indica
taaatttttttaaaatttacaaaaataatgttgtaattataatgaacactattaagaaaaaaaaatattccaacatatatattcaaatataaaaattagaaaaaaagttataataaaatattgtaattaaaactccttttcttgaaatggacactaattatatcatccttcttaaattaataaggaaaatgctaaagggtaccagtggtgtctaacaccctcctatgtgtcaatatcgctattggtccaattaagtatagtttaatctaatagcttttagggagtattactagccaatcgcaatgcgacatatcgagaaagttctagacacttctggtacctaatagaaatgctcaattaataaaactagctaaaataccaaacaaatctaactaaaattaattaagtaggttgtaggtgtagaaccataaataaatttgtcttctagagtagtacgtagtagtagtaggtaataattaattattagttaacatgcaatgccttgacaatagaagtacacttttatgttccatactgatttgggcagtcacacaccacaaataaaacatagctcatccgaaaaaataaaaggcataggtatatggacccaaaaaattaaagaaaaaaagatagggacagtatggtggataaatttttaattaaaataaataataagaaagattggtgaacaatatatgtgtcggactcattactataaatgaaatgtgtatataattattgttggaatttatagtctttaattcttacacaactctatcacaaagttattagtacacaagtggtctaattttgaccactcaacacaacagtgcacacacactcaatctttaatttgctttgatcaagaaccaaattccaaactcttctgcagaaatttaaactgaaaaacaaaaaattaacaaagcatgaaattctgtttttatggttagcaaagtgaaattaaaagataatttaattaatgttgaactattataaaattatttgaacagaattgaaatatattttattcaaaattgaaccttaaattataaatatgctgcagaaagtaaaattgaaaaaatgaaaatgacacatgatattggagaacattgtcctacatggattaaatgtaaaagtattgagtcatatataaga

SEQ ID NO: 302956 - DNA, 2078 bp, Cannabis indica
gaaacagagttttatttagggcataaaacccaacagattatcctatcagttaaaccatgtgtactgataaatcataggaatacatttaatcacacaatcttgattgctttccaatgtcttaacaacagaataaacaagaatatcagtgcgataaggatttggatgaatttataaatcaaataaataaataaatgatcacatgaaccaaataacacaataaataagttgaaataaaattttattctttattgataattgaatagaaaatattacattaaaatagagttttatttagggcacaaagcctaacaaggtaagttttagaaacaaacacgcttttcaactttttttataattataatgcttgtgatattaaggagtttcttttgagtggttttgatttgtttcaaaaagagaagctgactattttctttggtatactttgggatatttgggatcatcgtaacaaattcttctttctagataacaggactctttgtacgaatatatggaggcttttataacttcttacttgcatgaatacaacaaagctcaagttcaagaaatttcttatcctattagccctccacttgagaaagaaccctgtgctcccttcccttggaaagtataaattgagcgtggatgctgcagttaagagccaagataacaagcatggatttggtgcggtagttcaagactcacaaaacaacataattgcaggtttcttatctccagcaacctcaggccttcctcctatctatgcggaagtagaggctttttttggggccttacgtttgtgtaaggcggttcatttccctaattgaaattattgtcatagactgtcaagtccttgcctcgaaaattctaaagcaagagaaggatcacttagccctttccgatttgatttggaagatcatccaatctttgtccccttttcctaatgtagcaatcaagttcacatttagggacaacaattttatggcgcacgaccttgctcgcagagcattaggaacagataaagagcttaaacaattgtgtttcaagtcctctttagatctttgtaacatgttctcttttgctgttgttctttgattacaggtcttgttggttcaaaaaaaaaaaatcgacatttcaaattcgcactaagtaatattttgggttcccacgaaatattgaaaagaaataaaataacccatcaaactttaaaaatatatataattaggtgcttcttagtgaaaaaaaaaacctccacgtgtagcgtttccaattatatctctaacatccatctattggacttttctagaggtcttgtagtaaaaaattcttatatatatttgtgatatgtcaactttggcatgtgtatgcatgacataaaatatgatatgatataattatgtacatatattgcttatatgagtctattttgtatttgttatgggaaattaatgctaattggagattattatattgatgtatatactttgacactatattaatggtgttatctataactctattaaaagagagaatgttgtttttgggctttcttaaagtaaatgacaaaaatgtcattgattttcttaattaattacttttaaatccttctatttttttaagagagaattaaatccttctatttaatgggatgagaattatagtttctttaaatatgttttgtttatacaaagagaagattatagggctaataagctatatttttttatcattatctattagtaatattgtttttaataatatcattttgtaatatgtatatttcacatttgataatacaaacttatatatatatctatttgaagagagaaatttgaaaaaaaaaatgaaaagaaacataatgtatatcctaatttatagagttactacacttttttatttttttataagatttaaataatttaattttaatgggtttgtattatttaatttgaatttgaattttaattaatttaattttaatagatttaaaccaataagatttactataaacctacatttttcacatttgataatgaaaagaggtgaaactaaagatatatattttcaatgctatgcaatct

SEQ ID NO: 302957 - DNA, 2075 bp, Cannabis indica
tttttttctcgattttttttttcagggggggcgactgccccccctcgctacaatgtgggtccgccccggtgtgtgattcggattgccagtaaattctattaccaaactatttttttatattttattttttttttaataatttacgatataaatacttaagttaaaatgacacgtaaataataatttaacatttaattattagataattacaaaattttaaaaatataacttaaatattaatattataactacaaaaaaatataatttaattatttatactataaattatttttttatatatattttaccataacagtgaaaagcagtttatgcagtaataggacagattacatttaatgggctgattaagatagggacagatgtttataaagataagcaaaatcatttcaaccacccaaaatcaattatgatcataaaagtgaaaaataaatatacggagacaaaagtagttaatgaatcatatcctttgtttccttctaaatattttccttgtcaccaaactgcaatggaaaaacaaattacattccctttatgtttcattaccaaatctaatccactacctctgcatttctctttttctttttaatcttttatgctgaatttgattaacaattgctgtaaaaatgagttacttccccccattaattcaaaacactatataatatatatataaggtggaccaatctatatatttagatgatcatgccctacctcaaggcaaattaaataaaaacttctaaaaattactgacactgttgagtaaatgatatcattatttctatccatacaggcatatattagctctgtaagtgtaccttttcttctatcataaatgaggaagttaagaattaccacgggcatttttttttatttacttttttaattattgtagtaaatactaaatatgaatatgaccccatcccttccctatggctgctatagttaattttcttttattaaattattatttataattttaactggttccattccacattaataatattaataagtaagaagtacctgtttggagacgttactgcaaaatcaaaccagcgccgttgattttcatgccacttgatgattcggccgtcggatacgccggtgtatgggccttcaccaaagctgtcaaaggcatagctttcagggccaatagccccatcgattgggataaactcaaaacgtccgaaatcagcaccgtcaaaatcacgagaagaagaagaagaagaagaagggtatgagaactggaagaggttggctgcaaggacagatgagagaagaagggctcctatggttgcagtaggaaagagtttggacgccatgattttggcatggaacaaaacatacacattaactagctaattcaactttataagatgggttggtaaagggtgataatattatgctatgactttgttaatgggagaggtatagagcttctcctttcttggagcacaactattttgtgtctatatatataaatatacatgtttatatatttagtaattaatgctaattaaggtgcataacgtacatgtgtcaaatactagaaagatcaactactatactatactctatatccaataataatgttttggtcatgataaaaatagcataatgttatctctaattacacacaaaatcaattttttttggaaaaagaaaacgatgtcgtgtggtccatgatattttgataggtctcaactcccgacatgtaatactgacacttatgtcatttttgttatgataacacctcttctttattttctacagctttaataattagttccaaactaatatggtaagaatccgttaccatcacattattgggcttttcactacgtatatatggatagtggacagctactttcgtacaacagagttatacctaaacggtttaagattttgggattaattttgggatgtgtagtcaatgtttatatatataggattgcatttggagatgaattatagaatggatttagggagggttgggttggatttactgaaatggaatgaatttttttgtttttttcattttattttattatttg

SEQ ID NO: 302958 - DNA, 3768 bp, Cannabis indica
ataggctcataatagtggtaaaaaactattattgtcgtgtataattgcaccatacttcgcacaattttccaagtggatgtagggcattctacgaccaagaattaaaccactttttcctaatagaatcacttgacaaaatcaaaaaaaaaaaaaagagagagagagagagagatcaggctaacttgaagttacaagtttaccaagaaaaggtgcccagatactttaacaagcacgtcaagaacaaaaaattctttgtaggagacatggtactttaaagagtatttttgaacaccaaagaccctgcagtaggggtacttagcccaaactgggaatgaccataccaagttacggacatcacaagttcgggggcatacaaacttggccggtacaatgagaaaatggagttgatcctgctaccaagatattggaatggagaacatctcagaaagtactactaatgaggcagtttgtaaaaaacactactcttaagtagtggttcttgtgcgatatgccacacaagaattcgttaataatactcactcttaagtggtggcttctgcacagtatgtagtgcaaaagtacgtgaatactaatgtctttaaaagcagtcttgaggaatttaagcttttattttaatatatgtatgttgctcaggaacaacacatttataagaccaatgaatgaataaaaatgatttttttcactcaaattgtgtcgaataacttgctaataattaactttttaaagttaatattttatctaacatgcatttaaacaggtttgcccaagaaacttgatagacaaaagctcataaacttagttaattgtaagtgaccaagagactataagtttgcttaatcacttgaaggacacttacacctgcacaataaaagacaagcacagtgaaaatacttaagcaaaaaatttaaagcaaaattaatgcaaaaaaattgaaagtatgtgtaaatatgactttgttaatcataaaaagtaatttgttcgagattaaaggctaccaggtcaatcctacatttcagcaaaaaataaagtcatgattaaaagttgcctgaccaactatataatgcaatgatctttttggtcgtgtagaaaataaaaaaaaaaataagagctttaaagctctgacatatcaaaaggagtctgcaggatcatgttatcactggcctattcttgggcagcaaattcaaaaggtatctcaataggagggtccaatggagtagcaggctggccggtaacatcagtaagttggtcgacagcgttgttaggttggccgacatgatcctaggaggagatatcctccccagagggcttggatgcctccatttcctgaccttgatctatcaactcttcaagcaatttaggcttcatatatctgtaatcaccctcgaggttccgtttccaaaacttgtagaaggtttcgatggctaagctgccatactcttccttttctgcaacctgagtctgctctaatttcgctagctttgcctcagattcctccttgagtttggcgatctcctcatctcgagcaaccagcagttgacccaaggcctccttcttgcttgtcaattttctcacctgcctctcagcatcctctaagtcctgctccaactttgcagtagagggcgtgtcttcaatttgccgcttgagctcttttatctcattactggcaacaaatagctatttgttcacctcaccaacctaggcctctagctcttcaatcttcttcttaatgatggcaccagtccccttgaggcgagcataagtatacctaaacttcaaagtcacctgaaataatggaggaataagagttttgtgtgtgatgtagtacgatatacaaaaaatgctcttcgaagaaaaatattacctaccaaggaaagctcctttaaaataccaaaagtcaagacttcaacggactcgttgtctgagtgaccaagcacctgtcctagtagttatggacaacctcctttgctttatctgctcgagccagagtaggtgcctggatgggtttttggcactctttgttggacctcctggaagcaggaggacgtccatccaagctgctcaccatggactggttggctggaggagtataatgaagtggtggaggaagacctgtggtagtagagcttgacctctccttccaggaaactttggaaggggattcttccccaagggcgcctgtaggttttctcataataaactgccctaacttggaagctatgtctgcaaaaacacaaagtattggtcagaaacctaatttcaaaagacataatttcagcataaagtaaagaagtttaccctcagcctacgtagaggcattacctcagggagggctgtacggaatgccatcatgattagaagaagagtcttcacactcactggtaatgcccttgcccttgccctctacaactgctgggcggactgttctggcagattcaaactcttggggcctaatgagaactggggccttacttaaagactcaccccgcttaactctctttcgagcagctctctccctcatagtctcttttttcttcttagaaaggttattagagggatctacgaacttgggatctttcctcttggttcttcatttctacttcatagaaaggttatcgaatgaaccttgaggcttgcccgcggaaggatagaggacatacataataaaattgtctcccgtcgccaatttgcagatgttctgtcttgaggcggacaatgggaggatgtgattggctctatctctgagttgcagggtgagtattggttggtcaaaagtgtggacccttgaaggaatgttgcacaccctctgcaccatagaccataaaatagaccgggacataaccaccaatctttgacatggcagagtcatttgtgccactcaaccagatgaagcccagctggctgaaatagaagtatcctgaccgaccctaataagggttggatttcaagtcaaaataccaactgatctcgaagggcgaaggctacattcaacccatttacgtgtacaacatgacgagggcagacagatactcgatcccttttagcgtcaactatgttagacatatcccaaagtagttggctatgttatggaaatatgagtggagcagcaggatagccccctactcagtgtggggaccaaaccacgccattcagttcattgaaggggcatgtggcaagtattcttcacctaacaaatctgtgtccatgcccttgaccaataatgaataatatctctttttttttattaaaaaataataaataataataattactttcaaaataataataataataataattgagagtcaatatgtcaaaaaactaactaaaaaaaagaaataatagatatagtgacccgtatcacgggttgttgttatttttagagttttatagggtaagactctaatagaatacaatgacgctcatacagggagtctaaaatattttagtaacctgcactgaatggtcactatatagtatttttccagtcatccacattagggatttgcagtaaaaggttactaaaaatgttaagtgtctctcaaactgagttactaaagtccatttttgtagtagtgtgagggatcatcttattattctcaagcaatgataataagttgtgcttcttttatattgatgatttgtagtaactattttatttaatttggtaggattgtaggacacgttataaaagggaatattaaataggaataattacataagacactatttttgtaaaatatttacatt

SEQ ID NO: 302959 - DNA, 3118 bp, Cannabis indica
ttttgtaaacttttgctaaaaaaatcgtacaaatgaaaattcccctattgtagcctcttacacttatagctggtattggcccatgatggataaaagtgtacattaccaaataagtaaaggcttggataagaatcttcatgaaataaatgcctatcaagagtttttctattaatacatccattaaaatttggaaaatgcagtccaattccaaaaattagattgattacaaaatcagttaaacaacctaagaaagttcttaaagtagataataatatacaataaatatatcaaatgagcacatgagatcatactaatatatcgttcagttggaagaaataaaaatataaaaataaaaatgagaatagaaataaaattgaatcaaatttaaaatgcataaaaaaactgataattttttttctctacttgtattggaatgatcttttcttccattttaaaatagaatagtcactccaccaatatgatggaaaaattattccatttaaaatgacattcaattacttaaaaatacaactaaataaaagaataaaataaaaattatttctttttcattccattttaattcatttaatctgaccaaacgctacctaagagtaaaagagtctttaatctcataaagtgtccttctttggtctcctagtaacaaaagatattattacaagcagggaataaaaaacagttctcatgattactgtcttctgttgtggcggttttacagttgattctttgacaaaagtggtgatttttttgacactcttttttgtccatcttcacctgcaagcaaatacatatacatcccagatacacagcaaaatttctcaagccaagaactcagttcaaaagttactttggacaaagtttcttctttgagacttataataaggcaacaatgcttaaactcccaagggtttgccaagtggcaaagatgacagttaggatgtgtggtaaggcatatggtttccatgtttgatttttcatacatcaaattctcgaggccattggggggaaactctgatggacaccataggcctaaggttttacttatgtgagaaggggtaaacaatgctgagttggctagtgagagtcttttggtgattttgtgtagggtgagctgccttttgttgtgtgagtaaagctagaatcggttatgcacagatcagagtaattctctctgcatcatggggagcttttgctctctacttctgtaagagaccttggtctcaagttttccctcgaatgaaataacagctccccatttcatctctctcaagctactgttctattaattactgttgtgtgtgaaattacttactgttctgagtttattgcagcaggtactcatcagagtcatggttgagttgttagggcttcgagggactaggttgaagtgcacacaagctagtccgaaatatcacttatgcagcagctgctactggattcatccaccttctgcaaagcttttcctccaccctctccgccacatctaccttcccatgtattctacaagcacccaacaaagcattccacaaggcttcgtctaactctattttcatacccaaaatcaactcctctgcttcctctactcgtccagccctccctaacatgtccaccatacatgtataatgctccaacacaggtcttattcgaaacttctcttccatcatattgaaatactctttccccttctctataaacccgccatgactgcaggctgtaagcaccgtcgtaaaagtcacactatctggcctctcaccggcctttaacatcatatcaaacaatccaaacacctcactaaaactcccatgcataccataccctgccattagtgcagaccatgaaatctcattcctcagaggcatttgatcgaacactctacgagcgccaactaaatcaccacacttggcatacattgtgatcaatgcattcgagtttggcaagtctaagccaaacccattaaccaaaacagctccatgtacttgtctaccgagccttaaggccgacaaagcagcacagatttgagcacaggaagaagagtttggtggtcaatgggtttgtgtgcaagaagcatttggtgaaatatatgaagagattgggagaaaagattgagagaggaatgtgctctaatgagggtgttaaagaggaatgtcggttggcgattggcgaaagagaagagaaggtttgcttgatgcaattgggcacaacaagcataagaagctataagttttgttctaatgaaatcatgacttgaaattccaagcatcaaggtttgagcatggatttgctttaggcttctgaggttcttagtggaaaagctaagttcaaggagattggcatagaatggtatgatattgaataaagtcataatcttcaatcctgggaagaaaataataacagatgatatatatataaatatacaatgtgtaatctgtaatggttaatttttctcataaacaccaaaatcttgatatatattttacttaaactaagtaacaatcagaataagaacaaattaactgattaaacaagcttaatatgcaagaatatagtctggatttgatgttcttattcaaggtatttatgatcacagtagtatctcccaaaggcaattaagcacataccaataataaatactgaactcattttcatcataatgagtagaaacaaaacaatttcagtttcagatgcagatgcagattcaaagaaaaaattgaataacataatatatctatatatataacatatacacagagaaagatggagagattaaatgtaccttttgtttgaagccgtggcaccgtgacagagagctagtccgagggagataaagttgctaccttttagcgccagcgccgtcgctgctgcgctgccgtactggtttttgcatcgccgaggaagatggagagattaacgaagccgccaaacggtcgcgagagagggaaagattgaataagtatgctaaattttattttaatagaaatttaaatggatattttgcttagattttattttgtctttggatataatagaaatagcatttatggcacaattttaaaaaaaaataacatacatatttattgtaatagaaatttaaatggatatt

SEQ ID NO: 302960 - DNA, 1885 bp, Cannabis indica
acttggaacctaaacaaaactagttgtgttccgatattggacaactactgaaactctgtctattgtacaatgaaacgttgcattgaccaaacatatcaatatctattattaaattatacatttttatccgtagaaatgattcaaatttcagatccctggccaaaagaacaaacgccaataaagccaaaacaattgatcgatgtagaaaacaagaaaaatatatttaaaaataatttcatatccatctttccccttttcgattaaaactatttgaattggactattccataaaaacatttctttacccactttgaaagtacctccttaaaatgtgtcatgaccagctgtagacatttttagaccattactacttgttttaattgcctctttattcccttacctcaaaattgagaggctaggctaataagctagatacctctctctcaaacctcacactactactactactaatctattattacatggctaaaaattacaacgatcaccgccgtgacgcggtgattgacatagcaaataaggctgtgaacttcactggtgggttagagttcagtgacttgacatacacggtaacgaagaaaaagaaggtagaaggaaaatgggagagccaagaagtagacttgttgcatgagatacgtggttatgcgcctaaggggtccatcaccgcggtgatggggccgagtggtgctggaaaatccacccttttggatggtctggcaggcagaatcgccagtgggagtctaatgggcagagtgtgtttagatggtgtagtaatgaacccaagcatgatcaaaaggacttcggcttatattatgcaagaagataggctgttcccaatgcttacagtcttcgagactttgatgttcgcagctgattttcgactcggctccatctctcgtaccgacaagaaacacagagtggaaaaacttatcgaacaacttggattaacagtaagtgataaattgataataatcatctctaacttataaagaatgaaagatttcttatttttaatcacatgtaaagtgtattgttataaagagaaatatgagcactctaaatcatacatgaatacattctagtaatacttaatattaaaaacataaagccacacacattatggtattacacaactgaaaataccaaataacaatattattaattttaacagtagtaccgatgtgcactaataatctttagcattaatctaatttttaatttgagtattgttattaagcactattggtgctaagtaccttttagacgttagcttgagattgattagtgatattccctaaaagttattgcattaaactatatgagactcgataattaattagaccaataaaaatattgacatataaaatgctaagcatcactagtaccttttaattatcatttctcttttaattgccaccattatacatattgaaatgctgaagggtaccattagtaaaatttaatattcagtctacttattttaatttaacttatagaaaatcgttaactaattataaaatagtataggatagatgttattaatcttggtgccccgtaatgatgctcatatttataagaaaaatactaagagtatttccaatggtaaaattttagagaatgtttggtaaggtgatatattatgtgacaaaatattgagatgctataccattgtagagaaaatgatttgcatggatactatgttgtagcattgatgctatttattttttttaataaacaattgaagctaaaaagttattgtagctaaaaattagaatatatattaaataataatgagtgagattataaatataacattttaaagagtgttatacatttgagtatttttagaagtaagagtgttaaaaat

SEQ ID NO: 302961 - DNA, 3130 bp, Cannabis indica
tatacattaaacataatcatgaaataaatcatgtgaaccatgcaacataaaatgcaatttctgacctttattaattagtaaaatctgattatattgaaatgagttttatttagggcacaaaatccaacaagtggctatggtgagttgggcgatatggagaacttgaaatgatttcatatgacaacaaaaaagttggactgttgccaacaccgttgcttcagcaagaattacccttgatcaatataagttcactcaagaaaggaaaggtctttccttgtctggttttttagataaaagccgaggtaatgagcgttgggttgcacctgttacaaatcagattaaggttaatgttaatggcgcgttgtttgtgcaagagtctagatttggagttggctgcgttgcctgtgatcattgtagacaaatgattgaagctttcaccattggcaaaccgggtcgtgttcaaccggagattgctgaaattattggcattaagaaaactttaagttaggttgctcgacactcctggcggcatgtgattattgagaccgatagcttggtttgcgtcaaagccattcaaagtaatatgtctatgccttctcaatttggccttttagttcaagatgttcgtaattcacttttttgtcttacaatcatattgagttgtgttttgttaaacgatctgcaaatagagtagctcattgtcttgcaaagggctcttatttttcgacaagttgtatgcttcaggtggaggattgttccactgaagtacaatccattgtaatggaagattttatttgttaatgaaagttactagattttattaaaaaaaaaatacatatattatcaatcaaaacagaaaataaatttatattatgaatattatattacactactttttttaacaaattatattacactacgtaattaatcataaacttgatgaatgattttatggactgctacatatctatcattatttcaataattatcactttataataaatatttattggataaatataaatattattttaattaacaatttctataataatatgaatcatcatgtatacataggtttaaagaccgcacgaagcgcaatttcgttctctagttacaatataattgattacgggccagtttggcacaattgtgctatgggaaaaagcaaatgtatttgtgctgtgagaaaaagcagctgcagcagaactgtagaaaaaagctgagctgagtgtttggtaaattataaatttcaaagtactgtgaggtgttaagatttattataataataatgataatgttataatctaatttattataatcataaatatatagaaatttattttatataatattttattttttatatatttttaattttttcaaatataaatttatattcatttaataaaaacaatttatagtatttttatattatgtttcattaaatgtaaaaaaaaaaaaaaactcaagtatataagaaaaattctaggttgatattgtttgttgatattaatataaaatataagttttttcatattaaaaagatttctctcgtgttcttgctctcgcagctgagaagctggagctatggcaaaaacgagatcaaagattcaagggaaatcacgatctgctagcaggaaagggaagaagaaagcaggacgagtcgaaactgatgaggccgaggcctgtacggtggctgagatggatgagatgcaggaactggagatatcagaggaagaggtgttcgacaaagaccctgttcttgctggtatttttcaacttccattgtcccctggagcttccttgaaggagattcacaggcaagaagaaatcagaagtgacttcgcacacttcctcaaggtgaatgagcaatgtaacagtgatattcgataaggtaagaccacaattccccctgttctttgttctggttcagttgtgcgtaatctggaaagtacttttaagaataaagaacagaaaactaaggtgaaaataaccttagaggatatagaagaatatgtgttattttggaaaccatcaattttctgctatgtcttgggttcaaaccctccactgcagattattgagggatttgccaagagagtttaaagggataaagttgatagggtaaagacgctttcgtatgtcatattcataatcagttttgacattatggagtatagagatcaagtgctcaatggaggttttatcttctttaatcgaaggtcgatcattatgaaaccatgggatcctaatacaaattttaggaaggaagatgtgcatagtgtaccaatatggattcagttagaagacctagaattaaagtactggggagagaagtccttgtttaagatagttggccaaatgggaaaaccaataatggtggatgccataactagggagagggaacgactgagttatcctcgaatccttttttaggtgaatatggatcagaaactcccagacatgttagaattcgaggatgaacatggatggaatacctccattggagtaaagtatgagtggaaaccttccatttgtactcaatactctagtttgggacatgttgcagctgagtgtagaaagaataatggtgggaaagagtggattgtcaagaaagatcataggaaaaaagagcaggtggatgaggatggctttacaaaagttatgactgctcgaaaacctgagaaaacaatgactaaagaacgcggaacaaaggtcaagaactccttccaggcactagaagttgaggaaaatgcagaagggaataacagggtgaacaatgacaacacagaagaggggggagaaccctctttcctaaatggataagatgctttgttggaatgtccgaggagccaacaatcagcagaaacaatacttaataaagcaatttcttcatgtatagaaagttgattttgttgggcttcttgagagaagagtaaaggcctcaaagcttggggtcttgtactcaaatgtttttgaaggttggtgtttttcgtctaatattgcttggcatcccgggggaaagattgtgattgcttggaaacagtactttagtaaactcttgaatcagcatgtcactttgcttggaccctttgttttgcaaaagttaccaattggaccttgtgtt

SEQ ID NO: 302962 - DNA, 2981 bp, Cannabis indica
ttaggaatttttcctgatagcttattgtttgacaaaatgagaatttgtatggctttatgtttcgaaaaacaatttggaagctctccagtcaattgattatcagagatatctagaaatgataagtactgataagtgacattgcaaatggcatttagacttgaaaatttatttctggaaagatataatgcttctgttgtgaataaaaaaattggtatgggaccaagaaaattatttgaacttaaatccacctcagtaagattctgcattgatgaataatcttccattactgctccactaatttggttgttagaaagattcacaaaagataattgagaagtgaaattccaaaaccaactgggaatagattgtgaaattccagaatttgaaacatctatatgtgatagattgctttgactttgcagccactttggaaacttaagcccaactctacaatttgcaagtcccatatattgtaaataaaagggaggaatccattcaggagatacattcatttgtaggtaattaaatgataaatcaagataatacaatcttgagggttttgaaaaatgagcttcaccaatcacaccttctagagaattctcagatagatccaaaatctccaaatgtctcaaattgccaatactttcaggtacaattccttgtagttgatttagattaagccgcaactctttcaaagatgaaaatagtgtatcatcgacaaataatccagtcattttgttgcagcccaaacctaaatactctaagcaataatgtgcacaagacctagatgacaattgactaagattagggagccatccactaagattgttggcacctgcctcaaatctttgcagtgtacatatattccaaagtgatttaggaatttcacctatgagatgattaaatccaagatcaaggtgttctaaggcaattatgttcccaaaatcattgggtatataaccttgtaattgattagaactgagatcaagatatgtaagtgaaaccatgttaccaaaaccatttggaatgtaaccttgtaattcatttctagatatagaaatgtatccaaggctagtcatgtttccaaaagtgtgtgtgattgaaccatttatgctattagaagaaagatcaaggtacattagagcagtcaagcatccaaaagatgttggaattgaacctattaatccattatgagaaagatcaaggtatgttatagtagtcatgttcccaaaaaattgtggaatggaacttaacatgttataagagagatcaagatggacaagattggggaggaagctaaacaatctttggtgtgtatcaagagatagatgattcccagaaagatcaagagaagaaatagattttgaagagttaatgaaagaaggaaatgaaggtgctataccatgaagaccacaatcgcttaacttcaaatttgtagtgggggagtttgcatattggttgcatcagattattcatttttgtcaagtccattccacttaagtcaagttgtcttaaagaagaaagggtagaaatccaatccagatttcttataataaaatcattaccactaagatctagaaactgcaaactagaaaggtttccagagttgatgaggaatttttccactcatgaagttgttagaaaggttgaggtacaataatttgctaagactaccaataaaacttgggatgtgaattttctcccaataaatagaactaagacgcaaatagctcaaatattgcaactcaagtagtgaagaacttatatatttaccttcaagagccaacccataatcatcactttggccaaaagttgaaggtgaaatgtcgagcatgatgacatgaccagagttgttgtcgcaacgaattccaacccaattgcaacactctcttttctctacttcactcccccaagaagaaagaagaggagcaacatagtcatttgattcgtagagcccatctttgaacttcagaagtgcttctctttcaacttgtttgcacctgatcatacttgtttgcacctgatcaaatgcagagacatgtctcatgtaaagtaaaatcaccgtgaacacaagaagttcaggagtaaatctatccataatactggcaacaaagttttagttaattccaagaatagatataataaatacaatccttcaagacctatatatagagtagagtaatgtaattattctattcagtagtggaattcctccaaaatttaccaattttactatttcttagtggaatttgacatgcatgcattaattacaagtgctaatattcaactatacttcaagaatgagtatattatgtgtcaataattcaagaggttgaatgatggatttcaagttttatgtggactaatgtgattgtgtagatcagtggggggaagacttgcaaaatctaccgtttactaagtttcaaaatttgagtttatttatttcgagtttcgtggatatcgtctattcctttgtaattggtgttttaataatgattaatgaatatcttcactcttaaagttaaaaaaataataaaaagaaaaaaaaaagttgctacttagaaaattttctttcttaaaacttttggcctaaaacataggatgcttctaccgtcaaaatggcatttctttgatattttcgacatccaaataatttaatttttttttttttttagactttacaaaaaatgttcttgagatttgttagagaaaaccatcatttatttatttatttattcaaatgtaaatttgacacgtcatggaaaattaactatttccattaattatctataattaaaaagtgagtttcattctattttaatttatattataaaaagatattatagagaatgtttgacttcataactaaattatttattttcaatttttaataataaaaaataacttttaaaaactattagggatcgtttgaccaaattttttaaaaattgagttttaaaaaactaaaaagtaaaaaataa

SEQ ID NO: 302963 - DNA, 4419 bp, Cannabis indica
tctctctttatatccaattttttattattttttttgttgataaaattcacttaatcgtgaaagtggtggaggtggagaaaatatctccttaattttctcttccttttttgactgacctattcctataataataataataataattataataattattattattattattaaaattttatcgttcaacatacatctaacagtattataaactgcatttttatgtcatccttgaatgtgttccttaaataattcctttattcgaaccactataatattcaacgatttaaaatcttgaccatgagttactttatttcgttctcgccatatcgtccaagctaaaaatagaaaaaattcaaattcttgttgtgaaagcacatttgatgtattcagaatcacttgttggaaggaaatattaaaacaaaaaagttatctttaaaaactcaaagtccaatgattgttagaaaattggactccttcacactagaatattgcatgaccatttgagtcttcaatatgtccacataaaagggcaatatcgatctgaaatcacatgtctcttgtataaacctaccgaagtaagaaatgcttcatgaaatcctttccatgcaaaatgtaaaatctttgaatgtaaatgtagtttttagaatttcttccaccaatccataagggttgtaattgatgatgacggaatatccgttacaagagatgtagctaaatgatatctacttttaactaaatatcaccatcagtagtgtagtgccataaacaactgtccgcctttgaaaatttacttattggaatagaacaaatgcattcttgatcagccacattgaaataagcttgcaccaaaggccaattccaaccttctctattatctaaaataaaatctttaacaagaatatagttgggtttgagttagcaactgtcattggtagaaacgaatagggccaaggcaaccatagatctttaaaagctagaatataatcactagttcccactcgtctacgtaattctttctttaacaaaaatttaccccaaactatactacgccacacataattaggagtaaaaccaactataacaaattaaaaaagaaagtgaataaggaaaaccataaaataattatagctaaaatgaaaacttaatacaaacgtccaaacatccacctgtagcatttaggaagtctgtgttttgatgatatcggcctttaaagatcaatgatggttaagagtcgggtttgttgtgaatctgccatgcttgtgaagccaaaagggcttgattatgaaactcaaaatcttaaaatccgaacccaattttatttttagaaagcatagtttataccatgccaaccgatgagtcttcttactttgtattgaattagtccagtaataatgtgccatcattgattctaaattttcacacaacttcttggaatttgaaaacagacatcatatatgtgggcatagcttggataactgttttaagtaaaacttccagcccaccatatgaaaatagctttgaattccatgagttcagtttttttcaaaccttttttattacatctacagaaatcatttgcttattctttccactcaacattggaagtattaaatacttctctatttccattgtaattgagatattcacatagtaattttggatattttctagtatatttggagaagtatatagaagacttattaaaattaatcatatgtaatagtaaaaccataagatccaatgtgatttaaagaatcagaagcacttaaaaaggtttcaaatattagcttattaattatatataaacaacagataaaaattaatttatacacccaacattttaattaattttgtctaactataatatcataccttaatataatcactaatttagtatactaccaacaacaaagtgacatcataaaaattataatccaaacttaatcattttacttgtaaaaccaaactactgtaatcatcctgccttaaccattaaagtagtcatatttataccataatttgtattaattatttattaagttcttaagaaaaatattatctgtttaacattatacattgtaatctttaaaacttaacacttcttagttcaggcaaaaaaatttaataagcaaataaaattattatatttactaggatctgaaaaatacaaagttgtaataaaactattaattaaaccacaatattttcatatattataacttagaattaaccttaagaagaaggttatattctatctaccacataaattataatcatttattaaatgtacctttccagatgcatttgaatatagattaaaaatattagcaattacttgacaagatcattgtgaggtccgacaaaaaagtagactgtcatctgcaaaaaataggtgtgtaattgatggtgcaacgccactttataacttattagatctttagttcgttctgcatggcaaagaacagattaaaagccttctgcacaaaataaaaataaatatgaagacaaatgatcctcttgatgtagatcacgagtggggcaaaccaaatcatgcacatctctattaatattaaaagaatattgtacagtgcaaacacaattcatcagtaatcctacccaggaagggtgaaagcccaatcgaagcatgactgattctagaaattaatttcactcaactttatcgtagaccttgctcgtatctaacttcatcaccgaataatacttccttcctttagttacacacctctagcaattcataagccaccatagcattatctgttatttttcttccctcaatataaaagcactttgggctttgtagataatatcatctagccaaggatgcatttgttggactaagaccttaggaacaaacttatataatatattacagaggctaattggtcgatagtcatttatcttattggtcattttaacttttaaaatcaaagtcacaatagtagagctgataactgatagttcaatcgaactactgagacattctaccactgctttagtaactgatgaactaacagaatcctaataatttttataaaacataacattcataccatccacactcagacttttatcaagggtcatggagaatactgctcttttaacttcatcttttgaaaacggcagcaacaaggattgattcatattatccgacactctagactccactgatgatatatgacaattgtaatatcctcatccaaagaataagaagtcataaaaaggttggtataaaagattttgataatatttaaaacatcttcagcattggagcaccatattccattagcattaaagagccctaacaaaattacagttaaaattataataattagtaacaaataaatgtaataattttttgttttaactaaacatgacaattcattaaactgattattaaagaagaacaataaattaaaattataatttatatacgaagaacatgtaattaactaaaggagaacactaaatacaagtagaaggtaattaactaattataattcatttctaactcttttaattagctaaaaggtaaaataataatacattatcattgaaaaatattaaaaattttctaaaaataagttacttaaaaaaatataaaataattaggaaacaaactgcgattcgcatgcatttgtattttatttaatgatattcaataaaattttatcaaattttaaattatttttttttttataattttttaatagtataaataagtactcagctacttttatcattttctactcttaatgacaaaagaaaaataaattaatattgtaaagttttaatttttttttattattttgaactaaaaatatgtaaaataattaatgaattattatattatagatatatattattataaagtatgttttcaaaaaggtaataatttaaaaatttatcgaaaactcatcaaatttaaaatcgttatcatgcatcaaagtatttcactcgtcgctatatttaaagctgctatcatcactgtatctcacttgtagttgtaatcgtcaccatcttgaaaaaaatataacaattgataaatctattcaaactcatctattttaaaattgttgtcatcattttatctcactcatcactaaattcaaagcttttattactgtatctcatttgtaattgtcaccattctgagaaagaaaatatatagcaattgataaatcttttaaaaaaaaagatgttgaatatatagagaaaatgaagagtataaataaatgagaatgtaataagtaaattaacttaaattgtgagattgtatcatgcagttagaaaactcttttaaatgacctttttgagaacttaaaatagaaaatataacaattggtaaatttatttaaaactcatcaattttaaaattattgtcatcatcgtatctcactc

SEQ ID NO: 302964 - DNA, 2859 bp, Cannabis indica
tttttaaaagaatctagaaaatgtaatgttttcttggctgcctcttcttatgttgtatcttctctgaaggggttgctctagacacgtttttcccatatgggaggcttgagtattttgcatggaattcattttccttatagatttaattttaaagcttacgagtttttttacatgtgttatacaggaacttttgctcgtagattggctcaagagtttccaacatggcaggtatctcttctaaaaaatactgccttatttgaattttaccatttctagatctaaacattatcaagggaattttttttctggcaccaagtttattaccagtctggtttgtattttgccttcctttttacaaatagggaccactgctgccactttaggatggcccaagtggttagttgtgcagaccaataacatggttaggatagctcaagtggttagttgtgtagaccaataaattaaaaaaaggaaccgttgactttatagtaataaatatgtaattaatgtcatcaataacatggtttgttcttttccatttcacttgtctgcttgcataacatggttctatcacagtttaatgcattgcattgagcatttttctggtgttaatcttgttcctctcattttcttttctacagtttctcttagttgacctgcggtgtcatggggattcgacttctacaacaactaggggtccccacactgtagcatccactgcccttgatgtcttaaagcttgtgtgtatattttttgtattgtagtaatatttttcattattcgtcaacttcatgcattgctacctgattttcttaactctacagttatcagaagaactaccatattgcctttttaaattggatttacaacatgcatattgatttctcagtacagcataatttcatttattatgcttgtcataaaccaaattaatactagaatttcctcgtctcattagagaaagactcagtttttctctttcctctatccaggttcgacagttgagaataacacctcgcattcttgttggtcacagtttcggtggaaagggtatgtttctattttgatctttctacttttcatgtttttaacttacacatgtttcctttatagtgcaatgaaagtgcttgtgtctttagtttggtgctgattcttctgcatgttatttcaccttacagttgccttaagcatggtagaacaagccgcaaaacctcttgctagacccgttagagtaagtctctattggtttctatttttgacaaggagtttaacttttatgcaagttcatggagtgaatacatgtgtgaacatagatatacatgccgaaatgatttctatgcatctttagttctgtcaacattggtttgtgttgtgtatctttgtttctaatccaaaaatagacgcttagctaaaatcattttgtcaagaacatgggctttaaatagcggaatctattctgagttctgagttttcatactccagtttttaaatctgaaattttaaatttatgggcgtaaaattattttttgaacttttttttatccctttcttcccatattgaaactttagttttaactatttagtttttaggtttgggttctagatgctactcctggaaaagttcgacctggtggtaatggggaggaccatccagaagagctaatatcattccttaaaacactcccagaagaggtatttgctcagtcaactctttaaccttttgtactttacaattattagttttctttttttatgatttggaaaatgctatttcctctgatttgcattgcaaatatattgttgaaactttgactaaatcttagcatttcaattccttggttctgctgatactattttggtttgttttctacatattatgtatcgtatttatcattcttatttatctcttttctttgtgggcatgattttaatatgggaacttttttctcaaggaaggtctcttcaaagcgggatattattaatgcgttagtccaagaaggattttccaaagatgtggcacaggtacactttaaaccttctatgactgttgagacctgagtatctttaatttttgtttctgaaacttcttattataagagtggttaaatcttttactttttgacatgggcaaacatatttttaagagtggttagctttctttcaaggacagttatagttattgtaaatgtggcaactttactatttcgtgttcatgacgggcgtttatagttgtgccatctacatatatttacatttaacctttttagattttatagcagtattatactgaaacaagaagcagcataaacgtgggttttctatctattctactgagcctataaaatataataattcatgcagtgggtggtcactaatcttcgtccaactggttctcctggttctacaccatccggcttctcatggatctttgatctgaagggaattgctgaaatgtatcaatcttacgaggagacgaatttatggtattgagctagttttattaaagcaaatactgtattaaatatagttgcttaataccatttacaccttttaagtgcctcaagattaagaaacactggttgccttctgtacaaaaaatggctaagaagatgtttgttttttgtttgtttgtatcttgaagcaggaagtgtctctttggtctttcaccgcatcttagaaaccatttaattttaagttttaagttgtcgttccttttttttctttttcctttttaattcttttcttcctttctttccaggaaagtagttgaagatgtccctcgaggtgtgcacgtgaactttctgaaagcggaaagaagtttacacaggtgggcccttgaagatattcaaagaatacatg

SEQ ID NO: 302965 - DNA, 962 bp, Cannabis indica
aatatactaataaaaaataatacgtagataataatttaatatataacaattaagtacatttttaaaatataaattaaatattattaccattcaaaaaattaaaattatatatttatctatttatatgcaacaaattactttttttttaaattaatttcactccatttgttttccattatctatttattattttcgaatacattgtatgatgcagagccttacacgagaaggaaaaaagaaccaatggaggagtgacacgtacacagttctttataattgcgttcatatgcagctttgcttactatgtgttcccaggttacctcttcgaaatgctgacatcactctcttggatatgttggatatttccaaactcaatcttggcccaacaactgggctcaggtctatatgggcttggtattggtacttttgggcttgactggtccacaatctcatcttaccttggaagcccattagcaagcccatggtttgccacagctaatgtagcagctggtttttttttggtcatgtatgtattgactccattgtgttattggcttaatgtgtacaaagccaaaacatttccaatattttcagacagtttattcagatcagacggtcagaaatacaacatcacagccatcattgactcaaaatttcaccttgatttgagtgcttatgagaaagaaggtccactctatattacaactttttttgctatgacttatggtgttggctttgcagctcttacagctacaattgttcatgttgctctttttcatggaaggtaactctaaattttagcacctcatttttactactagtctctacattacttactaaataataaagtatcaaaagcatatacgtcatactctaaatttttcatattgtactcttgttaatttattgttgattttttgttatttgtatgttattttttattgttgctttgatattattta

SEQ ID NO: 302966 - DNA, 1574 bp, Cannabis indica
aaaaaaaaaaaaaaaaggtatagtaatagtaaccctactccctaaaccatcaacaatggagtgtgtatgcctttatatagtaaaattgactatacaccgttgatctatcaatattcttattagactcttatgattactcattatccaccatcaccacacaccaagccatattatataatggtcccaacccaaacagttactccccaaacttcatcctgtaattaccagcttagtatatcacttaagccctctttaatattatttttattatccaaactattaaaaaaaaaagtgtgaataaactaatgccacagctctttttaaggttaagtttttataatattaagggcttgaccaatagctattcaccaacaatagcacgcggtctctggttggttggtccgcattacattacattacattctattcttattttattaattaatttgttttgtgacaccaaagctttcatgaattgggtcccacaaaccgacccaatactatacgataaggacacatctccaatacagacattaaaacgttctgaaaaaaaaaaaaacttagaaatggagacactaaaacaactttttctttcaacttaaatactctatataatcaacaaattttttatggttatattttaaactaaagttttagatatttgtaccaaagttgatgttctttttcaatgtattcttttgtataaaaaaaattgaacattgtattgtataacaaaatattaactgccaaacaatataaaacaataaatccttaagcaaattgaagaagcccaaattagctgggctcagatcgttaagccgagccgagagaagtggaacaagtcagctgcagcaacagcgcgtgagcgtttctctgccattggtggtggagcgtgggccccactcagtctcagtatgtggcggctggtagtagtccggcgtgggctgatcaacgatcattaggctcaccattcaatgttatttgcacacataatccaatttagagccgaaaattaaaaaaaaaaaaaaaacaattataaaaaagttatttcttttagaagaagaaaaagtaaaaaagacataatttatatgtgatatatgaataatgagtactcatcacatattttgcctgtaagggaaaagtgaaacgcaggcccgttcgtggatgtgggctcaccactgttatcccgttctgggcccatcaaaagggcccacagctgtctttctctgtattttttgccagtgaagcttacgccttgcgctgctgccacgtgtagagatgtggttggggaatagggcatccccaccacacacgcccacatctcctcttgtccggagtctcgggccggttccgtctttaaactttaaaccctttaagcaaaaccttattatgatattataaaagggagttatatttgcaccccataaaattataaatacaccctattattaaaaaaaatataaacttaaataattttaaaaattactcttaatatttttaaaatttttttcctcacattattttatgttaatttcaatacttattttgattttatttttataattttttctaac

SEQ ID NO: 302967 - DNA, 1352 bp, Cannabis indica
tatactaaatacgtgcatatgtgcatcggaatacttttcttacctcaattttttattcaggtgtgtcagccaacctgaatgaaaattaactcgacgatcagaggctctaagtcacattagtggtaaagtggtaagtgtctcgctaaaactctttctagcactaaaatttataaattgaagtttttctatcgataaataagttggcaatactataaataacctaaaaatacgaaaaaccgaggtatatccaggtctgtccaactgagaaattagatttatagtggggtgacggaaattctaggcattgctagagaaaccgagcacctagtaacacaatctaggtgcctagatctttgcaaaatctataacttaaaaatttttgagttttaacttccccaacctgctctaaatcaatccaaacttcccaaaacaacataatgatgtattctaagaagatttataagctcataatgcaattatatcatgaatttcaaaatttaacatgaaagcataaagcttcaaactttactgttctaaacttcctctctcaatttcaattgcagctactcaccactaaaattaaaccaaaagctaccaaatctaatctaatattaaaaagattaaaattgctaatgaaaaaaattactaactaaaagaaagcaaattgtttaggaattaccttcttcttcttcaatttaaccttcaaagctctaattcccaaagactacttcttcttcaatcacatgttgatttacttgaattcaatgtgaaattgacaaagtttctattttttttttttttaggtttggggttccgctaaaagagagagaaatgggttgatatttttttattgaagtttctcacataatctagtcttttctatactaaaaaaggtttatcctcaattaactcaaaaattacaaaaatacacttgactcaatatttccataaaacccaactaaggataaaaggatcattttctaaataactcacataatcacatattttctaaatgtccataaaaaccctcgaaacctttatgttgcccctgattttgcccaatatacgtggacaccccagacaatgacacgtggatcaagcaacttataatccaaactatttgctaagtctttatgcaataaagaagcatccgggacatatctcccggagaaggcatatggaatcacatatgctcccggatgcccaagtaacgttaagacatctccgcgaggtgtcaggtttcccctgagcaatcaagtcgcatttaatgccgcatgggaggaagcgtgttgggactgctacacgcaataaagtctgactgcacaacctccaaccagcagctacaaagtaat

SEQ ID NO: 302968 - DNA, 2051 bp, Cannabis indica
acttaaaaacaaaaaaataccatataaattggtcaaacttaaatgtatcatatttatcataagaaattttaaaatatgataagtgtaatttccctaaaaataacattacatataacaaatacaccaccacggctcaaattttttaaaattttccggaaaataaaggattgataacaacgtgggaggtggtctagcgctggctcaagctaccccgcgtgtggcctatgatacttattgggcctaaaggagcttagttggttgagaccctaccatgtctcaaacatgttacaccactggttggatggtaatccctccccacaaccacatccaaacccagcttctccttgttaattaatttggtgtaaaatgtcatattctaattgttttgtctattcatttacatttatgttttgtgggataaacatctcattggtctaaaaatataggaatatgtatgaaaatacatattaaacatctcattggtctaataaaaaaaatataggtccttcaaaaaaaaaaaaatataggaatatatataaaatacatattaaatatgtcattggtctaaaaataatgttgatctgccacttttaacctttttcaatttcctgatacatatgagacttcttgttcatcgcgtttcttgctctatagagactcgtatggtagcaagaaggtagcataatatgtacaggctatatagcaagtataaatattatttaaatttagcatataactgggtacataactgtatttggaaattttgatgggcttttatataaatcaaatgattattacaaaaaaaattctccaatgttcaaaatttgaattctacacttaaaaattgattttgcagtttaatacatattcgtaattaaagtaagtttcgcccaaattctctgattttatatttttatatgtgactgaatttttataatccgcaagtaatatatcgggtaagttacgaaatctcgcattgcttggataatgtgaagtatgataactctaaaactatatatagatataagattacacaattgaataatggttaaatagggattgatgggtattacaagatgcttcttctttcacttgaaaactccaaagttaagtgtgctgacttggaatagcatgatgggtgatctactgggatatttttccacgatgcatgcgagtaaggacaaaacacgctggagggactcattttagtttgtagtgctagtcgtcattcccaggaacagtcaaaatgacatactcgtgcataagagtcataagtttatgggtggatgcccaatggaggcttgaagatggacactaaaaattgttatcaaaagccttgatgtagtcggaagtgtggctgacgaggacgttgaaccccataaggaaggtgactgtgacagttagaactctatgattcgctagggaaaaattgagtaagctatgcaatcccatatcgcttaaggaaagttaagtttgatgatcgattcttaaattgtgtaggtgttaattctatttttggcatatttaattgaaaaaatattttattatttattattattttcggatggtatgtttaatttggtttccttattttgtgtatccaaacttagaaggaaagttgtctagcttttctatttatagaaattgttgtaaaaatggtaagtttgattatacaattaattcttatctaacctaaatattctgatcttgtgtgagttttccattttcttagatcagatttcttgaagagaaaactagagctaaactttccttttctataaaagaaaagttgtacttactgcccacgattatgtaggtacagaaatggaaattcctgggctaattgaagatttattttagaaaagtttccagtgggctggggtcttgttcagaccgtgtgtaagttgtcaataaggtgtatattgattataaatacacattatatcagctaggtttagtacctctcttgtatctttgaatttctctcatatctttagaaaaaagagtctttgttttctagagaagagctcgttcgactcttactctgttta

SEQ ID NO: 302969 - DNA, 1723 bp, Cannabis indica
ttctagtaatcccagtttaggggattagggtttcgtaatctgtgattgtgatgtgcctaattgttaaggcgttacgcttataatatttcgtaaacttcttaaagtatggatgaagaggcaagatcgcaccttgctcattatggggaccagaccatgcacaaatcctctccttggggttagtggcaagttgcctagatgtaggtagaaaatcttcaactccactgaggggacccttgtcataaaggttcgtcagcctcttgtaactgagggtggatggaggtgaaacccaatgatgaacttttttctccctagtcctcatgggacaggcctcttcatactccaccttgacgtagtcttggtatagaaccaagacatttccagacttcaagatgagttctctagcctcattgtacccatcaaacgaaagaatttaaggagcctcttcctcttcctcttctgctacttcttcttctacaccatcaagaaaagtaggtacagaaaattgtgggtccttagcttgttctacaccgaccatcgcaaaatgccaggaaaagtgtgggtccttagctgagacctttctgtatgtttttttttttccatcaccttatgcttgaatagggtgtttggttagtggtatgattcgcaacggagacaacaatttcaactagtgtagattttttcttcgaaggctttggaaggccttcttgcagcatgtctaggacatttgcttatacgttgtatgtccacctaacaagaaggtaatgcctctagcccgtgttcagttttcaaatgaactgactgtatccttctccactaatttggccagggtaatgatgatattgtaccacaggctttggggactccaaagggtcacttgtaacctcccactcatcgatgctcagtatcgatgaattatcactcgatgaagatgaagctagatagactttgggctagttcttgtaaagaagatgaagtaaatcattacctatctgatggttacctccccagtaatcgccaaggttcctctacaaaagagggaacagaaagaggtaagaactggacagagctatgattttattttgcaataacaaaatatgtctgatacgctgaccagacatattcaaaaaaaaaaatatgaaatttcattccaaaaatgaaaacccaaatcgaaggtttaaagaaagacaataaacctgaaaaattcccaaaaactataaacaagtaattttgaacagttcctagcaaaattatgggaagccgatggaaaattaagaatctaaaagccataagcgtgtgtctaagtaaagaattgaaagccttagtttctcctaatctcagtcattgaagaacagcctcaccaacccaaatttcaaagaagcaattaaaaaattatgcatctatttaaagaaaataaaaaaagaagaaagaggacttactcatgtttagaagctcttgaatgcacttggacaacttctataagtcaagctccaagcaagaattcttcgaagattttaggaaaaaaagtgtttttgtgctctggttttccttaagaataaaaatgtctaaaagagtgtaaaaagaattttaaccccgtttataggtggttagcagtgtgatttggtaatttaaaatttaaattttggctcttctcccataaaagtgtaatcatcacatattgtgttcaatcactacaagaaaggagaccttttatcccactttttat

SEQ ID NO: 302970 - DNA, 4979 bp, Cannabis indica
aaagaatatatattaggggattgattggtttggaatgtgtagagccacctcgtcaagtcaagttagtctctattttatttgaagtcttctctttttctttctctctctaataactcaaagaaaaaaccagcgcctttttctacttctacacctttctactcccgtcgatatggattccgatcttgaaaaacaggccaaagaggcttttattgatgatcacttccaactcgccgccgacctcctctcccaagcaatcgatgtttgccccaccaaagccgacctttatctcgaccgtgcccaggccaatatcaaactcgacaatttcactggtgaccctccacttcctcccaatttcatactgtttattagaccttgtacttcctttactccttttttttttctttcatttttttttgttttttggtggtcgtcataacggttgactcactgctcgtgttactcagaggcttggttcttgtttttattttttttttaatgaatatttattgttcgtttgttcctaatagattggcgaattcatactcttttagactcgggtttcgatctcacttttatgaacagtgacccatgtacttgtgattaattttttttaaaaaaaaaattcacacacccaaaatcatatgtgatttagtttttttttttccttttgtgctgataagatatttagtatggaatgttattcaaaatgtgctaatgttcttcttgttgctgtacttttgttggtgaatgctattcagaggctgttgcagatgcaaacagggcgattgagttggaaccgttaaatgcaaaagcctacctgcgaaaagggtgtgtagttgaacgtttcaccttctgagtatttgtgttggacttaattattataaactattgtaaatgtttaaactcttttgtggattaactttagcaagttcatgtttgcttttattgcttgtgtcatgtaaattatacttgttaattgatgaattgtatttctatacgtggccttcttgacaatttgaagatagtagtagttgtttttgtcaaagaaaaagaaagagagtagtagttgaaggtagttggcatgacatcttttgtcctgtagaaggggtttctatttagttgtgagtttgataagtctctgcaactctttttctcactgttctgtagaaatgcttgcatcaagcttgaagaatatcagactgccaaggtagccttggaaaagggagcttctttggctccaggagatgctagatttactaatttgattaaagaatgtgatcagcgtatagcaggttggtagtttcttgttacattcttacacctttttgtgatatatgtaaatagtgatattaaagaatgtgctattgttgggaatggatgcattttggaaggaacaaagtttttagggtatagaattgcatatgaagaaaacttcaatgaccctttgtttatggattttcatatcaattcagaggaaactagtgatctacaacagaaattattggagacaaccagtagcacaagtgtgtctatagaagatgttcagcctgttgttgctgtcgacaactctcccactgaggtgacagttacacctgctaaaccaaaatacaggcatgtttgcttttgatgcgttcttacaagtgatatggttttcaacttttaattagtaattttatagttgtacagtacttccacctcctcccccttatgggaatatccagatgtaagagataaatatctaatcattatgggttcaaatctctgcaggcatgaacactaccaaaagccagaagaagtggtagtgacaatatttgctaagggtgtacctgctaaaaatgtttcagtcgattttggtgaacaaatagtatgatttgtactagtgttcctgttttcatttatcatgccttatgctttttctttgtgttagatctctgaattttcgccttttgtttctagctaagtgttagcattgatgttcctggggaggattcatatcatttacagactcgcttgtttggaaaggtaaagactattttaacgaggctataataatttattatctcttcactttaattggttaccagcaattaactataacaaatattttaaaaaaatattttttttatcaactattaagtactagattattacaaccatatatctgattagttgatgaacaaaaagcaaaccaggattatagtacttctactgaaaataaatattacatgttagtgttttccaattacagttattttattttgatataatagggatattgttggcattttatccttaaactaaatgtaggaactacttcaattatatattgctttatatgctggggcaatagttcagattttaccattctgaaacttaattttaattatgtttgcgttgggagattctggaaattaaactccttttgtgtcatgcatgtctaatgattttgttttatgtagtgcctcatatgctggagccatagtttatataccattctgaaatttaattttgattaatgttcgggttgggaggctctggaacttaaactccttttgcgttatgcatgtctaatgattttgtttttctgccatatatttatttggttggtttggttttctttagcacggaatgcttacataaacttttgcctcctttttcatatgcagattatacctgagaaatgcagatatgatgtttgtcaactaaagttgagattcggcttgcaaaggctgaagcaatacagtgggcatcacttgaattcagcaaagatagtgctgttcatcaaagggtcaaaccttcatcctcaggtatgcacagactgttcatttgcatggtcttgacaagatcatacatccattataatgaattgttgcttgaagttttttattgtgcttatcatcaataatatgcacacacccattatcagtaagttcaattcatctggccatatttgcagtggctataactgaaaggccaacttacccatcatcaaaatctaaggtagattgggacaagctcgaggctgaaatgaagaaacaggtctgcctttacctgtttaatttacattgatctccttcacaagtgctttttttttacactccatgttctgattttgacatcaggaaaaggacgagaagctggatggcgatgcagctttgaacaaattcttccgggatatatatcaagatgctgacgaggacacaagaagagccatgagcaaatcattcgtaagactcactcgtcttaaatctttttaactcttgaatctattctatgtgccaattgctttgttatattagatcatctatttcctattgatcatcatgtacaggtggagtctcatggaactgtgctgtcgacaaattggaaggaagtcggttcgaagaaggtggagggaagccctcccgatggtatggaattgaagaagtgggagtactaagcgatggatgctctatttgttgcattggatatgattgtttttgcaagcatgtcaattttgttgaggacattgcttatcaaatatgatttattttctcttaatggatggtttgcttgcatgtcttgttcaagtttttcatcacattgttcctgtgattatccatgtactttaatttttttttttttccttttctagtctttaacttcttctgaagtgtcaatatttttcttaattctgtttcaaatttaaatctgtacttatttttgttcagtcagttcttatctgggctacatcatttttagtatgaaagagaatattgtcttctaatgattattcttaatttggagtctttttcccctagtgtataatatgtacatggattaatttaatttgacagaaaacttgcctaacagatctaaattatcacttgtcggtcgtcaaaataactttataacatttgttgttagaatttttgagataaggtaaatgaggttttatcataaaatcaattggcaatgggaggagtaaccaattcatcttatataatcacaatttatttttacacatgagtaatgtgggactaactctaatacacattcctcacgtttgggcctggaaagtctgggtgtaacgaatgacatttaagagataacagggtcgaatgtgacatttgaaagaattccacaaggctaaatattgggaaatttgtggatgtacacgtcgggaaatttgtggaatttgaaacaggtcaaagactccaacactgaaaaattggcacactggctgaaaggtcccaaatggaggttaatgggaagacataggaagcatctgtttgaaccggcagtattttggctcacaattgatcacaaacgactttttggaccagtggcaatttgggctcacaacggatcataaatagcactgataccatgttagaatttttgggataaggtgaatgaggttccatctcaaaactaattggcaatgggaggagtagtccattcatcttatatatcacaatttatttctacacatgagtaatgagggactaactctaatatttgtgccttaatataattgatactaatttaaaaatgggagaattttaagggtagaactttatcccaaaaagcacaagataagaccatttgcacatggttaaagtaattctcctttcgtcatccatcatcttgaatcctaatatctatactaggaaaactgaagaacttgaagagagtccctagctaactacaaatttcattgtttactaatatttcatcatgttctatgaatgcttgatttcatgaaaactattctatcaatgtacaagtagttattttatttttttaaatattattgcttacaaatcctattaagttattataaaatacatattgttttattgattatatatatatataaaaaaatttacattccagtactttaattgcattctttttacaaaaatatggtgctgtcatttatatatgaaaatgtaccgttttttataccgttatcaatttaattcaatttttttttt

SEQ ID NO: 302971 - DNA, 4587 bp, Cannabis indica
tttttttttttttgttaaaacccaaacccactttttcagttttccgaatcgatttttttttttttttggttatttccttcctttctctctcattccccttgtatttgtacactttcctcttctacgcaatttcattgtctcttatcacataacgaaacatttttaccaactctgctttttcttcttctttatcatcgtcttcgtctctaaccttttgtttcactcttctgtgactgaagaagctgaaattggagaacccatatacaaaaataacgatctgggtttttctttcgggctcgatttcctgagttagacgattcttttaagtcatcccaaatatggacaaagcacgggacgtgaggcgtggagccactcggttcaaacataccacacataaactctgtaaaatttatacttaatgcttcctcttttctcgaccaatccagttttttgtttctttttcagaaaactttcatgtttgtttgtttgtttgtcttcttagaaaattacaaaaaaaaaaaaaaaatctatataatacctgtcttatctgcacattctcttcgttcaattactgataagagtttcgcagataatgggtgtctcttcttttattgggtttgttgtttctgatttgaaggtgtggatggtggtggtgaggaagtcttgtcttccttaaaatcgaagaaagaaaaggtaaagaaattgagtgctgttgttggtagatcgagttccagccaagaagattgcgagatgggttttaatgtatctgataaagaagatgagctacgcagtccaagtgctagcaacaaatttcaactttcgaaaaaggttagtaatcccaacagtaacaagttttcttgttcttttcaaacaaaatatacattccatttctttttatgtatttttaattctcaattttcaattttttgtccagttttctgacgacggaaacggcgttggccaggcttctgttccccgaaagctacggtcaggtgtgtgtggagactgtaatatcagtataattttttctctgcatatttttggaagagtatcgtcttttatagatgtttttttttactatattcataaatataatatttttaataggccttactgttcattctggattaggactaaagcattaatgaactttgcttttttcagcaaaaaaaaaataaataaataatgaactttgctttttttatttgtttcgctggacaaaaacaaaaagattctgtgtaatttatttattttattttatttcaaaaaagaaaagaaataagaaacatgctgtggattctatgactttgattgatggtgcaattattcgaagtttgtgtaaatactaaatatttatgttatagtcttatcgattcctcctcctttttatctcttacttttccaaaggagatattctatagtgaatatgaagggggtgtttttataaaatgtaacaacaacaaaaaaaattcattcttgattcgttgtatgcagctatgaagaagcgtggtcgtgattctgtatctcctcctttatcagattcgaagaagaaaatccataccattactggaatccattcacaagaaatgtctgctattaagaaacccaagtcaatattggtactttaaattaaaaaaactggttctgctttcaattctttgtatcttaatacagttctaaacatggaactttacatgtgttttggttttggttttgaagaaacaaaaagtatcaaacaaaccaacagtttctatgccaatcacaaaagatgaggaagaagtggctgaaacgttgtatgccttggctcgtatgttctccaacaacaactcaaatgataaatccaaacgagacactcaatctttacaaccaaatccttcaaattttcctgagtcaaagccagcagttgaaggttataacaaattgatttgtgtagttttaagtctttggtgtgtaagatgtagacatgtcttgtctgttaactcctatagtgtgttttgattttgcagcaaaggataatgtaataaactcgactcttccattaaggactaaagatgatccctcatctagtgctgacaaattaaatgaaatggttaaagttgattcctcgaataaaccaaatagtcaatcgaacccaatttcgcttgacgattatgttcctcgagtgaatccgttcacacaatcctatgtccctaagagtgaacaacagttgaatgtgaagccattgaacagttgttctgctaagtttcgtattccctctgaggttcacttagatactaggtgagtggctttagatacatttgaaacacacttcagcttatgaagatgttatcttcttttgtaatatgtttctttggccctcaatcagatttaagcaaccccagcaaaaggatcccttagttatggagaaggaaaaacaaatttggttggggaaggttagtaattttcgcctgatctagaacaatttttcttttttgagttttgactatgatctgaacgtagtttatggtaccccatttcagaacacacctattttgagctccaagaaagctggtaagtgtatatggtctttctgataaacacattttatcatcattatttggaaattaaaatgaatccttctttaatttgaaggaatgggatcattgcctggaccgtcatcaaccatttcacaaggtgctagagttaatgatacatgtacaccgtaagtgcttttgcttgtttactcttgtaatattatgttggacccttttaatttagcttttactattgcaggttaccaactgctaaaattccagcttggcttgatgttccatcttgttccccaagaactaacccagtggtccaaaatcagtcaattagaaaggtgggacgttgtcaattcatttgtattagaatgtctgcataagctacgtgagattgtatttgattatttattaaattaaacatacaggtttctaaagctcccgttaaaagaagactatctaagagatgtgcaactcatgtgtacataagtcagttaattcaagctttgaaaaagtctggatacgaagacgtgctgagcctgccaaaaaatcaaaagagatctcacgaagaaggattaaaacaaggggttgcagtcacccttaacaacaatatgtatggtgaaaagaatgatgatttaaatggacttgtttctgatcccaccgtcactaatgctgttgccaataaaactaattcaaatggagttaacaatggtattcttcagcaaagattcaatcaagatcagccactgcagaagcaggtgcgttaaataaacaacatatgtttatcattattatcttgtttgtttagttctcttctcattgtttactctcttttttccagaggagtttcgatttcctgtcgttgtcagctggatctagtagaactagaaacgtagttgagccattgtctttgtctccactccaagttccttaccctcattcactcgtgcaaaatcaattccacccccagtcttcccataactcagcttaccttgaccatatttcatcagcggggcaggtttatgactcggcactcattgttctgcttctttcttttttttgttgtttatattaatacgagtgacattacaaacctacgtgaattttttttaggtacatccatatggtaaccttctctaccatactcaagcaagctcagcaggcttaacaaaaccacaacagcaacaagtttggagtggtcactataggccggatgacactcccaaaacgacgagtaaaatcgcaaactggcaaaatggaccaactactactcaacatcatcatcatcagcagcagcagcatcagcaacatcagcagcagcatttgatgtcccttccgtcttcaccgtttcctgctggcaaaatgactaaacaagatcaccatatgccttctgtctatgaagaacatggaggaggattccgtgctagttctctaccattgcagttactctgtcatgagcgccgttgattgggcgttagaagaaggaaggaacgaaaaagcatgaagacccgacaaaatgtttaattaggataaacaatatgtaaagaagaaagaaaagtataagttattttatttggcagctcccagcacagaacagaacagccttttcttctgtaattcattataatacaagtaatgttataaatgttatttgaattatgagaagggatccaatgagatatggagttgataataacgccatgttgatcctattccaacaagatggtgagactgagatacaattaattaattgttgaatggtaatcctatagtgtggtgctttaagttggtgcgtgtcgtgctaattcggtttgtatttatttgtactttttaataaacgggtcatctcatgccttgctacaaaaaatatgggtcgtgacatgtcgtgccaatagttttaaagagtagacccgacacggcccgtaggcccagtatttccgtgtcgtgctttgctcgtgccaatccgtatttcttaaacagaccgaaccattttcatatctgagcttaaatttgtaatttactttttttttttttttttttataattattaaattatatgtatatt

SEQ ID NO: 302972 - DNA, 2189 bp, Cannabis indica
ctcaagaacacgtttaggcatggaagtttgggactcggttatggcctgttgagcagccatggccgagtcatccttgaaggtctgtaaaatcaaaagtccattgttctctttaacattggtatcaacatccacgtggctactcaggaaagagaatttgacaaataacgatacgacagccatcaataaaagagccagaatgatcctacggcccagattcttccccgatctaagcgactgaataatcgtagccatccaataaaaaccatcctcaatacgaattaaccacttctcgggtacacaggagaacatgcgcctgcgaagcagcagatactttgtcacggggtggtgatggtggcaataatggtggtgtagatggtgatggtggtgaaaaggtccgacggaggagggagtagttccgggaggatcgtaatggtcttcttcttccaccgacggcgcgtctgacaagttcgaggtacggtcggcgcagccctcggctattaagtcagtcacgcgccgccgcgttgcggttggtcccgggggtagtctcgggctagtgccgttagacgaggcacaggcagcagcgtttgggccaccgccaccggacgtcgtcatcgccggaaagaaatgaaaaacccaatatatgtatatacccagaactttgaaaaaaagaatgagaaaattcccgaaatgattgtccaaacagaaaaatatagaatagtgtaaaatgagagaaacccagaaaatgaaaagagaaaatggagaaaagggtttcagatatttttgactgagagagaaagagagggaaccgtcggtttgggcctaaggccttcttttttggtttatggtttaggagattagttccgtaatctaaggtgaccagaggtgtttattgttttctcatatatatatttttatagatagataaaaataaataatatgttgatatttatatttatatatataaagaattatgtaaatatatatatctctgcaactcgaatgagagagacgaaggtggatctaaagaggagttcttaaatttcgcttcgcttcagttttggcttctttttatattgttataaattgtgaagagagttaaagttaccattataccctcgtgtcttgagaatttgacaaattagacaacttttaagggcactttttctacggttgcctttttcactttccgtataggcacgtacgtaaatcgtctattctcatttattccaattatttactatatttttatttatttaaaatatacttaaaaaataagaggtatttttataaaggatgatcaggattcaagaattctgttacaaaaaaaatcaaaaatcaaaattaatttttcaacttttcacgtgaaaatgttttccattttcctttttttttctaatattttttttgaagagatcaaaattttcgaaacagaaataaatcaaataaaaataatcatattatttatggatagaaaatggggatagtaatttaagtgaacgactttgtatactatagtactatatactatataaatcaatgtacgattgactgtagtatatattatgtcatagtaattaattattagtggtaaatataaattaatactcaatctacactacaaccactaactatatttgagtgaagtgttaaactaattaattcatcattataactcgaatattttctgaagacatatattaatgttgcttgcattattgatctatatagagaatccaaaaacggtgtatgatacgacgaatattaatgcgtagttatgatgtttatttgtggaaatgaaagtatttttccatttatatttatatatttttttgaacatgtattttatatattaattgatcattttaaatgtaactaattatcaacagattgtcccattgtttatatatagtgcctaatatgaccaatttgattaagatataatgcgttatgcgtatatgaactcatgaatgtatataatataatggttttactattttgttatgataaaggtaataaaacaaaatatgtgaagtccattttttatacaaccattcaatctacccatatataatttagactagatagaaggtacgtgccaattaattttattttaatttttagttttttttaatatcataattttaaaattcataatatccaatgtagtatcattgaaatttgaaagcata

SEQ ID NO: 302973 - DNA, 1856 bp, Cannabis indica
ggttcaattttacgacatacatgtgtaatggtggtatattatttatgcttcctttcttttatattgtgtagatgaattaattatatataatatatcgatcgatctatatatgctttttataaatgaacatataaatatatatatatataagaaaattatatataccaatttattactttttgttgttatatatcgattgtttttgtggttatatataattttcaaacttttttatgtttgataataatttacaataccacactttgttcctttcttattttttcttttgccacacgaatctcattatacatgaacacagttacatatatatatatataaataatataaatatatttatatatataataagtccagaaaggaaaatagggttattagtgtcacgagacaggtttccaaatttaacactatttacgctataatatatatataattatttgattgggacgttaattaatatatgtatattaattaattagtttctataaaattaaggtgaacatcatctatatatatatagtatgtataataccctttttctaaaaataaataaatatatatttatataatacccagatttaatgatctgatgatctcaagcttatatgattggacataaagataattaaattgaagcgaactctagagccttggtcactatgtatatatataatgatgtgatttttatatatactaatatatatcatccacaattaataagtttataaatttggtttgaacttgctagctaattactagtattcatgcatgcatgttaattatgatatttctttatctgttcgatcgcatgatatttactttaatggttaatatatatatatgtagcttttttgaaccatgtacttctttaggttttggtcaacttaacttgaatggactgtttttgaagcttgaacttgtttgtgaattgacttggtgaatttttttttaacaagacgaatgtattatttttaagtatagtaaaatagtagcttatttcgagtttcctcaggcttcggtttcaggcgatgctttctatgcctacactgattaatattgattcatacttcttttgtaatttggagaaatacctaatacatgattggaaattcatgcggaagaattgacttgattcctctagctggacgcattcttccttgacaattctagaggcctaactggaaaggttagggtggttggaggaagagttagtcgcctcaacggatttagagtttgtaacttgaaattggatttggtatcccagtactttggattccttcccattacaggaacttctctgtggctctggcaccttattttgttcccttattcctcgatttcttttagctctacctcctttcgcacaccctcttttttcttatgctttcggcgaaagagctaattgctagacgatctctgctttaagtcatttctcctctttgtcattggaccaccagttcaagacaggtctctcatcatcatcatcatcctccccaacaataataacttattgggtagcaagtggaatctgctgtaaatggttcacttgaagagtttatgattatcatcgtaccacttcctcagaattactatatgtatatatattatatctaaaagaaatatatgaataaaaaattaacctctcgaagcctatcagggtattctcgatttttttgtatgtttgtatccttagttgatcttaaaatactcacattgtagtctttcgaatcttccactacacacaaggactagtgtgggctattataataatgtgtatacttgttgatgagtcgacagactcagtaagatatgcataacatattgttggaaatatttta

SEQ ID NO: 302974 - DNA, 2888 bp, Cannabis indica
agttttttgtgatacttgggctgctaatgatggccaatctggctatggcagctgatggagacgatgaaaaaattctgacgaaaacggtgaaagggaagaagctttgcacgcaaggttgggagtgtcgggtgtggtcaacttattgttgtaatgagaccatttcaaagattttccaggtttaccagtttgaagatcttttctcaaagaggaacacgccggtggctaaagccgtcggattctgggactaccagtccttcattatcgccaccacgctcttccagcacctcgggtttggtaccaccggcgggaaacttatgcagatgaaagagattgcggctttccttggccatgtcggcgccaaaacgtcttgtaagcacaccactaacattgaattttgcgtttttggtttgatattattagtactttctatgttggctgagaaaattagtcggaagaagaaataattcagaacttgagtccaatgttgtttttaagtttgaggtcattagtcatttattagttaatttaacagaattaggcattatttagtggatttcagtttttcaatgttggttttcattgcgaaaacaatgtgaaattagaaagggtcttgatgccttaatgtttagtttggtttgatcgtaaattcattcatagtttatttttcttttgctgttctaattcagtcacactcatagttgatggcacaaagtaatgtttatgtttgtaacaatgtgatggttaattataatggtgaattccaggcggttatggagttgccacaggaggaccattggcctggggtctttgctataacagagaaatgagtcctatgcagtcatactgtgacgattactacaaacttacttacccctgctcccctggtgccgattactacggtcgtggagctttgcccatctactggtgtgtactcttttcctctcttatcattcactgttctcttattgtttttttttttttttaaaaaaaagtgaatgttaatattctgattttcttgccatataccctttaacttgctaacttaaacaggatgccatggttattgcaaaggagcaattaaatagactagatgagctaatattttaacaggccttaagcatctggttactcatcattttagagataaatgttttttgtgtcaaataatgcaaatgccatctatcaagttgcgggcaaattgaactatcctcctgagtgacagaattgttttctttaaactgctttaggaattccactctatgcatagattctcttcgtgtatgaaatatatgactaactagttaggttgttttgaatgtgaaatgttatgctgaggatattcttgttggtgtcattgtgataggaactacaactatggtgcagctggagatgcattgaaggttaatctgttggagcatcctgaatacatagagcagaatgctacccttgccttccaggctgcaatctggaggtggatgacaccaatcaaaaagtcacaaccatctgcccatgatgtttttgttggtaactggaagcccaccaagaatgatactttgtccaaacgaactcctggatttggtgcaacaatgaatcttctttacggagattcaatttgtggcaagggtgacattgatgagatgaacgtcatcatttcccattaccaatactaccttgacctgcttggtgtgagtcgagaacaggctggaccacacgaaatgctaacctgtgctgaacaggaaccctttaacccacccactcctgctgttcctgctcaatcatcttcttaaactctctctctctctatctagttgttagatagcctgttttgtcctaaaaaaattataggttcaattactctccaaaggtgaaacatcaataagaggtggtctagtgagatgcttccatgctcagacattctctactttcaaagctaaactacccagttaatgtataaggtgttgttcaatttgttgtttctgtgtagatttgatattcatttgtctcaaaacatcccaagggtactgtgtggttggttaatttgatatatgtaataccgttttgctcgtgtattctgttggagttgcagacttgtaaagttgatacataatgtaccctttattggtacgcaattatttatttgcatattttcatacattatttggggtgaattgcttctatacgattagcaaatatagaataagtgggttcaaagttcaatgccatttttctttccaataaaaaaagttcaatgccatatcttgtttgagtcacaaaatgtgttctaatataatttttaattgtcggtgaacttggcttggagttgggacatggctttcagtttaaggttagatgttgttttctgtgctttatttagtaatagtatgacgcaagaattggttctttttgtcggtctaaagaaacgaaaggcaattgcgttgtctcattctgtagcattgcatgattatttatcgcatagtcattgtttttccttattatgattgtaactttctcaactattcatttgttgacttggatgactacacgtttattaatcgtttataaacttcattataggatttagggtgtttttggaagtaacacttgactaggtattatacactatttaaaatttggataatttgaaatggatgataattacttataaatttttaaattattgattggtaaaatatttataaattatataagaaaataataatttttaatacctaatatttaaaatgaaaaggtgttcataaaatactcaatctaattaaatctatacaattcaatccaattcaatctgctcatataaaagtaaatgatctaatccaattcacacatatttatatatatattttaaaaaattatatataaaattaatattt

SEQ ID NO: 302975 - DNA, 1717 bp, Cannabis indica
aacaaacaagcacatttaattagaaaaaacacaactaacaatatcaatttttacaagacttaaaagttagcttactaaatagaaaatgaaactaaaactaactaaaattaagcaaacaaacacattttcactactcttctcacaataatttcagtttaaaagcataaaaataactctataccatagagttatcatctatcaagtctattcttaatcaaatccatgcctcttctcttgttagacaaagtgaaaaattttcccacaatccttaagtccatccctccaatagagtcaaggaaatcattaggaagttgagtatcatgagaagagatctgagcaccaccaattttatcattctagtccgagacacagttcaggtttgccaacaagaaccaggaagaagaaaagtcaataacctccagggacaagtgcttccaaaactccattctattactacgaacaaaagggcatacacaaacccctaaccaagcaacaccatgcaaaatattagagaatttggccatgataatcgacaaattggacctaaaaatttccacaccaatcccaactttccagcaaaggaacaatccaccaaccaaaccaacaacatccttaaccacgacacaaaaaaaccatattcattgccatatatgattcatctgaggcacattcaatttagttttcataagataaaagatgtcagaatcttcaccatgaaccgaacccctaagggccttaactgctaaggatttccccaaacccaagaagttccaagacaccgcctgcatgaggtattggggggaacaataaggctcgcttcctcggttacatgaaaatcctccttcccaataatatcattatgaataatcctaccatttcaatattagcatctattaaaagggaatcaaactagaggactctaaaatatgttcacctgtaggaagctcattttcagatggtatttgatattcgctgagacatactcactctcctcaaagagaccattgtcttgttctagtgccatcaaaattttagatttatttgactttcttttcgacttacggggtctatcattttcttgaaatcgctactcctccaaatccatacttggaataagattacacgactcccctacctctgtaggacttggcgaacctcttctctttttactcattccaccaaaaaaaatgataggattaacatagggggaaccattattttctccattaaaaccaaccatcggaacatgaacatcattagagatagcactcctttcaggaaacacatcatttactcatccctcttcgaacccacagaggtgcaatttagattatcgccctggaagatgagacttttctcaaggggattttaatttttgcgcttagaaccaatttgtaaattctcgggtttagtcagacccccaaaatgggttttttggtatccctttagggaccgtcatcctgtgggattcatacttccttgccttattgggcttaggtcttggtccataagaagtagaggccccaatcattttaagaagattagaggggttacgggtacctttggattgggtcagatcaattgggtcactattgaagactttaaaaggattgcttaccaggaatggtcaacccatcagaaataggaatgttgggttaggttgtgttggaaattattttatatctgaacctcgatctctttctctgattctttagtg

SEQ ID NO: 302976 - DNA, 1365 bp, Cannabis indica
gaagagaagtttcgaggtgaaatgctagtcagagctttccagatatgcgggcaccagttgcatctaaccatccctagtgagcaagctttcagtcattgaagagagaagccaggacaacaagagctggtcttgaacttcccaatcaacgaactctggattgtatcttagagtagcttgatctgcgtcactgagaaagttttggaggaggtggagtgtcttcgatgaatttctgtagtagattgccacagatggctgcaataacatgttgcttccagagaaggtagttgtaatcataaagctttatggagatggtgtggttgaaatgaactgtgttatcattttgatctctagtggaggttcttgaagctaaaaactatggtccttgagttgcagactgagtatgttgattactaggacctgttgaagtcatatccgttattaatggagaaaatggctctaataccatattggaggtgttcaacctcttagccatgaaaacagaacaaaacagagaagagagaaagagatataaaaggaagaaagaggaagaaggatagaaagagagaaagaaatctcttatttgatttagtgaagcatacaacaagtttatatacaaggattaaccttaggagctaaagactaactaacaactaaccaactagagtaagtttatagatagctaagaaagcaactaactaaccgactaaacaagcttaacaactaattgtcctaacaaccgctaataataaattaaatagtaatgcgggaatttttccgcctagtttagcagtagaatattgcccgtcgctaataaatctgtcgctaataaatctgtcgctaattgtatattttcttatagtaagtaatgaaaataatttaaatattttgttatattttcttgtagtaagtaacaaaagtattgaatcttatttttaacacttcaaaattttcaaatttttctgtaaatttaaaagtattttaaataagtataatttagacaattataataaattggattaaaaagactcttttaaatgctaaaatacataaaaaaaatgtacaaaaatattttatttgtgagtaatttgtggcataacctcattaagtagtcaggtttttgcaactaactcccaattctaaaattttggtggtaaaatcttctaaactgatattctgttagcaattagtcatttccatccatttttgggtgttaaatgccaagttggaatgtctacgtgtacacagtgtacacgtggcacaatttaattagtccacgtaataaatatttaaaattaaaataaaaaaattaatattttaaaataaaaaacttaaaaaaattaaaaataatctttaaaaattaaaaaa

SEQ ID NO: 302977 - DNA, 2562 bp, Cannabis indica
ttaccataaatggaaaaattattttgtcaactaacttgccaaaaaaaagactttacaaaactcactaactaacaaaaataattaaatgactaatttgcccctttattcaaccaaaaagaaatctagatatttaggggtaaaataatcaaaatgcatgacccgattaaatttgacattctaaatgtctaactaaatcgtctcgctattctaaaaatactaaaccataataaagtgactctataggccatacgtcgcgttccactattactgggcataaaaatattaaaaaaatataaaattcatataaaatacaaatagcacacttagaattcaaatatatctccaaaatcataaaataataattaaaagtctacttgcgaaattagaccctaattatttactaattctaaaaaaaataactaagcggtgattacaaagggagatggctattgtagatggctgaagagttgcgtacccaactgttaactcggtcgaagcctgcctaaacgtcaaaatctttgtttaactgggggtggttcatactgaggtctagaggtaatgtggttgggaagtttcttgcttgaacttggagaagatgatttatgatggtatcaagactctcgtacatccaccgtgaaaaagaagtttgggttcaaagtttttctggccttaagttctgagaaggaaagctttggtttgaatttgaaagcaaaaggattcaaaaagcttagaagtagtaagaaaggaaaacgatgggggtttcatacctatttatagtggagaagttagtccaatcaaaggccaggatcaaattagctcaaaagcacaaattgatccaacatggagttgagaggactacatttaatgctccttgaaagaatcaaggaatttaattgtcatcattatgtgcatttaatcatcatcatcattttcgcagccccttacgcattaaagaatcgtcacatcataactctgccaccatttgaattttcctgcaataaactcgcttcttgcaggcgcatactatttatagatctaaagaatgtgtgaactaccagttgtttaccataaaagtattttatctctcaactaccaagttctagatgaaggagatgctcccacattctcaagattcatctacatctcccaggtgtaccctggtaatccggaaggagactacaagcttccaccacgcaggaatcctgcaagcttggggggtaaatattatttgcatttttggaaaaagaacatgtgggaaaaggtagaaggtgacgacctgagtgactatcaactaagtccctttaattggagaaggtcgcaaaaagattaaacaaactcgggagaggtccaaatctagaaaaggcccaaaaatttaccacaaagaaaattaccgtccaggacccggaagccctatcatccatctgagtactggagaagactaaatcaactaagcttacaggaagacacctgggagtcatacgaagggtctaaggcaatgccaattgtacaaggaaagctggaagcttgtcacaaagcgagagttggatgactcttgtgataattatacttttctgacacaggatcagatcttttcgcctgtgtcaaatcatggtagtgcgtgtaccacctttgaatacatctttctgtccgacgactcgtatgagggttttgtctactaggtgaaacctccacccgacacacgtcctgcactaatagtgatcttagttgtatagacccttcgccccatgagaaagagccttagtcagtattcttatgtaatttaccccagtagttggtgggctttttgcaaaaaaaccctaagagggtcatggatatgcccatacttgtactttagcctatataaacatctttatttcttcacaatggggggatcgaaaaattacatagtcaaagctctgctaaaatactctctaagctttcatcttctttaagagaaacctagagaatcagaattaggattttattgtaaacacctcttgtaatatatttaaacacctataaggccaatatattgactcgtggactaggaataattaatgttccgaacaacgtgaaatcctttgtctcatttactcaatagttatttaattcataaacctttcatttagtttctaaaattctcaataaacaatttaaattaaaaaaaaaagaaaataattatcaaacattgattgttttatgaaaatattttcatttttctaattgagaaaaataaattccattcaaataactattacaagtaactataatttttaactttaaatttatttattatgtcttttaattttttttcttccctttttcccttttttttttacacagattcgctcttttaatttatatcctttaatccttagaagaatgatatttcaaaacaaaacataagaattgaaaagagatatatacaccattttatttcaaacaaaatgatagaggacttgctataatatcatctgaatatttattctcttttgtaagatttttttatcagtgatcactaagttttttttcttaggtgacgtttggtaacacttttttaat

SEQ ID NO: 302978 - DNA, 3523 bp, Cannabis indica
tagcctctatgaatctttattccactctgtcggatgccttactcatatcaagcttcaagcagccaccccttcgcctgagttcgtcttaatccatgaattaatttaaaagcctcaaaaatattatctgttataagacaatttggtaagaaggcgctttgtgtttcagagatgacacttggaagaataggctttagctgagccactaacaccttggtaatgagttgagatgacattacataggctaatcggacgaaagtttttcatgtaatgaggcttttttatcttgggaatgagagtgataatggtagagttgagaggtgtcgggtcaaccccaccatcgagcacacttagaactgtggaagtaaccaaattgccaaccacatcccaattattttgataggacatggcagacatgccatcaatacccggtgatttgtctgatcccataaacttagtgcttgttcaacatcaatcagattaaatggcttgagaagatcatgattcatgtcatctgtaactgttgcaggaattttgttgacagttgcagcaagagcatcaacatcagtcgtgcttgattggaaaatttttgcaaaataaacttgaataacctctcccatatcttgttttgttgtcactttaacacccttttctgtttgtagaaaggttatattattatgtgatttcatggctgaggcttttgaatgaaagaactttgtatttttatctcctaagtgcatccaatcaactcttgatctttgttgccaatatatatcctcttgttctaaaagatcatcaaggattgattcattgtgtattatggccgaagttgtatcagttgataagtgtcgagcatttttaagggaggccaaagtttttttggatttctgccatattttttaatgtgccaatgttgcaaagtttttgcacatgaatcaaggttgtgttgcaccaaagagataggatcagctgatgtgttattagtccagcattgggcaattatatctcgactttctgggtcctataaccacaacttttcaaagcaaaatctgtagcgccttttatatggtgtagtatagctcctagtggtgaaaaaagcagaaataacatggtgatcagagtggtagtagtccagatgagttacttcaggtgtagcaaattggttgtcccattgattgttgacgaaacaccaattgagatgcactttgacagtgtttactgctgtcctactccttgcccaagtgaaagagtcaccttcaaatgaaagttcaataagatggcagcagtcaagagtagcacaaaaagcttgcattttagtttcacttcgaagaaaaccaccagatttattttgattcgaaagaattttattacaatctccaatggccaacaaaggttgcaagggagcaacatctgccaacctatgaaggagagtctaagaagttgttctatctcagacagatggagcaccataaaaacaagtgaagtggaaacttgggccattgtcattagatatgaaccagtcaaaaaaattaaaaccataggtattaagagatacttctacagtgtctttccacaacaacataagtctgccactgagacccgttcttggtgcttcaagaccatttttgaaatttaaagattgtcgaaagcaagaaattgagttgaaatgtttcctcaagattttcataatactttgcgggattgcaaagcaatcactgctgagtcatcagatgaaccatcataatccatgatatcagaggaaacattctggtttgagttgtctccttgtgatgaagaaggagcaagggcagcaaggttttggttacgacaatgtttaagtgtttgtcttagcgatggtacattgcctggccttttaagaaacctgtttggagagacattttctttgctgatagcagtagaaacatgagaaggaggaaaagctagaggtgaaatggttatagatgttgaatttgttgaaagagtttgtgatggtggaaagttgttgggcacgtactgaggtaaggcatttggagttgcagtcggggggtatgtggaaacaggaatcagtggggaagtcgttgtaccaatattgggtgtgtaaatgtgattgaggttggagatgggtgaggaaatatgggtggtaattgctgcagtattttgactggttttggtattcatggtaggaaattgtttgatgaaggagggatcgagtagtatcggtcatgacatcagatgctaagatagtcgtggtggaagggtagtcaattgatcccaaagtctggtgttgagtatgaggtgaagtagtatcaatagaagattccccccctaaacagatttttgggttgaggaagtaacttgttgttcaattgaggaattgaggatacaatggctttgcgggcaagacgtgtaacaaatagtcagacattgttctttgaaaagtctgaacggtatttgtcatagcttgtggttggtaattttgtacccttcatccaaggtccgtatagcatgtcatcatcattaccatcatccattcgctccatgaaggagatacatttttcaaaaggatgcctaataattccacactcaaaacaatattccgacaaacgctcataccaaaaatcaatccaaaactcatctttaacttggggtaggctgatcattcggcctcgaagcaaaggcttgtcaactgaaatattaacacgaattcttaaatacggaccccatccttcataaagagattttacatggacatcaatatagtctccaataatattccccagggcctttgcgagggtcttagatttgttgagaaaaggcaagcgaaacaattgaatccaaaatagcgtgtacctgaaacttcttgctgtgtaattttgcagagcatttggcgtacaaaaaacaataaggtgattctgaatgtgtcatggttctttgtttaacactcagaatttttcacctgcacacccaaagacaatcttgaaaatgtcatctctacattcagtgataaccactggaaagcggctcttccaatgaccccctatttggcttatggatataattttctgttataacacgagcaagaatggtgtgtatggagaagggagcaagggaagggacaacctcttcaatgaggacaaaacacaacactctcttcttcacttaagttaagagtagaattaagaaaattcatgagtggatccatggaagcaggttattggtggtggctagttgaaggaaaaacagagcagattagtgaggagaaaagcacagggagcgaagggaaaccgtcaacgagataggagggaaaaggaaaaagtttgaaaaaagtagttaaaatttcaaaaacagttagaaagaaacataactgcaacagacccaaaacagggcacatagatttattctaagttttataatttgaaccatacctcaaacttaaactatactattccacattttttttcttataccacattattaaagtaatatactcgaatatgagtattctgtaatatactttgtctttcgt

SEQ ID NO: 302979 - DNA, 1855 bp, Cannabis indica
aaaaaaattaaatatcttctatttagttcaataattatacaacaaaatagtaaaaagcctccacaaaatagttataattttaatgtaaagtaaataataaatatttttataacaattaagcccccacagatcaaaaattctgggtccgtcactggctgttggtacaacttaatatcacgtccaacatgttttactttaataaatattataaaaaatcgctaactaattagaaaacgatactttatcgtacgtgttgttagatactatgggtactttatagtaatgctcatacatatataagatacttctacaagggagtatattaatacatccttatctcttttggcatctaaacaattttttttatccaatttttttaaccttttaggtgggtgtattgtaaaattttcttttataaatatatacaaatacttcaacactttgatactgagcattgctatggaaatccatgtattaacttataaatagttagcaataatttatattacatcaaatagtttatgtgatgataactcatttatactttttagtatttcttttttacaataactctaataatttataagtaaatatcacaagtatcacaccaaataaaaataatcttcttataattcacattgtcgaccactgcaagtgccatggaccccgagatggtcgaccacaacaatttcactggttagagcaatacttttgctcccaagaatctaggaatggtggactattttctaagtatccaggttacaaaaacagagcaaggactactagctagctccttactcaaacaaaatacctataggacttactctctaaaattcatagtgttgtaatactatccatagtaggagggctgtaatatgccactattacaaggccagaattagcattttgtattaacaaatatgtccatttatgcaaacacctttgcaaaaacattagatgacagtcaagagaattttaaggtatgtacattgctgctggcacctcgattttaaagttgcctctgatttttctattgaagcattatgtgatgctaattgggcagcagaccttgatgatagaaggtccaccacaggctactgtatctacttagggggaaccttgttgcttaaggtcatttacagaagctgaattcttagccaacactttaagtgaataaacacaattaacagaactacacattcagcaatcgagcattccatctgtttggtgtgataatcaaagcacgatttttcttgcagctaattcagttttgcatgctcgaaccaagtacataaaaattgatctttactttgttagagacaaactgttgcagcatcaactccaagtgaagcacgtttcagctgcagctcaaatcgcagattgtttaactaaactagtttctagctctaagtttcctgatttacgaaccaaatttaatgttgtttctcaacacacattaagtttgaaggaggctgttaagggtgataatagttaattattgttagagctggttagttatagtttgttagagttagattagcttgctgtacatttctattattgacagttaagcttcggttgtatataatgtacctctcttaatttcaaactcaatgaataagacaatcacttgttcatttgtttctatctcttcttctctttctctcaaacataacattattaaaatcaaattatttatatatatatatatatatatatatataaattgtgttgtttaatgactaaagacaaattactctgcatggttttgcaaatacatataagtaaaaaaaaacatgtcattacagcttcgagtcttctttccttaacttattcatcaagagaagatcatgaa

SEQ ID NO: 302980 - DNA, 3384 bp, Cannabis indica
tctctctctctctctcttgtgacactttcctactgattcatacattaaaatcttaagagtgctactttagatcccatcactacagtgatctgagtagtattatctctcggtattaatacaactaaaaggggagtaagtcattactcgctaactaaggaggccaaaaatctataaaatcttgtctcttatttacattattattcttattgtgtaacacgtggcaagcatgagtattaaatacaatttcgctatcggttggccaaattcgaaggccaacagtatacatcaatggacttattttttttttactttaagtaaattgactttgttattttaatttttttttcctttttgttattgaaaaaatatatatatatttaaaaaaacttataattttaaaaatatatatatatattagaatgtgtcataaaaaatatattatgtttatcagaatgtgtgagcatgtacaatttatggcatttggctaaaccgaaatttgtatataaataaaaaacaatctatgaatcttagatgtatagatactagcaacagagagtttataaagtaaacttaatcttgtaaaggaaaataaatggtctagcatagataaaattgttcttaaaaatgtgaaacagttgtaagtttttattttgaaggggaccttgtagatgtaattgactcggtttgattaattaaaattattttttttgataaaaaaaattaatataaaatataattatagtagaactatgtatctaaataaattggtagtaaaagtacttaagtaatcaattttgttagaattaactgttaatataaaaaaaattaataacaaaattcataagtaaaattatttatttaaaaataatacctatatgaaaacaattcaaattaacttttaaaataatattaattcaaattaaaagttaataaattttttaattatttaatattattttatgttttaaaaaataaatatataatgaaatattattgtaatatatataaaattttaattatatacaagcaattttattgtaaagatattcaccttatatcttaaatctattgataaagaacttatgctaagtcttattataatttttacccgatatatgtatacatttatatataaaaccgataagaaggtccccactaacataaaaaggaaattgtaggtatgtgatacccactactaggcaactctctctttgcctatcgttgtcttacaccttgattgaacctattgatgaagaaaaccccaagcattatgaatcaaaggggtattctgcccttcctatggatctatactagagatgtggcacttgtcattttgggaggattatgacatcattcatgacatagcactcacttcctttgaatatcaacctcacaaaagggatggtaacaccaattatgatccccaccccaccttggggttacatgttttatttttattcactacaaaaagccaatgaaaagctttcaattcgttcattaatctcatttttctttttgttcattttcatttacaaccttattattaacccaaaatcataaaaggttagcctactcactctatttagttcttttaaaccgtcaatttctatattaaatgttttcatttttttaaagaatatttatataagcaatcacttattttaatccttatattatttttacgattgcattataatttatcttataaagtctctaataatgttttcattttttttaatgtatatatatatatatttatgggattgagaagatatcatttttacaatttttataactatatgatacatcctatatttttaacatatgtaatgttcatattttgtgcaaaaacagatagaatttatttttgaaaatgaaaaggaattatttttgaaaataagttcccacctggccattgacttagcatatttgtattacacatctccatatatatagaatatgtttcaaattcgaatttccttccatattattatttttttttttgacaaatccttctattttaataaaataataataaaaataaaaattattctatttttctaatacatatgtaaaaaaatcttttttttttccaatgtgtttagatactaaaaaatatttgtgaaaaaagaaaaactaaaaaaactattttgagtcgcttctcataagatttctatcctcgatcttgtcactttttattgtacctgaaacacttttaaaacaacttttttaattctaaaactaataatacaaaaataaaaacatctttttatcttgccactaataagatttggtagcctgagtatcgaatttttattcatgaactcattttgagggatgagcactcccaacatcttttagatatataatatctaaaaggtaaaagaaaatagttaagagcttaaaattgagctccatcaaatgctttaaatccttagcaattatacaacatctcaaagtcgaagaaatttttctctacctatagctcaatgaatagtgaaaaggtaaatatattttatatattttttttttcattaattttttattcttctttatgctcatttgtatgtctttcttattagaatattttctatttcaagaatagaatcaatgaattaatttaagataaataaatattttatattcattcaatctagacacaattagctagttgatattctatatatggtcagattacagtttatcaaatatttaatttcttgaattaattgtcaaaatattctaacaattaattgtggtagaaactttgatagaatgtctcacttatataaatatagggtctcgaaaccgctcactactcattctgtgaaaataataaatccatctaagaagagtaaagggagttgttgggattttatgggctgaataaaatgtatttcaatataatcagatttactaactaaaaaaagatcataaattattttatgttgcatggttcacacaactactttcatgattatatatttaatgtgtaaattctattaaatttaaaacatatagttattcataatattatagtatttttaatacaatagaaaataatcacgattatatgttttgaaatctttagtcccataatttattagtgcactgaatttccaccgacatgataatcaacgttaaagattacttatacctgtataagtggaatattctttctaggactttagaaaagtatactagtatcgaatgtatggagtatatatcgaactttactgatattgatagtagaaaagatatcataaacttattggttatatctttctaagtcaatatcacttagttgatcttaggccaatagattttaatcaagagatagttaagttctagcttaactgtattatttgtgttttttgacttgtt

SEQ ID NO: 302981 - DNA, 3911 bp, Cannabis indica
ttcattgacaaaaaaaaaaaaaaaaggaaaaacataataatatggttggtatattagattttggatatgttttacaattttgggtcttttttttttattaattttgtaaagagctacaaaacactttttattttattttgttaattttgtatattttagatatgatttggctgagaatttctacccggagtcaaaattatttagttaagttgaggtcttattggttagtggggcacatcgataatgtggttagtggggcacatcgataatgacaatctacagaaattaaacattattatgtaaatgcattacaagttgtcccattttttatccttcagtcattgccttcactaggaatattttttcaccatttaaaacaacagcgccaaaaacaaaaccataatctaaatctacttctggtcataattattctattttacagcacactagtaaatcaagcacttcggcttttttgacccatcagtttctatactctcccataatatcaggaatgaatcaaagcatttgttaccacatagattgttagaattgaacattgttcagaacagaagaaataagtgagagcacttcctatgaaatattgaagtagaattatacatgttgatctgaatttatctgtaacttgaaatttagaaaacaagtgtaaccattataaacccataattcatcgggaaaccagatgagttataggatcaatattcatcggactgaacaaaatgcatggatgccatattccagacaagaccttaactttgtgtatgttttggctctggaaacacccgaaaaatgtgcagaaagtctaactcttactatagccttctaattgtgaggtcactcaggtcagagaatctataaaaagcaatggccactgatctctaatatatctgcaaaacttatcaaatgaaatctgttcacagatttgtctcctagaactcaacttaggattgggattggcttgttcaccagccaaatggacttacaaaagttcagtaagtatatgcattgcaggcaacaataatagaggtcattcatgattcaacacatctcatgggccttcacatagcaacatctggatccagccttctctgaattgcagctgcagcctgtaacaatgaggtaaaggtgtgtcaagacgagacacagataaagttgtgagcaacaacaggaagagaactcaagtctgtgatcattacctccatatttccaaccttgtactggtaagccatctcctccctcgagttgagcttgctctttcattgcttgtgcctgggatatagtgtgcaagaagcaataaaaaaattatggactagtgggttaaaaatcaaacttcagctataattaacaatgcagaggaaactaaccattccaccctgcatggaccgcttcaaagctgccacctcttcttctttctgcttttcacgtactatcatcatttcttgcctgaagaaaatattgtgaattaggccaataattttcatatctcatcttcttcactccttaaataaacttctattcctcttgatgatgagaaatgggtgagaacacaatttcaaagaagaagataatagaagatgcttcgcatgagaacttttgataaaaatgtttcaaatttttactttctttgttttcaaatatcaccacaaaatacattcaacttattattttacaagcaaactcaaacaaatcttcaccccaaaccttctccagaagcaggcacccgactaccataataatttaaatgattaaagcctttttggcagctgaataataaaatgcaatgtattaataatgatatttggcgcaattccctcttataaggcaatttaaagaactgttggtggattttttccagcatttctgtactctgattatttgaatgatatggtcattattcaaaaaaaaattcttcagcttaatttaaaaggatttatttattttattattattaaaaaaacaaaaagaaaaatctttctaatcaattaaacatgaataatgtaaacgctagaacctgtccagtaagttgaataaacacaaacacacacaacagcaagaagacaagccctgatatgacaaatcactttaaaatacagaaaaacgcgaaaacaatacttcaactaaaacatacctgcgtatttcttcatcattaaacactgtacgttctttttcctgaaccttcttgaaaccctttttcatttctttttccagttggtgtctgaaatgtgcatcaaggctataatacctgccaaccaaaaaattgaattaaacactagtcaacgagtaatctacattacatacatgcattatgagtagtgctgcaaataataagatacaaaagctccaaacacactaaaagctattatctcgcctttatttcattgttaacacacctataatattggtaactgataacactcttgcaaacctattttggatgatgccagtcataataatacttcaaagaaagcaggaaatatcaaatagacgtgtgaaagcatagtttggcaaaaagagtagcataatatggcagcaacagaaaaatgcatcccaaactaaacggaggaaacaactatatgaaaaaaggccttcaaatattacaagaaaaaaggaaacaaattaactctattaacactgcttgacaagcaattataatcttctacaagacctcttaaaacaggacatagagaaaagctatacaactaacaaacttaactcactttttagaaggaaaagttgcagtgttgtggtcttccatgaatctgtacaaaataccgtggagcaatttcagaattcaccaaatagacataaaagtgctttgacttgaaacaaagataataagcgagtgacttttatttgttcaccgagaaagtattggcttactctttaaacatttgtttttcttcccagttgggcaggctttccaaattaacctgcaaagagagccagtcatgtaatagctatagaacaattctcatttctcaacaaaataagtgaaaattcttctgtctttctacatcaactaaacaaaataaaacttgcaaaaggcttcgacgactgtgattaaaattacctgtttcacctctgccaaccaagcagtgaactccggtcgttttgtcctacaaaatgcagtgcacgtacggcaaatatatcaattgaataattgtaaggtcaacatatatatgtgtacgtaagcaactctctacagaaagaaaagaaaatctttatatatgtatattcatcatacaagttttattactattttcattttggcagatgccatttagagagatttcattatcagaagcatagtgaaacaatacaagacagcaattcatagtccatagctgctgtaagattaattttcatttgctttaagccgccaacttatgagtactttcacattcttcaatataatcatccatagtccacttattcaatccatcataaatcatgatctataaagctgagattttgagacatgcaaacacccagatatttatataacctcaacatgtaatgacacatagttctcacttaaattctactcttcctttcctacagtttctcagcagcaaaagagatataaaaacaagaaattgtgtgtaaagaataggttaccacatatcagtttctctgataatcccatacttcccccacgaattcgtgacagcacctttcttccctctttcctttttctccttctttttcttctttctcttctccttcttcttcttcctctcttcctctctctcttttctcctcctcttccgctccttctcttttttcctcctcctcctctcttctcctcctcttctctctttcctctttctctcttcctcttcctcctcctcctctcactctcgctctcctccgtgcccgaaccctcagacacc

SEQ ID NO: 302982 - DNA, 2740 bp, Cannabis indica
gtatactttataactgcattttttggatcggtgccaactttgccacaagtccattttactactatgctatactatgttggtgtctaacttctcatacccaactctcatttacgtccaatgttggaagagatctgttcagctgtggaggtggctaggctcaacctcaattatcccagaaaaggaccaagactcgttgaagatggtaactttagtcattttcacaactttttttggaatgataacttatgatttagtcacaataataataataatgatgatattcaatgaagtcaagtccagcacaaggtgattacttcattcttatgcctttcttcttgaataaattttgatacgggaactggaggatccggcttctaagaattcgagaaatggaatttttttaaaaaaaaaaacagacaattgaaattcaattggttcgggcctttggaactgatattttagggaatcgaaaatagattgattttacaaaaaatttctattgtatggttatccgttattcgatttgggaatagaagtaccaactgaagcccataaaatttaggcctttggaactggaacttgagggatatgggagtaagttacttcttactacacttggattaataatccatcagttagctcagtttaacaaggcaaaagaaactcgagtttcaaaaataataaaaaagtagtaaatgtaaaaaatgctaactggaatctgaatggtctaagcttttagaactgggaccttaggaatttaggagtaagttacttttatacattctattttttaaaaaaatgagcaagttgagaataaattcacaccaaaaccccaaggcctaggtcattggaaccaagacttgagggaatctagaagtaagcaatttaataaacaacttgaaacaaaagactaagtgtaaaattgaaactctaaggtctaaaccattggaattgggatatcatggcatgtggaagtaaattcacttaacaagaaattcatctaaacacatgcgatttatatggctctaaagtgggcaattcaaactcatggaaaatcactttctttcagattgtagtgaagtagttcgagctttggctcagaaggcttgtcccccgtattggggtttttttttgaatttatctttattggttttagacttagttaatcaagttttagattgtaagtttttatttgttaatcggcatctaaactctgttggagatggactagcaaaaacatttctagccaagtggctaatgtttttcaaggaaagggaattctccctataattcctatccatcttaatctaatgaactagtgttcttgcaagaaaaaaaagtacctttatttataatgctactatgcaattgttgtttggtaaccttataattactctaaattacattatatttgtataagtagctttagaaagtgtttataatgtaactagtatggtaaatgtgttttccatacaagataatttaatttgtaatgaccacgaagtctaaccttttgatttaatataactttggaaacgtgcccaaatagatgttgttgtttgatttgaaaaacgacatgtcacttgatcttgcagaaattgctgtccccagccgttcatgtatgggtcactcggctgaaatgggctattgggccattcatagccttacaaaaagcccaataatactcaataatacgcacaagggtattatagtaattaaaacacaacctctaaagagagctagggcttcatcagcaactcagataaaggggccaacttcctcatttttttggtctaaggcaaaaaaccctagcagagcatagcacacttcccttgttgcaggtcagtctttatctccgtttaatctcaaatctcttcaaaattctcgatctttacgatctaaagtcggatcttcgttaccattaacacttctaatctgttattctctttttttttggggctacagagatggccaagtcgaagaatcacaccgctcacaaccagtcctacaaggctcacaagaatggcatcaagaagccaaagaagcaacgccacacttccaccaagggggtgagcttaatttctatcttgttttctctaattttttctcttatcaaattgaaaactgcaatttttgtaaacctttttggggtttttttctttaggatggatcccaagtttttgaggtaaccagaggtatgcaaggaagcatacgaacagcgttaagaacgaatctggagccgaggatagatgaaatgccttctaaatttgctagttttgtagggttttttttcttatttgtcctaattaggtctttatagtatttcaagaatttatttttttgattccttttcattgtttttgttgttcttattagctacaatgtgatgttactctagtgggttttgatttactattcgaatttctgagtaatgaaaatactttcaagggttttttaatcttcctgtttgttcgtagctttactatttcattgatatggaatctttggattgatggtcttgtttagattgtggtcattattagtaataatagtattggattgtgaattctttcttgaatcattaggtgcctagttctaaaattttatcttctaatttaatagataaaatgttttgtggatccaatgctttctgaaatgagataccatgatagtagattttgggtgcttgagtttatattttgcaataaagttttttgctcatatcattataggaatgtgg

SEQ ID NO: 302983 - DNA, 2163 bp, Cannabis indica
acaacaagtaacaaaaatgtaaaatgattaagtgtagaactaaaagtgttactactatgttctgttcaacgaacttgactagcaatttcaacttattaccgttagtgtcgcttcagtgaatgggacttggatattaaatgaccgagatagagccttgtagccaccagaattgaagccaatcaaatttccaggacacgtcatactgttagccaagaggatgagatgctccttgagaacacccttgctcacctttgatactgatgtcgaaaggcgctgcaaatgaagcaatattgtgattatgacaggaaaccaacttatctacaatactggtccagagctacctatctttatttaacagtatacaaagacggtatttataaatcaaaagaacaacaaggaaaccaaagttacagacaacaataagtaaagagtttattcaaaccaccattttttaacacttttatgaaaccttttagtgagcatgaaaaaggcaatgctacaaccaagaattaatgaaattgtttagggaaatttgtttgcatggaataaacttcgtatttcacaggattgcaaacaaaggtcgattgaaagaaatttaccaaataactcaattgttaagatcagcgaggaccaaaaataataaaaagaaaaaaaaaaacgaatagtgtgggaaaggagaaccatgtaaaaaacacatacagaaaaagtgttggaaaagattccccaccaggtatacttctgattcagcatacttcaccgacaggaaaatctctgattacctgaattgcttgatcaaaagcacaagaaattcccagcaatttctggatttgtttaattccatatgggatggatcgcttggtatctatcaaatggagtacagggaggcaagagtcaaggactatcctccatgcatcaccactttgcttgactgctgacttctccaaaacaacatccagagccaattcacccctcctctcagaaatgtgcggatgtcttatccaagttgttgcctcaggactaatccaagttatatttgccgagcaaatccgggagtcacctgcacatttgatagattcctaatattcaaatgcttgttcataagatgcaaaataaatgaccatccaaatgtgacggtttataaaattctaggactcgaaacttgggacctcagaggttgcaggcagcaggaaatttaaaatagatgaaagtataaagacaatagaaaccttaaatgccttaaatatatagaattctcgttaatcataaagggagaataacatggcaaattgatatgggagaaatcataatgatttcaggtcagtagtttagtactcacatggcaatttcgaaggcatttggatgaatttaaaaataaaataatcaatgccaaatcagctaaatggaatatatttttctacattttacgttcttttctttttggagggatattaaaagagactttctattgttagatggagaaagaaaattatatgtcatatcatcttcaaatgctatattctagaactgagattaggttttatcttatattgtgtaattggaattttatgtggcaagagttaaatacttaaattcctagttgattaaagcataagttagtcaagttgcatgcaccactgagtatatgttatcaacaatccataccattggtaaaataaacaagaaaaacaaaattaaacaaataaaaagtaaaaaagcagactttaaaggagtatttaacttacctttgataaccgttcctaaaagaaatggacatacagaatcagcaagaatctgtgaagattcctccaaagtaagactcatatcttccttcaaggaaatcaataagcacgggacttcagatgtttcatctggagacttgtggaaagagcaacattcactgcaaggatgcaagcataaaatcagatcatataacttggcagttccaaccgataaagctagggttacataataatcatcttcttccatgtgtagatcttaaccaaaggagagcaacgaaaacacagtaacacaaggtctgtaaattactcatctatgttgcacccacctttcagtcgacagcgtactaattaagaaagtatcacttaacagagattgggaatgttttttgttaacaagttctacattgattttgggatattggtt

SEQ ID NO: 302984 - DNA, 2069 bp, Cannabis indica
tttctcgtcatcagcaaggctgataacaggagctgacatttttggcaagacaaaatgatgagataacccaactgaagttgctgttgaagaaaccaggctgttgacatctgaaacaattgctttcgggcttagctcttcagacctatctgttgacacagatggaagtacattcggtggcaatatttgactacagctagtgatttgatctaaactggcatcttctaagtcagtggagatcaatgacgaagcagctagatgtccggacaggccatcattatgagcaacagaatccaatccaggtatttcattctctagattccccaaatcattaatatcagatggaattgctaggcaacctttgcccaattcagaagaaacatcaggagcagataacccagtagaatacaatggagattcagcaccatcaacaacagcattatcggctaaacattcttcctcctcttcaggttgctgcaatcaccataaaacatagatatatgtgtcaaggtatctagaaagctaaaatgaatgaatgtaccttattttatttataatacaaatatttagaacacaggaaaaataaaaagatggacaaatgtgaaagaggttgagaagagattagaggatgagatcataccatcatatcatcggatactgcctgatgagtgtctagcagtgaagctattggtgggaaagtactggaaagtgaaagaacattagcaacaaatgatggtggatatttaacttgagaatcgctgccaattatactcatgttcagcagtggttcatcatccacttcgtttatagaatgacttggaggaagattgcgcatattgagcatcactacctcagccagcagatcagcagagatgcttgaaatgagtatctctaaagaacctactgctttttccccttgagcaaccaaggcaccaaacatggcgacaagttgatgcacaggaccagtatcactctctcctttagaagtggttggtccagttgacgaaatgtcatcctgaacaccattattattcttatcaaactctttagctgattcagccgaggcactaggtgttactcggattcgtttccctgatgaatcctcatccttagcacaattacctttaccctgtgctcctgaccttttctttccaagattgttgtgcacggagtcatatggtctaacaataggtttctcttcctgtaaatttctaagatgttatatgagggtacagaagcaagcgggtatgtataaaaataatacatatgcatgcattatgttccaggagtatgcaaaataagtaaaaaagaataaatatgagaaatcacctttgcaaggggagtatcttcttgctctgttcccagacccccattaatctcagaaacacggtgaaggacaggctctgctgatcctccaactttcatctccctcaaggcccttgctaaacgatcacgccactacacaatcaatgctatcattactaacaaatcattagatctggagaaaaaatgagtttggacaacaattggttgcttgtgaaaagatatatcaaagaagagtagagaaaataaataagaaacttatggacacaaaacaaaaaaccaaaaattaaaaaatttgaactatttgtaaaacctagtttttttcactgaaaaagaaaaaagttttgaatttcaaatggcccacaaaagtgaaagaacaattaatccataaattgcatgaaatgccaagtctaaaggcatccatatagttatgaaacatgatgaaaagccaaggcagtaaactagagaacataacttataaattcaagatggaataaaaagtaccggtgcagcacccgggtatgtacacttcaagcaggtgatgaatgcatttttcaaagcatgatgtaccccaaatatatgcactccattaacttttgagcttgtaggcttcaaaccaagtagaactggaaggatgcgtccatagaatgcaggcctcttcgttgcaattgttgaaagactgtaataatgataagttagacaaaaagataattttgcagtaaaataacaatacacaaaaaaaaaaaaaa

SEQ ID NO: 302985 - DNA, 5078 bp, Cannabis indica
taattaaaattaaaaaaaaaatggaaaaaactgaaattcgcgtacctatggcgtcggttgctacgctacatatggcgtcagttattagctaggaaccgacgccataggggtacatatggcgtcggttcatttaaaccctttagcgtcgccctgatcagcgtcggtagcgaatttcgcaaaaatcgacactgaaagtgcttaaaaaccgcctcacggtagactacttcacaaagtgtgggttgaggcagaatcttagactaccataacatttaaaaaagtacttgactttcttgtaaaaaatattgtatgttgatatgaaattccttaaaagacagtaactgataacggtacccaattcgacaacgactaattcacagagttttataaaaagaatggaattgtcaagagcttcgcttcagtagctcgcccacaagcaactggacaggttgaggcagtcaacaaaacgttacacaccacattaagaaattaagtgcctagaagctgccaaggaaagatggccaaaggagctccctcaagtgctctggtcatatatgaccttacaccgaaccgttacgggacacctccccttctcactcacatatgaaactgaaggcatgttcccaattagaattcaagtaacctcacagcgaaactagtactatgagcaacatcgtaaccacttgcacctagaagaaacattagatttacttgatgagagaagagaggagtctcagttacgcaatgcctcttaccaacaacgagtaaagaagtattatgactcacgtgtccgcaatagaaaatttataatgggtgattttgtgttgaaaagggtgttcttggcagcacgtgacccaacacctggggtccttggtcctaactggaaagaatgtatcaaattgaagcagtgattaggtctagagtgtacacgctttttcgcctcaatggagaacatgtggcacgttcctagaacaatgaacacttagtcaaaagtcctatgtgcatggcatgaatatatcaacatcccttttagtttgatagttagccaagtcatgtttgttactttcattattttattattatctcaaatatcctccatagacaattatgttctttgtgactattagtatttttttgttgtttttaaagtttgaataaaaatatttatttattaaaaaatagatgtatttttattgcaaaactcaaaaaacaggtaactaagaataataatcaaactttagttagttagggggcagaaaagggtatagatataactatactcattttgtaatgctacaattttctattaagaaaagaatgtttagaaaagtaggtgagtttttaattttttaaaatttactactaacacttaaactaaaagttataatgataaagaatggatttaattatactcacatgataagcacttaatctagacaatgagtttaaatccaaataaaaataactgagaacctattactcaagagagcttagagattaaactcttacaattatctatttaactgagtagtcaactagagcaaagagcacatgcactcatcataaatatctcatgggataagactcttgtggaagagtatctccaagccggtcctcatcagcaacatcttcaagttgaaccacgagaatagtgacttcagcatgatgtggtactagctccaccatctcttttaccactaatcaaatccccaccaaacgtccaccctagaatgatgaggtgggaatcgtgttggtaggaagtgaggcctcctgaagctgcctcactttgaacttggcaacttctttgtctctatactcttcaggtacgtgttcaagctttatacctggattcttcttccaaagcaagtggaattggtcataaaagacttgaccatatacttcatctcttttgttagtggacgcttgaagcttctccatgttagtgtgaaagtcattggtagttattatagattccttcatcttatcttagcagtcagtaagttatttttcgagataatatctctccttttcaaccttgaagatttccgtctcataatgttgcacgtcgaactcaaattttttctcctcagtggtctttgtagaaaattcttgagttgtcgttgtgattttttgcttaagatattctttttccaacttagttttttccacattagccttgaaggtggctagctcctctttcaaggtttgagaggcctgttgagagcggataattcgagtggcagactaaaagaaagaggatcacaaaacaaataaaagatgatgtcaggtaaaggatgtaaaagtaaggaagttatgggaatcacttaacacttgatgctcaacttactagactaatatcctgaaggtcaccggcaagatcatcccaaccagacatacacatctatcgagccacctctattgtgttgtgacgaaccaacttgtcaaagcggtggtgaatagatgatagaccatgaacaatgcgtgtgccaaagaatatcgtaggttttgcggtgtagggcctcatcatagagggagtgtgtctcctcttcatccaaggcggagtgttgtcctagtttggagtttgggaactttgaccttcatccttgacttgagaagtcagaattggggacaaagcctaagagagtggctactggttctcatcaaccaccgttgtgtaacactccaccaaatgaagaaacatatgacttcctacaaactaaagtgaaaataattttagtgtcacaaagtatgtgtaaaaaaaagagaaataaaataatgtgacacaggcagatggggaggtgaaagtgaacaagttattaaaaaaaccttcgtagtcattgtcatccatcaccatagtacccaagagttaatcttaattttgactacaacttccttaccccttcttctagtggggagaggaaaagttaggtcaacaagtaagtcagtagtaccactattcgaagaggatgagtcttctattccaatgagagccaaatggttgacattagctagctgagcaggaacattgggctcatcaatcatgttgttatcatccaaatcgtaatctggtacaatcctaccagcttaaaggcctccactgttacgatagtaggagtaaatcaatcctttgctagctagcatggcccttagagcttctgcatactccaacatatctatagtaggggcaggtctcgcatatttgccaattttattaaaggcacaatgagttgtaggcatgggtgtcgtgaagaagtaagatctctgacaggtgctcaccttggtgtgctcaaaaatcacagtgaggtgtggctcattctcatcacgtccatctcagctcctgaagtaagaataccttgagtagttttgctttgggaaaccatgtagtgtgagcaagtaatggacttcataaggggtaggcccctcccatttcatttggtgataaatgatgtataaggtagaaaatgctaaatatccatgagaagtaatgagggtaggtgagagcttgaagtaatttgtgatatcttgaaaatatttgtgcagcggaagggctgccccagccttgacatcatattaggtctagacacatattttagcaatcagtttactgacacattgaccctctctcgctccagtcacccttacgttcaatctaaaatggtgtagtgagtggtgtctcaccacgatagcccattttcacttgctcaaggggagcttccactcctcctcatgcttcaaagtttggatcttgtactatgttttctctaggatggaagaggggatttgttaaggctttccctttttatttttgggaggatcattaagagacgcgtgaggagccatttctcctggcttataaccaggaggtgcctttgtccttttttacttctttaaaggaccaccagaaggagtttgaggagccatttctcccaggttgatattagaagtggggttagctacatctattgtgataggagggtgagaggcggaggccttcactacctctggcacctgagtagaggatggaccagccatgtgtacgcctatagaggatctacaacaacattccacttcatggaaaaaatataaggaccaatgagggagagccttcttaaacttctttaatctatcacaaggagatgtaatctcttgagatccactatgatcacccgaaaactttccctggtgacatggacatcaatgtttgacacgtgataagaaatataatatcttagagtgcaatagttctgagtcatacagtcgacctgggaggggtccctagaactacacccaggttaacttctggaactccaaaatggaagtttggactttgataacacatttatagctcactatctttcattattctgtagcatgatgacatggagcaacaaaatccaagccctgagagctgaaattgcatgaacctacactctggaagtcaatatgggcacctagggtttcacccagcgcccaggttgacatcttcaatgagggtttcagtttttgggactgtcttagtgaaaatttgtcaaactttgcactggaaaatgaactgtacataccatgaacatattagatacatcagaatcagattttgagaaagttctttttcagcacctgggacacccagtgcctgggcacccagcgcccaagttgacaatttgttaatctaggtcacttccaagtactagatcaaaaatccaactcgtgcatcttctttatcttcatcaaaaatgggaaaacaagtgcttgtagagaagaaacatctcttcttgtgtgttagaatcaagacccaacgccgaggttgacattttttcaacctacccaaattccaaggatgttttctgagaactcttttgagcatattctccattttcatcaaagattaagattcaactatttttgcggaccaaacgaaaccttcaaaaggccaaaactgagatccaacgcccatgttgacatattgtcaacctgggccagttccaatcagttacttgaaaaagtcttctgataatattttctgtcattagaaataacaaaaataaaagatatctcggggagaaaactgttggaaattattt

SEQ ID NO: 302986 - DNA, 2727 bp, Cannabis indica
atctgatccacggccaatccgatctaaattggtgggtcagacgcaatttgatctatcgtaatcgggtttaacctaacccgaccagcccaacattttgtatttttatttatttgttcatttattaaattttattacaattacatgaattaggtttcaaaaaaaaaaaaataattaaaatttattcttctctctaccatctcatcttactcttagtcgtatttcacttatagtcactttacattaaaagtcgttgctatcaccatattttacttgtaattactactaaattcaaaattattgttatcaccgtattgaagaatgcacaaacattatcaaaatcaatagaaaaaaaaattaataaaatcgttttccaataaattattttacaataaataaaaatattaaaataattaaaatttttaacctgaatgagtattatactttccccatctaccaaataaaaagaaaaattagttaagaataaaaaaaaattactttaattttatattagaaaatattattttacaataaatataaatattagaataattaaaaagttactttattattttttatgtattttacttactttaatttttttttgttaattttaatactttataaaataattattgttaacccaaaaatttttactatagtgatgtggatatcaatatttgacacatggcatgaaggataacgtcacgaagttgagtagacccgagtcatagcagtcaacgtgggaggggaccctagccttgcgcccaggttgactccgtgatctctgggatggaagttcggacttcaataacttgaatctaactcattatctttcactattttgtaccatgaagacatggagcaacctactaccagatataggagctaaaattacacaaacctgcaacccgaaagctaacctgggcacctagggtttccaccaagtgcccaagttgacatcctcaacaagggtttcaattttcgagaccgccttagtgcaaagttgccaaaacttgcattggacatcgacttgacatgcataccatggatatatttgaggcaccgaaatcagatttggagcaacttgatttttaagcacctagggcctcgagcacccaacgcccaagttaacaatttgtcaatatgggtgccttccaagcatcagatcaaagatttgactttttcattgaatcagtcttcatcaaaaatgaggaaataggtccttctgaaggaaaaataataattcctaggtagaaaaataagggtctagctctaaggctgacacctggagctggccctgcgccaaggttgacaatttgtcaacctgggccacaaaaagggagttttcctagaattgtttagagtatcatctccatctttaaaaaaatattaagaattaactatttttgaggaccaaacggaacttccaaaggggcagaagaaggacccagcgcccaggttgacacctagagctggccctgcaccaaggctgacaatttgtcaacttgggccacaaaaagtggagtttttctatagaattatctgcattttcggcattggacacgtggactccaggtcagcattcaagacccattagtgggaccctcatcaaagataaaatgggctaagcccacctagatgtgcccttgcgagagttatcttggttccgtactcgcagagtcttccaccctccgtagatagaggtcggaagacaccttcggtatcatgaggccagaagggtaagatagtaccttcctagaagaccccttccgtttccctatttattcctacctataaataaggaagttctagctaaggggaaacttcccaatgctatgtagttatttcagaataatcatccaccattagcagacacggttttgactcgatcaaccaaattccaatcttcctagtcaacagatcgtattcttcatgggttgaacttcatgataaagcccagagacattgtataattgtaaactcttcagtatatggaaaagggaaaccctaatgtaattctccaactactataaatacccactaatctcatgaattaggtgttgaactctcttatgtactttgctccagtaagcttacgaagatacaccctatgtatctattaaagtgtttacaagaaaacaacttactaaataaaactgactcgtgaactaaggctagttaacgccctaaccacgtaaaaaaccagttgtgtctttttatactttctctttcagttattatttcttcagttcttattatttttattctgtttatgaaaatctcaggaaacattacccaatttaaaaccttagttgagaatcagttttacacaaaaatcaaaggtctaagaactgactagggaggaaaatattaagccttctataccattgtcaaagagggtggaataggctttgatcacccttgtccacacacctctacacaaaatgctggagtagaaagaaagcacagacacattgtagaaatagggttaatacttctagcacaagaatatttgcctctcaaatactcagttgatgcctttaaaacatttgttcatctcataaacagattgcccacagctgtgctagagggaaaaactccatgtgaatttttgtacttaaaaaaacttgattatacctttctcaaaacttttggtgcagcctgttatcctttcctaaggttgtaaagatcgcctagtcttaatttagaaattagtagataattagg

SEQ ID NO: 302987 - DNA, 897 bp, Cannabis indica
aataaatagtatatgggataattccatttatttatatcctaatttatatcatacgttcaaaaccttaggaattttcatgttccatttattaaaagtgcaaggttattccattatttataaaagtctaacatcattccttgtaccaatttccttttatattaatttattattttaagagataatcctcacttgttaattatgtaaaaatctagacgaagtattaaattgggataagttgagaaatactttttatgtatccattaataaaaaaatacccttatattatattttattaaaatgcacttacttttgtgagtaggttgcctaatataccattatcctctatttaagtctagcatataatttacattaacctaaagggtataatgaggacatcatctacaaaagtaggtatatcttaaataatatagaaatgaatgtaaaaattaagatagataaaaaaaaattagatttacaatgtaattttctttattaaattttgcaactatatctaggccttttagtaaaatccataaaatatttcaaaacaaggtacaagttcccaacttggaactttttgtggtatttttgtaaaatagggctttggaaccaaaatgaaattatttctccattaaattatgattttaagccttctaactttattcaaaattttcgtgggtttagatccattcttccgtacaagttaggcctgttctcttgatagggcttctaatcagcccttaattgactgttttttaaaagggaaatttcactatttagccctaataaaataccacaaattaaattttaaaccctttactaatttgtacaaaacaattctactattactcatttctacccaaaataccccacatttaattttccctctctctctct

SEQ ID NO: 302988 - DNA, 1555 bp, Cannabis indica
tttctcatcccaaaagtgtcaaatacatcagctccaccattaagaaaatgctcattttgctcaaaataagttgaaaatccttccactgtagcagcaacaaagtcttcaccattaatagctcgagcaaggtcatcatctcgagcaatattttttagcttcatggtcaccactaacagcccctgtctcacctcctaaaccaggtagaatttcctccaaaccagcttcatattgatcttccaaactagtaccaatctcctcatttgtaggccttattgattcatcactaacaacccctatttcaccttctaaacttggtagaatttcctccaaactagttgcagattgatcttccaaactagctacatattgagcttccaaaccagtaccaatatcttcaattctaaccactaagtcatcatccatagcaggcccatcttgtgtgaccttctcactcaaatcacgcccaccattatcaaatggaccatctaaaacatggccatcttgtgtgacaaccccattttccaaatcaagcccatcttgtgtgagattccctatttcattagtaggtgacgcaacttcctcaactaaataacattcaaccatatggaattttttaattgatgctctaatcttctccaataattcaccacctctacttacacactcaatcgtgatactatctgcctgagattttggaaaggatagctagcaacaactatcaatggtcaactaatagagctcatacaagttgaaaagtagcatgtgttcttgatgtagatgctttggccgctctaacggctcaaatggcctaaatgaccaacattttgaagaacatgaatatgggaggaaacatacaaccacctgctaccattcaaagtgcagagatgtcttgtgtttattgttaggataggcatacttttgagaattacccttcgaatccagcttcggtctactttgtgggaaattagaatttcaactgtaacaacaacccgtactcaaactatttcaatctagaatggaggcatcacccaaatctttcacgggggctcaaggagcaagttcaagtggagcatcgacagaaggaaaacaatcatttctactgagattttctcaataaccaagacctcaacaaactcaaagctctcaatcaagctatttggagagtttaatgagggattatatggccaagaatgatgttgtgattcagagccaggcagccacacttagaaatcttgatatacaattggggcatctagctaatgacttaaagaatatacccctagattctttgccaagtgataccgagaatctaggtaaggatcgtaaggaacaatgcaaggcaatcactctgcggagtggaaagattctggaaaaaaatgtggagaaaataaaaggtagcaaagagcccatttcaatccaagccgagggagaaactagtgaaaaactagaaaattttactgctagaaaaaccccaaatgctacagcatcagcccatcatcatgtagcagagcttatttacataaaacacctccaccattgttgggttttgtgccct

SEQ ID NO: 302989 - DNA, 4083 bp, Cannabis indica
tagacctctttatatagtgtttaggatatcaccatttgaaattcaaattgataagtcataacatacatggatgttatggactcaataaagagatgtaacgcatgcacaccataactcctatagagatataattcatgcacacaccataactcctataccactaagaattttaaattaagatgtgtaacatcttttacactcttagtgttggtgataatggtggaggttactcatagtagcaagtaactcccccaaatattacaaaaagatcacaattgttatgtgttacatattaatttgttacacatatttaatctacacaatatattattgataaataatataacaatcccctactagattaaatattatctctttagtaataaatttgtaacttttgtaacatttatttaatcaataaaaaatattacatcaaaatataacacatcaaaatataacagacaatattaaggttttagctaagtaccactaacttagattggctgcaaaagtcattgaaaaacctaggctaggctaattcaggcaaaaggatcaccctcgtatgattgtttcttgaacatatataataaagcaatacaattaaacacccaatgactaccacctaatctcaaagcaaacaaagtactcaagtgtctctttgtttcatttttgtgaataatttctcatcctaaaacatagtttcagtaattgggccattataacattcactaagaaagtccaaattgggtgattcaagtgacttcagaaaactaagactcagtgtttcaggttttgcaacataaattggtccagaaaatgaaataaatataaaaaaaattggatagaaaaacagaaggctttaattacacttatgttaagatatctttggagaacgatttagacaattcaaaagagggattaagggtcttatcttcaaagttttggttgagagattttaaaaaggaaactcattggagagcttggagattgaaaagacagaagaaaatgccattcactcatatctcatacaactacttattcttcacagatatttacaaccttgaactattaatccctgaaatcctaaatattaacgtatcaaataagttatatggtgattaatgataatataacacagaacattaaatggcaccgtaaacaaatatctaatacattctctacctacaaaagtacaaactacaaaatattttccataatatttaattctttcaaacccctcattatggctcaactttttctcattatatccgatgccagtttttattagcaatttagcattttccctttaatacaagcaaacatgattgataagtaaatgacaagagacaatgcaaatgaagatcttacttggaaaatctgttgtgctccacctgcaggttagtagtttatagcagaataataccaaaaccagcaaagaatcaacaaagaacaaaaggaatttttgaaagtcttactgaattgtcataagcaaccatattaaacccaaaaagaaagaaaaaaaaagaagtaaagaaaccatgtctgcttctcaaaatgtcttaattcccactacaaaacatctacccctgtttctggttcttattctggttccctttcttattacgcctagaatatgtgatcaaaggtttagcagaatcttggttcgttgaacaaattggaggtgaaggaagatgagcagagcctgaaacaacagcaaatccatcattagtatcagtacccttctcctcatttgccttgtgagactcagaggaacctgtggttgttaacattggaaccagagattccaatttgaaaacaatttctttttcagcttctagcacagacacttttttctccagttcatcaaatttgctccagtccccattttgcttcatgtgaacaatctcctcaattatttttctctcggtcttcttcacatcatccaacaattgctctaacctttcaacttttggagttttcgcctcagctccctcgtcaagtttttttgctctatcttccgccactctagttctctcggtagagtctcgaactttctcatcagcttccttaactctcaattcagcatccacaactttcaactcagcagctttagttcttaaattagcgtctagaattttctcctcagcagccttagctctcaaattacagtctagaactttctcctcagcagccttagctctcaaattacagtctagaattttctcctcagcaaccttcaatctgtttcgcatggtatcataattctctttgacaactcttgtctcagaattataaatcctcaatctcttaacctcatgatatagttgaatattttctgactctagctcctcgattctgttcttcagcttggcttctctatagatcagagtctcctcgacccagtcgaaatcagtggtcataaacgccgatctcaagcccgaaatgagcatcgaaatgctcagttcagctccttcgtcatcactgtcgttcagactgcaatcaggtgtaaactcgaccttcattatcaactgaactgaactgtcaccaaaaaagaaagaaaaagatgagagctgaaatggagtgaaactgtgaaagtaataagctggaaatcgaaagcagaaatgttatttctagattcacagataagatattattcttcactacacacagattatcaaaaaaaaaaatctctaaaataatataagattgagaatgcagctttagctcgatgacatgaattcgcactataatgaaaaagctttcaaaatcaaaagaaaattacctcaggcgaagaaagaagatgaaggaggagcagtgaagtcgtgaagagctgaagaaaaaggcaatgcagtggcagagagaaaatctgtacgttatgtacaaattttgctttaacagaatttgtacgtgctccaaattttgtgcaatgaaaatcaccttttcctttccaaccaataaaaactgccacctagttttctttctttctattttaggatattattattattattattactttagaaaaatactaatggtcccgagcgatttggcttgaattttcttctagtgacatgtttctttttttttttttttgtcttaaaaaacaaatttcttaactaatgaaacaattttggtgagtcatatagagattcaccttcgagaaatttagaaaccctttgcaaaagtgttcaagaccccatttggcaagtatacgagccgcctaattagaggttctaggcactcaaaaggaggatacagaaaaagacgaaagcaaagcaaaaaacttaaaatacataagagtcaaattccaatgggaatgagtagcagaagagatagagacatgaaaggttggcaatcagagtagagattagtagccatacatcccatctgttgcagcaccttcaatccccaaaaggtagccataagttcaccatgaacaatcgagagaaaggagatcttgatggcaaacaaagccaaaatgcttccacggtcattacgaaccaccacccctacagctcttgtgccttctttgttcacaaaatcaacattaacccggattcttcctggtctgggcagagtccaacgagtcaatagagatcgagcgccatcagttcttccctctctatttcttatcatagtgttccagtggcccttgaaattacaattaatttttttcttcctctctaagaaactccattgactattgttgtgataaatatcattcttgaaaaaccagaggttatgaaaaagtattgctgcaaacaataagaattcctcctgatatatcatggatacatcatccatagcagacatcaagttcagaaaccaattgacaacctcaacaccattgtggagagggacattctcaatgctaacattccacttacttatcaacgagaaacttaggtggcgtttggttggaggtaatgaaatggaatagaatggaaaggaaacaattttcattccattcctttgtttggttgcattttaaagtattggaatgccattccaatggaatgctctttccaccattttggtggaatggctattccattttaaaaagaaaggaatgaccattccaat

SEQ ID NO: 302990 - DNA, 3026 bp, Cannabis indica
ctttcttgatagaaaacttcatctccaaaatgagcaccttagacctctttatatagtgtttaggatatcaccatttgaaattcaaactcataacccctatagatgttatggactcaaatgtaactcttacacacaccataactcctatagcattaagaatttcaaataaaggtgtgtaacatcttttacactcttaatgttggtgataatggtggaggttactcatagtaacaactccccaaatgttacaaaaagatgacaactaatatagtcatatgttacatattattagtttattacacatatttaatctatatattatattattataaataatataacaatatatataacaacatgaattattttatttattactaattaattttgagatacaacccataattctcaactgttattgtttataatatgattagtatgaagagtcaagaagactctcagatagtgcaaggtagccggtaatgtcaatggcatatgatatataatgagttatgtatatatctattataatcaaactatacatgtagaggacatatttatgatcacataaattataacattacattaactacaattggtgggaaaagaccaactcgatatatttgtgttttctgccgtgatgttctagcacgaattatattgaatcggcatttactaaaatcatgaattatattaggtaccagtagtgcctagcacctctagatatgttgctttacgattgattagcgatactctctaaaaattattacattaaactatataaggcatgatacttaattaaactaatagtgataatgacacataggagagtgctaaacatattgataccttttagcagttctctgttcattatggtttattttgtagaggcatcaattctaattctcaatttataaactattctatatgatttttattttcgttttaaatattattttagatcataatgttagatctatttgtaattttttttaatccaatctttatacatttttaataatttttttttaagggattgctaaatttcattttataaaacaatttctgaaaatttaaattaagttaagttactacctgtcaccacgtgtgcctaatgttttacgtactcttatttaaataaatatttctttttaagatttatagaatgtgatctttctggtagttagtaaatatttttgctttttaacagtttaagtttttttccaacttttctcactataactgattcgccttcttttttccagactaattttcttctgtgattttgcctagcattgttgatttccttctcgtttttactctgatcatggattcattcatatatgtctgacatctcaaaagctcttactaatagagaaagggaagttgttatcatttcaatattgttttgcccccaccacgatctgtttcccactatgcaaaattcaaaaaggttataaccacaaacagttcaagaacttcatacttatacactaaaaagggagatttgttatcaatatatcagaatatgaatttaaatcatatatgattatagttggttgtgaaggtgatctatggagagttctatccaaagaaccatgacattttcgtaatctctcttatgcatagaagaagaagcatttcagtgaaaacatagctgagatgaacaccacacagcctggacatatttacaaccaaaaagtgcatgtcctatcaattttgaagctctgtgaccaatcgagcaagtgaaattagtacgaacaagagatgtggcaactagaaaggcatcatgtagaactcaccacgaaaatttcaaagaagaagaagaagaagaccgatcagtttcatctaatgaagtggcaaaatatcagcccagctgtacattattgatacttgaaatattgtgatgctaaatcggcttatcatggtttgggaaaaactcagaggaattcttaaaattcgatccacatcaagcctcgagaaatactcgtgaagtaggttagtatcccattggcgttctgtagttatgaggttagccacgactacatttgaagggcatgtgtaattggttgaaacgaaaacattatggccaggaatccatgggtcagagccacacttgatattcttaccctcgcccattttccaacgcaaaccagcaacaaggaggtctcttccaaaaataatcccttgccaagtcaaggaaggtgagtggccatgaggtgcttcaaggaaggagttattgggaaagtaacgactctttagtaatcgactaagaaggggtgaagggttatctagaaggcgctagcctttttttttatgaaagctcataccaccttcatatttggttttacataaaagcttccaattacgccaatgaattgtcaagcttgattcattagagcccccaccaaaaattagacatcatggacacttgcttacaaatagttgctggcaatcgaaaacaactcatagcataagtaggaatagattgaactacgactttaagaagaatctctttcccccagtcgagaagcttttatcattctaagtgtgcataagcctttaaattttctctttaacacatcactaagcatttgttgcttatccaaacctaaatacactgacaaaccaagatattttttgtggtattcacaaatggacatggatagttgtctatggaagaaaacttaggcaaccaatgtagtatttggtgaaaagacttaatcgatttgtcatgattcagtacttgtcccgaaacacggtggtagatatccaatacccgcttaatagcaaggcaaaaattctcattcacattactgaagagtaagctatcatctgcgaaaaacaagagattaaaagagctcatctactaagagaaaaaccttgaagttgtcctatatttctagatactcatacattttgtattggggaattttcataaatatgagaattaagggtatagtttacttttttatggcataaataaataacactatagggttatgagtttttttatttattttttt

SEQ ID NO: 302991 - DNA, 2007 bp, Cannabis indica
cacaataattgaaaaagcactgtagcgtgccttagcattagggcattacagatcacatatgaaaattaaaattccttcaccacatggcagatacgagcactttaactggtgtttattgggataaaatactggacaaaagagatggaaatgtactcaaaaaaggtcacgtacattaatccacattatttatgcttgctcaagatgaaggagaacaaccataatataacatgtcatcaaccatatagcaattatttccacaaaactcaatattgagttttgtaactcctctctaggccaaatctttctccaacatctcaacacctatttaaataatataaatgagtattgtaatagcttctaaaagctaaaaacttatctcgttcatatcataactttcatgtgtaataactcacttaattacgtataatcaaatgttaaccttaggctacaatacaatttttagattttgtaaccactatgttgaccttgcttttagcaaacaacgatgagtcaattaaatcaataagagtgaataataattaaattagattaagcaataagaacatagagatttatagaagtttggcctcgtgatagtggtaatagcctactctcattttagtagtattgcttgtgagaaaagaagcaattgactttcttgatctctctcgaaagcttacaaatattttaacaacatcagagctctcttgaaaaccataatttggatgcttgaaaaattgaatggctccaatatttataggaaaaaaattacatcaatttggtttcccaaaacaaataattattaaaaaggaagactaggaaggtttcctattttaaaacaataatgcgtggaaatcccactgaatttggattcgattgaaaaaagaaaatatctctaaatatatttcagccacatttaccttggccagtgtatgcgggctttctacgagattgacgctagtttgacattgtcatttaccttgtctggatgttctagcttaatcttcagataagttgtgtctagatcttttaatagtctgaaaaacataacgaggaccataatacttgcccaggtcttaaacgttctacatgtttcaccaagatgaatgccctgtcaccctgtgcaaaaattgggatacaatttccccccaagtccgcatgggaactttctgttcgtacgtggaattgataggcccacgtgttaagtgaatggctgacacatgctggactgtgaagcatgtgaacaaaactgctccttggtatatttgagcatttaatgctttacctcaaaaaaacacatcctggaccgcatggttacaattatactcccctcagtgtactgattctaccttttggggggaaaacaataaaatttaatatgtggaattaccaaaatacctctttagtaacctataagaagggtttttgaattcatttctattcttctagtcattttgaaactcaaaaacttcagaacaaaaatccatttctctcaaatcatcagattaattcgaagcttcaagggattctaagatcatttttagatttctacttgagttaccttctcagcaatcttcaatagtaagtccctaaactctttatgtatttttcttttaatttctttttgtgaacattttgggtttatgaaatgagttgttctttctttttagagatcaagagttataatttgattctcggaccataatctatgatttcttgcaaattgcactattttttactgataaatactcaaaaattctgtgctcgacatttttgtagaattctgggttcatctcgtgctcttgaacatcttcaaactaggaatctcatcatttggatgaagtttcgttccttcaatctttaaatctaacttgtcgaagcaccagagttgtttccttttcgtgacccttgtcggttcttactattgggttttgttccctaaaaaaaactcatttcaatataatcagatctagttattaataaagatcagaaataacattttatgtt

SEQ ID NO: 302992 - DNA, 1196 bp, Cannabis indica
tgattaaaaaagtaatatttttcaacttacctctacctatacctacctatgtccagaaccaaccccgcatcttactatacattcacctattctttcttcctcaactatgaacttcagcattctaacaattatttaactttaatttcaaacatattatattatgagatataatgtaccatagaaaacaggttagtcaaaaacgttataaagtatcactattaaaatagataaatcatatgtgtaaattagatagaaataacggtgaaaggtgtaaatttcccataacattaaggccaatattagataataaaaaattacataaacgaaaaaaaaaggaaaatataaaatggtcaattaagaaaatccaatacaagtaaatgaccgagcacaatgaatccctttaaaagtcatcattcattagatcatgtaaatacgtatatgttttggttggttgaaccaggtcacatttatatatatatatataatgtatatattcaaattaaaagagtgggtacgttttgacggtgactaattataatgatacatgctaaatacatatgtcccacctaaccacatatttcttttccaccacttcaaaacttttataattctcttctctctcttcccattttcattttttcttccctctttcgattcaacactcacattatatatttttatatatacactcttctctatactgctttcttaatcacctctccaacttaccttgtcttaacctatagctatattttctaccaatttaaggatctattaattaaaaaaagcaataggtttgattcgatgattatgcatgagtactactactggaataatatgtctatgagatcatgctgggccgaaccaatagtattatttgatgatcaagttatttagcctgagatcagcgatggtgttgatagttctaactctcttcttactgttactgccgctggttctgcccaccgctgccaccgccaccgctacttcttcttttggttccagtgctgatcatggcggttctcatcttgttggccttctctcctttgtctcataatactactactactactattgagacaactatatagctacatatttaattgtctttgctgcattgctgggtttctctctcccttccaatattccacgcccatgtaaaaatttcggctcctttctcaggccactggtactgc

SEQ ID NO: 302993 - DNA, 1549 bp, Cannabis indica
ttaaggcataaaacccaaacactaaagaacaatgcaaaaacacttaaaaaaatcaagggcaccataccttgactattaaggtgacgttacattccttcgcgggcaattttaacataaccctgttctagaaatacaactctacggacattagtttaccattcatatatattagatatcctagacttaccttgaactaagcatttctatcctagatatgaaatggcaagattcaacaagcatcaggatacttacatgatatatgagtggaagacgaggggttattgtggaaatctgcctaagagttgtgcacccagtcaatcaatcggtcgaagccgacttgcacgtcgaaatcctgtttcgactaggggtggaatgattcaaggtgcaatggctatacactctgaaagtgggttgaacgaagttctaagaatagattaagtagtccaaaaattcttacattcaccgaccaaaacgagcacaagatcaaaactttttttttttttgggaaatagggctctggtttgaaatttgaaagcaaggattttttaaaaaagtctaaaatggtaaagaagaggaagtggtgtatgatggatctatttatagtctgatcaagttcgtgcaattcaaaataaatagtctggattctccctccaaaaagcacaatttgatctaacggatagggagtttaaaagatggcatttaaaatctgctcaatgcttaaatttttcatcattaactgtcttgagcccaatatgcattaaaggatggtcatgtcaatcgaccttccatgcatcaatacaacttcccctggaaaacgtgcctccaacacacgcatgttgacaatgggttcactaaagacatgtcatgtgtgccacaccagtggcatcttaattcttgatctttcaaccgacgacaattcaataaaaagaacacatccatgttcccaaaaattatccacgtgtcataaatatgcctcagagatctagaggaggattgcaagctcccacaacttgcaaagtttcggaatcttggagggtaaatgttatcatcactcttggacagcaaaacatgtggcataaaaagagaagtaaggctccgaaaaatcattaaataagtatcctctgtgacatcaaatcacaaagaggctccacgaagccaggaatagatcaaggccagaggatacacgaaaaattatgccatccgagacatgaaaggcttacccttgctccgggacccggagtgcccaggattaaagttttcccaaaaatgatacttagaggttactgaagggcttatcacggacgccgacagcctaaaagagattcaaacgtctaccttaaggatatacccaaattgcctagtgataactcttgaataaagagttatttgttatatttttttagcttaatttgtgtgtattttacttgtatttagttcttttccttccattttgtgagaaaatatattattttgcatttttatgttcttttgggtaatttggagttgttagtggaaattattaagttttatttgagttttggtaaagaaa

SEQ ID NO: 302994 - DNA, 3017 bp, Cannabis indica
accaagaaatgccgttagatagacacttttaatatataaagatatatgtaaatagagtaaaaagtaagtcatcacttttattggttcaaaatttattaaaaagagtgtctcaaaagtcttatataagcaagaagtaatttagtcaaattaaataacattatttgaaattcatgtggcctaaacgtgaattctaaatttgattttttttttatatacataaataaataaataaaaaattattagtcaatttcttcaattataatggaaatcttttaattttgctttctttaaataaatattcaagtttaatgtttattagcatttgaaccccactaatttgttgttttgttccctagatgcttaggagttagaattcgtgttggcggaccatgttcatatcctatcgagactcatgtattttaagcaaataataatgcaaacttagctcattttgtgtagtcgcataaaaatcgaacccatataatatgtttacaaaagaatttgtgttcaattaatgggtcaacatatttattttagtacggatgtacttgtttacgacacgtctactatacatttaagcactaaaatgctttaagtacttaatattcgtgtttttggatagctcataagtaggcgacgatgaatgcccaatacgaaaacaagacccattcattgggtccatatggatcaattgcatgcacaacctgtccatcaagaatgggcgaagtcagacttgacatctagcccaatcaagactaacgtctctcaacaacggattcgagagagcccaaacctagatcaaccaacaaataatcaaatagcgaacaagtgtagatcaaagacggatgcccttaagaggcgcatccaggaacataatacgaaaaggcatccgagaatacttaaggtcacggaagccgactcatgtggcataattctaacacgatcctgagacatcaaacaacttgtctcatgtgttagaccacatattgggtcacaataaaaaaaaaagcacatttttggctaacgcctagtactactctgacattctctttcttaatactgaccacacatgcacacctgtcgctgtcaatagtataattgtataaagatgacggttacctacaacttgggcctcacctacccagcccaatagccaatattatattatatttactccatccgtgggtttttaacactaaatagaaccttaatgggtctaggtccgcccaacctattagccatttagcctataaatatggcttcgcccctgcatataaagagttaaaaaaattgtatgagaaaaaagtagtaaatacttcatagtcaaagatttaataatattaactcgtgcactaagatgtgttaatgctttaatcacgtaaaaatcatatcttatttattttttaatcttattttcttcagcttaatttttttttgttaattcaatttctaaaaaacagtctcaaataccaaataataatgctctcaaaataatgttgctaaaagaaaaagtaattaaaaggtgtgtaacttttctatggactaattggaatgaagtaggtaaaacgtaaaggaagggtacatttctagggtttggggccatggagaagaaggccaaaccaaaaacactgtgattgaaaataagctttgccccacaatatcaaattccatggaccaaaatttcgaaagcctcgaatcatggttgtggtgggtcttaattataaaagaattaagcaaaataaataaaaaaattggataaatttgaaaatttgctaaagtgtgaattaacgtgtcaaatattggttggttgcgggcccagcccaacagttatttacatggttaacccaatcaaatgcggcccattgagatattaataataattaataaatattagcaatttattattaaaaaattggaagatgatatttacatgaggtgaaaaagagtagctgatagtgactttttcgtccaatgacaaaagaattaaataatattattgagatgaataggtttgaaatttaatattcatcacctagacttggcccatgggatttgtttttgttttttcttcttatgtaatcatacaacaacaaaagcattattctttcccataggatattaattagttgatattacttataataagagttgttggcatgattcttctatgaagtttttgtgcattagcaactagttctttaatattattattttgtaacaagaatttactttaattacatattaatttaaattataatattatcatggtttttataatagttttgagagaatgtatgataccaattgaaagtccaatcaaggccgatcctagattaagcgggttagcccgtacttagggccccctcctatgaagacctaaatggaaaaaaaaattaataaatattcttatttttttaataatttttaaaaatattatttatatttaaaatgactcaagaaaattatttttttagggtccaaattaattctaggacgagtctcagtgcattacgtaattcttacacatttctttatgaacacttaatcaacaattagcaaaagtaaaatcacaaacaaaaagaaaatatattataaaatttacctgccctagaaacaaattctagatgggtagtccattgggtcccaatgaagtaaaataagataacaccactatatgaattcaatgttattttctaaaattaaatcaacatatatccatagtgtgaagcaccaacatatattcctttaatattattattaataatatatgagtataatatatattatgttttttatatataaaaataataatttatacttgcaatatatagttacataatttattttgactacttttgaatataattaacttaaaacttattatgcattaaaaaataaaaaaatattataaatttaacattatattacaataatattgcatagtaattttgcaaaccttgattattattgggtaatattatagtacaactaaaagtgactctttcggtacactttct

SEQ ID NO: 302995 - DNA, 2584 bp, Cannabis indica
ttagcaggggatccccatattacggcagtatttaaaaatgaaagtcttatgttgaatttaattaaaggttttaattaaaccacacttttccaaaaattatagattagtaataataagtttataaaagcacacacgtggcgtcccttatagtcagggcgttacatgttctttctaagcgagcttaattcatcatccacaaatcgagaccactccttgttctttccatttcaagcctcttctatactcaatagttatagtatgtcacactactgggtctattgataaaacataagcaatcagataagcctctacaaaccttgctagaatataaatttttcttctggttctatctcacaagttgatagtcagacaaatatggttgttcctcattctcatttggagttgtgcctgtgctgtcattcttctcacttggttcaaatcctttgagcttgatttcaaactctgttagatatttcctcttgccagatgaatctgcatcaggtaacacactgcccttctcggctttcaagtgagggaaattattttcattaaacacaacatttctagaaattatcaccttagttttcccattctggtttatgcagattctataaccttttgtgcctataggataacttagaaaagtgcatttgacagatctagcctcaagcttatcattggattgatgtgcatatgttgcacatccaaacactctcaagtgtttcaagtttggtatcttcctataccacttctcaaaggtgtcttcaagtctatgactctattaaggctcctattatcaaggtaataggcagtagctaatgcctctccccaataaggctatctcaagcccaaactaagaagtaaatgcctcactttgttcaaaaggtttctattcagatactcagcaactccattatgttgtggagatttcacaactgtcctatgcctatttatcccatgctcattacataatctatcaaactcagtgttgatgaattctagaccattattggatttaagtgtcttaacctttaaatttgttttgttttccatctaaacttttcatatcttaaatttttctacatactcatctttggtcttaagtaaataagtccaaacacatctactaaagtcatcaacaatagataggaagtattatttacctaaaagtgttgggattctacttggcccccaaatatcaacatgcacatactctaggactacctttgtgttgtgagttgctgatgtgaactttatcttgtgtttcttactattaaccccaaaagttagcgttgttaactctcaagattggttgactaataatcacgagattattaagaatgtgcttagggaattgctccaaaggcatagtagtgcatggtcattcgacatgcgcatactcaaagtcgctcgaccatggcctgagagatgtcactcggtcatggcttgagagatgtcgcttggccatgccttaaaagatgtcgcttatccttagcttgaagatgtcactcggccatgacttgaggaatgtagtcagccatggcttgagagatgtcactcagccatgccttgaaggatgtcaattgaccttagcttaaagatgtcacttgaccatggcttgaggaatgtcactcagccatgacttgagagatgtcactcaaccatgccttgaaggatgctacttggccttagcttgaagatgtcacttggcctaagcttgaacggtttgtccatggcttgaggaatgtcactcggccatgccttgaagaatgtcactcggccttagcttgaagatgtcacttagccatggcttgaggaatgtcactcgaccatgtcttgaaggatgtcactcgaccttagcttgaaagatgtcactctaacatagcttgagaaaaagccactcaacatgatacttccacgatgacataacaatacatagaaaatttttcctaagtaagggaaatgaaggtaacaagggtatgatcacaaggacaaagcgtgcatccaggaaatgtacaaccacatcctctacaagctttaagggagaaaaggtacacatagtggatgcaccacacctccaagtgttgacttcctacctaagagtgcaaaaatccattacccgtgaaacttggttctgcctgacactagaaaaaggtaccaggggtgaggcttccacctgtaacgtccagctcatggatgtcttgttgttccttgggaccacaattgtatcccaagccattagagcctataaatgttgggttttgtgccctaaataaaacccatttcaatataattagatttactaattaataaagatcagaaatcatttttatgttgcatggttcacatgatttatttcatgattataaattctattaggtccagaacatatgtatttgttcatgattatagtgttgtcagcacagtggaatatagtcatgattatatgttcaaaagtttaaattccctgatttgtcagttctctgggtttagactggcatgataatcaacgataggtatacttacacattggataagtgttatgtattttccagggcattggcaaaatttaccagtatcggat

SEQ ID NO: 302996 - DNA, 1417 bp, Cannabis indica
atagtattatataaaaaaatattagtaatcaaatttaatataatacaatacaatacgacctaaatacggcgttacaaaccaacccttaaactattttaaatgcatgactccaaagtaacgctaattagaaacgcaggatcacaacaaaggactttgaaagaatgagcaattcgtttaataattagtattagtatatattgaacgaagtaagttcaccagccaacattaaaaaaaaagtgaaaaagaaaaagagagacagatatgagaagcttttattatgcatcaacatttaaaagcattaaaatcacctagtctatgttgtaaattttctacccctaataaatattattgatgctactcatttaaatgagctaatactataaatcaatagatgaatgagctagaaaaataagttctctgtgagcttttactaaagacaaagagaatagttaaggaatttcaccaaactcataaattgcacataaataaattaaaatatacacgcatagtacaaatcataaatcatcctaactttttcaattcaccacttaaaaccataaaatagtaataaaaacacaattaattaaatctcatacaccataagaacaggtttatgtgatggccacattaccatttatacgtcattaattaaaagaatgagaatcacaactagcttccttcctgtgttctttaaattccaaatgtagttagcttgtataattatttcaatgtaattaggatgaacaaaaagcatgagaataaatatgacataatccaatcttaattagcacaattgtataattatttgttatctttgttgtgatcggtacttataatcaggggtgggtggctcaacagaaaaaataaattagaaaattttgataaaaaaatattttaaaaaaaagaaactttttttttttttcttgaacttagttaataaatttactgaaaaatgtttagtgaggagcatagttttacaatagtaatttaatatttatctatagcttttgtctcttctcaatcacgattagattagggggttcaaaaagtttctcttcttcttccttctgacccgaaaacaaagctagggttctatgggtttttcttctcttctcttcttctcacttgctgccgaaatctaggattcttataacaacaaaaaattgataagttaatgattggatttcgagaagtattaaacacaaataaaggttttaaggtttgtcgtttgggtattattaataaaatagtgagattattcctattgtgattaaatgacctaaagtataaattgtaagttatgatgtcttgtcttttgacatgcaaagttcgtattggttttgagtgatttgctagctcctgttttcaggtttcagtgctctgtttttttcttcttttggttctttggtagtggtac

SEQ ID NO: 302997 - DNA, 1801 bp, Cannabis indica
atatccgatccgatccaattggtttttaaaatttgcatccgattcgatccaattatgattggatatccgattctattggatcggtcggttggaattggattggatgactttctgcacacccctattgtatataatgaaacccatttttttacataggatataaaccaacaaatggggactaattggatcacaatttttgcttcctttttttctttctttaatttgcttttcattaaatagttactatctcttacttttggtgctgatgagataaagttaaatgaaaaagaaagggaggtgcatgcaaagccaagagtacaaaataagtttttagcatacgaaacatgccaaccaaaacatctttctttcatcatatattatatatataatatatatataggaaaagacaaagaaatatatataaatatatatatatatatacacgacagtgtaaagagcaattgcattgcatgtgaatcgtgattattattattgttggttttcgaatcacaccttgtttggttctgattctctgaaaatgaaattcaccacttatttacactaatataatttaacaacgaattttggctattaggggtgtccgatctaatctaattataacccactactaaatattgaatatttaattgtgatcgcatcgaattagatgttatttttaaatatccaattaaatcggattggatgtcggatcgaattagtgggaacttgtaaatgatgtaaaactttattcatgacaactttattagggtggctaagccttttgtgccacaaatttacaagattttgactcatagtacaatgttttgttagatcctgatttacaaactctacaacattagcaacaacactcttatgagcggaggagtgaggcacttggacagggaattgggagggatgaagctggagacgtacctctgatttagagggaactccgaaataaattgttgtggtgtctatagttttttctcttcgctggttttttatttttgctttcttgtcttgtgttattctttggtttttttgcaggttttaaagcttggaaagaaaggttcgactggaaaattttgcagcaaggagaagaagagaagtttggctgctactgcagcaaggagaaacagagaagaagaaatcgcagcagttgttttctgccattgaagagctgctgctggatcaagaaagaaagggagaagaaggagacattcggctgaagattttcttggagaagaatagggagtggctgctagggtttcaaaggaagaagaagataagaagaagagaggctgaaggggtttgttcggctgctaggtttagaggaaaagaaattgatttgggtgccagggtttcagccagtaaaagggtttttatactacctttaaaggctagggttttgagggaatctctcttgatccgcacaagagagggaaggtcaattttgaccttggtttttgaatttgtggtgttggtgtaggggcattattggaatgcttaatttcctacagtggtatcagagctcggggaagcaagaagattcaacaacacttggaaacaaagtcaagaaacaagaaagatcatcaaaacattgaagaagccaaatctaaaattatcaagaaattgataaacagaaaaactctaacctaaactttatcttattacattcttgcttttattatcttgttcaaataactaaacatgagtaatattagagtggatgttgacaagttttatggatcgggggattataggatttggaggaagaagattagagctcttcttgctcata

SEQ ID NO: 302998 - DNA, 2249 bp, Cannabis indica
gaagccatagatttcagagcaaaaaagacatcttccttagtgaaatcacgaagaagaaattcattatgggcatcagtgattgtagtaggaatggtagataatacatgagaaagagcccaatgatcctcctcttgagcagtgaaaagatcttcaaaatattgagaaacaatatgaacaataccctccttatcagtaacgagatggccattggaatccttcagagatttgattttattggtagagttccgagcacttgctttggcatggaaaaatttggtgttgcgattacccgattgcagccaatcaatacgagaccgctgctgccagtaatgttcttctttagctaaaaggtcatcaagaatggattcggccgtattgatatcatgtggatgagacacagtagtggcaggggaagagttaagttgattcacatatgattgagcttgtgatatatcagcctttaatctcccaaacttgcgggaatgccaaccttgtaaatgatctgcaatattttgcagattagagtgaagattggaagcaaaatccccatgttgctgtaaaatccagttatccgaaataatctcagcacactcagggtctgatagccacattttttcgaatttgaaacgtgatttttgaggtttaattgagtcggctgatgcagaaaaaaatgatattaaccaatagtgcacggtggtcagatccaaagtagtcaagatgagtaatcttggggagcaaaagactatcaaaccatttattgtttagaagacaccaatccaaccattccttcaaagctgagggattttttctgttcttagcccaggtaaaatcatccccctcaaaaggaaaatcttttaaaaaacatctatccaaagtagttctaaaagctgccatttgattgtcatgtcttaaaggacctccatttttatgagtatgagaaaaaatctcattaagatccccaataagtaaccacgggtccaagggggagacatcagcaagcctattaattagttcccaagtatattttttattagaagattcagggaaaccataaactgcagaaaagtgccatcttgggccatcttcataagacacaaagcaatcaaaatagtttgtattcattgaaagcaaagatacattgacattttccttccataacaacataataccccccttaaaaccaacacgagccacttccaaaccattacaaaaatttaaagcttgtttaaattgaacaagagaaccagcagtggctttagtttccatgagaaacaaaagctgaggattgtacttacgaactaacagtcgcaagcgacggaatgcacttgggttacccaaaccccgtgcattccaacttataagattcatggctgtgcgcggggttgtttgtcaacaactcccgctggaaaagaaggctgcaactcagtagcatctggtgcttgagaagaaaacaactgtgttggaacgccttcagaggaactttcagattgaacattatttctgcatcgtttgagaacacttcttaaattttcaggttcaacatgtcgcttaaatactctttgaggagaccccggaatagagaaatcatcttcaatcaagatggctttacccttagccttagtggatagtgacatggcatctgtagtggaggggctgatcgagagaggagagtgtcgtgggatagtatttatagaaggtggaggtggaggatatgtggcaatgggtgttgagtggattaaggacatgttgacagatgtaggtgaagtcatagtataaggcatatcataaaaggtgtcaacaatggggccattcgcattaaaaggcaaagaggtgtggaagtaagaaggaaaaggggaaggaagttcaggtggtgtgctagtaaggtgtttttcagtaatggattgagaagaggattcaacattagttagcagggtgggataaggagcagagccaagggaaaggtgtttctgggataaatgtttaggataaagagagttgatagattttcgggttaaacgggtgagaaaagggtaagcattggctttggaaaagtcggttctatacctttcataaccagatttgggaagtttatcacccaacaactcaggaccataaggcaaatctggttcaatagcctcacccaccatctcaaggaaccccacacatctttcaaaaggatggcccaacctaccacaatggaaacagaaagttggcaagttttcatagcgaaattccaaccaatgttcatc

SEQ ID NO: 302999 - DNA, 1115 bp, Cannabis indica
attatagagtgtcacctataaaaaatgttcaacattattagcgtccaataacaatattttttattaaaatttactttttaaaaaatgactacataattttgaattttatgatgataggtcaaagttgtagaaggtaggtgagtagtgcaagccaagaacaagtgaaaacgacatcgttatggttggccaagaaagaaaatatattatatatataggagaagaagtagagactcttttccaaccccactaaattgaatagttgcatattgaagacggcaagtatctttgattactactacaactacaactacaactacaattacaaaataaagaatatacataacaaattttgtagttttcaaatttgacataatatttagtatttttgaaatgtaacacactatttttgttaaaatatgctaattgaaaaatagttttaaaaagtgagacactaatggagatacttttggactacccaaattaacattttcctaaataagtagcaaataatatttattaagtaggaaaattctatttaaaaagtagaaatattatgactcttacaaactcaactaattaaatactattactgtatgagtggatctcgttgtgaaacacatgttcttgaataattatgagtagagccgaaaagtgtgacactacaagaaacttaggtattagtagcgactatattacatgcgacctttttgtcactctaatagtatttttaggagcaaattattagagacgactttttaagggcgacttgttgcctctaatagtcattaagagcgatttttttatagttttagaggcgatttttgtcgctcctaatacatatatttgttgtagtgtgaactttacaaattaacaataacattgattaaatgagggaagaagcgaataagaatatataacaaaatttgtaattttcaaatttgacatattgtttaatatttttgaaatttaacacacttatttgttaaaatatgctaattgaaagatagtttataaaagtgatatattaataaatggtgatacttttggactacccaaactacattttctcaaataacaccaaaaccaacataagatttttcctttttttttttttt

SEQ ID NO: 303000 - DNA, 3220 bp, Cannabis indica
aaactaaacatttccttatacatgcaattttttttgtcttcctttgaatttgttatttattattttatttattttaatttgttattggagataaaataataatttattttattttgttgctaattatgtaaaaaaaaattcataaatattaaataatttaatattaaaaagtaataaatctaaaataatcgatataatctgtatttttttagattggattggattggaataaatttaaattattgtgcgaattgaattgaatttgagcttagattggattggattggaataaagttaaattatcgtgcgaattgaattgaatttgagctattgtgcgaattggattgaaaccaaaaataaaatctataggtactgttgatcgaatgcaaaaatagtacaaatttagttagatgaacacacatatattacttttattatatttttaaggaaaagtcaccatgcattattacattcaaaatcgtgctaaaaggtgggacatgtcatgcaaggacattaaaataatttattttattttagaattggtcatattttttctcactgagtatggcactattgcgaatagatgttaccattaaactaaggaaaaaaattgattctttaacattactccattgttgttgtacttaagtaaccttacaattataatcattggaagttataaaaaataataataataataataataataattagtcactaaagtggtagcagagctaagagtctaagaggaatggagattaaaatataaaaagtctttatattttgctgaagttattatatgcattgtatttatatgtaacgttcacttcaaggaattataatttatgaagatactctctcacatgctttttgtctcaaatgagtaggagtattagagtttggtatagatttttaattttttcaaatcaaaccagtattacggttttttaaaattcaaaattaaactaaatcagagccagtttggcacagctgtgttgtagagaaaagcatcagtaggaaaaaacaactgtatcagaactgtaaaaaaaaaactgagctgagtatttggtaaattataaattttaaagtgttgtgaattgttaagattctattataataataataataataatattttaatttatttcattaaaatcacaaatatatttacagaaaatatgttatataaaatttttatttttttatatatttttaagtattttttttctttagtataaatttatatgtatttgataaaaataatttttaacattattaaattatattttttatcaattctaaaaaaaaaaaatcgtagcttataaaaagcttaggttgatattgtttgttaataataaaaataaaaaataaatattttttaaaaccaaataaaaaaatttaaatttaaaaatttaaatattatttattttaaatatttttattttttgtaatatataataaataattaaataaatttttagtaaaaaataatttattatagtcttttaatcaaaacagctttttctaaaagttgggttgtaccagctttagcttttagctgtagcttttacataaattctttaataagctattttttaactgcttaccaaacacttttttgtcacagcttttagcttttccaaaagttgtgccaaactggccttcaaactaattcacttaagaacagattagtttagttcaaaatcatggtttgtattttgtaattgttctatatttattatatagtaactattcattttttagtaatttttttatttttaataagtttataatacataaataaaataatataaaaaatattctcagaataatattaagtcaatatcaatattctaccaaaaattgctcccaaatatcaacattccattaaaaaaaaatatattaagtatatataaaataattacacagattgatttgatttgaaacgctactgataattctaaaatcgtgattgaatcagagaattgtaaacggtccagattgaccaaaccattcacaacggattcatttggttcggtctctaatagtttggtccagattggttggagtttagaatcacagattacaaattatatgaacactcctacaaatgagcaatttaatgttctaacataatggccattaaatcactatatatactgaaattttgttttatgattaccaagtgaaattaacaaataatttaattaatgaaatccttgtaaaattgtttgaactaaatcaaagtatattctattagaaactgaacctaatagataagaataatattgtagaaattaaaatgacacacgctattttatatgcgttatcaataatctttacagattgcatctaatccacaggccacgcctagaaataagattcattagtcaaatttcaacaagtacaaagtaattgacttaaacaaaacttagaccccctctaataattttatcgcaagcttgatgtactcctatttgttgagtgaatctccttaagacaccaaggtttgaactctcttcaaattacttgatgagtgcttgcttcctcctgatgcaaaacctgtagaaattttttttcgaaggtaacagtgcttgcttcctcccgatgcaagacttatagaaatcttctcctgaagatagcagtgcttgcttcctctcgatgcaagacttagatgaactttttcctgaaggttgttctacactttggaaattacttcacataaaagtaatcacatagacacacactcacataggaatagcagaacaactatcctttacaaacaaaaaatactctactcttctaaaaatataagaaattaagaagtgaaagagtttaaccttctgctataggtcaggtaatatttatagggataaatgacactcaaaactgagctcaaaaggtcttaaaagagaattcattaattagtttccttacaaaaactcatatatgatgaaattttgtttgaacagatataaaaagtagggtagacatttgtacccaaaaaacccacccacttgggaaacccagtcgacccaaacccagaaaaccacaagaaaaatgggttttaaaaaataatgggcaagttcaggtgaaacctgggcactattcaggctggattcaggtttggaaaataatagatttttagaactgccgtacttgcctaaaacccattaataacccataataaatatatatatttatatatatgttttttttt

SEQ ID NO: 303001 - DNA, 4291 bp, Cannabis indica
ctaaaaaaataggtaaaaattaacttaaaaaaactttttgagggtaaatttagtgaattaacccctaaaaataaagtaattatcaacttatattcatggtacaatatggtggagtggagataaaataagatgtgtcaaaaaggtaatatgtatatttttttttgacttaatgattaaaattactcatgaatttacggtgcagatatctacaaaaagcgtaagaacttctttgaacttggataactcatcgtttaactgaaagacatgctttgtcaaaccgtaaacagctaaagtcagcgagcaacatgggacaaaactgttctaaaaaatttatacaataaagctataacgttcccaaacaacacacttaaagaactagagctttaatttcgtacatttatcctttcttccaaaaaaaaaaaaaaaaaaagaaagaaagaaaaatgagatttgagatgattgaatggtgatttaataattatgtatgatttgcgtgcaaatataggaaaacaatagctaaaattaatggaaacaatccttgtcttgcctaggatatttgggtcccaatcttaccgattttctatttttaaacttcttcaccaacctttatgctggcccactcccaaagtcaatcatattattgagaaagtctatactaagtaggttttttttttgtgcttttaattattattattatcataagtaacctataatatgtgtatataaatgttattattttggtgccattaaatttatatatatatgaaaaaaattatatgtttattctatatatttaggtgtgagtaatttttagaatttatattaagagcagtacttacgataaaattttaatagttggataaatattatgatttaatctattcaagtttttttatttttaaacttcaaaatattttgttttgtatttttacggaattttacctaaaaattcttattagaactagcactgcagcctaattaattgcaacaaaaaatcgtatagaaactcctattgcaactagcgctgcaactattttaaaaattcaaatcgtaattaaattaaaatatatatatatggtgtaattccccaaaatattataagcatacaaaatgtatgttaaaatatactctctatatatttttttaaaatgaatttcctcaaatattataaagcacaaagtaatgacaagagaatagagcaagaggtaaatatcatagagttgaggacaattagacaatccggctaccaaacacgaagaacagccacatgataatgctacacttacatacatggtaatgcttttctaaactgtgtatctcattttaatcagattttattagctgaaaataactgccacattactctattattgttgagaaagtctattgaggtaacacatttttcaattaatcataattcggtaaggtcagacttaatttgttacaggtggtaaattaattatgattttaatttttctttttaaataaaaataaaaaattgtataatatttattaccgcatcactaaggtaaaaaagacataccatactacagacatttccattagttattattattcttattatgagaatgatagagggcaacaagttctaacaaacatattgctattctaaaattgataacaaaattaatttataactgaccggtgcaaaacatacatctcttctctatataaaaatatatatacacatgatgtcttttaacgtttatagtttagggtactaaatattttatattattgttattattatttagaaatcaaaatcactgtattgcattaacttaaatttacaatttaacagtaccattacagtctttgtaatctatataacatgtagaatttgtaaaaataattgtgttgtaaatttacaattgctcaaacaaatttaagtctttttatttcattttttaggcaaaattaataaaattctaattttcacctcatctcgaatgcagagcattaacatgggtaacgagcttacacatttgtcccacaaaatagtatttcgactcctccaaatgtactaaactatagcagcctcctacctcctgaaattcgactattttgatctcttaatggaacgaaaaatttagggcaacgaagtactcaaggttctccatcctaaccaaagtttgatctcctacaaacaccttctactaaatgggcaatcaaaaaaaaaaagatgatgtatggtttcagcatcttgctcacaaatcaaacaagtatcatctgtaactatgccaaaattaggtaatttgtcccttgtttgtagtctatttaaaataactaaccaaagaacaaaacgatgcttagggataagaaacctaccccaaatctctccataccatgacttggcttcacaatgtggcgcgaacactcgatacccatgttgaatagatcacctgtttagcagaaaatgttgtaaagaaactttttctttgatttcatctttgattcgagttacttgcctccagtactagttgcattgcattgttgcgttttaatcccaccaagacatttcctttatgtatatattgtgtacccatttaacccagagattgtcttgtttagtggcaaccgcccatacatactttctaagagctactttgttccaagttattaagttttggaaaccaagaccaccttccctgtgagatttacatatctcattccaagctacataccctaggccttgatattctatctttcccttccatagaaacgctcgacatatagcagtaatctcttttaaaacactcttccaaatcatcattatttgcccccgatatgaatgtattgcaattaatactgaatcataagggtcactctccccgcaaaggagatgtgcctgaaactccaagttttgatacaagcaatcattttatcaatcaatcctatacattcagcctttgaaagcctccttgcacatattggcactccaaggtaccataatggcatctgacttctagtaaatccagaagcatcaatcactctttctatttcacttttcctcatttcagagcaatacacagtagatttctcttcactgggttataaacctgatgtctaagaaaataatttcagtccctgcaataaccattatgtagacattaaatccccatagcagaaaagaaaaacgtcatcagcaaaacaaaggtgattgagctttagaccacgacatctctcattatacttgaattaaatcatgcttgctcctaactttatccataatcttagaaaggtactccatgccaatgataaaaataaggggagacatatgatctccttgccgcaaatccctttttgcttcaaaatgtcatgcatagtttcattaatcatcaaactaaaccttcgagttttaatgcaaagcataacaagttgtatgaactctttgggaaaataaaagtctatgagaatctcctcaataaattcccattctattgtatcataggctttctttagatcaacctttatcatacaattaggcttggcatttgtccatctataatgtctcactacatctgagcacatcgtaatgttgtacgcaatgtacctttcttgtacaaatccactctgattttgagatattaagtctggtaagacagctcagaatcttgtacaaatgagtttagttgtaactttataaattacattgtaataagctatgggccggtattcgctaacattggctagacattgatttttaggaaccaaagtattcactgtggcatttatttccttcaacatcttccttgtgtgtaagaaattcagtattgcattactcagctcttctccaaccaagtctcaaggcactaccaaacccatctggacccggtgctttgacccctggaatggcaaaaattgttgatttcacatcctctttgtgtactcagccattaaaagttgtttgtgtttattcgagacaatcaagccttgtgctataatttgtggaatcacagctctccttgaattaatgttggtgcctaacaaagtctaataatcatggaaagttgttttcacttcttgaggtttgttcatctatttcccctccatgttagttatagaataaattctattaactgacctccttgctcgaactgaagcatgaaaaataacaatgttcttataatgaccgttttagtaattgggattagtaaaggcaattagcgctgatttttattattttattattatttgtgaattaatttatttatggacccccaatgtttagaaataaatattagagttataatttctcaattccggagat

SEQ ID NO: 303002 - DNA, 3738 bp, Cannabis indica
ttatctccgtccccaaccacgaaggagaggtgccatttgtgttttgttactgtttacagtataaaagtaaatatattgggtctgagcagtataaaagaaataaaaataggcttggacagtaaaaatgtaaagtttgccgtatcccagtatttttgaaaacatttggtaaaaaaacagtatttttataagtttcccattaagttttatcatgtaaatatgaattaacttatttttaaggccctgctggtagagcgggggccctaggcacatgcttactttgcctacccataaaccgaccctaattaaaagtacatttgcagtgataccaatatttaagttagcttaaatttaatatatttacattaaatataaaatattattaactctcaaagaatatatatatatgtaaaaaatatatatatatgtaaaaaatatatatattcatagaattcgttattagactactaattatttatatacctctttttgttggattcttaatcatgcgttaaagattaatgttacatttttactacatcaaccaattttattttaaatgataatgtaatttaatggggatattaattatttgtaacatttttttaaagttaaatatgattgtttgtcccgaattttgacatgtattaaattataccatttgaattttttaaaccgttaaaaaattctctttaaactattaaaattgttggatttaatgacatttatccatgtactaaattattctccataaattttgatatctactaaattatgtctttctaactttaattgcaccaaatcaatccccatgaactttcatccatatatgttagactttctttattataaaattgaaaaaaaaaatccttaaaattcaacaatctcaatagttcatgggagatttttaacggcttcaaaagttcagagaacataatttgatacatgttaaagtttaagagacaaaaatcctaaatatttttttttaaacagtaagggactttttcaaaagaaaaaaaaaataaaggggcaaatctctaccattatagttcggaggaacaaatcttatctatgcataaattaattgatatattatagcgattactttggtggtgatggtgtgaaataaatatgaaaaattataaaacattatggtgatagataattaattaatacatttgcttctgacaaacaatttaataatcaattagtttaacttgattgacttcttcttaattaaagatttcttgcaatttgaattagcttacttaattaattaattaatatatatatccaggaatttctatacatttgccttgatcaatatatatagtactatagtattaaaagtttgtccaagtccaaaagagtgacaaattaatttacatattaattaattctctccaatctcttaattagtctcaccatctatactataaatatgctaaacataatgttttaggatcatatcatcactaaaaactataagcagttccttatacaaataaagatcttactcaaaattaattaattattaagaaaaatgggttcaaagagaggaataattttgtatgtggtgggattagtactcacaataattttggcttatgaaacaacaagttcctcagctcaactctctacaaacttctatgattattcatgtccagctgccttaccagctatcaagaaagttgttgaggctgccgttatgaaggaacgtcgtatgggagcttccctattacgtcttcactttcatgattgtttcgtccaagtatgtcacttgaacgatatatgctaactatataaagggtcggctctaaataaaaacgggtttgattctgaatatacttgtacttattatatattatctaattttataacttgtgtcatgatatgtagggttgtgatggatcgatacttcttgattcgactgacacgattgatagtgagaagctagcgaatcctaatgtgaactccattaggggattcgaggtcattgatgacatcaaggctgaggtcgatcgtgtttgtggtggcccagttgtttcttgtgctgatattttggctgttgctgctcgtgattctgtagctgcggtgagtatatatatatatatatatatgttaatttactataaaatgactacttaattaagatatattatgaatatatgtcttttttttcttaaatgattaatgatcaatcaaagtatgactataatacttggttcttgttttgaatttatcagaccattgtgaaaattgtgatacatatatctcgaaaaaaattacaataataatttatgtacacatcaattttacggtaaaaaaaaaaatcatcttttataaaatgctaatctcaagacaaataaattttaaaagttcattttcacttcatattattactcttatttgtcatatgatgataatcgatataataatcaaattaaatcaatgtagaattatataaaacaaactttccattttattttattttttattcttcatgaaaaatagtctttttaaattgaatatattaatctttatttatatttataagctagctataatatgtgacacacgcatatcttatattatatatataaaaaaaaccctattaattttctcatttattctcaaagtgatcaaaatatatactcaaatgttttaaaaaaaaattaatatataatttgtctaattatttaaacagctagcaggcccctcttgggaggtgccactaggaagaaaagactcaaccacagccaacaaaaacctagcgaacaacgacatcccaccgcccttcctagaccttccggcactcataacaaacttcaaaaaccaaggcctcgacgagagggacctcgtcctcctctccggggcccacactctagggtttgctcagtgtgtaaccttcagggctcgcttgtacaacgaggccaacattgacccagctttcgcagaaatgctcaaaaaagcatgccctaacaccggaggtgactcaaatctctctcccttggacccttcaccgtccgagtttgacaataggtatttctcccaattgacttcctacaaaggagttctccactccgatcaagaactctttaaaggcggttccacggatgaattggtcagtcattacagccgcaatggcgaagctttcacctcggatttcgctaggtctatgattaagatgggaaatattaagcctttgactggatctcaaggtcaagtccgtgtcaattgtaggaaagtcaaccaataatttcttcaattgtttttcattcaatttgtgatgtaagtgttttatatgaatttgttaaggtgtgacaaataagagggtatacaaataatgattcaaagttataattatgttatatatagagagtattttatatagataattaaattaattaccctcatgaagataataacgatgaattgttcaatttgtaattttatataggcacatgcatgcatgcacgctagctagtcgtgacttggtgtgatcttttcaatttgagtaaaaagtctttgtcttgtctaattaattttatatgttccgtaattaagagaataaaccatgcttatatttatatttcttaattaatttatatatatatatatttatatatatgggtgcacttttaatgaatatccatgaataaataatattagaaaattttaagtttttatgtattaatttttctatttaattagaaaaatttctcatttttatattatatg

SEQ ID NO: 303003 - DNA, 6120 bp, Cannabis indica
cagagttgaatggtgaagatatcatttcgggtgttcttctatcacgtccacggtctgtaatcccattttcatatagtcattgctcagtgtatgagaagccaattgtggaagctacaaatgaggaacacccaaatggttcgtgctcaaaagtatctatggaaagtagagaattgggtggttggaattgtgctagacgggcttcagtttgtgtggaaagtaaagtatgtgatgattttgatcatgctggatgtgcttcagttggtgtttctacgttagatcactgtaatacattcgttaaagatcggataaacgagggtgaggatgatagtattacctctcctcaagatcagagagatacaagattggcagaagttagccatgaggcggctctatcgctggctaagattcaaagatcaaaatccaggcagaaggctcttgagcttcggactggttcaaaaacagctaaatccagattaaagaatgccaataatttcggtggaagaattcccatttcttcccttgaggatgaccttaacaacaattgcactgtggaaggtgttaaactaagtgattcttgtcgcaaggagaatgaaagcaccatgaattctactaaaagctccgaaaggcaacagagctctttgaatgccggttgttcatcaaattttgttggagaagatggcattgtatttacagattctattggccccttaattcagcaatctagcctggggaaccaggagcaaagagaagttaaagttggggaaaacaggagcaatgagaaaggaagggactcatctaataatgttatcagggaggatggagctgcagttacacaacagtctaatcagcctccaatgtctgttaatcatttttcaagtcattactataattgcataacagcagaagctgatgtgatagcctccagattcaagggggttactgctcgttctgttgataaggatagagaggggagatcgttagaaacaagctctccacacttatctgaatctgcaggtgtaatagatgaaggaatgtttgagaatcaccaagaaaatcttaacttatcgttggatgaaagggatgttttaagccaagaaatctgtgtggaggatgcagtagatgaacatgctgtctcagcaattcaaggaacacctcgtgctgagaagagtattgctattcagacattgcagcattgttacaaaagttccaaagagaaatattctttgagagatcctttggtttccttacaagtagtcggggaaagttcgcatggcagtgggctgaaagagatatcaagttccaaaatctccaatgttaaagagacaaagaccacaacaccagtgatagtaattccttgttctatttccaaggatgaaactgaaaattcaaaaaattctcagttttgtactcatgatgccactgatgttggtctttctcaatcaactgaaagggaaactgcagcaaagtccacagcaaaaaccagtttcgatgccttgcttgagggttcaactcggaataaacgaaggagtggttcttcagataccctgcttgctttgccaggcgaaaaagaaagtgcagtttttcttgtcaacaaggattctgaagttagaaatttgttacgtaaagatcatggtctgaaacatgtcctagactcccaagaccttcaaagtcctcaaggcaatattcaattagatatcagtaagggtcaaattggagagatacctcaaaatgaggagagtggcatgctaaaagggtctaaatcttcactaaagcttctagatcaagaggtattttctttttctgattttggttggatattctgccatattttagattgagtatgctgagttagcaaatcaaaaatggtttttatatgtttcgtaagctttcatgtattccattctctgcatattgtatctgcaggatgattgtaacatgaaagatagggagttaagtgcaactaccctgatcacttctgctgatgaagaatcagaatcataccatgtttccagtgtgcttagaaagtcttctggagctttgggaattcttaaggaggaagcaagagtggaagatctaagtagagatatctttgatgaaatctcacaaagaacattagaagagaatcaactttcataccatctcgaagataactttcaaattaggaatactgattctttgacttatagtaattccttgcacttgactggtgctgatgagacaatgcatgtgcttgagagtttcatttttcaatcagacgatgaacaatcatgcattgctgatgagggaatcaattttgacaagttgagccttccgaagacttcaattgaacgcgctagcattctagagcagctttgcaggtctgtttgcttgcaaactccagtatcctgttcttcaactttctatggattagacaagatttcaaatctataccaatctgttccaactgggcttctagagggcatggataagccagtggatgataatgatcgtatgagtgaagtctttaactgtgcttttgaaggaagatcatattcagaatgtctttccaatacatccaatcaatgtgaatgggacataaagaaaccttgtatgtctccagttcgaaaaggctgggacagaatcatatccaaatcagatagctctgagaatcgaatgagcttaatacccgaacttccatgcatttgtgaggaaaatgagaatgtagatgaggtagctgagacttaccaagaaggcattgtttcagagatccatccaagctcagcaaaaagagaaccacttgctgaaattattgcaaaccttgttgaatctgaaactgagccacatattgatagaagtagtttagattcagttaacacagaattcagcttcaatggaactcataagaggtcaagaaaatatgttggaaatggaacaggcagtaagagaagaaacattaataaggagaatgatagcatgttaatgggagcaactgcttctaagggaaaaactagattaattcgtaatcagtttagtaagccaaacgtatcaacaagagccagttcaaggagaggaggtccaagtttgactgtgacagaatctaagcctagcaatgtcatatcaaatattacttcctttattccacttgttcaacaaaaaccagcagttgcagctataacaggttatttcccattttagtaaatggttttcctgctttaataagtgaatgaactggtcttggtaagttagcagaagttgattggtggatattatgaagttatctaatctgatatatcgttttgtatatttccatttattttcagtacttaaccaatatactatttatgcaagttttgattaatttttacaggaaagagagatgtcaaagtaaaggctctggaggctgctgaagctgcaaagcgtcttgcagaaaagaaagacaatgaacgaaaggctaagaaggaagccatgaagctcgagcgagtaaggctcgagcaagaaaatctgaggcagttggcactgcagaagaaacagaaagaagtggaaaagaagataaaagaggctggtatggcagcaaagaaaaggcaaagggaagaagaagagaggaaagaaaagctaaggaaacggatgcgtggtgaggaaacaagaaagcaaaagttgcatacacaaaagcaagacaaagatgccaaatacagaaccatggtaataatgatgttttaaaaattcttagcttaattttaatttgtaatggttgttgttttagatgttagttactcacaccttgctgattgatacaggatgataaaggacatggcattaaggaatctaaaagaaggaatcataaaaagatggaacagaaaaatgaagataataatctccagagagtttcagaagctgaacatgcagctacacaagcatcaacaattgctgatagaggaccaagcattgtacatgaagataatggggtctcaagtgatcttgtgaaatatctgaaggtataaatttccactgagaacaagtattcattttattctaacctatttgtactcagtcagaattgcctcttgctgatactctctgtgcttttctaggtgaacaatttagacaatccaacacgaactgaaaacttgtttgccacagcaaatctagaaaagtcatatgatatttctccatacaaatgttcagatgatgaagaggaagaagatgatgtacccaacacaaaatttgttccttcatgggctcggtatgcaaaatttgctttgtctttggacctttttcatttattagttatatgattgaaaaaagttcacattattttttaacagaaaatctagcgtggctctgattgtttcctcacaagaaagagtggatccactgaccatattccccccagaaagcttttgcagtatagatgaaggtaatgaacatatagtaatatgtttagtattgttgttgagtgtttggtattgataatattgattggagtaaatgacaaagacatttttgtttttatagttgttttgccaatgaagatttaaattaagacaggtatgaatccattaagtttctttcccttttcttctgccagttaaaaaactgaaagatcaacctcttgcttttatttttttggggggtttaatggtgatgattgttttttttgttttacataacagattcccagagaaaattttgtgaatgaagattctgtacatgttgtagatataccaagagcttctctttccacatttctaaattatggactttgaaaccaatattaatccaggtaaaaatgccccttaacttattgttagtttttctagctttgaatctgtacctgtataatgtatatataaagatgatttgatctgatagggaacactttgtatgattttttttcctcaagaattacttgacttattctttgaggccaacaacaatgtgatcttatttgttcccaaaaaatttggccaaatgttggaaaaatcaaatctttccatgttggtttgtttactaccaaacatagcataaatgctacttaactgagtactctattttcaaagcttgtttattcataatattgaagaaaatcattccattccatacatttttttaggtggtgtttagttaaaagtaatgaaatgaaaaagaaacaattttcattccattttcttatttggttacatattaaagtattagaatgtcattctaatggaatgactattctaccattttggtagaatctacttttttcgtggaataactatcccattttaaaatagaaggaaagaccattttaatacatgaatttttttatacattttaaattttattttattctatttcccttcttatttttaagttttcattcctaccaaccaaatgccaccttaattcatatcaagattgtaactattgataaattacaaaataaagatttttttatccagataatcgaatttttttttatcaaatgtggaattttagtgattaattcaaaacaataattgtggaattcagtgaaatatgtatggtatctaccttactttttaatttaatagtatttgttttttgaaagaggaatatggtttgggtttgggtttgggtttaccttaaataggtttgggtcatttctaagttgatacggctgatccgtttaattaatttttaaggtgacacacttaatctaaaagtgatatgacaatgatttatgtaaaattattatatttattacatgtaaattatatttttttagttaaataggatataaatatattaaattgctcataaaaatgtcatataaatatgttaagtgagtcgatcatgtcaactagtttatactgaatttaaatttattatttgcttgtaatatttaagtcttgacacgatacgaaaataactcgtaaacacaaattgtcactcttagtttcaaggtgcaaagtccaacaagtgagatggaagcaagttgcaaaaatcacataaaaagatgaccaaactaaatagacaacaataaacgacctaaacccaacaccacaaaaaatacattatttcaatgaaaatgaaaaaaagaaacatataccactcgagaacaactcgatggtgcaaaataaaaagggatttttataaaaatactagattttagataaa

SEQ ID NO: 303004 - DNA, 2583 bp, Cannabis indica
ataacatcgctcccaactatatttcagcacttttggtaaaaagccagtgtcatcccatctggactcggactcttatttgggtgcatttggaacaaagctttcttcacctcctcatccgtaagtggctgacacagctccaaattaacatagtcaggcaccatcggctccacacaatccacaacttctcgacatgaagcacccgaagtctgaaatatttcctgaaaatagctaaaaaccacgtttgacagccccgagtcccaagaaacccaattatcatttgcattacgcaattggattatctgattattacgtttccgggttgtatcagctttatgaaaatagctactattagaatcaccttcttttaaccaatgctgcttcgcgcgctgtttccaataactttctcgcttatcaagagcttcgtaaagcttcttttttgtatcattatatctctgaaatgaatcactatcacgtcttgaatgaagaattttcaactcagccttataatattttatacgatgattcaacgtgcttataatttccttacccgaccgagccaaactctcagcacacttagaaaacttgtgctgaaattcttgtaactgagcttgttcccaacaatcattaaaaattttcaagcaaataggatctttcaaccatgtattctcaaaacaaaaatgaacggtataatggacattatttattaccaatggctccagaaaaattggtgagtgatctgaggttgaatactcgaggttggtgagagtagcttccaggaaagctaaccgccatgattgagacaccaatgctctatccaaccgcacctcaacccagtgacttgaacctcgacctttctcccaagtaaaaggatgaccttgcagctccaaatcagaaaaattacattgcccaagagcggagttgaacccatcaagcagccactgtggatagcgtctacccccacgtttatcttcatggaaaattgtattattaacatcaccaattacacaccaaggcaactcagactgactagataaagtacacagaagattccaagttagttggcgtctattttcgtcaggctccccatacaaacctgtaagcctccaatctcgaacatgaggagtagaaatcaccacatcaatatgtttattattttaaccctataaagttccttcctctttatttttccataaaagagccagcccacccacaagacccacgacctcaaccacaaacacaccttcaaaattcaataacgggacttaacacacttcgtttcacatagaaaaataaaactgggtctcttttgagaaacaagttctctaaggaattgaatactccgttggttcccaagccccccaacaattccagcacccgccccgccccaaacaagttttttgttaaatccgaaaattccccaaccacaccaccttcggccccaacaatgtccatactttccaacaaagtgtcatttttctcattaaagcccacatcaccattcagcccacttttcccctcacatcccatcctcctcctttttacttccaaaaaagtcaaccccacatttgaatctccctccaaaccttcctcattaatatcttcaacaatcacatccctaacttcaagtgatttatttttgtgatgatccaggctactttccgcacctccttgattttctcccctaacaacttgaccccaattattcgctcttgcacaactatcactaggcaccaccaaccgagaaacagtcgggccatcctcaggcatagcagccgaaccctaggaagaagatccctgcttagtcaccaaacctgaacgcagccacttcgagccatcatcatagttacgtcttctcggtgccgccttaatatccagactgtaacttttaacgagctactcctttggagtatcaaacaacctctcacaaaacctctccgagtggcctaagatgccacaaatgaaacaaaaggtagggagatcttcatacttaaacaccacatggcacacccgaccaccttgaatctccaactttttctttttcttcaaagaaatgttgacgagtatgttgacccggatacgtaaataatcatgccatactccgatttaatagttattttttaaatggccacttaaatcaataaaaagttcttgaaaatataaaaaacaaatatatatatatttggcaccatagcgaggctggataattaatttactgtggaaatttaataaaccatacaattaaaatttgagttttttttttcagttttaactaaaaaaggtaataatattacaaaaataattctagctggccaaataaacaaatatatagcccaaataaaataaaattacacaaatatcacttacacaccttcaacccaggatctatgcttcttaggcaaccatcaggcaaccatcgggcaaccacggagcaacccaatgcaacttaagtcaaaatcaaacctgaaagagaactaccattaattccactcgagaagacgaccgaaattaatcaaaacagggaatgttttgaattcatgaaaaaaagtgtagaaaaactactacgaaactaaaattcaaccaaaa

SEQ ID NO: 303005 - DNA, 2004 bp, Cannabis indica
tattacatatatatatatatatatatataaaaatactattagtatttaactaaacttctaaacttcccaatcatggggctaaccaccatatcctctccgcccctttcatgtttgccatatatataaataccttatttattagtgggattactctcattataagctcatgtcatggatgaccccaaaaccctcaaaactagactaaagtaatgaatattatatgtaagggaatatatacatatttaatatatatatatatatatgtgtgtgtatttatgtacatattctatgcatgattttgatagagcacgatctctttattggacaattgtcatgatctaatctcatcaatcaaacattctaataaacccatctacgtgttcatttatctagtgatgtagatgatgatcacatactttccaatcttatgaatgaatacatattaatatttgtatgtgagcgatttctgatcatagaattaattaactaattaatacttttgtttataacctagtcacgatgactaaaactggtcatacatttacagccaaacgatatatatatattaaaaataattgcacactaaattaataaaacaactaacttctgtagaaatccctagatcgttatagctagtactacatctctatatataaatatatatatatcagtgcgcattatattatattaattaatttttttttttaaaaagagtttttcaatatgtaattacatattcacatatatatatatatatatttatacaaactgtgtattatattctctctctttttagcttcgttaagcttccttcggacctaattaattatttaattatcactacagtagagatcacaattaagaaaatataaatatgtactatatatttttaattaaaagtacaaaggtcggcaggttactatttgttattagtgcacacacatgccacggtcaggaaatatatatatataattaataatctattgtgtctaacctcaattatcacattgattaatcaacaaaaccctccaccacattataatttccattactactaatgcactccatcttctctctctccagtattcttcgatcgatcgattttattagtgagtgcatttatattatatatattacaattacaattaattaataattaacattaattattagttgttctcctccgcggtttcaccactaatacatatgccgactatttagggatattcactaatttacaaaaagaatgacaaacaagttaagactatataattcattaattaaaatcactttattaattaatgtcttagctactttttgcattagagatggaaattagtttaacgggtgtggctttctcaagtataatatatatacttatgaataaaagattcacatgcccgtatatataattttacatatataaattatttcacatataagaacaaatcataactgtgtaaataatataagatattttataaagtgtagttctatataaccaatccctctagatcaactagaaatttattctctattctctcccaaaaatagaaaattaatcagaagaagtaaaatctaataattataaattatgtacagatcgtgacacacatatatttaatatatacattatgtataaataattgaatgtttcaaatgattagtacattattattactctaacctagttatgtaatcattaagctaacatggaacagttgaatcaaccaagatcgattgatatttagtaataatagaaacctatcaggttgcaataaataataaggcataagcacatgcatgaattgtgaattatgttccattcacactagagagagatgttagattttatatcactcataaaatatgcaacaacaaaattcaattctatagataaacatattacatataattataagtgtataactatagatctaaagaatacctttgttgattcaaagagaagaattcaaatggcgaaagcgtaccttaattcataga

SEQ ID NO: 303006 - DNA, 1120 bp, Cannabis indica
atgcccagggccgggcctgctcgacaccctgacctgaatcgggccttgatttgggtatctaaatccacatcctgacccaaccacgggcccctagccctgacctcaaccttaattactgcccaggccctagaccttgacccacactccaaccccaatcgagaccatgtccctgaccttagaccaacttcggcaccggacctcgaccctcacctcgtccctaacctggaccccagtgccagacctcgatccactagcctcgacctctataccgaccatgaatcttgacttgaccctaaaccccaacgtcgacctgacttcggccttggacgccatcctcaacccaaagtctggccccgaaccccaacccaaaccctgggccctgtggaccccgacctaaacaccacctctagactttgatcttgatcaagacccttgacccatcaccatggtccttgagcaccaaccttggacctaaacttagacctcgaccctaacctcgatctggacaccgactttaaccaccttatcacaatacagtgtgagttaataaatattacaagacgagctaacacataccatttattgtgtattgaatagtatgatttgtattgtatttaaatttgtgattttaataattaatacaatataaaattaaattaaatccaaatatagtgttctacttatttaaaaaaaaatgaaaagctaaacttattctttttaaataaaatatgtgagatttaatattaagttatatcaataacaacaagatatctccttgaactgttagacatctttaaatgtcctttaacatttatcaactataaaaatagaaggtagaaataagctaattgacaactattaaatataatttataactaacacttctcctcgagttggatcatacgtattaatcatcgccaactttctacataataatcaactcgaacttaatatcccttaaccccttcagggtagccaagaaacatgcatctcaatgctttaggctgtaacttatcttgtctaacatgcacaaatgtagtacatccaaacactttcaagtgatctaagtttgggggtttacctgttcataactcttgtggggtcttgaagttgtttggca

SEQ ID NO: 303007 - DNA, 2590 bp, Cannabis indica
ctctccactactaaggtgtggaagaacgaaatgcttgtgaatcattatctgagagttcttcttgacctcaataccccgttggttgctcgtctgagtctcgacaatgaggatggtatttaaggtttagagatttttcaagtatgagtggctccttgtggtctgttgtaaatgtgtccttgttggtcatgatgaactctcttattcagctcggaaaagaatggtctctcttaccgatggtagaagtgtacccctttatggtccctagctccgtttgagatctcgtttggagagtgggtttgcgattcttgaagtggaagattatcaagagtgcatccgtatggagcaagatgaggtggtgtctaaggttaagttacaactgatacgggtgatgaatgcccttccggtagtgctaaggatttgaatcctagggcagaggatccaactattaaaaaaacaaccttaatcaacccgaaggggaaagtggtccagggtggagacaactcttttaaaattcggtgtaatgattatgaagttgagcattacatccctgaggttgatatagctcatgtgggcactattttaagagtcatcttggtgataaagatgtagagacttcccagagtaaggagaaagcttcaactaaaaggaataaaaaaggctttgacaatatgggttggcctattggtgttatcccgaaatcaatttttggtcacaaatcctctggtcctccccctttctcaggccaaaaagggaaggaattgaacgagacagaggatgttgagcaaagtcatcatgtggactcaagtattcaaggatcctcatctgattaaggctttgtgcttggaacatgcttcagtgaggaaagttctgctagaaatgccaatttggtgcattttgctaaaggggagaacaatggtaaacacaattgtcatgattcccagatggctactagtgaagttcctaatgctactttacttctgcagggataggggcactctcactttgataaggatgggggcgtctctcgaaagttgaagcctagattagagggtttggaaggaggtgatggggagcgttctaattggtttgatgtgaggtccccactggcgggtcacaaggtctctcccaataagcgggattttttcatagctgaggaggcgggccttatcatgtcccccaaatcatcatgaaaatcatttcatggagttttcgcagactagctagttcgctggaaaaaagggctattcagacccttgtctctaaagaagattcaaatgtcctctttcttatggaaactaagtttgatggtagatgggtgaatttgatttggcaaagtctaggttttgtggatgcttcgatggttggtgcctctaatactgttggcagtttgtgcctttgttggaaggtagcattgatattcaagttttatcttatgatttatctagaatctctattttatttcataacatcctcaatggcccagattggtctggttcctttgtttacaaccttccaatgagatatgaaatggcagatttttgggagaatttagctctggagattacagggatcgattccccttaggttttgatgggtgatctcaatatggttatgtgtcaagatgacaagtttgaaggtaatctggtggaagaggctgaccataaatgtttgcttgattttcttagtatctttggtggagtggatttaggttgtgttgaaaatcatttcacctggtccagcagtcaacaagtttttgatctcattagggagcgccttaatttgtggttagagattcagactagctgatttcctttcctagagctagggttcggatgcttgctattaaagactcagaccatgcccctattgttcttgatcttcttctcaattgtgagcactttcacactccttttcggtatcttgatgcttgatcgagggatgcaagctataaagaagttattaaaaaggcctgggagcttgaaataattggtgttaaaagcttttagctgatggggagactggcttatactcatcgctttttattaaaatagaatcgagaagtttttggtttctttaatgagaaacttaagtttaacaatttgttacttcagatctaagctcagatcccgtctccaagtaatcttcaaatggaggcggacaatgttttggaaattgatgaggtggaatcgtgtcaatatgagatatggaagcagaaatcttgggaatgttggtttcgtgagggggacaacaataccaagtattttcatgctactactcttagtaaaaggagaagaaattttattaggcagtgtctgatgatgatgtccgtggacaaaaggaaggatagaagtcaaaaattatttcaagtcaaagaagttttcgcttcttctttcccttcagatcctaatcaccattctcttatttaacctcttatttatttaggtccaatatgtgaaggtccaacttaagctcaataattattgcattgttgaaatttgtaaacttttttttttatatttattttcaagctttatggtatttttgacaagtgttgctcaaattttgttgtatttgtaatagtttaattatt

SEQ ID NO: 303008 - DNA, 4481 bp, Cannabis indica
ttgtattaaaaaataaaaaacaaaagtgttagaataaggataaatactattttggaccctgtattttgtaaaagtcactaattagatcctctgttttaataaatgacaaaatagacgctatattttccaaaatggtataaataagacccttaattgatttttttgtcaaaataaagtttaataataatatgatctaaatgtgttatgacaaaattgtttacattttctgtatttgttcatattaagaattgtcttcaagttagttatattaaaaaaaaaagttacaaagattaaactcaagtcttatttttactattttaaaaaacacatgatctatcttacaatttaataaaataaaaattccaattaataactttaacaaaacacaatgtacaaaatactatttacacttagaataataataaaaaacttacacgcgaatcatattttaaaatcaacggtccaaaattggcttatgtatatacctaaccctcggattcgactaaacctcggtagcagtagtagttgtactagataccattctcactcttctatctccctttttggagtttggggcttcgatccatcggtttttgtagtgggtttcagtgaagcacaatgtttttggtggactggttctatggtgttcttgcctctctcggattgtggcagaaggaggccaagatcttatttttgggcctcgacaatgccggcaaaaccaccttgcttcacatgctcaaagatgaggtttttgttcttctttattttctcccccaaattgaattaaatggaattgaattatgaatgttcgctgttttattttaattttaaaaatttcattttttttttgggtattattattactcggtgagtttgtttcccctgaaaagaaaggaatttgagttgggaatttcctgaattttacttttaattattgcaacgattgtataatcgttgatctgagctgaattttttgagtttgcctaaagtttaggtatggttttattggtgtaagtaggttaaaattgaccaatggaaaaatgttgggttggtgggtttgtactgaattttactcacactataagagaattaagatatcaattttgtttaggtgtgttcttcttttgcagatgtgaaaagggtggtagttttttctttttcttataatgtttttgatttaagtatcatacaattttatttattggtgatgaattttggcagagattggttcaacatcagccgacacagtatccaacatctgaggaattgagtattggaaaaatcaaattcaaggcttttgatttgggtggacatcagattgctcgtagagtttggaaagattattatgccaaggtattattataatttgagtattaaaatgcatgctcactgcaaatggtgactgccattttctttataattggcttattggaactttgttatttatgtggaagtagtttaggaaccatctttgctcaaactgagattaatggtcgtcgatttgtttgattttattattattaggctagttaagatatttgcctacaaaactttttaggctgttgaagttttttcctcaactattaagattcttggattaaaagacttttctccaagtttaggggacatgatttggtatatgtcaaaattcgaaagtatgatttagtagatattaaaattcgtgggaaataatttagtacataaaatatacccttatctaactttatagcttactttagagaaggatttatgtatttgggaagggggagcaccacaaaactagcaaaatttagacaagagtttttcactaggaaggacttggttgattgttacaatgatccgaatgggaattaagttcatttcaaggagccctctcttagattcgtgttgcataatctatgttctattttgctcgaaaaactaatgtagatgattcttcgtcttagatggctcttttctagtcaattagtttaggaagtaactaaaattttgtgttttattcattaaggtggatgcagtggtttacttggtggattctaacgacaaggagagatttgccgagtcaaagaaagagctggatgctctcctctccgatgaggcattggtagatgttccatttcttatattgggaaacaagattgatataccgtatgctgcatctgaagacgagctgcgctaccaccttggactgaacaacttcaccacagggaaagggaaagtaaatttaacagattcaaatgtccgccctcttgaggtattcatgtgcagcattgtgaagaaaatgggttacggagacggtttcaagtggctttctcagtatattaagtagagattgcagtttaggacgtaaaagtaaagatttggtttatagttttttcaaagcgttatcttatttcttgttaaaccaagctgttggtattggaaatactttactttgttctttccttgaaatgacaataacatacaaccttctttccccatgacacgttgaccaaaaaaggaaaaaaaggcattattgatttgctgtgattggcgatcgttttgagagatttctagcattttatgctcacttttgccccccacttgggtccagtggaatatcctttgttctatatcttttagtatcatacaatactatcataaacctaatcaaaccagaatctttcttgtactttttctttctttctttttaccttatatatggttatacgtggtcgaagggtcgttctgtcttaatggtatgctttaacactattgttctccaaaagtagcaccaatgacaagaaatcaacaaatgaaggggatatttacggcaaaaattcacataagactctaatattgacaaatgaaggggatatttacggtaaaagtatcttatcttacgaatttattgtaatcgtactcttttttagctattaagtgtcaattcaaaaacacgtgatgatatattattagactatagcgggcttaattgacacttaataaccaaaaaataaacgacggcaacaaaatcataaaataaagtatttttgcgaccattttttttattagggtcatatatataacagttaaaaatgttgagagagtttcaccataaatattccaaaaacaaacaccaatatcttgactgtatttaagtccaatcaaaagagctactagtgcttttgaaacaatttgtaatacaaaaactaatactaccaagaagttttaaaccttaaaaatgattttcttttttgatgagaaaataacaacaccaaaaacccactatattgttaggaacaaaaattgttgcattcacataaagtgtaagatcatgagattttaattcatccctaatctgattaagagattttcctttagaaggtttgttgtcacctttaatttacacattttgaataccatcccaaaaggaagacaaatacttgttatggtgtttgaacttgtttaaaacgacatatgagagtaaactgaataatgttgaaatgcttaatatcttattcatgggggttcatgttatggtacaatttgtatttataggttgtgttcgtgtcgtgtcaaaacttagataataagtattataaacaatgctaaatccaaacccaactcatttattaattgtattaaaatccaaactcaactcgtttataaacaagtgaatttaacccaatccatttaactaatttatataaagaatcatgcttaattttagttaacttattaacccagtaacctatttataacaagttcaatatatttacagctattttatgatacatttacgagtcatttaacatgtttatatcctatttaactaacacaatacattttacaagaaataagtataacaaatataaaagtgtatacttttaaataggtcgtttcgtgccatttttgagttaggtgtatcaaaaggtcgttgtttccatttttgagtctgaaaatgacatgtttaataaatagattagttgtatcaatccgaaaaatgcccaactaatttaagaaaaattcaaacttacttatttcgtgcgaacttcaaaataaattatcttgtctgacccgttttccccgtactaggtcatgtgaattgagtctactcaatgaaaatgtcaaatgtgaacaaagctgagcagagattgagttggaaaatcaaagaccaacgaaagattgaattttcacttttcacacaaagtaataagagtagccataaatgtaaataattataatacatataaaataagtaataaaacaatttcaacatggggatgtagctcagatggtagagcgctcgcttagcatgcgagaggtacggggatcgataccccgcatctccattttttgtttaatctttttcaacacaagaatctgacaaatctgaagtctacctcaatctacttccaaccatttgataccaaattttaatgggaaatttgattttctatacttaaaaaatcaaaaaaaacttttcctaaaccaaaaattta

SEQ ID NO: 303009 - DNA, 2078 bp, Cannabis indica
tgtctattttagtaaaaaagtataacatgaatgaaagttcaggggacatgatttagtacacgtaaaatttcgaggggcatgatttggtagatatcaaagtctgagaaacatgatttaatacataaataatcactgaaatagtaaaattgaatgaaattagataaaaatccttaaatctaaccatctcaataatttagggagaatttttaacggcaaaaaaagttcatagtgcataatttagtacatgttaaagtttaggagcaaaaatcttaattagcctatatttttcgatgtacagtaattgttattagacaatattattatttgacgtcttgcgaattattatcagttttctataataatatttatcaagtattctgtaatttaaaattatacatttttaatattctgaatttaaatttaattaaggaaacttgataattagacaacttttagagttatactataatttaataaagtaattttgtacacttaaaatcaaatacctaataataccaccgccatatatacttatatatataacaacactcttaatcataaatgtttaattgtgtattgttgtctttctggttagtcacatcttggccggccgggtatggttttctcttcatgatttggctccccatgaccaaagacacacacacatatatatatatatatatatttatatatgctatatatatagcatattaattagtttctttagtaaaaagtgcatgttttaaagtgatacttagtatggttgggatagagaaggcaagaattaactctattttggttattgtgtttatgttgtctcgttttaaagggtcatgttcatatatatactttttcctctcccttttggccacatttatttatattattggaatggatatcttaatattaatgtataaaagtgttttttcttcttcttctcacgattttgatcataaactcaatttggtctcaccatgtgcgtataagttaataaatagatcatcaagcacggaatagtaatttaaatatccatgcatgcatgctccaatctgaaaagtaattaaagctaaataaaaagacacttgtagtcggagatagtaagccaaaaaaaagtcattaaaaatcaaaaaaatcgataaaaaaaaatagggttaaaaagagtcacttgtgattaagggatagtgaacaaaaagaactacttgtaatcgagttgttcaaaattggtgaacaaaaaataattactattacattctaatttatcacacatataatttgtattaaataatgttagtcatattttatacatatatatttatatatatgtttttaactagatactacaataactttaattgtgggcttaaaattaattacatatgttataactcagaattctgttaacataaattgagagttgatagttgatgatttgtataaattgcttagtaaatgatatatatatttcaatatgatcgagggatttttatgtaattttatagtaaaaatctacatatttcacgagtctatcttatttttttatattttttggttacagatacaatttgacaaaattttgtctaatttgaaaaattggtcatgcctgtacattgtgatcactgctatttatagaaatagaataacagttaatttgatcttatctaaacaataattatataacgtgggcattctcctttcatttatcttgtaacaggctggaaataaacatatataactgcctgtatttaaaataaatataataaccgttgtttgctaactaggcttttcgatgtgttatggacaatcaagtttatagcaatatttcctttctcgagagtaacactaatggaagatttcatgttaatcataaacttcctcataagtcacattggtccagattataaatcttccaaagtaattactaggctcctcgcaatatatcttggttcagattataaatcttctagggctcgtttggaacgccgtattaggtcgtattgtattgtattgtattatattgaattgtattttatgcaatatttttatgtaaaactatatgtggtattgacttttatggacac

SEQ ID NO: 303010 - DNA, 3443 bp, Cannabis indica
ttacttttttttttatttatttctctcgtctctgttatatttactcagctcgatggttttgagtttggcatttgtttcctatagttacaatctatcttcaaatttggttagaagctttttaattcacatgaaaaattggaggttactcaattaccgttatatagaaagtaaagtccaccagttagtctagctgattttctttaagactagaaaaagaagaaaagaaagtatcttatgtcgaaccctatacttgatttaaaacatgattcattcagctttacaatataaatctataaattgacggtgaagagcttttcttacgttcatattgaaaaaggaaagtaattttgtaattactttggatcttatgagttttaagtcctcatgaaatatctaattgtgagcctctatattttgagatctggatgtagcacagatcttgagattccttggaaaacagcaatctgactagtttagaaagtgcatgacagtggaaaagttagacctgggaaggggacattttaagtttgcttatgcttgttttctggctattttaatggtgatggaaacaaatcgatgatacatgttctcttttgtcttctccttactctgttagtttaaatcctgttgtgctggtgtaaactgattatcctcttgatgtttcatatgatcttctgggatgcttcaaaccagtatatcagtaggatcaattgccaactgctacccccctcgttcatcttcgagatcgttgctgatggctgacatacggtgtctacctggtgagcaattttctgttatgttgtaattgttatcttgttactgtcaacttgtcttctggtgcattatttacgctaaactaacctttcagggatggaaggtggcccaatttttgatgggcaagcacaagtcattggtatcttgatcagaccactgaggcagaagattagtggtgctgaaattcaggtgacttgattatgttttgtctttactttcataccgttctaagtttcttctagttaacacatcatccaaaactctagtgttggataacagctagtcattccatgggaagccattgcaagtgcttgcagtgacctgctgctgaaggagcctcataccgaaagaagcatttattatggtgagggaaaattagctgcggtagggagagcatgtattgcaaacagccatggccctgatggacacgttacttacactcacaaagatctgagttcttgttgtcccactcctgttgagaaggcaatgacttctgtttgtcttattactgttgatgatggagtatgggcatctggtgttttgctcaacaatgacggcctgatacttacaaatgctcacctgttggagccatggcgatttggtaaaagaactgcagatccttttataggtggtgaacatgggatgcttaattggacttcatcttacagtggcagcagaaacattcgtgtacgtctagatcacgttgacccttggatttggtgcgatgctaaagtagtatttgtgtgcaaaggtcctttggatgttgccctactgcagcttgagtcaattccaaatgaactttgcccaatcgttatggatttttcaaggccatctgttggatccaaagcttttgttgttggccatggattatttggacctagatgtggtatattcctgcaaacctttttctttagttggaatgaatctcaatctcataggttgaaattgttttccttctgtcaacaatatctgttctacctttttactttttttgtttgtttgtttttgttggggttggggtgtacagtagtaagattgagtaaatttagagtttattattattattttaaaaaaattatacttggtattatatatattgttgcaggggggtttgtcggtaggggtaaacgatgagatccgtagattctatgaatactaaattcctgtgatgtagatttgtctctcatatagctttgtgttttcaattaggcttctttccatcagtttgttctggtgtggtagcaaaagtggttgaagcaaaacttccccattcttatcaacaaagtcaaccgggaagtgcacgagggaattttccagtgatgcttgaaacaacagctgctgttcatcctggtagcagtggtggtgctgtcgtaaatatgaatggtcatctgattggacttgttacaaggtacaaaaaagttatttggtcgtgtataagttactattggcgttattacttgtaaaacaaactgctttattctgtctctgccattcttatattcattcttcaaactcaagcaaccaatcctaagaatgcaaacttctctttgaattccaaattgaatccataagcagaaactgttaaggttttgagagaagagattggcttatctcacggaggatgaacttgtctattatttatttggtcaatttgtagatggaattgactctagctgataaaacatcccgtgctggttctcgattccatacttatgcattaaaaatataaatcttgacaacacaaataaatccatacttgtgcatttgtgatgcttttagaattacaccaagtaccaggacaaaaattatctacaaaaaatcccactaatgttggctatatataatatattccatatttaatgggatattttcttgatacagcaatgcaaggcatggtggaggaacagttattccacatctgaacttcagcattccctgttcagccttactacccatctttaagttctcagaaggttggtcagttaaatggcgctttgtatatttttgtttgttttcacaataatataggtgatgagagagagacagagaggacctatttaaagtttaattctacttgcaaaaatgattctgtttcttgtgtagttgtgattagttgaagctgatgagtttctccttttaatcagacatgcaagattcctcgctgctacaaattcttgatcaaccaaatgaggacctttcctttgtttgggcattgatgcctcctctatccccgaaggttcctcctttgcctgccttgccagtgcctcttctggtggacaaggagaacaagaaagaagcaaaaggttcccgctttgccaaatttatagccgaaagacaagaggtgttgcagaagccaactgaacttggcgaaaggggaaagcagtccagtgtgattgttcccagcaagttgtgagcatctatgtttttttttttttgtttttttagactaaacatacatgatttcacacaagattccactgcaccatccggtgaattgctttgatccaatgaagacttcatggttgaggtgctacagcagaaatgaagtgtgctatttgtttcaattttagaaaaagaataattacaactaaaaataaaacctctcacaagcctatacaacttgtacatttgccttcaaattattatttttaatattagttttttttttt

SEQ ID NO: 303011 - DNA, 2303 bp, Cannabis indica
aatatgaaatccgcacttagtgcaaattaaatgttgtttgaccaataaaacgcggattgaatcggataaacacccttatatttaatgaaataaattagtaatagattatagttataattttaaccgtataaatataatcttcaatctagaatactttaaaatgttttaggtagacaacactttgtattggttcaagtgctgtgctccaaaaaagacaaaactcgaataaaggaactaatagccccttttcctccaatcccgtcatacaaataccaaaaatacaaaatttactgtcacaatgaatactacataatatcatgaatacaaaattgtagattagtaagaacttttcttgtgttaatcttgaattataaaagactagcctaacaaatcctcacaattgcttctccgggtgagtcatcatctttcccatcaatgaataaaaaccattcgtatctacgttgtgaagtggcagaagaccccaaacatttcaaaggtatgcactatagtctatatctgtagcctaatttgtaaaaatgaattatgtgatatcatcgcctaaattgctccaatgagattctgaaaaacaaaaatcaaaaattccttttcccactcccatgaacatagatggagcagcaatgttttcagagtgttttctttggcttcagaaattgacgataaaacccccattgactgtgtgatttcgtaatggcttgttgaccaaatggattttgttctacatacttttgaacattgtcagctagagctacgccttcgagataagtacgaagatccccaccaggccctgaggttaaacaggtacagaaaaaggcatcaacatttaaaacatcaaattgtggaaatcatcaatagctaaatcaacatcaacatagcaattataagcaaggaagattttgtcacacagcattgaaaagttttaaaacaaaaatgacaagaattagaggaagataatggcaatcagctttggaggaaatattaccagccataaccaaaccattaaaaaaatccttgtatttcatgaaaatttcacaagttgaaaaatcgtagatcaagtggtaactctaggtaataataataaacaaacagcagcaacaggtaaagattcagattatgagcatgacaaaccaaaacatcaaaaaaaacatacatcttttatggcatcagacaagacagcacaatcaggaaaaaaaaaatcttaatttaggagaatttagtgtaggtaataccatgttccctgagaaactcacacagatttttcatgtctgtgtgaccaggccatggcatgttggttcattaaatgtgaacatatttttgaccaatgccaaatatttacctactcctaaatgactcacctaatgaattatcagctctgtcaagatattcaaatggcttgggaaaaattgcagtgttcgcctaaccagttggagatcacaaagtaatgaaacaatgttagcattttaagataaaaattctcaattgcaataagatggttacaaataaaaatatgaacagattttcctaccggattgcgtaaagccttatatggtgaatcatccaataatagtgtatttgtctcatcatactctcctattttccatggaagattaggctccagcttttcccataacttcctaagttccttgaagaccaaaggtttattataattctcaagagtgttagcccccgtagcagaacagtgagactggtcctgcatagttgtgtacagacaatatattgcacttatgagttgatatgacgacgataattacaattaagaaaaaataatcactccgaactattgccaataaagtagtcattgttggtccaaaaataaagacttataaggggagaaaattagcatgtgcaaaatagcaatgacatacatgaaacacaacttagcacaacagaagtgttgaataaaaactacactacttatttagttcaattaatacatgtatactgaacttctaatacacgtcaaacaaaaccgattaaaatagaacatgggatagttaactttgactatgatcacccaaaacaagttcaacattagagtaaatgaccaacagttcatacccaacttgactggaattaaacaatttaaaagaacaaggtgaaagaataaaaatttcccacaatgctgaaactttccaaagcagctttacagcatgaaacacaaataagaacacttaagtggcgtttggttggaggtaatgaaatggaatagaatggaaacaattttattctattcttttgtttggttgcatattaaagtattggaa

SEQ ID NO: 303012 - DNA, 1608 bp, Cannabis indica
cgagaccctgttgcaatggatcgaaacgccgagcgcaggccacgccactgtattgtagccaaggttttcgccgcgccggccttatgtctttcatttccgccgtccctgaatctcagagacctggtaaatacatttagatgagttgatagataaatatagagttaacttttctttctttggtgacttttcttactgagatttctgttatctgcttatgcagcgttgtttcagtcactgttgtttgaagcgtgcggacgaactgtgaaccctgttaatggagctgtgggtctgctctggacagggaactggcacatgtgccaagcagctgttgagaccatactgcgcggcggaacgttacggccactaccggaacttcttggaggcggcggcacaggaacgatgacggcaacgactcctacagctgcctccgatgaggcctccgaggcagaagtaacttgcacagacatttggaaggttcgagatccgaattctggctctcgattctcgacgtcacggtccaggttgtcgccgaagcgtaaacgttccgattctccagctaagctacgaaacaccgccgatctcgacctccgccttacgccgatctttccggtgaaaccgaccgcacggaaagccgatgttcgtcggccggtttctccgtcgatgaactcagaagaatccgagacgacgacctgttacgatagttgcttggctgatcagagtgcaattggtggagatcgaaagctcctgaacctcttcttctgagtttctaatctaaacaagccatggctttttttggtgttctttcagtttttcttttttctttctattgggtttaattacgtgagtcgtacgttcacgcgcgctgaggttaaactatgtaatattctctaatttgtcttttttcactactagaaagagaagggctttttcggaagtttaattagtttccggggagtttttgtaaaattaccggcgaaaggatttccctctttcttatgagtctttattaagagaatagaggggaatatgatattttggcggtggccctttttcttagctatattttagtgtgacattgaataaatcaaactaatttcattttccttatttttatttaatattcagaatttgtatgttttggattttggtttagtttagtttagtttgggtgaggtcggcactttacgcctactgtactttctccgtaacttatatcaaacctgcacaacatgttggcgcaaagtcataccaaaaacgtgttggcactgactcatgttgtgtcccaaaggccaactccattatattttcaaatgaatttaatctaacctaaactaattaattcagtcctcatttcataaataaaataaagtttattttaactcattccttggtttatgttacgcaaccttcattaattggtcaaggacttacaattctagaacagtaattttttatgagaacgagtgagtgtaattaactaattttttgacttaatcaattccttagatttatcaaggaactataaggatcagttgagttatacagataataaaacgcattaaacaagtgcaggcataattggggacaagtctctctctctctctctct

SEQ ID NO: 303013 - DNA, 2105 bp, Cannabis indica
cggtgtacaggatagtgtatatgtattctttaatagtataagctgtttaagcatgtatctatctaatcctgggaaagaccattggctatcaatgaagtggttactaaggtacctaattggaactagcaaagaaggcatgacgtacaaaataaaacctggaaaagtgactatagaaatatttagtgactcaaactatgtgggatacaaagacactcaaaggtccacatctgcattttttgatgtgtgaaaattatgttagttggaagtcacaactacaatctgtagttgctttgtccacaacataagtagaattcatggttgcaactgaagacatcaaaagatgtatttggatacaaggaattcttaaggaattgaaactatttgaagggactgcaatgattaatttagacagttagagggcctttcatttatgcgaaaaccccatgtatcatgacaaatccaaacatatagacattatgtacttctttatcagggagaaggtgacacaagggaaactctaaattgagaaggtgcatacaaacgaaaacccatctgacatgggaataaatgttgtaactttgcacaagttcaaccattgcaaggacttcctgagaattggagttggctaaggcaactccataagttttaaactcatatggcaagattttatttggtcaagtatgagctgaggtggaatatgttaggtcagctcacactttacttgccacgtgttctacatttgttcagattggtagttaaagttagttaggttctgtttctctttccatttttccagttctaactatttttaaacaacttgtgttagtggctcttgtacatataaataatgtaatttataattggtaagacagagatttacaaagagagtttagaaaagtgagatcaagagagaaagagagaaagagttcattgtggaactttggtttgtatagagagaatttcttagggacacgtttggtgttgctttgttctgtaactataaattctctaccattgaagtgcacgaactgactccaagtttctgggatttcagacaaggggattaggctcccccaatcaggaggaagtttgaacctaattcttggtgttcattgtttaatttttgtttttcttgttctgattgctcgttcttgtttttgcattgtgatttgtgtgtgtgcaagtagagtttgatggtttgtgatcattaaaaatcccaacatatagctattaatttaattacattgagagaataagaattagtagaaaggataatatatgagtgaagaagaatgatatgaaaaataataaattagaaacatttttcataataagtagaaaataaaaaataccaacacaaatacaaattcatagcactccaattcaaaaagaatgtttctaaagcaacatttaccatataaatcttttgcatttttttttttttggagtgatttcatgttaatgtatggaaatataatattataagatgtatggactactcatctcaatgctaatcaattttgagatgaaactacatgcaccttcatgataaattctaacatgatattagagacttctgactccgccttaaacctccacttttgggacctatcagccaatgtgtagtagtttctagggactttgacatgtttcaagaaaatcacaaatttcttggcgtgtacacccataaatttctgatttggccttatgtgattctttcaaatgtcacgttcggtcttgtgatgtttcattatagccacacttttaggcctaaacgtgaggagggtgtactagaaatagtctcacattgttaatgtgtagaaatataataccatatataagaggcatgaattactcttctcattaccaattagttttgtaatttttaaccgcatgcatcttcaccacaaactttcaaattctaacactgtgtgacccttttttttggacgaaatttaaaatatttaacatttttttaattactacactaagtattatggcatctctcattttaagaataattaaaaaagaatccttctatagtgttggattaaacctccacttacactgatattaagactcaatacaacttaatacaaaggaca

SEQ ID NO: 303014 - DNA, 1597 bp, Cannabis indica
gttctaatgtttaataatattcattgctaagttttttttacaaacatttcattgcaattttataaatttataattgagtgaggagcaattagattgtacttacttagttttttttccgtttataactaaaaaaaaaaaaatcctttataattaaaaacattatcagtctaataactaaaaatatcaatactaaaaaaaatacttaaatttatccaaattaattaataattataaccactaatgatataagatgatatatataatatattaaagtttttttaaaaaaaaaaaaagataaatgttatttttataatttttattagcttaatttattagatttgacctattttttaagtttttttaaaaagtagacatttactatattagttactaaatttagaattatctcaaccctaaatgttatttagttcgatatttggtagatttttttagttgaatttttatttttataattataggttataattatttaactaaacccacttataattatataaattttatttttgatataataaattattatagagaataaattcatgaatatccaaacaaatgattacagatttttccaaaataatctattcagtttactttactgctgtgagactagctactattttctccacttcatccggtcaaaagaaaacgaaaaaaacaatatacatgtatatattagaccgaccatccatgtgaaagctacgttacgtacgatttacgattattcttttctttttaatttttctttggaaataaataaataaatagaaaaaatcttctttattagaatgtgaaaactgatactctttttcaacattaatgataatggtggacaatcacattgataaaatagaagattatattgtataattatcgagcggataagaaattctcaacgcgagttgctaggatttaattaaaaaacaataatagggatcgtcaattataatgtactatttgtgattcaacttaaaaacttgacccttattcaacttaatttataacttgaggacttaaatatttacatgtgttattaatgtcaaatacataaattatggttgtggtggtgttggtggtggtagatgtttggttgtggcttgcattgggaatttattctatatatctttgattttggactgtggtttgttgttgggttccatatttcaatcttaaggagaagatgtgagttttggtgtattgggtggctctccttggttgtgtactttgtctagatcattttgttgggataaagtttttatactttgtttggtttaacgtattgtagtcgtaatatacaataattaaaaaaaaaaagtaaatattattttacattctctattttgtaaaagttattattgaatcagaactgaatttaattttcaacaattttattttttaatagaatcaactttaagacaatttctaacacgaactgatacagaaaaatataactaattttgtcatcatatctagatcagattattattaagttttattttagcaaaaattcagttaaaggtcatatttgtacatttttgaaaaatacatgatccattttatcatttaacgaaacaga

SEQ ID NO: 303015 - DNA, 2046 bp, Cannabis indica
gcctacattgtactagtggaaagtcgttacattaaatttttatgagacccgatacttaattacatcgatagagttattacatcttagaaagtattaggcaccattactaacttttagcatttttctttatttatggtctaattttgaatcgtgaatattagatcagattagctaaatcttgaacacagctacataaaactaaatttacaagtattgtccataccgtatatgcatgtttgtttaaggttttacctttgttttcttcctttgcactatacttttttatatctagctgggataagatttgaatttatgttcttgtggggaaaaactaaaaatgttttaagacattatttcaaaaatggcagaagaaaagagttaaattgctctttgaaaacaagtaatgctagctagtaattaagttttgttaattacatgtattaattagtactccaagctagaaaggtgatggacatattaacctttagatctttgccttttcaaaattcagacacatgcgaaaaatcaaattagtttgtaatcaaagaaaagggtgcaaaaacatataataaaatgcatttgaaagcaataataggaataatgtggatgtagtaatatatgttatgtcagctgtgctcttttgtttagcttcaagtacatctgtgcagtcaagaccttctttcccttctctacactgcaaagcaaagaggccaggtgggtactttccatacaaattaatgtagctaaacatagttgaagcacagtcactttgctcgtcgtttattgcgtctgcaaaagggcatgcgaattccttgaatgccgagcagcaagactgaggtgggtattgaggtcctttacacatgcttgtgattattgtatagttttgtgactcaaaatttattgcacacgctgagaatcaaaaatatgtatatgtatacaaaagaaacaaataatctttcaagtcttcttccattatgtattgtatggaaaatcatatatatgaatgaactaattgaaactctaaaatatgaaaaatttgttcatgtatatcatttaataatttcacgcatttacgcacggagaatataaaagagaagaaatactctgatcaaaacaattgtcatgcatgtattatataataaagtgtgtgtgtgtgtgtgtttggtagaataaaacttatgataattttcatggaaaagatatcagcattttagtacaatactactcttgccaaattaaatgattatgcaatatctatatagaaatgagagaacaaaaggagtttactctttttggcctgaagaagagcacgagatgtggaaccatgtaactcaaaaagggtatctgcaacaatcccaacaaagaaattagattgtaaaatatatcccaattttagttttgtttatacaaattagtaaaatataatgaatttatgtatgtacctgaaaggaaggtggtagagaaggcaaagcctagcagaagggagcaggtgaagaagaaaatatgagataggcatggttggttagcgaaagccattgttgaagagttatttctaataatctaaagcaaataaaggtggagggagacaggagaggttggtctccgtcttccaagagatgggtcacccaatttttttttaaatgcaccttttttgtttgttaatgtgtgtgtgtgggcaaaggaatgaaaagagttggaattttgaatggagaagagtaaatagttgcaaaatatgtgggacaataaagaagaggatcctttttagttaaaatattaataataataaaataacttaaatagaatgtcttaattttttttaaatgaattattaggtattgtatatgtttatataaaaatgtacttttttttcggttaaattctctcaattattattctacttgcacttaacaatccaaactcaaattttggtagtgaatatttccaaactactcaattgttagtagatttaaggtgacatctgtaacaccctaactagcataggcgtattacgtgatttttaaatatattgtgcagctcgttgctaat

SEQ ID NO: 303016 - DNA, 3355 bp, Cannabis indica
aaaaactctgaacatttagaatttgcaaccatcaacttgaaacaccagttttgcatctatatcatggatgaatagcaatttccctactgggagcatggaaacatcgtcatcatacctgattttctgcaacagctttcagaaactgagacttcattttgaatgccggaagtttctcccgaaatgattgcattgtttttaagctgtcacttgtctgcattaaaaatgtatatatctttaaaaatgaaattttgacttggaaatcaaaaaaatgcaaatacatataataacacgagcagagggaatgcagcagccaactctatcccaaccaaaacaccttcgcaaatataattaattgaataataatcaagcggaaggtcattagtattcctacaaactccatcattgaaataagtcattgccctgatccaactggcctctgttttcagggtcttaaaagcagtgtgttttaataacatttaatggggttgaggttttactatgaggttgtcaaagtattctcaaaagcacaagaaattgatggggttccttagtaacatggctgggtcaactgcatcaacataaatcctggcttgtaaccaggaaggccgcggaatgagacacaatgctttcacatcacatgtcaaagattcatagagcaatcattcatgttttcaacatgcttgagtatgtgtcatttattagatggtttgttcagcagcaactggtgattggcaatcttgtttatacagaagaaaattagttgctactctgctactaccaatattgtaacattggcaccaataatctagttatttaattttaggtaaatgtcttaaaaatatcaaatggatacaatgagaaatatttataagataagaactagaataaagagccagtgcatggtaaattaaagaactagagagatcaatatcaggaatttgaagtttgaactgtaacattttttcggtaattctacatgagctttccaaactttcctaaagcttaagcactaggccatgggccaaagctaacttggattttgatgataaactatgttgttaatgtcattttttaatactggtagaagatcaccaaacctctctggataaaattcataccatagcatgtatattcaaatggttctgctatgtagaaaatgaaaattaatatatgcttatgtaatttttatttattctttgctgtgtgctttaactcgaaaagatttctggtataaagggatgtactggagttaatgatctatctatttattggctagcatacgagtttggtagcatcaacagctttggtcaggaggttttttggggggttttgtcaataagcattatagtatggatatgttagttgtattcgcttatgatatgtattctgcattcttgatttcttattgataaaagagaaggcaacacagattatggaatataaaatcgacacattgcaatatgtaccttcattttttcctgcttctccttaagctcaaggctaagtttttgcctgatagaatcagtctcaaggggggagacaagttgagtcatatctccatcagcggaagattgtatgcctctttgagctgttgagcctgttgcttctaaagagctatttttaggtactcctacccgcgactgtgagttatccagcagatttccaactcgcctttcaatttctgtagtcattctaatctgtacaataaataacaataattaatagtgcattgaaaacaaaaagccaaaacaatgcaagaaaacattacctctttctgagtagagccatgacggtcatcaagatctgcccggtaatctggcaatggaactttgctaacaacaagagccttgcccttattatatgcatggctttctttgcagaagcacaaaaaattataataaatgtaagattaacaatacattgactgcagttatcacggcaaccaaaacactataatttttcaaagccagattgctaagtccatgccaaagtaaaagctactcaaaaaatgagtacccaaaaaaaagaaaagagaaagaaacaaagacatacatatttttttcaaatgaaaaacacaaaacagtcagaagagagcttacaagtgaaacccaagttgatgagccatgtcagctagagtttgctggtctgctcgactaaagtttcgcttaattatcaactcttgttctcctcctcctttcatttgctctatcttaccccaccattcattttcatcaagagcttccatctgtatatccaaaaaaaaaaatcacaaaaaataagacctttcactctataaactcaagaaactgagccccataaatttttaatcattccaaacacgaaagttaaaacttttgcattcactgaataccagcaagctcgatcactcatcactttcccaactttcaagccaaaaatcaaagcttttcggtttattgacataccatacagtcaagctcaatgaaaggagagaaaaaacaatcaaactaatccactatcctaaactatttttttgacaatcaaacaaagaaggttttttcacacgaaaacacttacaacacaagttagtagttagttacctccgaagctttttccctcagtttctcagcacgccagacagggtcccaccacctctgttctcctcgtccaccaccacggcctcctccgcctccgcctccgcggcggccagcacctccgccgcgaccgccaccggagttgcggccgccacgggagttggggccacctcgagagttggggcggtaagacattgagggagtcgagatctggaggtaatggcggcgaatggaagatagtcgcgggggaaggaggtggagttggttgggaatggagagtgaagagaagaaggagcagtagtacgtgatggtccgcgctgtaggggatcttagtgagagatttggaaagatttttaacactcgcccattaataataggttttgacattttcttttctaaattgaaatattggttgtaaattggttgttttaatgggaattgtgttggacaccaatatcttttcataattaccacattcaaataatgttgttccataaaaaaaaagattattttataaatacacaaaaataacaaaaaaattacaaaaatactatttcacagaattttaaataattttacgatttttttgattttatttacagaaaaaacaatttttttatgttgtactcttgttaatttgttgttgattttttgttatctgtaagttatttttttttattgttttgatgttattttcatgttatttttatatagttttcttattattttcgtgttgtctctaggaaaactgtaaaaatgtaaaaaaattctgtaaacgtaaa

SEQ ID NO: 303017 - DNA, 3360 bp, Cannabis indica
acatttgtattgtgtttttattagtaaagttctttcctcaacacaacaataaaaacccataagccatcaagctcaatcttatgagggaaatgcttagattttccaggttgccaaacaagtaaaagaaaatcaacaattaaagctttactcagaaaccaaaacaagaaatagcaatgaagaaaattcacaaacctgaggaatggaatagtaaagattgctgacatgagtaagggttccagcttgatcaaccacagccttgagccaatcttcatcgccatgaccaagagcattaacagcaatcccagaactcatatccaaatactctttcccttcaacatcgtacaatttacaccctttcccactctccagaaccaccggcgaccgcgcgtacgttccaactatcacacgcgcgtccgtctccataacctccttgctcttcaaaacaacaccatcggatttcgtcgcattctccggcgcctccactctcaagctcatgcaaaccgtcggagctctccagcggccattgattccaaatgccgccgccgccgattcgcgctggcggcggcggatatcgttcggctgaaaaggtggggttttgagagaaacgtagagagaagtcatttgcgtagtaaagtttccttcttgttttgggagtagaaagctgtttggttgccaagaaaaccagagaaaataggacaaagtttcaacctttatagtcctccagccacccggtgatgatacactcagacaaatttcaagactttatttatttattattattattattattttgctgagaatttattattattatttggttgaagaatttagggctagtagtcaaatggtgaacgagtaatatttaactactctaaaaaaactactctaatttcattttcttaaaagcaattaataattgaatcatgttcaacaacctaaatcacacaaatatgttttaattcttaaaagaagaatttgactaatatggaggatttaagacctatagctctttgtaaagatgtggtgtgttctaaggtcttggccaatcgtttgaaagtttgaaaggtgttcttgtgattgttatttttgagaatcaaattacttttatttttggaaaatgaatttatgacaatattttttttaaataatgcattatttgaaaaagaaaatgagttggtaagaaaggatatatggccttgaaactttatatgaataaggcttatgatcgtatagtggccttttgtgtgtgttatgatgctttaaatgggcttccataggcgtttggtggatttaatttatcagtgcatttctatggttagctacacggttacttgtggaggttgagaatcaaactctattgatcctgctagaggtatttgtcaaggggaccttttgtctccttatttgtttctcatatgtgctgaagttttcgcttctctcataaagaagtttgaggcttgaggagatgtgcatggttgttgtgtttgtaatggtgctcctatgatttctcacatgttatttgctgatgatagttacatttattgtaaagcgaacgagaggaagacttcaaatgtggttcggctccttcaagtttttgagcatgatttaggttagcaagttaattttgccaagtctattattttctttagtgtgaatacttctcagaatgtaaaggatagaatgtgtagcttattaagcatgatggaagctcctgcaaacagtttgtatttgtgattgtcgtgtactatggggcgtaataagaatgttattttggggttctgaaagataaaatgcaattaaaatccaaaagttgcgatggaagatttttatccaagactaggaaggaagtcttgttgaaggtagttgctcaggctttacctacgtttgttatgtcagttttattactacctattgatatgtgtaataagttggaggaaatgataatcaaatattggtggagttcaagttttttcgtcaaacaagaggggtaaagttgggtgagttggaaacaattgtgtgtcatagtatcatggtggtctggttttcagtattttaagagatttttaatctctctatgttaggaaagcaagcttggcgtttggtggtgaatgattcttctttgattggtcaactgtataaagcaaggtattatcctacaggttctttttttaacagcttctcttaatgataatctagtttcatatggatgagtatttttgaaactcaaagccttattaaattaggtgtcagacggaatgttgggcttgattgttctattaatgttcttcatgatccccggtttcctgacttggatgatccttttattacttcaccattgataggtttggaagattgtaatagtctaattgtgattggtggtagggattgggataatgaaactatttctgatctctttaatgttagggatcgcgagataatttttaaaatctaaatttcacaatctgctttgaccaaccattgttattggtttcaaagtgttactggtattatgttgtcaaggatgcttacaaattcttcattcgcgtgagactttaacagggagtgataccaacacttttctttggaagattgcttggaaactttctattccaccgaaggtgcatcactttctttggcatgctctctcaggttgtttaccaaccaaagttcatttggtgtcgaagcatgttccaattgatcttctttactcgatgcgtcatcaagaggaggagtctatttttcatttattggttcaatgtagttttgtgagggcatgttggaaccgaattgggttgagcactaagagtgtggtggttgatgatttttgcagctggttttctagtttattgtagcgttattctagtaggctacgagaggaagttgcgatggttatgtgggatgtttggaaagttggaaatgagctggtatggaacaaaaaatcttcttctgcgagtgatgtggtactttcagcaagtgttgttcttaatcaatggcatgttgctcaaactaaaaaacaattatctttgcttattcctctcggatggttgtgagcattggataaaaccagttttgaatgcgattaaggtgaaggttgatagtgctatatttgaactagatcgtcgttggtttggtgcgggtcgctgtgtgactcagaatagctcagggagacttttataagctttttcaattagtacacaagggtgtgtggatgttatagtggctggagtctttgggattaaggaagccttatgttagattaaaagaaaaggttggactgatgatcaacttgagataaatagtttggtaatagttcagacattacaaatataacgtccccgcttcaagcttctattaggcact

SEQ ID NO: 303018 - DNA, 3174 bp, Cannabis indica
tggagtcttcgattattcattattccatctttttatcatagcgaataaaaggccggcagactttacatagaaaaaaaaagtaaacaaaactcaaaaaaaatctataaagtgacacgcatttaaaacgaatagaacatttgggttagatgtttgttgacaaacgtattaatgtaactttggaaacaatatttcattctcttggacttggattttataccccctttcttttcctccgtacggatccaccaagcttttattttagaaacattgttaggtactatatatagtgttcatcactctaatgagatgatattacttataaattgtattagcaattttttataatcaatattaaaaactcaatacaattaatattctagtctatcaataacatagtcgatcgtcaacataaaatctctacttaaaggagatggtcggggtctttatatagataatccaaaagtatatatggtattaaaaaaatctataagtaagcttctaccgatgaggatctactgagaactttatatcgagatagatatatttgttgagaatggtgaccttaaaccctattttttagaattacgtataattatatagtattttacatactatttcttatctaaagagatctattgttatttaatgtaaatattaagtataaatatatatatatatatatttatatatatgagattatgtatataagagaatttaatttaagaaaataacaaaaattaattgtctgtgataatattaaaagtgggagctaacttttatatatattagttaagattatcaacacactttacttaatatctttggtagaacaatctatccagattggtaagtgtacagtcaggaataggtatgccgaattaatactagatcgtataagactaggaacacaatgaaatatagaacttcttttggatctgaaaaaaaaaaaaaaacttattagtgtaggtaatcggacttccaaattctctcaactctctttaaatagatttattgtgtttacagaatgagtaatgagcttggaaactgagaccctatatttatatttatataggtgacacatctcatcaaaatctttgccacaatctaatttggacaactaaatagttttgatcatatttagaatattttatcaattgaactaaatattaacttttgaataaaataattagaattaatataattaataattctaatattagaaaatatgaatatgttacactgatatggaatccacatttctttaattgaaactagactaaatattcatttaagtattaatagaggtacttaaaaatagaggagtaattttctattgtgaatgaaaattttatctatatatgacttacagaaatttttgttagactattaaggacactaattcacatataaaaaaaaataattaaacaggttaatagacgaagatacctaactctacttatgaatatttagtggaagatcataacccatacaatgaataaaatattggtcacaattttataaaattagttgataaaatgtctatataacttctgttttaactgtatctaattctcttgcccctttgtcgattcttgtagattaagccatgagcaaggcttcaatttgagcaatcatatatgcatcttttctggttgttatagatgttacaaaacatcgtattaggaaataatccattgaaaatagtctcaatgtgatcttgtgtggattaaacatggccaatagtagcaagaaaatcaacaagattcttgatcttgaggagatagtcattgaggaaatctactatcttgcgcaactgtatcttataaatattgatattagggcagtataatgttcattgagggggctccatatctgaacaattgtatgaaaaccaatcatacaatatgtagttttcttggcatcgatgataacaaccaagaaacaaggaggttgtcttgttattctcaatcttcgaactcaaggttgacacgattagctcattcatctattgtgatgaactttggcaaagctctaagaaaatcaaaacatttgtggagttgtctacctttgagtgaagcaagaatttggtggcgtcgtggaagagaattatgtttatccaatcgaatcaaaatagaatgagtgaaagaaacagaagattgatgtttttggtagagacaccatagatgaacttggtgttttgagagaagcattagtttgggacgaattctccatgattgaagggtaaacgaaaaagctctgataccatataaaaaattcaaagaatgaatttgagagaaataataaattgtattaagtggagaaaatgtttacaaagtaacttatatacaaaagcttggttacataattaacactaataaaacacttaactaacacctattaaagcttaacaactataactaactagtagttagttttatcaatctaattatttacaatattattcctaacactttactttaccaagttctataaatagaatcttaaatggacaaagacaacatcaatagattttttacaagaaattttgtatcttcttctctctttttaatgtgtgccgaaccaagggttcattttctaaaaaaaaaaatatttatactcgaaaatacaaaagtatagataaatttccccattaaaaaatgagaccactcaactttttttataagtgcaaaatataatttagaaaacaactgattatacaggcaatacccaaaaacacacactttaaatttggtgtgaattatagactaatttggaaaatactttttgtagtaatatttatgcaagtaattactgcaaaatggtgacaacatgatactaatttttgtgtaactaagatcacttttattagtctcaaccaaaaagaataattgtgtgactaaaaaacataacatttaactaagttatcactcgagatatttaaacagtcgaaaaaaataaataatatataagtgattaaaaaattaaaaatattaaatatttatgctataaatacgttctaccttaatatttatgccacaaatacgttctaccttcctaatttttcagagaattacaagatactttcgttttctaattattaggagcctgtttggctgtgttttcagtttttagtttttagaattgttttctcaaaagtgagaataaaaacagttt

SEQ ID NO: 303019 - DNA, 2308 bp, Cannabis indica
aaaccaagaattctgttatataagcacactttatatagattagatatatcaaaaaaataaggtgggaagagcacgtgaagtttgaatgggaagggaagattttattattaatgaggagtaatagcaggagctgttaaaggatggtttttttttttttgaaggaatattcataagttttattaaacttcaaattcatctaccaaatatgatagtatgtagttcagttgagacatttcctatactaaaattgcattcaggatataaactagaagcttttacaaaagtatgagctgctacgttcactaaatgcttaacaaaacaaaatgaaatttgttttttagctccgcaagcaacgatttacaatccttgataatcaaaccaaacaaaaaaagcatttcaaaagagttccacaaaacccgcacaacaatcaaacaatctgtctctattaacacaagctgtaaggatgttatgaagagacaaaattaaactattaacacattaaattgtcataaataaggtatatacgtaaatataatagctgatcatgtgtttcctgtaaataaaataaaaaacgatcaaattgtaaattcaaagttcaacttcaagggtattttagacataagcataaatcttggtttgtttgtgtagttttacgttattgattccacgcgcattttcgttagcttaaaatttaatctatatatgagattttatcacgttgtattgtgtatagtatatataataattaattaatcttgtcaactatggaacacgtactaagtactaactcaaattggatttgccacacgctagctagagctgggtagcctgtactgtatacgtgtatacattttcaaatgaatataaaaactagatttttatgggttttgccggccttatattcctaataaccttcttttttttttcttccatattttgattgtgactatacattaattcttgatttagtagtgagtaattaggtggtcgtcattaaaccatacgtgttaattaaaactattgaaattgatcgagtttattagttcttaaaatattaattataccatatatttaaaagggaatgctgaaggtaattaaataaacataatataaaagcctaacacaacagttggagcaagctagtttagtttctaaaagagtaagttcttaatggctcagttctagttaaagaccccacattttcctgaattagtaagaacagtcagttccactctctaaattcaggataatataaattatataaatttaattaatttttattagttgaagtcatattttatttataatcaattaattcatgatcaatgtaatatttagagttaatattagaggtttggagtagtgcaagttggtgagaaaaaaaggctcaataggttaattggtcaagaaaattatgatacccaattcatgcacttcatcatcaatgtatagtgcagcatacaaatacatataaaagatggtaggtagatgatgatgacttctaagctccaagtttttgtaaaggatgggcttttcatggaactttggtacatagatatataaaagggattatttctcaaatacacaaaaataataaaaaaattataaaaatacattttcacggaattttaaatatttttacgatttttttattttatttacaaaaaatacggtctttttatgttgtatcattgttaatttgttgtttattttttgttatttgtatgttattttttgttgttattttaatgtcattttaatgttacttttatgtaatttttttgttgttttcgtgttgtctttatagaaaattgtaaaaatgtaaaaaaaaaatcttaaaacgtaaaaatataattttttttacaaaaaatggtcatttatgtaattatccttaaataaaaatatatatatataaactaattttttttagattaataaataattaatataattttttctcaaaatatttttataagtacccaaattgatctatagtttttcaagatttaaacttttctttttatttttaaaaaaaatgcaaacaattgtttttctgttttcttttcccacatcatgatgctatattatactgtaactttcgcagcggatatatagaataggaaaattctataatgcacctccttaaaagagatacaccgatatatctctttctgttttagtatccgaaataattttttaatcaaaatttttttcatcgtcatatagattatatatagttattaaagacattctgcaaaattttaaaaaattcagaaaagtttaagatgccgaaaattgcgttcaagca

SEQ ID NO: 303020 - DNA, 2753 bp, Cannabis indica
agttcttactcaatcacagagaggctctttaaccataagattcatcttttgctgaagaaatttaagaacatcatctcttccttccttaatcaacaactgtctcaacctccctaaagtcacaccagaaggtctaattcccttctctatcatctcctccattaaaacacaagcttgagtagcatcacccttctcacacaacccatttatcaaaaccgaaaaagtatgcatactcggaacaaacctcttcaacttcatatatttccacactttcaaagccatctcaatctcatccttctcacaaaacatcttaatcatcatcgtatacgtgtctgaatccgcctcacacaccttaatcatcctcctaaacaccttaaacgcctcttcagtcttccctctaccgatcaaaccatttaacatcacattacaagtcctcgaattaggcataacccctttcgaatccatatcattcaacaccctataagcattcttaaaccgatcaaccttaataaaagcaccaattaaagcattataaacaacaacatcagcttcaacacccttactttccatctccataaaagcatcaacagcatcttcaatcctattctcaaccccataagtatgaaccaaaacactataaataaaagaagttggtttacaaccattacaatccattgtcctaacaatcccaatggcttcatcaactctcccagctttacaaagaacatcaaccataataccataagtaacaatatcaacactaataccaaattcaatcatatctctaaaaatttctctagctttaggcaaattaggttctttcccccacccatcaatcaaaatactataacttttagaatctggctcaaacctacccttcatagaatcaaaaacctcttgagctttcctaacattcttagatttacacaaagcactaagaagcccattaaaagcaatcaaatttggttcaacaccatacttttccataacattaaatgtataaagagcttcatcaattttttgagctcttgtatattttctcataataatacaaaaagtttcaacatttatcaattcctttgatctcatactactcaccaattcccacattaactgatactggcgtattttagcaagtgacccaatcattgaatggtaagctctgacattgtgggaggcatagcttctctgcttggcagcccactcaaagaatctgtaggtgagcattccagcattctggaatctaacaaggacttgttctaccatctctgttgaaaccttaactccagtttggtctagtgctgtttggattgatgcaactggatttgacatcatggctttgcagattctttcagttgggtctgggatttccctcttgggttttgtggaaaaattgaaacttttccataagtttggcttggtgcaaagtttttcaactttgttaaagatcatttctttttgatgaaattttgagaattgaggcttttttttttctcggatcagtggggcttggtgagttcatcaatggtaggtagagagagagagagagagcgcgttgcgttagccaaatgttacacagatcgagtcgactgagtcggttgggagggcggcgacggcgagtcaagtaaagttcaaaactattttatcacctattttgagttaatagttagttaatttctaattattattaaattaaaacatatcggatttgatattaaattatactaataatattatgacactctttttacattaaattttttatataaaaaattagaaaataaagttagcacgctttgcatcaacatgtatccaacatttttagcacgctttgcaaataattagtaattttttataaaagtaatcagctaaaatactacgtgcaatctaatcgggacatatcttgcattgaaaacatgaccataattaaaattagaaaaatgagttcatcagctacttgattcccgaatcgtttgacaaaaaaaattataataaaattaaaagaaaaagattatagcatcacagtaaagcttcaatatacttatattcagttttatcccctgctcagaagacacacgacaatggaaaatttacaccaaattcattcaacctcatagattgagcactcaacttttgtaaaggtacgaaattgtactactaacaatttagttcatgtcaaaaacagagaatatgaactatcgaagtcagggtactaaccttgtgacacctaaaacatcatatgaatatcagaatttatcaaagagtattctttaatctacatttgattgtcagggaccttgttcctatcaatatcgaccgagtcttatgactttggagcaggaaatgtaaaagtctgcctaataagttttatctacattggcttttcgctaaatttatcataagtttagaaactttaaactaagttatgtgttttattttctaagaatttgaaaataaaaagattaaaaatatcattacaaaaaaaaaaaaaatacctattaatcggaaataacgccgtacgtccaccactgttaaacgcttcgttcttctctgcaaccacaacaaggtgtaccttgagatatttggtgtctggtaaggtatggtgatgatgttgaatatgatgaatatgtagacaagtttgaaaaacaaaaattgaattttggagatgatgaatctgatgaataccttgagatattaatattctctgttaagtttgaaagagaaaaattgaatttttgagtagagatagtggctgc

SEQ ID NO: 303021 - DNA, 1731 bp, Cannabis indica
tcataatagtattaaacaccttaatatcatataataatgctctttatctttatatttagatggtcattatgacacatgctgagaactaaattaagtaattagtaaacaaaaaaaaaagaggttgatgttttgggggcttaattaggtaattgatatatagctaattatataatattttatgtatatatatagaatatagtagttaattgatttctgttgaattggatgtgggcgcaggtggttgccattgcaccaaacattccagctctttacgagttacactttggggttccaatggctggtgcaatcctctctgctcttaattacaccctagatcataccacattagccaacatatttctccaactaaatcctaaattcatttttgttgactaccaatttcttgatcttgttcttaaagcattgcactctctcacacaaaatcataatcatattaataaccatcaaccaccaccaacccttgtccttattccacctaatatacaatcctcatcatcttcttcttcatcttttaatttgccacaaggttccttggattataaccaattgcttgagttagcaccaccacctcatcttcataagtttgagatagtacgacgaccaaatgatgaacgcgatccaatctcagtgaactacacttcaggctccacaggaaaccctaaaggagttgtgtatagccatcgagctgtgtatctcaactccatggcaaatattatcaacatgggcatggctaggagtactattactagtactactagacatgctactgtctttttatggacagtagacatgtttcgttgcaatggttggtgtttcccttgggcgattgcagccattggtggaaccaatgtctgccttagaaataatgacatctccgcagatgtcatattcgacgccattactcaacacaaagttactcacttgtgtgggaaacctacccttttgagcattctggctaaagcatcggaaaataataagccattatcatcgagagtggagcttgtggttgcaggaacactcccgtgtgagcatgttatgaagaaggtgagcgagctagggtttaacataagcaacggttatggtatgattgaggctcttggtccaattattatcgaaccatggatacctaatgataatgtaaaagcaaaacacgaccaacgtttaaggagtagtgttataacaatggaaggattcgatgtaaaagattcagaaacaatggagagtgttccaaaagatgggaaaacaattggcgagatcatgttaagaggaaatactttgatgtctgggtatgaaaaaccctaatcataataacaaagaaactcatagtggtttcaaagaagggtggtatagaacaggagatgtcggagtgaggcacccagatgggtatgtagaaatgaaagatagagccgtggatgttgtgataagtagagaaggccatgttgtgagcacactcgaggttgaggctgtgctattgtgtcatcctcttgtgtcggcggttgctgtggttggaagaagattgtgcaaagaaactaatgatgctaatgagcaatgttcatcaaatattagtagtctttgcgcttttgtcaagttgaagatagagaatactaatactagtaatgctattagttctcaagtatattattgagttttgtaaggtagagaaatttgccaagttatatggttccaaatgttgttatatttggagatttg

SEQ ID NO: 303022 - DNA, 3156 bp, Cannabis indica
aaaaattgaatttaaatatttatttatatttaaaaattaaacatacttatgcagcaaattaatcattatcttttctatacttttaattttgttattaaaaatattgaatggttggagatgacgtattaggaacaatattacatattctttaaatgtgtcaggttgtcaaaatcgtaataaatatatattacaaacaaatccaaagcaaatattttcttggacagtccacttgattctaaagtgtagataataacaacttctcttcttcaagagtaagtactctcttgtcctcggagacgctttaaacattgagttaagtatactgttagaattttgggagggttttatgtcaaaaccaattcgcaatcgaatgattagctcattcatcttatgtatcacaatttatttccacacattagcaatatgtgactaactcctaatacacactcctcatgtttgggcctagaaagtgtggatataacgaacgaccatttaagagaccacaggactgaacgtgaaatttgaaagaatctcacaaggtcccaaatagaggttaaaggggagacaggaaaatacctgtttggacttaccacactttggctcacaacggatcacaaacgactttttagactggtggcactttgagctcacaacagatcacaagtgactctgataccatgttaatattttgggaatatggtaaatgggattccatctcaaaaccaattaacaatgggaggagtagcttattcatcttatatagtacaatttatttccaacattaggattgcgacttactcagtataacgaagagaacccttatgtacaagcacactagagatttaggtaagaactttatagtttcacccctgtcgtgtagaattctactggggatggttgcttgtggattgaaaggagaagctttagagcacatgatgtttttctttaggctgggaatggggttgaaaagcgttgctgatgtaatctctgagtctagcagaataatggcaatggtttcatctgacaacgcaaggaccttttcccttacatttctcctgtgtccatagcgtgtgggtggataagaagtgcgagctcaactcctcatttcaacatcttttgaagaccatttatagagcagagtccgcggcattagatttttgcaacaaggtaactgttcaattttcttttctgtcgtatttttgtatatttcttcatgtatttttccttaattttaggtctttttgtctttttgatgattaagagattcttcgcacagagagacagagagagagtagatgaattcattcattctcatggttttgtatgtcaatttttatggaagattgaagagtaagtagctgaaataaatactcgggtgcagaatgctactaatggactcatcaaagagagtgttccgaagcagtttattcaaaaagatacttttctaatccttgcgaattctctttatttcatataggtacttgggcagagccatttcttccagttagaaatgttactaagattttttacaccgtagatgggaaaagtgttcaagtttcctacttgactgagtattgcttggtctattcttatagatcctctcaaggatgcaagattcttaagttgccttataatgttggcaatcaaaatgagctcaacttttccatcgacattttttcttcgatcctgatgagaaagatgggctgcatgagttgatgaaacaattgagttcagactcagcactattgagtctacacttcaaattcaatgagaatgcgaaggataaagattccaaagttcaaacttgaatataacatggaagtttctgatatgatggaccgatggggtttaggctgaacattaaggacgcagagatgttggaagatgttgatcccaatgcattcactaaggatatgatggtttttcaaagttgtgttgaaattggtgaaaatgaacatgaagctatagctgttcagacgttgataccagtactagagattgttaatcccctccttcaataaacttcaattcagtgcttacttaaggctatacataactttccttgtaatttttaaggtaggcttttgtttgatcaagattttgcttatcattgcccatcaagtcgtgtgtcatcatgatataatgtctcaaaattatagtttattaagtcaggttgtatggattggattgaatgacaactattttggagaagttgcttatcattgcccatcaagtcatgccatttttaactcttgaactatattcattaactggttggtttttatgggatttcatgttttgtttagcattgatacgatctttattgtgtttctagaaattggttcatcacactttagtgttcatcttcctttatgtgtacattagtttagtaaatgattcctattttcattgcaaatcggtaacaccaatacgaatcaagatctcctgtccaaatattgtatctagggctgagcacttggcctactgggccgaccaaactggcgaacccaacccggaattggccaaaacatgctcaaatttaatgggccgaaactctctttggttgaaaaatgcttaacccgtcacttatgggttgataatcgggctggagggattttaacccaatgaacccaacccgggtcgtaaagcccaataaaatttaaaaaattaatttacatttgaataattataaggaatcagatcagcagccacacttgtccaaaccctaaccagagccacttttttttttttgtaaaaaaagccctctccactcactctcaaccgtgccaccaccactgtataggtctcccacccgcaccaccatcttccagccacaccacgccaccaccgtctagttctcccaaccataccactgtgttttcttcccttcggctccgagagtggtgagtacctccattgtaacttttaagaacttctttatattttttctctttgctggaagtaaaagtttttaatgtcaaaagagtctcatttttttttctatttctttgaaatttcaggtcacctacaaaagtttgatcgtcgggagtccgttgcttaggtcgtgttgttgttggtgtccatttgctcagtgctctggagcaagtaaggttgacatctcactttttttttactcttttaatctgattttattat

SEQ ID NO: 303023 - DNA, 1180 bp, Cannabis indica
gataaagtatctcacctataaatatagagtaacggtcctcgagcttctcattcattctgtaaaaataataaattctatctaaaaagagtggagagagtttagaagcctcattatctacactaacttgttttcttttcttttataaatcagatgctcgtgtgggattgaagctcaaaaattaaataattgaagatatttcacatttcataatgtatataattgatttaatttcatatttcatacaaaattatatatgtttcatgttttaaataaatgtttttgcaacatattatcaataacactttgttattttttttagcaggatatgtaagtccactcacagatttgtgatatatattatatatttcaaattaaaatattcatttgagcaaatttgattttcaaattaagtattgtacatagaaaatagtcttatctatgattatggatttggaaatcacggtctagaaagttagaagatagtttccaaaggtggatgaaagggagaaatatagctatgaaagaaagagaattaaagaatctaaatagtagaagagagagaaagtttcgaaagaaacttgaaggaatggaatggaatgtgtattagatgatagaagataatcaaagaaagaaatatagaatggggaaaaagggaagtagaaagaataatagacagagagaccacttctcttctctccacacgagcttgacatgacaaaataaatgcaaatagtttgagtgcattctcattgggtcccaattaaaagaacatataaccttttggcatgtatgagaggtcatcattgctaattaattaccggcatgtttacataaactcaatggaatcaattgtatacaattatttactaaattttaaatgaagaaaaaatatctcacacaaattagagtaaaaatcgtaagaaaatttttctctattttcataggaaatacatttcatttattgacttattttattttaattttaattttattacaataaaataaaaaaagataaatatatttatcagaattctatacataaaaaataattacatgttcctataattataatttattaaattaaaatttcaattacctttttcagttatgtaaataaaataatataattttaatttttttttcgtaatagtataataaacagcataataaaatattattt

SEQ ID NO: 303024 - DNA, 1090 bp, Cannabis indica
aaaatatttggccaacagagagatactataacttacctaatagggcacatagcacttgtcactaccaaagaaatgccacttttaaagcccggaataagtgttgctacgagaacttaaatagaacaaaatgaaacaatttatttaaattatattcaactaactacaccacacattcagtggtcccatttttaaaactcactaatattattacagcaatttttttctttttcttagtcaaaaataaaaaatcccattattaaaatttacacgctatgccaaaaaaaacatttatataggaagaagtaattaaaattgatttgccaactttttgtgacccaacccaaccaacactttgatctcataaaaattggctgttccctcattgagtatatatagcttccctttattaattatgattgtcacgtatgcatatatcattttattatatataatatattctatatgttttcaaaaataatgtgcaaatatgtatattatatattatattataaatacatttataccaaattaataataaaaatatatataatattaattatgctagagatcgttcgacaaagagataattgtagctaggataatattaataatattcaattgtacactcatcatattttatctaattaagtttgaattttatattagtatattataagttatctaatgtttttttcgtaaatataagttatctaattacgtatttatattatatatatgattaacactatacatcaatcttaattagatgacacgctaattaatataaaaatatcattactatgaaattataacattccatatttgcatgcatattgcacgcatgaaactactgcaaaaacatgtttcattgacaaatatgagtgattaagaaaatactatttagtgaccttttagattgggtcactaaaccattccttagagcgcgttactgtagctttttatagtctcacatataacgtcctcgcttcaagtctttatttggtctttacacccacggaatgaataactcttatacacgagtacgccaatgccactctggttgcttcttggattgatgactgaccctaca

SEQ ID NO: 303025 - DNA, 2531 bp, Cannabis indica
ttgtgattaaaaattaaaaaacaaaagtgttaccaaacaacaccttacgagacatctaattattctctacttttatatataaaaggagtatggatatacttttcaattattccttattataataatatatttaactgatgatagacttttctgaaattaacttttccaacaagttcatctaactttgaacagaccgttacacttagatggatgtaaaaattgaactacattttgtagaaaaagtaattttctgatatttttaataaaatgaactatactttgcattttcaacattaatttatatttccattgaagatgcttttttagatagatgagagttgctaacaccactcactcatcatatttcatataagctaaaaaaaataatattttaaagaatattactaattaattatagggagccggcactattgtgtcgaatataaaatatacaatttatatatgtatatatatatatatatataaatatgaagggatcgttttatagttcttaaattcatagccccagaacctcatttcctcgcctctcatctatagcaaatactatattattataattgttattactatcatagtaacttacgcatccaataatgggaaatcattcttcagtccatttatcagtattattcgtttcacttctactggctgtggctctactctccttgtttgttcttccggtatattcaacttcaagaagagctcttcttcatcatcaaaccactgcaaagaaaacgggctttagggtgacgctccatcacgtcgatcatggcaagaacttgacaaagcttgaacgtcttcagcgaggaatcaagcgtggtagccacaggttgcagaggctcaacgccatggtgttggctgccaactccgattcttcttcttcttcttcggtgtttgaatcccccattcgagctgggaacggcgagtttttaatgcagctatccataggaaccccgcctaatgcttattccgccataatggacaccggcagtgacctcatatggacacagtgcttgccatgcgagacctgtttcgatcaacccactccaattttcgacccgagaaactcttcttccttctccaagctctcgtgttccagccagctttgcgaggcccttccccaatccacgtgcagcgatagctgcgagtatttctatggctacggagattactcttcaacccaaggtgttttagcatcagaaactttttcattcggcgatggtgatgaaaaggtttcggtcaatggtattgggtttggatgtgggggagacaacgaaggagacgggttcagccaagggtctggtctcgttggactcggacgtgggcccttgtcccttgtttcccagctgaaggagcccaaattctcgtactgtttgaccgccatggacgacactaaaacaagctcactgttggtggggccattagcgagcgtgaacaccacgcattccggcgctaaagtcacaacgcctttgatcgaaaacccatcacagccatctttttactatctttcccttgaagggatttcagtaggaggatctctcttacccattgaaaaagacacttttgccctcaaaaaagatggtagtggagggctaatcatagactctgggacaaccattacgtatcttgagaagaaagcttttgatattgtgaaggaggaattcacttcccagataaaccttcctgttgacaaatctggttcgcagggtttggatctttgctttaacttgcccaagtattctacttcagtggaagttcccaagttgtcgtttcattttaaaaacgatgccgttttggaacttccgccggaaaactacattcttagtgaccgaactttaggagttctttgcttggctatggggtcctctagtggtatgtccatctttggcaatattcagcagcagaattttcttgtcgtccatgatctttctgagggaacaatgtcgtttgttcccacgcagtgtaatcaattgtgatcataactttaatatttgtgtactatcgtatgttttgtcgtttcgaccttttatttttattcttttattaatgaacttaatttgcaatacgcaccatcatatggtatataatatatatatatatatctattctatataaagtgtgcctatataactaaaattcttggtttttgagaaatttatgggtgacttttaatttttatttaataaaataataaaataataataaaataaatcccattaatatttgaactgatatttgggtgatttttaatttttatttaataaaataataaaatattatttatatataataaaataataataaaacaaattccattaatatttgaactgatatttgatgctaaatattagagaatcgcaacacaataaacaaatttcattaatatttgaactgatatttgatgctaaatattagagaatcacaacacatttaaaaaaaaacaacccgggatttgatactctgagactctcaattaaaaaaagtaatatgctcatcaaatttgtatttat

SEQ ID NO: 303026 - DNA, 5216 bp, Cannabis indica
  modified_base (5190)..(5190): a, c, t, g, unknown or other
tttaaaattatactattataattaatgtatcatatatattataattgtatttcatatattctctaatatattatccattaattatttacttttagggcataaatcctgacaattatgtatctctaaaaattagtatgcagatttatcaattaaggtggtagtagaagcataaactgaagtccaaaaagtttgggccattgaaaccgaagcctcaacgatccaggatgaagtcattatcttatttcacttgtgataaataattcattaagttaatacaagttcactaatggtgaagaagtttaggctttgacataagaaataaagttgaattctaaatggttcaagcctttagaattagaatcttatcaagacgaaagtaagaaaattttatttaattctctatagtataaaaaatattaaaaagcccaagacttgggtcattggaaccataacctcaaggaacttgaaaagtaaaaatttcacgaaaaaaactaaatataaatgttgacatcctaatatctaggcatttgaactggaacctcaagtagtccggaagtagactaacttagcaagtaaaaattatttaactatcaaaatacttaataaattaaaacaaaagatatagtaaataaaagttgtactaaattaaaatttacacatccaaaagccccacaacaatggcaaaattttatcttcgcgtaattaaaaagggagaccatcgtcccccaaaatcaagaaaaaagataaagccactcaaagctggacaaaagtgttggttggcacggaagcatcaaggattgaatctgcagtaaaagactgaaaagagggttggataatttgttcctcagccagaaaggcagaatttgatctagaatcctcaacttccaggacagaagaaatctttattctttcaagttataggatctaagagagaaattcctcttctttcccttgaagaagctttgtgatatttggatctttctttcaaagtagatgaaaattagctacaaagatattgaaaaattcttctactctttcagccattgttgtagctaactcctctttcaccatgttctttgctgccttcagtttagctaaatctagctccacttgtttcttagcgactattttacgctcaacttccagaaatccatcttcagcatgggttagcttggggatcatatcaagttccacctcagcaagcttggtgaagacctcattctgagcattaatagcaaaagatcaaaagttggtcaacaatttaacttcttggtccaagtcatgaatttttttgaatattttctataatctctttatttaacctggttgcctcaagaatagaattattggctttgttctcatatttctaaacttttatctttgaggcttccactcgattatctagcagatagacctgagcctgataattttgatagttagctttgtagtcatctccatgcttttgtagtgtccatacttcttctttgtaactagctaaagctttatttaggcctgactccaatctttctttaacttgtttctccactagctctttagtttgggtttgggctttctatagataaaccaaggcttcctcattcttccagacagaaccatcccgttctgctctaagaatctctaactcttgagacatcttctccatagcttcaaagcacctctatgccaataagttcccatggaaaatgttgaaagaaatcaaatacaataacaagtattaagaaaaagccattgtcaaatgtatgtaagaatacttaccctagccaactgctgtcagcaaaagtcagcaaggatggttggatcttcactagtcatcatggcccatctctccactcctagccaacaataggtgtcactatttatctctagaagatctgccgtaaatggagccaaatcacttccatctatagtctagagcctttttgagatcgcctgacagtcgaagacaagattagatacgccaaatctcaccgccaagtcaaccaactcagccttgtgtctagtagcaattacattggtctgttggaggactttagttgcctcagcctcaaacttcttctggataattaatttgacttctcgagttagacacgtttctctttcagtggctctaatggacgagcgagcaaagtaaaagtggttaaaggaagtggacgaagagttagctttgcggattggttttgaaggtgtatgctggagttaagtctagcatctagagacttggggtccaaacctccttgccactacgatagcttctcctttgttctgatattatcttttgctcttaagcttctttgagctccacctctttttgggcaaccttttctttctcctacctctgtcaagaagccaattgttggattacctctgcttccatttgcccttattgtcaatgctcgacttgggcctcttcctattgaagatggatctgtcatcaccaccgtcatcttcactatccacctcaacaacaatgacatgttgagtggaaagtggaacctgctttaaatgctccacttgaagagccaaagagcaagtaactttttaagccttggcctccgccacattttgttgagctcaagatctaaggtagcttcctgaataggtgcttccaccacgtctgttggggtacaagatcttagaataatttccaagataagaacttgagaagcagcctcttgcaccttagccggaggtggtgattctttaactccattctgggaagatgtcttagacatgcctttccctttatatggcttagcatcgtccttggcctccttggttctagcagtgatattccctaagaagtcatttacaagacccatctggatggtctgggggttttctgtaaagaagaacatgaaaactttagtaacatggaagcaataaaaaaatcagtttcaaataaaataaagaagcacaagtttgggttcaatcattaacactactatattttggatacccaaaatcaaataataaaatgtctttcctacctaagaaagtaccgtattgaaagaatcttagttacatcatcaagacgaatgtatctactttaacagactagataggcagaagaaaatttgttgggctttcaaccatttaatctaccctatcataaaattcaattatggggtatctataatgatctaactccaagaagtatgggtcaaagtcttccataggcggagtacaaagtaagccaaaaggggaattacctcttctagatgtgcttgcccccaaagtgccgccatctgagatagctactttggaataaacttcaagctctatttcctcactcatggtctctgaatgtagttgggcccaatcttttagtaatcttttatttttcttgatggatttatttgcctcatcagtgactatctccacaatgaattctttaatttttggagggtcgctgtggacatctttgacgtgataggcattgatgctctagtgaggagcaatcaaaccaacttgcctaaggttagttgaggtgacaagcttctccacttttaggtcctctagagaaaagcctcggtacaaggccttccttccaagcaagaaagtggtagaaactggacatgcaatgtcgtctatttatgaagagaaaaattccacatcagataacaaactaaatgatgtgaatagaattagaaaaaatggtatcatttacatacaacattaaaatccaaggacagggttggtaccctctttaatgggaagctagtggtaaaaaactagtagtctcagaaattatgcgtaagtgatggttggataaaccagtgctctgtatcttttttcacgacgatagaagctaattttgctcatattcttctatatggggtcgattctacttggtaaaactaaaggatttcctctagacacaaaacatccaccttcttggcttgatagagtataaatcatcctaccaacaagttgtagtcttagggaataaattggaacggagcaatgcctacttctgcacaaaagcgtgcaaagtagctcttaagcgaaaggtgtgctcccatctcaatatggggccaactccacataccaaagttgtcaatacacttgcatgggaattcccccaaaatagagagcctattcaagaacaagcctgaacaatccccttcatatgcacgaaaggactcataatttctaaacttgtttgtgtattaatcaatctcccatggagatgagttatacacaactgatggagttgtaacttatacttgctccaaaacttcaacttcgttagcttgaatagcattagccatggtggaaaagaaaaaatagaaaaaatcaagcagttaaatacccacacttaagaagatagcaagggtacggaagtgtcctcccttaacactgcttggagaggtacccaccggaccctacattcggaagaaaaattcttgaagaacattttgctaggatgatcatatcaggaacaatgaaataaaatcaaatgctactatgtgtgtcatcttgaaccataatgatgccaaacagaggaattaattttaccaatgcttagtgctaaattttaattatttcaattcactggtaaagacaaaagattgccaaacctaatgatgtctacaagcaatatgcacataaaatatccctatttcagcaaaatgtttaaagtttctcctatgactaaaatcatattcatctacctagggcaagcgtgttatcgtcaagaaagaaaaacagaatgtcaataccgcccagaacttaaaaaaaatactaaaattgattacttgatggagaatttggggaagatggaggatgtggagaaggaatttgaacatcgtgtgttagtcttaaagaagcccctgtcaaagaacatttttcaaggcacacaagcctggtttcaaggtagcgagctttgttgaggagttctttgatcttcaactgaagatccagtggttctaatgttgtagaagaataaatggtcaaaattgggggttgcactcctgggtattcttgctcacgaattcaaaaaagaagatgaatacacttttcaaaatagtgattaattcaccaaaagaaatttttttctcttttttctctctaaaattttaactcaaaataaaatttggccaaaagtgtagatggaaattttcatctatcaatgaatgtgatcgcatgatttcattgaggcaaatgatntcaagaacatactgcacatctgacag

SEQ ID NO: 303027 - DNA, 2197 bp, Cannabis indica
tatttagagaaatatttttttacaaaaatatcaaaatataccgttgtaccacttaattggcactttattaatagaaagtatgattcaaacagtttaaatagtctatttcacatgcgtacaaaataaaagagataagcgtgtaataaattatttaaatattatttttggcaaattaaattattttaaaatttttaaaaatttgtaagacatcaataattacatcatacattgtcatataaaaaaaataagatcaaaattattggaatgtcgaaaacacgaggtggtacatcaatggggtagtagtagaattttttagaagtgttcacggtgcgggcggtgtgaactttagctattttttcagaccaaactgcacatgtagtttttacaatttttcaaacagcaactgcatcacaagactttaaaactgcaaaaactacactgcaaaatacggtgcgattcaagcggtttacactatcgtcattatcaaatattataataaaaatataaaaattaatttaataaaatttcaacaatatgaaaaaaaattattaaacttttaatgtcacaatatatacactaatcaagtcactgtatttaaaataagaaatgagaataatttatatgaatgtttcttacatttaaatattgtatgacacgagctttgtaatgctataaattgttcgaaataaaaaacacattataaaaattagtataatatataatgtggtacggtttgaaccgcaattattaaaattaaaactataaatcataccatactacgcgatttggcaaaaatataaactgtaaccgtactataaaaaatttaaattatattttttatgaaaaaatttccaaaacttatatatgataaaagaaaaaataagtaaatttatatatattaagttgtaataatatccttttcaaaaaaaaaattgcaataatattcattattaaaaaattaaatttatatatcttattagatgttataatgtgaggaaaaaattaataaatttaaagatgtttaaccaaataaagtattaaaatgaagttaaattataagatccaagtgatctcaaacaaaataaaatatacatattaaaaaaaaaaaaaaaaagagtgatagaaaaagttggtttagatttagagggaagaaaagggactacctgctgcaagggtaagaataaaaaacatagaaaagatgtttgaaaggaatggcagaagtggattgtttcatgttgtcaacaatgcaacctgggcaattttcttcatacaagtaacccatttctttctgctctcttctattattattattattcatcatcataacttaacaaaaataaaaatactacttcactttctctttctctattctatttattaaactatatatcttcacctaacttcaaattgtctcttgttcttcaacacgttttttataagtgtcacacctatataatatgtgtcacatatttacatatatatgtgtcatgtgtcacagatatccgtatgaaatatgtaaatagtgttgaagtagttcttaaaaataataataatataaaaaagtgttttaagtgaggaaggcaaagtgttgggaagcacttcgggttcaaatttattatcgtggagagcaatttgaaagtagttatcaatacttttaatgggaataatttttattgagctattgaaaactatgtctctttttgtaataattcttctcactcgtttattatttgtaattttactaatattaataaatcttataactttatagtctataatgtggtaaaatggacttttgctcattagaagtttaattttattccgttatcaactatttctacaaacttattatgtaatgtccaagaagtctaattattcccatatatcataactagggaacctaagccgcgcttcgcccagtattgtccaacttttataaattatacatatatattatacttattaagtaatataatctaaaatataatattttgatatatgtattataaataaagtaataatattaaaattaaggatataattttaaattacttagaaagataacggttttgtaacaaatattaaatggtagacttgataaaaaaaattgcatgtgtttttataataaaataaaggaaaaagataacaacttttgaatttaataaactgattgtgattgatgatgtagttgttttta

SEQ ID NO: 303028 - DNA, 3313 bp, Cannabis indica
aaaacccagcatactttgccctgagcgtgccaacgatatgtcctgctcggactgtcttcccgagcagatattccaagtggattccacgtgtcaccattcatgtgatgcctcgtcagagtgcaaaaattaggataacaaacttaagtaggattataatcctaccctaatacccacttaatcacacgttaaatagaatatgcccaatttaagtaccattatattttctgggatattacaactatcccctccttatagaaatttcgtcctcgaattttttttctaaacaatgcaagatatcgttacccacaactgcgactttaacttccaagttgccttttaatcttgctgttcattcatagtgctttagttaatgatacaatttttttttattttgcagtacattctcttttcttgttcaaaaacctaaatcgattgttcctcatatgacaagtctatttgaaactccatattttcgtaactcggtatacgaatcgtagctgcctcaaagttttgaaactttgaagtacaagttatgaactccgggtaatgcagagagtatggctagctgataagctaccctacctcccattctgggacttagctttcattccttcccaactttccaagttcccttcattggaaacacttgaagaaagaaagaattcccaacttggaattttaatatctctacactttggatcagcatagttctttcgtccactcaaaaaaatacataataactcgtatctttcttatggcctcactcgttccttagactacatcaggtccaaggttcctccattcaccgactttattccaatgaatgggtgaacgacattccttccgtaaaccattttgtatagtgccatgccattagtattttgataactattattatatgaaggctcaatcaggggagatgcttactccaggaatcctcaaacttttaatacacatgttcgtagcataccctcagatatctgagtaattctctcgaaatgactatcagtctgagggtgaaaactatactgcaatctattttggtgctcattactcattgcagactctcttggcatttggatgtacaccttagatcttaacctgagacaattaatatttggagcaccacaaagttgaattatttccttgacatataaattagcacagtaacccaccatatatgtaatccgcctgataaagaatatgtactgactttgtacatctatccctaattacccaggtggaattgtagaatcctactgttcttggtaatctaaccacaaagtctacggttacttcttctcatttctattcaaatatctttagagattgaaatattcctactgttttggacactttgccttaacttgctgacaacttgaacatctgatacatactccacaatgtcatctctcatattttcccactaatacagggccttacattgtgatgattcatctagtaaaactaaaattctctactggtccaacttcaagcttttctttatactcctgtagtttcgaattattatgttgggttgtctcaattcttcctaacgaattgtactgtattgtaatattggctaactttggtaagctctcattgactagcaacatcaacgctagtacaataatgaacctctgtctcaattcttttggcttaatttccactaagaacatagaaatccttcaacaattattccataacatcccgtcaatcccagaaaacatcttacctcacttgcagacctgggttgaagccaattctaaacttctttattcattgccaaatctattaagatactatctatgtccacctcatgtcttaagaaatttacttagggccaacaaaactcgtatttcttgtatttagcatgaagcttatgctcctaaagacattgcaacaccatccaaaggtacctctcatatgcctcctttgagtcaaaagaaatcaaaataccatcaatgaagataattatgaagtcatcagattcgaaaaactgtttggaaatgtcctcctcttaaatctccaattggtaataaccagatcgaagaccggtcctagaaaagacgaccctttcctaaaatcgatcaacataacatctatccttgataaaagatattcattctccaccattactttatttaactcctagtggtcaatacacactcataaagtattaatcttcttcttcacaaaaaaaactggtgcaccccaaggtgaggtactcagtctagtaaatttttgatccaacatcccctataactaaaatttcagctcttttcagctctacatgtgccatcctataaggagcttttgatacaggctctgccccttgtattaaataaatttcaaaatcgtttcctactttgggggtgaccctggtagcttctttgtaaagacatctagaaattctcggactactggaacatgttcaggtcccactagtggttcctttgtagtatccactacacttgctaggaaaccgatacaccctctcttgccttcaacgctgagattaagggaatccgagatcctttcaccttacccacaaatacaaatgggttctcgccctttggttgaaaagttaccatccttcttttacaatcaatggttgcgttatattttgtaagccaatccatacctaaaataacatcaaaatcttccaaatttaattttatcagatcaactgacagctcccttccttccaaacctacttgctggagataaccaactctccagtaggcaataaagtactaaaacctcttaaaagcatatcactaggtctactcaaatttttaattatactacttgaaataaaaggatacattgcaccagaattaatcaatacagtcaataaagtaccagcaacagaaagctgacttgtcacagtggaagggcccgcatcagcctcggcttgggtcaaggcaatcacccgagcaggagcaagtatatcgttcttctggtctgatcgcaccaactgcgggaagtttctcttcaagtgtcccactgtcccacactaaaagcaggccgtagcctgacactcgccctgcggcacctcttacactttggacattctgggtagatccaacaattctcatttccaccatgatggaaatcttcattaccctgaaacactttattcgatcctgtagctggtgaatcattaggtcttttcttacgatcacctgggtcacttcctctgcccgaaccaacagcagattgtttccacaagtctctccttgcactatttcttttttgtatctagtctttggcaccctcggcaacaagggccaactccactatctgtgca

SEQ ID NO: 303029 - DNA, 3773 bp, Cannabis indica
tcccgagatagtaaaaaccacctaatatttgtctccttgagggaacaaccttcacgaattagaaatataaaatttctaggggagttggacacttccacctcataacttggtataaaaccttcaagtaggctagaattaagaactcagaattaactaaaaaagggaaatttcgagataattacgaaattccttataataatccctcagagggagtactgctcaagctcttatatgcttgaggctccaagtgcctattctagacgagctaccggtactagtaccagcacactcttctcggatcactcttttaggggaaaacaacaaaactcccccagagctacaaacctaacacgacatcctttttttatgtaatgccgcaagatcttagtacatctcccacatatgctcctatagatttaacatttgattcaatcagttcagcctcgaatgtgattgtgggatcctaaggggtcttggattttcgagcttgtgaagtcataattttgaaatataagtcacctagtgtaaaagcaacagtgactctaggtaaaaataaagctctcgcaaaagaaatagaagataaagtctgaggttcgagccaagctgcatctcgcaaaaaacaacgtttaccctcaattcttttttttttttgcaaaaatcatttatagccacttgatacctcatcattattggctttaactagataatctctaatttttacatcatttatctcaagaatggttttaggaacataagttttgggttcgaatggaagggataaattttaaggacaattaatttctagaattcgggattgtgttttctagagaaaattgggtcatgtatgtgggcgaattttatctgaatttctagaaaaataaatacagactaacccaggaatctatgaatctaataacgtaaaaattttcttaaccctaaaatcacccaaattaaagaaacaaaatttacctaaactaaacaaagaaagaagataaatgaagcaacaaattacaaagacaagacttcaaatacagaaaagaaagatggtagaaataagagaatgagccacttactattttgacgaagatttctggatagtgaaaaactttgtgattggggcttcgacaattgaaacgatgaattttgagattctttaaggatggaaatgtaatcggattaaacacgcaagaaatatgttaaggacagtgagggcatgcatgatgaaagaggaaaaatcgtaggttgcagaggaaatttgaaggcttaaaatttgaaaatggcaaaatagaatgatgttcttgtttttgtaccctgttataaaacaccgttagaccaaaagaagtctgatctaacggatgggaacaatgcaaattaaaagagacggaatatttaatgctaatgatgtgcctcaaaattctaaactgccaaaaacccaaagcatgcaatttttcgaaattgggttaagacgaaaatacccttgtaatcatttatgaaattctttttaatcaaaatatactttttaaggggcaatttttatactcaaaatttggctacacctcaaaaattgacacatgtccaacaaaaggaatatgaatgaattctgaatgatatcataatgttatatcaatatatgcatattaaataactcgttattattaaataaatgattaatagatattattcaaaactctttgattaaaagcgagacaagaataataactattcattcgagattagcgagacatatgcatggattggaatatacaaacaagaaggcgatattcatccacccgagcagaatgaatgtatcaaaactacctcgcattacatatagcgagaagatcacctcgcattacaaaagccacaaagaggacataacgaggtgaaaaccctcctaacacttagcgttttttcttattaagatggataagaaagataactcaaatcagagaagatataacgttccacgtaagcaataaccatcaaaaggataaaactaattaaatagcggttgggtagttatttaatattatcccacatgtgatttaaatgtaacgtttggattgtccacgttccatgaacaattatatttgaattaatcccaaaaaagataattgccaacttatatccttataaataggggtagattccatgagaacgaggatgacaaatttgagagaaaatattattattcaaaattagacattgtattttgtacgcgaaaaatatccctcataataaagactcgtcgaatatgtagattttaattacaaaatcacgtaaaaatatctgtagttattatatcttttattactataaatttttgtagagaatttattactgaaaggttatttaatttttgttaacgaaaatctgcgttaataaggtgaattcctatttatacaaaaatatgagtcaactaataggaagctaaatcaatgtaataaaggaaaatacaacgaagcattaatggtactaattaattttgtaatttggacatccataaataatatttgatatcactcatccttagatgtccataaaaattgtcccgttaaaaactttgctgaaaaaactaggtcaaagaaaaaaaaatgtaatgtaaactaactcagccttctcatttaggttaaatatatatatatagggtaaaaaaataataattaaatatatatattattagaggattaatataaaaaggaaagtataataaatgcgatttaaatattgaaagattatacatatcgaaactataattaaaaaaagtatataactgaatgtgaattacgtatagaaagtttaaagaattttctaacaaaattatgccatatagagtactaaaatacacttagttgtaaatgtctcatccgcataaaataagggaataatatatttaacattaaatatatttttaaacaactcagtaagagaaaaataaattaaaaagatctgaaataataaaaattggaataaaattaatattaattgtctcaatagcacattcaaaacaaggcactaatttaaaattaattatatgcgcctgaggggtaataagtagagtatttcatttaaacaaaactatggtagatcttattgcttaatgtgcttattaataatagaaaattaaatccaatttgctaatgctaccgcattagttaatcgattttttttatgagtggaaattgaaaaccttcgttgaatgcaacgaaaacttcagatgtatactaaaatatcataatataattaatgagcaagcaaaacacaattcacctagacacttagatacatctatatatggtgtgcaagttcatgtatgttattctaagctgatgatgctgtagaggttcatgaaaccttctttaaatgcgtttgacaaagaatcaataaattattttcttattagttaataaacaaaaacttataaagtacacccctttaataacggtggcatcccaaatttatatatgtgcgtttagtgtaattcgtgttcgactttataccctaaataaaattctatttcaataaaaaaaattctattcaattatcaataaataaacagatttaatttcattactcgtttaatgtgttatttggttcatgtgatcatttatttatttatttgatttataaatttatcaaaatccttatcactgatattcttgtttattgtgttgtcaacacagtacaaaataatcaagattgtgtgattaaatgtattcatatgatttatcagtacatagagtttaagtgatatgataatctacaacgtagtt

SEQ ID NO: 303030 - DNA, 3014 bp, Cannabis indica
atcaacaatgttttactccttatataatttgataatcaaataaacatgtttggatcaagagaccaaattgtctacttcaaatgttaaaatatatgtgtaccagatactaattcagttagattttgtgttacttctatagaagagtgattttcattactaataaaagctctttgtacagtttataaaagaaattacggtaaaataaatgaaaccaaatgagaggattcggtcaaagaaatcgatttcatatgatatggaagaattatattacattgctttctttcttaacaaatgctacaattttttttagtgtaactcatcatctatcaacaatacatgcttcatttcaaacataataataaaataaataataataataagaaaatattcaatgactaatccaaaaatggcactggaaagatgcataaaatgagtaatttctctctgcgagatgatttttgtcaagcgaattttttatttatatacgtaattaagaaaatattcttatagataacgacaaataaattaaacatcctataaatgcacatgcttaccaatatatagaaataaaatcctacccaattgaaaaaaatgaaaacctagaattttcaggcaaccaccatttggccaaacatataaattaatttgagaacaaaataaataaataaataaataaagcttcgattcactaacaaaatagtcattaaagctctccaatcatgtccatagaacctgtcaactaaatccaccattaaagctacacaaagcttcgattctctgaaatcaaacaaatggcaccacaagtgacagtctattttcacatgttactagtgacctcttctgctaaacgagggaaaaagaatcgctatctggcggcattctctatcgaccatgcacccatttcatgcagggtacccgaaccggtggagaatgtgaagaaacctacaccttctaaaacggctagaagagggaaaggtgtgaaaaatatccctaagattgtgcaagccttgagaggcaaggcagcaaaaggcttcaaaaagaggtaaccccaggcaatgaaaaggtccactgtgaaagttgtcaagacagaagggaagccaacaaagattggctgccccataactatccaaaaggaatggggccaggagcgtatcttgattggttatatccctattttcttgcccattgttgcttcagtgatggttatctccacaaagaaaattgagacaacaccgacttctcaaactctgagaggtaggaaggaaacaaatggcaggaaggggacaaaaacttcaccctcaccaaaccctcttgaaacgagggaattagtaagagacgtgccgatcaggcctccgattgtaatccctatcaaccgccaaggtcaataggaggcatcttctgagaacaatgaacaccttttattatgtctaggactagatgaggggtgtaggacgccttttgccttcccaaagaaggctagaagtgacaatgtaagggtttccaaagcaaaccctaactcgttcctaaaggagtagggataccgaccaacaagggtcacttcaactgttaagcctacgtcctatacgggacgtgtaactcaatcaagagctcgtgccatgcatacaatccccgttcagaaatcagtgaacccttttgttcataaagttcaggaagaagggtgttgcacatctgaacactctttagaagacactccctttgtcgaacaaagcaagggatgtttgctgatctcattactcagtttgaagcactaaccactggcaatgataaaaatatgtcagtgttggtagctggggcaatcagtaatgaagagaagatccaggaacttcaaagattattggttgagagggatgaagaagtagcccgactctcaacataattatctcatcaatctaacatgagacaaaaagagagtgagattaggcaacattccttatcctcagcaccgcctgtaggcaatacacaactgtcatcgcttggtgtgcaaccaccattagctggtggccaaccttagcaagacctgaaggctcttatcatggagagtattcgggaatatcaggctacaacaagcatgcctatcctgagatatcataagctatacccgacttactatgaccgaatcccatttccaccaaactatgtcaaacaaaagtttgatagaattaacggttctccccatgaacatttggcgtatttcacttctgtatgtggtgaatctacccaatcagatgcattattgattaaacaattcgtgcaatcgctaaaagagacagcattcacctggtacactcaattacccccaagatccataaatacctgggatgacatgcaaaaagcctttctgacataatttgtgagctcgaagaagaccacaagaatccatgactcggtggaaacaaagaaacaaaccagtgaaaatactaatgagttcataatgagatggagaaatctcaacctctaatttctggaaaggttatcaaaacaagcagcagtttcaatgtgtgccaaaatcctcaaccctgaggtggcaatttttctgggcacaacagagcccaaaacttttaatgagcttgtctcgaaggcctgtaatgtcaaaatacaaattgctcgacaaagggtagcaaaccctcattgagattcaaaaacaaaaaaccattacagaagggagaatcaatgaccacttttatcaataccgataacagtaaagataaaggaaaggcacgagagccataaaagaaattaactctcaaagaaagaacagaagttaagtattcatttgacgatgatgatgtcgaccaaatttttaatgagttgttaaaggttaaagcaatacgacttcccgagcctaaacgacccaatgaggttggtaggacagatgacccaaattattgccggtatgactaaattgtgagccatccactatcagatttctacatccttaattgagaatgaccaaataccaaatgatcccacacaaagggacataatttctatgg

SEQ ID NO: 303031 - DNA, 1391 bp, Cannabis indica
aaaagaaagaaaaaaagaaaaaaccaaattccaaaattaatgaaaaaatgtcaatagatcatgacattataatcttgtatctatcttcatagttttagtacagttgtaattaacattaatgtggagatgctatcatgctattatacggatttatgataaatcactaaaaccctccctcccattcaatttccttttagtacaagaaaacatactaaaattcatttacattctctgaacaccattcaatttatatctaactcatgttatattaaatcgatacacaagagtattgtatgcttaaattagttgaacaagaagtttatcttcgtatatataattattttcagaagaaaaaaagtaaaataaaaaagaggaaaaagacaattatatgttaatcaacttcctaaaaacaatcctcaagctctccacacaacgtcaaccaaggtcttaatcatacccaattggagatatacacatttgttcccttctatcatgtttgggaatcttatctatattgatttcaattctcaaggatccttattattaaaatttgtttaatttgtaatccaattaggctttgtcggtgcaatgcttcgtataccttaatgcttttcaccaacaattgactagtggaaattatatgtaaaccaatcaactaaacattatgattatgttttataatatatatatatacgctttgtaataattgtaccgtataagattggtatattttatctataggtttgtctttggaccacgtgtagttttaggtgatgtgtaatagtttttagtaccaaaactttgagttaaggtgggcgataggaggtttaattttgaaaattgttttccgtgaggtggaaaaagaaggtataattgcatttttagagatgattttcaatgaatataaacagacactactgaatgaagttggtcatgacactgaaaagtttgaatacggtacacaatctcatctgaattgtgtaatattattcctgcatgaccttactatcaatgaaactaatttcagaaattacattacatggttggtaaacctaaatactataaacgcaattcatcagttgaacaaactaatgtttctcctttgaggtgccacctcctagtccctgcaacccataaattgtgaaattacaatcaaaacagatcatgtaatgaactatggagaggatgatctctagtatttattgactgatattgccgtagtacattaccattctttgttggtgcaaatcctatatttgtgtaatcgttgagaattttaagtgtatgttcttttctagcttgtttgccatgttaagagtatagaataaatcacactgtaattagttgttcattgttgttgtctgttatcggtttttcagttaagttagtta

SEQ ID NO: 303032 - DNA, 2295 bp, Cannabis indica
tactttagcttttcctttatagtcctccttgttctccagctgctgagaatttggggtcatatggtgcgtggctccagtgtccagataccaagcagcacctggatcatcgttctgatttgttgtagacaggtttgcttgaggattgtcactattagaggttgaggctccaggagcttgaggaccagtgaatgttatatcaaaacgatgataacatttctgagtagtttgacctacacgcccacacaattgacaacttggcctgttacctctaccacctctattggtggagttagatctacctccacctctgttggatccacgatttcctcgaccatagccttgacttccatggccatattctcctcgaactttcataccagtaaagtttgcttaaacattctctaaggcagcactagtttgctgttttatttgcaattcctgactatgaagcatgaactgaacttcctggagagttaactgattagttcttgaagtgagattaaccaccacagattcgtactcaggtccaagacctccaagaatgtaaagaatcaaatcttcatcagaaataggatgatctgctgcagcaagagaatcagcatactttttcatcttaagaaaatactcatcaatactcatagaacctttcttggtggactgaagaagaccacgaacttgaagaagactggctctggatcgagtagcaaacagctggttgaagacattccagatctcagccgaggattgacagttgatgatatgggccaacattagttcagatatagaattcattagccaatgcatgagaaattgatcaaatctaatccagttttgataggtgggattgggaacattacctgcaagaagacgatcgggtgcttgaattgtgccaaggatgtagccatccagatcataggcacgaacaacggccaagactaaagatcgccagaacaggaagtttgtgcgatccaatcgaagattcagaggcaacagattattgttgggaagatttgcaggtgcaagattcagaacagggacttgttgttcagttggtggtggagcaggttgatttgtgttagaaccaggagcacgttgttcagccattggtggagtgggacgattggttggtgttgactccatacagctctgataccatgaaaggattcaatcaacagattgaatgtaaaaacagagaaatgaaaagagagaagaagatggagaaatggctcagctgaactaatgagccttgaattgtattgagtatatatagatacaatacatagtagctgattacactagctgacaaaacagaatacagttaggcaaagaaatgattacacagtaacaaacttaaccaatcaaccaactatcctaatcgttttctatattcctaacagtgggtatactgtttaagatctttattattgaatatttcaaatttgttttccaaacttatatgaattatccttaatccatgattttctcatggattaattgtgcatatatcatggtagaggattaaaaactgttatagtgcgaatttctcaccaaaatatatacgagtacaatctcgtaaaaaattgccacgtggagccagtcttcacagaaaagatgatttgccgcaagtgtacgcttgtctccactcctatgctgctaactgcagaaagtgctgttgaccgtagaaagcattgttaacagaccaaagtgttgttagctacagaaagaaatgtgtggacatagccaccaatgcgatcagagaaagaatgatcggttcatcttgcatgattgaacttgcgagaagatgtgaccaagacagggtatagtcgcatactatgccccgcatagttaacagataagcaggatcgagagaagttattactggtcgcacatataccgattatatgtgatggccaagtatatctcttatgcaatgagtaaagaccgtttctttacgtaggtttggtccaaatgactaatatattttgaatactcgttagggaatcacatgtttcaagttatctacgcatagaatgtctaattatgcgatcgagggtgaacgtagacattcaatgaaataggcccaaaggcccctcttgcgattacaacaccatagagcccgcgagctcgtgtgtggaatatgaatggacaagctgtgacttatcaagtcacagacgttgctgcaattaagtcaagaatggataaaattgttcttcattttttcttaaacgtttattttaatttaattttgtcatttattgtaaaaatagtctgatctgaccgattatgtaatcctaa

SEQ ID NO: 303033 - DNA, 3666 bp, Cannabis indica
ctaaatttgtcactcttcctaatggcactaaagtacagatcaaaaaaattggtactattcaaataaactctcacattactctgtataatgttctctttgtaccaaagtttgactttaatcttttatctgtacacgctctcttacaaaacagtaaaaattccatgcatttcacttcttaccactgttatatccaggaccattctcagacattgaagattgggatagctaaacaaattaggaatctatactacctgcaacagtagaccctccccaagcatgctttatcaatcaatacttgtaatgttcaaattactaatctctaatggtatactcgccttggacattcatggtacttggtactaataaaattaataaacatttacatttctctaaaattttcactcttttgcaaagcaaaagaaactaccttttctttgacctcattcatatgaacatttgtggaccagattcaatccctttagttgaaggctacgataatttttaaccatagttgatgaccattcaaggcacacttagttatactttttaaaagcaaaatcagatgccatgttagccatacaaaatttctttactttcattcatactcaattttaggtaaatatcaaagttgtccacagtgataatgccaaataattacatctcactactttctatgccacaaaaggagtcttccattacaactcttgtgttggtacaccacaacaaaatattgtagttgaaagaaagcaataacatatactcaatgtagctcatgcactagcatttcaatccaatttacccctagcttattgaagttatatggtgaccattgtagtgtacctattaaacataacttcttctgttttacttaatgataaaacatcttatgagttgttgcatcaaaagccaccactctacacacacctttgaaattttggctgtcgaacatatgcttcatttttcaccaccaaacccaaattttcacctcgagctagaccatgtgttttcattttccattcaaactaacaacattttccattcacgaaatgttgtattttatgaacatatttaccctttcaaaaacatccctcataatcagaacattgatgacttctttcatcagtgttccaccacttctccaaccaacatgcatgaggaaaataaaactcaaatcctcattcctgaatccattccagctcccaaacctccacttcacactgctgatataaacacacaaaaactagtcaccaacacttgcaccagatcaggtcgtgttcatcacataccatcccatcttcaagattacaattgtgacatggttactcattccagcactcaatatcctctcaccaacttcttatcatatgacagattcctcaatctattttccacaccaacttcatttaagaaagcttccaaacacaaagtttaggatgtggaaatagatgctctcaaaaagaacgacacatggattgtggtgcctttaccaccaaaccaacatgtcattggaaacaaatgggtatataggattaaacataatcctgatggatcagtgaaaaaagttaaagcacgtttaattgccaaagggtatgctcaaaaaccaggaattgactatttcaaaacataagctcctgtagcaaaattcaacaccctaaaactcctctttgctcttgctgccatcaaaaattggcacttacaccacatggacatcaataatgctttcttgcatggtgatttaaatgaggatgtctacatgaaactttcccaaggctactttcctaaaggagacctgccaacaaatgtagtttgtaaattaaacaaaagcttgtatgggcttaaacatttcttgcgtcaatggtaggccaaactcaacactaccttattgcatcacaatttcaaacaagctaaaaatgatccttctctattcacaagacactaatatggtgtcttccttgctctccttatatatgttaatgacataattgtagccaccaatgacataactgctctaaagccattcatatcaacacttgattccaggtttaaactcaaagatcttggcacccttcgcttcttccttggccttgaaatagctcgatgttcaaaaggcatatctatttctcaaaggccattcacattacaacttctcaaagaagttggctgccttggttccaaaccagtctccactcctatggaacctaatactaaactaagcaacaactcaggggacctcctccaaaatctaactcaacataggagtctcattggcaaattactctatcttacaataacacggcctgatataagctttgctgtaaataaactaagccaatatctccaaaatccttgacaacctcacatgcttgctgcaacaagagtactccactacttaaaaattcaccaagacaatgactctttttttatgcttcccctccacctaaactctagctctaagcctttgctgatgcagattggggagcttgcgtcgacacaagacaatcaatctctggctattatgttttcttaggcaaatcacacatctcatgaaaatcaaagaagcaaccaactgtctcacggtcttctgctgaagcagattatcgcgccattgccaatgctacatgtgaactcacatggctcacttccattctccaagaactcagacatcaatctcccttcaatactattttgcgacaacaatgctaccatccatatattagagaacacaattttccatgaaagaacaaaacatgtcgagattgattatcacatagacagggagaaaatcacaaatggtaccctgaagttgagtcacgtttcatccaaagtcaaccttggagacatcctaacgaagctactttttcctgctcctttcaatgaaattctatttaagatgggtgtaaagaatctttacactctatcttgagagagactgttaagtttgttacatttgatctattcagttataagattagttaggtgtttgttactccaactagctttgtactatatatatctcatctgtaccattattctaaatcaatgaaaacaattttttttctctaaagttttctaataaaaatccatttggaaaccgacccaattgaccaaatagcacgaataagcaaaatgtccagttgggtcgttgttgttgttggtttatgattggttttcaaaagaataccatgactaaaaaaaaattattttaagaaaatctcttccaatgggttttgaatatgaacgaatgaaggtggctttttggtttttcttcgaggaggttgatagtggaaggaggcttatcttttgttttgtgaataaaatgatgatttgattaaaagtggcaataatgaaggatgaaataattatttgagtatgttaagaacataaaattaatgatttgtcttttatcaatatcttctaaaaataatgctcgctctatcaaaatattttcatttattaatttttaaattgaaaatcaaaatttttaaataaaagaaaatcacttttattttttttaaaacaattattttaatcaatattttaaactccaactctattctagaccttagaacacaaactccaaccccaacccaaaatccaaacccaaacttaaacccgacttaaataaaataaataaataaaaataaaaattatagaacacttttattt

SEQ ID NO: 303034 - DNA, 3745 bp, Cannabis indica
gatgaacttttggaattctatttttccgtttaggtcggctagaaataaatgacttgtaatagcgtttgtaaatattttgggatcccaactattttaaaagtttaaatatattacaagtttattttcattctgtttaatataaaagttttaattatgcgctattttgattagtaatcccgtttaggggattagggtttcataagtattttgggtagcgtgcctatttattcagggcgttacaataaatatgggtctcttcacatcattcagtcgtcggttgcactccacttctcttgctgaacgcgccttgtcactcgccaaagaggccaaatgtgatttttaatgtaccgcgtgatttccatgcaagtggatgtaaatgtcatatttacccttagcagattagaacacatgcaaaagatgcatccacggcttaaatcatgaacacgtgtcaacatccggtactggggaaggatgacaagacccgtatctcaaagagtctcaaaagcctttggttaaatgttatccttgttttcgtgcataagacaagtggcatgattaacggacaaagtgtattagcaaaaaggactaatcgagataactaataaagtatttcggaggaacatcccagctattccaaatatatgcactgagacgccggatggaacgacccattcacgaacgaacaacatctctcggacccagaagatggttggggaaagcgactctcagatgacaatcctctaagcgatgaacatggggtgaaataacaatctcgcaggtaaagaacacgtcaacatcatacaaaaattattgtatagacggttacacctttttctgacacaggatgagatcttgttccccatgccaggccatggtagtgcgcatacgcacctttggacatgctttttgcccaacgaaagtatttttgaaaggagataccattgcctggcacatatcctagtttgtacgaaaatcctcactgcaagtgtacgctacacattgaagaaggttcttaccaagcaatatttatatcttcctttagttgtaccggtcttagcaacatgtggagtacgaaaccctaggttggtaaaaggtatgccctttacccaatgtgtgcctataaatagtcttattttctttgagcgaaagggagaacaattttccatttacagtcactctgctaaaattcctaaagagctttctctcaagagaaacaagaggaatagagagatcattattgtaaacacttgtaatacctgaacacttacacaaagaggctaatactattagcttgtggactaaggatcattaatgcctgaaccacgtaaaatatttgtttgtctattgtttaatatctattattttcttaagctctaaataaaatcggtttcccaaaatctcggtaaaaataaatgtcaacataaactcactgacaagacattatcaaactaaatttgtggagatttttagtggtaaaagaagtcttcccacgaatcaatttcaataagcacgacatctgctttcctcttcatgtcagttaacggagcaggtatcttgaaagggccagccttctggaaggtaatatgtcttgatgtaaggactagggtattaaattattcttgatggtaaagactgcaattactcttgttcacatttgctatgtatggactgactcaatggaagtggtaaaatccttcctcttttcgagttggactacatcagcaccacgtggtagtatagttcatcaacaagaagcccaagttagcaactaagcccacaaggatcccaacactcaaacgggacatcaagtcacagactagcttcgtcaaagaagctgactgaccacccttggctagccctatggctagccagcctctggacaacacatggctggccaacttgctccctacaagtgtctagctggtcgggaaagggcgaggcaggattttctatataattctacacgtggactgtgagttgggctctaatagcctaacaaaacatttgcaaagtaactacgttcaagggaattttagtcttttgtaattaactaaattaatatacaaatacctaaaggtttagttgtagattagggtaaaactctactatataaacagctttaactctaacctagaaatctctaagtctcattctagcctccaagtgataaaactctaagcctaaatctctaagtctgataactccctacccctctctcacacgcccatacaagcattctcagtacttgagatttgccaaccttgatttttactttgtatccttaagggtgctatatcagaccctacctatagcaatctaatagtattttccctcagtatcaatacaactaaaagcggagtatcattacccgctatctaagggggaactataaaattctttgtgttctttactttaacacccttattatgtaacacatggcaaacatcagattcataagaccccactgtcggttgaccactttttgagatcaacagtttggtgctttcattgagagtgagtcgatatcatatttggtaaaatgccatggttaacacaatacgaaccccaatcgcaccatctacatcttcgggtctcaagacccacaaactgtagatcttgatgttaaaattctaaccacaactggaattcccacaaacactatacatgttgtcaatcctatcacaacaacaggcgccacaagcctggccactacagctggccaaactgatataaacatcctaatggatcaaatagcaagtcgttgccttcaagggatgacctaccattggcacctgccactgaaggaaggaatcatgggcgatagcccccatagacaacaataggatctcatcttcggtaatatgctagagagacaggaccaggagttggcgagccccatgtggacttgggagaagatctagagttagcaagacttagagaagccatttgccaagctgacctaacaaagcaccacgagctgctaattgcagtgtattcgctcaacaaagacgtgaattcctgaggtggatggatgaccaagagtacatcctttttatctcaccaagaggagttggatctctgtaatagagaggccagcaacctgataaggcagttcaacaagagaaccgatggaaggggccaggatctcatctgatatccgctccaaggaagactagttgatagatcagggagagtctatcgacaagctgaccaacctggtccctcgactaggatagatcttcccttgctagagggaggatagaccttgccttaaaggtcaaactacgataatagtcacatccccacaaccagcggcaggggctggccagggatctctagctcagcaacagcccctctcattcaggttttggtagactagccatctgcaggagttcccttggcccgccagtgaagagtagtccctccccgacaggagcagggcacccagaggtcagtctttaactgacaagaatcaagagcgagtggaaacacccaaaacgatgatttaagaagtgaaactaatcgatttagacaacttgatccactaaactccaacaactggtgcgatatacctttgtcagcacatcgccaacatcaatcaactgaggagtcacgagcagccagactctgccctatgcaggtgtggatgaccatggaggagttatgggtagccagaccctgcctaatgcaggtttggctggccacggacagctgcctagtgttgggaattattttaccatgatct

SEQ ID NO: 303035 - DNA, 1298 bp, Cannabis indica
ttttttaaaaatttttttttcattaattccaagattataataattaatagattctattgttcaacaagaaaaattacttgctcgtttaaaaaaaacagattttgcatgtataataattttcataacaaactttttgttagattataagatgtttaaaaaattgtaaaatgttaaaaagagatatgaaaaattattattaatgtaattaagtatcaaacttcatataatttaatatagtaattttgaacgtaactgattataaagtaatatgtataaaaattaagtataattagtgtctaatatgcacaaaaattttatagcatcatcattgcgttaagtaaaataattcagttctaaacagtaaaatgcacttccaacaaaaaaaaaataaaaaaagataatcagctaaatgcaaattaaaatagtctttctatgctgtatgtttttttcttggtaatatatataaaaaaaattcattaagtattatttagtcaaataatataatttcattaattatacaattgatcttttcttttccttttcatttctcccatttatgtatatatggacttcacatgacatttcataactaattgtccttataaactttaatgaactcattaattaattagtaaaatcattattgccaaaaaaaaaaatagtaaactcattaataattagttagataactcacaatacacttttatattgtaccatttagtactattttttcagtcttttaaaataataattatccatctccaaatttctaatatgttggcttattttatattcaacaattaaataaattaataatataaatgcattttaaatacaaaataaaaaaataaaaaaaattacagcataaatgctttatatttttaatttcatacacttatataatttatattttttcaatcgatgaattaaatacttaaaattatattttttgttacttctgtcactatcatgtgttaaaacatattcaaatataggagtatttacaatataaatacatattttcgatttcatacacttttataccaattgtttttttttctaagggcccgtttggtacgcaggactggattggattagacaggttaatttgtccaatccagtgtttgggtatgtgagaagtctggataactaatccagttaacctcatctgtctgggattatttatcccatccagcagggtgggataaataatcccatgcaagtgagattttttttttatcgtttttttaatttaaatttaattaatatattttaaatttaataagaatttaaaggaa

SEQ ID NO: 303036 - DNA, 1683 bp, Cannabis indica
ttgcctgtttcataacttagttgatgtatttcaagagatggaactactttgtggatggtttcctttgagagtttcgaatcggtcaatattgacactgtagaatgatgttgtacatgctatatcaaaaacatttaaaatatttgaaacaaaaccaaaccaacgagacattcaatgcttaagtgtgacattctaatgatgttttctctacttgacatacagattatttctgctgggtttggataaatatgggaaaggggattggcgtagtatatcacgcaactttgttgtcacgagaacacctacccaagttgcaagtcatgcacagaagtacttcatacgtttgaattctatgaacaaagacaggaggcgatctagtattcacgatataacgagtgttggcagtggcgagattgctggacctcaaggaccaatcactggtcaagcgaatggttctgccggagggccctctggaaaaccatccaagcaacctgctcaacctccacctgggcccccaggggttggaatgtatggcgcaccatctattggacaaccaatagggccccttgtatcagcagttggcaccccagtaaatcttcctgcccctccacaaatggcgtatggtgttagagcacctgtagccggaactgtagttcctggtgctccaatgaacatgggtcccatgccatatccaatgccgcatacaaccgctcataggtaaccttgttaaattgcaaactgtacaaaggacagacttactagcttgggtccttcttgggacatagcgaacattctcctttgagcttgaacatttagcttattttcaagcacaagtttaaatcctgatgtttcactatcatttgtctattcttgtatcaaaataagccacatggggaagaaaccacaagaatctgtacaggcaattctgaaagaggtggcaatatttatggtcaaagacaaatattttagtttttttttctttttcatcttatagacatgaataggaaattactagtcatggtggtagtcagttctgaaaagtagtatcattgcaaaagttgtaaagaaccgccttttagcttgttactggtagcacattcaagttagtaggtttgatattttttcttttctttaaagtattatttattcaaccttttctttccataatttgtttatgttgtgaaaagccaaattttcgagtctatcaagacctgcaagggagtcacaggtacttgaactgactgaacctataaattgattgtgttcatgttccaagtttcttagacctatgaatcaagctaaatcagtttatcaagttttgggctggcttagtttgtaggtctctaattcaatctcattcgggtttgtgtgtatatgtgcatgttaattccctggcaatcttgattgatggccatgccttttatccaaatatctataggtttttctctgattttaagtctagcaaaatgtggtactttactattttctgccaggtcattgaaggtaggggtgggcacccgatccaatccaacatttttttcctcatccgatccaattcaattagtaattggatttagaaaatcatcatccgatccaatccaattagacctcaatccaatctaatccaatccaattacacacctaaatttcaatattagcttaaaaatataaagaaaaatacataaa

SEQ ID NO: 303037 - DNA, 4569 bp, Cannabis indica
atagcgaggatcatcagtcttcgatacattattcagataactagaatttatttcggtgatcttgaatcatttcaaaatagcagcaacataccattttgagggatttctttctatcaaagaatcatatgaatggttgattcctgtgtaatacacttttgattttattgaaagagttttacctattcaccaaaaattttacttttgaatttgaaacttgcttgaattggactctttcgatttttttcctttttttttttaattttgttttcaatttttttttcatactttatatatatatatcaaacattttaatttttaaaataacactatttataaaattaaattatataagacattaattattgcaacaattaaaattatgatatattttttttaaaaaaagcatatatattgtaacgaagtaaaaagtgtattgcatataacttcaacctagtataattttaatattaaataaagaaatctgaagagattagatttggattttaaaaaaaggataaacatgatatttatactggttggaccgctaatgaaacatattttcaatataatggatcatatctaagaataacttgcaaagctcaaattttattaagattttggcaaggtatgagcatagactaaaaatagattcccattacaagtgatgacctaataaccctatttataggcagctaagggcttagcactattagaaaaaaggattattaggggtctataacctaattctttgtaattagcataagttcatgaacaattcttgttgtggtacagttagttttattcgtgatgcggttatggttaatcttttttattaatgtcgagtgtgtagttaagtaaaatacattaacaaaattataatattcacacaacatcacatatataataattttttatacattattatattttatatatatattttaaaaaccaattttcatatattagtattatacaattatatttagagattcaattaaaaactattaaagattgtggagatgttaaattatcatatcataataatagagtaaatctaaaggggagcttctaaaaatatatatatttttatatatattttatttataatttttcggtctaaagcttttatttacaaaagtatgtttataaagttttaaaattataagaatacactttactcagcaaaaagtaaaaagataacaagaaatcaatcttacgataattataaatcaactataaataaattttaaaacaacaaaaaataactagaaaaataacatcataacaactataagtaaaccataaacaaccaaaaaaatagtttatgttataattgaagaagtatttttataaagaatttcaaagagtaaaaataaattcttttttgtattagcgatttttgtaaaatttttcaaacttttggtctattatgtaaaacttttaaatctaaactcacatatcatctccaagttgaatcttatcaatgaattaagggctcgtttagtaggcgatataaatgtcgtattgtattaaataataaataacactatatttggataaagcaatgtattgtattaattattacgaccaattttttttttggtgaggggggtgcgaggtacctattcattgaaaggaaaaaatagcccaagaactacgagaaaacatgaaaaaagaaaataggccacgctatagccaatacagaaaacaaacaaaaacaccaaaggagaagaccaaaccagaaataaatacatacaataaaagcaacattaactcgggtcgagaaaccattccacatgatcagaaagcacgccttcatctattgaattcagagctatttcgccaacaacagagtagagccctgcctacttagcagaattatgggccatataattttgatttctcttaattttccttagcttggagctttcaagggagggaatagcacgtttgaatcgagttgaagcaccttccaacttagtggggcagttgtcattgtgtggattattaaagttggtgcattgtcacaaaaaaaaaatcactcttttgaagtgattcctcactgcatattcagcagtacacaccagcatgtgcgcttcggttagagctagattcgtggcggtaaaacgctatgagaaaattgcatgtatacggtccttactatctctaaacacggccgccccgaatgattgatctgagaaaatataaacatcagtacaacaaacaagccaaccagacggggggattatctgaaccgagtcctcatagatgtgtagttttcgacatgaaaggtggtcctggtaccgaaggcacactgctttaattgcctctgaacctgtaaaagatgggagacatgaacaacgttgttgtgcgctctccatataacttcaaaaatacataaggcttccagcataaagtcatcaaaaatgagattcaggggcccgttgcagatgcaacgaaaccaaagcatccaattaagccagttctcacactgaatgatatatgttctaattccccataagcttccaaaatagattgctttagcatacatacactcccaaaaaagatggaatgatgattccacacccccatcacatatggggtagtagatagacgggatggagatggccaaagttagcttatacctggtagggagggcattgctaagaatttgccaccagagtaacttgagtcgcgcatggaagggtgcattccatagtagtttccactgccagttggggtaatcgctgaaggcattcttctttactaggtggtacactgatttgatcaaaaataatccactctcctcacctagccaaagccacgaatctttctgttggtgggcaggaagaccaatattgaggatatgtttagcatctatcgcactgaaccattgtctaactcggtcttcattccaagtgaggtgtcattaataaagtagtgcacaaggttcgccccttttgttgcatcctttagagggcgaggtttgtggtcacctgtaggtacccaagagtcaaactagatggaggtagatcttccatcccctatcttcttacagataccttcatttcgaagcgttttagatttcaacatccctttccacagccttgaatcagtaggtttaatctcgacgtcaaaaaagcttgctcctttcaagtatttttcctctatgattatactccaaagactagaggaatctgtgattattttccagctccacttgaaaaggaaggcgctattaatgtctgacttgacagaatccgtgacccccattaaactttgacttacagagagtactccaagctatggtatagatagatttttttgtgtcttgatcaccccactagaaatttctgagacatttatcaatctttgttgcaatcctgcacggaataacttcagaagcagtaacataaattgataaagatgcaccaactaactgaattaggtaggctctctgagccttggacagcagacgagacttctaaccatcaattctagctagaactttcttcacaaagaatttcatatcttgtgaacgattgattaaccgaaagagaaggaggcctaggtaagttacatctttcttcattttacacattcccagaatgtcagcaatatagtttgcacgatttttagacactcctttcgagaaaaaaactattgatttattgaaattcaccgcttgtcctgaccaagagcaataggtatggaggctatttaggaatgcctcaacttctttcacagttgcttatccgaacaacatgacatcatccgcaaacataaggtgtgttattggaggagccaatcttgacactttgaaactgcgaatcttacctttatgcatgtaatccaatatcaatcgagataacagatcgacaacgagcatgaaaagggccggcgatagatggtcgccctgcctgagcccacaggaaggggaaataactccttgcttagctccatttagaatcaagttcaacttcttagtatgaatgcagtatccatccaaggaaaggatccttggcaccatgaaattgaagagcttcacgcaaaatatcccaatccatcttatcgtaagccttttccatatccaacttaatcatcatgaagcctctagatcctttctttcttgccatggaatgaacaatttctcttgccatcgctgtgttttttgtaatagattgtccttttataaaagttgtttgagtaggggaaatgataaatggcagaatgtgtcagagtcatagagcaaggatcttagatatgcatttgtacaccacattgcacaaggcaatggggcgatagtcattgaccataatagggttctcctttttcagaattaggactatattcgtatcattgatgaagtatgacagctttgaagttgtgaagaaatgagtaaccaactctagcaaatcgtttctaatagtgtcccaatgagaacgaaagaaagccaccgacaagccatcgggacctggagctttgttaattcctatagaaatgagagcttgaaaaacttcttcctcattagtgatgtaagttgtattatttaatgttggaaattatttt

SEQ ID NO: 303038 - DNA, 2943 bp, Cannabis indica
aattcattagtggaagtataattagaatcccatctaaagttgtgcacaatatttcagttccagaattaacacttaaagggaaccagcatttgatctattaggaaagtcaagattccataattgtaaatcatgttcctagctatgcacattattagattcccaaaatagaagttgtaagaatcatcttctctaagaaactttaacgagtaaatcaaagaaaataatcacatgaacaagagttcatgataacttaggattgaggccaatctactattgatctttattatgatacgaattagatttttatgataaacgacatgttaataaatacaaatttattcatattggtccttgtcatatataatctctattatataaaataccttcactttgatgtcatactacatccgtaatccgaactgagattacttgcaccaatgaacgggcatcagtgaatcgtcctagcaactgttgattaaagacttcccaaatttaatatgttattgactgtttaattcatagcttaattgcacaaagttctttgtacagctacaagccacaacctcatttatgaatgaggaattttctgatatttaatataaattatacaataatatattaataacttaacattcatatatatatatatatatatatcacatgttcaactcattatttaataatcaaaaaaattacggacttttcagggcttaaaccctaacaattacgtcctacttggtcaccaaatatattgttgacaaacctctaataggtgacactgacatttttgagtcctaacagcatgactcggtaacaataaagccctttgcatgtgatgaaggatatgtgttccttgtcccccgagttcatagtgatctgattgtatcccaagtatgcatccatgaaacataatcactcatgccctactttggcgttcaccagctagtctatctgagggagcaagaagctatcctttaggcatgctttatttaagttggtgaagtctacacaaactctttatttcccattcagctttgggactaggacaggcttagatacgcagaccaggtaaaaggcttcttggataaatcaaaataagttgaggttatccacttcttcctttagtgttatgtatcttacagaattgagagctcatcattttttccttacgagccttgcttgagggtccacattaaaatgatgagacatcaatgtgtgagttgttcccactatatcttcatctccccatccaaagacgtccaacgtccctttgagatattatttcaacttatttttgagggctttgtagagtcctcttccaatcttgagtaccttcaagggatgttccaacatcaccacttcttcaatttcttcatcaagttctgcacgggcgtcatccttcaccctcaggtgtaagtttgcttctactctttgcaagggggtgttcctgttgcacacagtcatcactgtggactcatgaagctttgtgggaatcccaagggatgtgttgtaacattctattgcttccttctattctccttttaccatggccaccccacccgaagttgggaacatcatggctaagtgataggttgacataacaacccttaagtggtagatggatggtcttttgagtactccattaaaggatgttgggcagtctaccaagatgaatgtaatcgttaccgtcacttgctgaggatattcccctatagtgagtaggagttcaatcatccctgggatgtattgagtccttaatgaatccatatatgggtgtcgtgcaagaaatcaaatccttcaagcctaaccatttgctcaagcgcgttttgatagaggatgtcaaccaaactttcattgtccactaacactcggtgaacacgggcattagctaattgtatctccaacacaagagggtcattgtggggaaagtgaactcctcgtgtgtcttcctcaatgaacgtcatagagttcttcccctttgaagttctttagtggcctttgttctaagatcatgaccattggaggtagtctcccctcccgtgcatacatatcccttctcttataggtataacctcttactcctggttacccaaagattgtccttacatctctcaacacctttggagcctcgtttggggttcatttccttagatcttcttgcctccattcttcggggcatcaatcttgcttatagtatcctcctaagtatcccctttgtatcaggtcttcaatttctatcttaagatgagagcattcttctgttgtgtgaccaatatctctgtggaacttgcaaaacctaataggatctctcttcgacctgtccttcctcataggaggtggttttttgaatggtacctgatgttcatttgtcaagaagatgtgctcccttgaacatgcaagtctggtataataagtgaattctctatgttggggctcctcctccctcctaatattcttattctcgatcatttcttcccccatcaaattccctattcttctgaggttccttatgcgcgtgggggttttccaatctatctagatcactcttccctattgtgagattctcatgcccgtcttcaacctgaaagtatttcttagctctttcatagaattcctccaagttttctagctatctcttgagcatgttgttccatagcttgcttttttggatggactcccatagcaatagctgtaacgccctaacaattaagcacgttacccaaggtgattaagaaaccctaatcccctaaacgagattactagaacgataaacacgggtaatttaaactttaatcgaaaacagattgaaaataaaacttgtaataaacttaactttacaatcaaaaattacatgtttcgggatcctaaaaatattttacaaaatattacaagtcttttcaatagctgacctaggcggcaaaatgagagtttcaaaagtacatc

SEQ ID NO: 303039 - DNA, 6514 bp, Cannabis indica
tttacttatttcggcatctagaaaaaaaattagtcatttttttcatattcatgtacgttatagttatataagatgtcttataaaattttgaaaaattcaaaataattcacaatataaaaaacaatgttcaaatagtctatttcacacgagtgagtgcgacacaatttttgaatcctgttttcagcgtgttaaatttttccgaattttttaaaatttggagaatgtcttaaataactataacgaaaaactaaaaaattatttcgaataccaaaatagatagagatgaatcagtgcatttcgcattgtaaaattttccaataacatttaacaaaggtcaattaaataaacaaagagagaaatgagataccatttcaataacttgagattcatttccatctagtgcttcaatatcatagctcttagaattgtcctataaccaaaacacaattaaatcaattttaagaaaaaagagttaattaagattttagttctacgaactttgacatatactaaatcatactcctaaacttttaagatcgttaaaaatctccctctgatctattgagatgaaagtgtacgagcatcattaggtacatgtcaaaatttaagggtcattgacatgatttaatagatattgaattctgtgagcataatttagtacataaataataataatcagtaaaattggtacataaagttcaatcttacttcaaaatgtaaggattagaatggcaacctgtttatgaagctgcaatttttcattggcttctgaaattactcccaaaaagtctttacttttccaagaactgaataataataataaagacaaaagaaatcaatcaaaatgaaatattcatgaaacccaacattactctaattctatttctccattaaaacctacaaaccaaaagatgggaaatttaacaagtacattgactccgaggcacatgagcaatggtgggcttttcatcagacttgcttttctttctttcagattctgatttacaaacaagtaccgctgattctgcatatacatagttacatacatacatacatatatttatatgagtaaggaataatgataataataaaagacataagagagagtgaatgaaagaaagacctagagatgaagttgagggattcttgtgctccaagtgtagaagctccttactggtttctgctcctcccatggttatggcagagatgaagaagacgaagtacaaaacggcggcgttgcaactgtgttctcttaatgttctaacaaaccccaaaacctcttgcttagtactcagcatttttctttctcttttgggatttgagttgggctaaatatcccatattggcaaatttttatttttatgatttttagagaatatatttgcaaaaatatgattttctgtaaaaatatttattttatgggaaatttttgaaaaaaaagttaaaaaatacggaaagaacagcatagggtacttggttaccctcttatggtaaatggttactcttttggttagtataagagtacctggttacccttactcgatttttctatatatattttttttcaattttctcataaaataacatttttttgaaagaaaatgtcaaatttttgaacaaaaaatataagaactcataaaatttgtaattttctttttattatagggattatttcaaaaaaaatataaaagcaacaaaaaaatacaaaaaaacagttgtatggaattttaaatatttttacgattttatttatatgaaatacaattttttaatgtagttttatgttgtatttttattattttattgttgctatatgtatattatttttatataatcttttttattattttatacggtaaaaatatatataaaaaaaaatcattaaacataaaagtctaaaaaatttaccaaaaattttcctttattatattccttcctcctaaaccaactagcatcattttcaaaaattgggccatcctattatttttcgcaatgggcctaataatacgaggctttacgaatcaaatgggcctaacttgtactaataatgttaattttcatttcaattattgataaatagttaaagtttaattttttatggtaataatactaaaattatatttttggaacttccataagtacatggacattaattatcaagtcgatggccaggcaacaggccctgaatggtccatatcattaaattttttattttttattaaaaattaatttaaatatactgataaaaaaatgacacgtggttcgtagataataatttgacacttaacaacaatatattagtgaaaatctaaaaatataacttatatattattactataaaaaattaaatttaaatatttttccacaactcaaaattaaacttaaatatttatgttacaaattattcctctctaaataatgacaaaaaacaattataattgtacaacaatgcttgacaaatcatataaattatttgttaaatcattgaaaactaaagtacatcaaactaaatttagaatacattaaattttaatcaatgtacataaaaaaaattgaaccggtttggattgtacattgttcattttgtgcatgattaaattttggagagtagcatttgtgatattagatcactaatgttgtgacatattacaactttgaccattaattaagcaaaatatgatctttttagtcttgtaatcaatgatataatagtgaccaaattgaagtgtgcattttccatgttcacaatttgccttttgggtattgagaattaaaaatctaaacaagcaagtggttaataagagtcatatagagatagagagagtagtaaagtaccataacatatatatggacctgaatagacttatccttacatctaccactgcattagtcttgcaatctcctccacccaatctataatccaaaaatccaaaaccaaaacacatctttatttttaatcttttttgggtatttttcttcttcttttttctttttgctaaaaaatccttaccacctcataaaattcaaacttttcctcttgtataacatcatcatcatcttcttctttagtttcttttttctctaatatttccaaccatggcagctgcagtaactgctgctgtttcattcccatcttcaaaatccacttctcttcccaccaggacttccattatcacaccagacagaatcactttgaaaaaggtcagaactttatacataaaaatttgatcttgattaatgtatgtggtttttcattgaatttaggatatgggttttggttatttcaggctactttttacagagatgcatcagctgttagtggaagagtggtttcaatcagagccccaggtgaccacagaggctcctgctactaaggttgagaaagtttcaaagaaagatgaagaaggtgttgttgtaaacaagttcaaacccaaaaatccttacactggtagatgtcttctcaacactaagatcactggtgatgatgcccctggagagacttggcatatggttttcagcactgaaggtatcaacttttctcacatgataattacactttcaattagttgaattctcaatgtgtgtttggattggttgagatgtgtattaagtttaaggtgtgttcggaagtaactatgttattaatttttggtgtttttgcttgttgtgacacttaggtgaggtcccatacagagaaggacaatcaattggagtgattgcagatggtgaagacaagaatggaaagcctcacaagctgaggttatactcaattgccagcagtgctcttggtgactttggagacacaaaaactgtgagtttgttatgattatgtttaacttcataatttcatattttttgttttactaagattacagatttaattggtgggatggtgttgatttttctttacacaggtttctctatgtgtgaaaaggcttgtgtacacaaatgaacaaggagaaattgttaagggagtttgctctaacttcttatgtaaggacattgaaaacttctatatcaaattccattagaaaaatataataataataagggtaaatagatgcataactacataaatttaatgtttatttttagcggcataagtatctaatgtttgtaaaactgtaacttttttctaatttcgtgaatacaaattctgttattgtcttaaacaagatacatataagggtcaaattctaaatcattgggtttagatagaaatatgtagtatcagttacttttaaatatttttttaataaattcaaaacagaatttatactgacgaaactggaaaaaatttacagttttacaaatattaagtacttatgttgctatttatcctattaataataaacttgaagatgacttaagtggtaaatttcaggtgatttgaagcccggtgctgaagtaaaaattactggacctgttggaaaagagatgcttatgcctaaagatcctaatgccaccatcatcatggtatgtcaaatttgccattttaatcaaaacaataaatatctttagtgtgtaacatttttaatcaattttttgttacttgatttactcttatagcttgcaaccggaactggaatcgcgccattccgatcattcttgtggaagatgttcttcgagaagcatgaaaactacaaggtaaattttacatgttcttaactattgagactctgttcagtacactgtattatatcgtattgtattgtatatcattataatatgtaaattttaccagttcaatggtttggcatggcttttcttgggtgttcccacaagcagctcacttctatacaaagaggttagaatttgagatagtcataataattgatgtttaattgtatgatttcaacacaaacaaagttgttgatgaatttggtttgggtttgttaggaatttgagaaaatgaaagagaaggctccagagaatttcaggctcgatttcgcggtgagccgagagcaaacaaatgagaaaggagagaaaatgtacatccaaaccagaatggctgaatatgcagaagagttatggcaattactacaaaaagacaacacttttgtgtacatgtgtggactcaagggaatggaaaagggtattgatgagattatgagtccattggctgctaaagatggtaagaggactataataatattttgaaaaatatgtttttttttataccccattttgtaaattagttcgaaatagtctctgaactcaatttagtcatgttattctctaaaatatttgcctaaaattgagtttaagagactattttaaaccaatttacaaaatactagatttttctaaatatagaatttaactaaatattagcgaaaaagaaaggatttaaattttttttattatttttgaataaaacaaaatgagatcgattccaagaatccaaatagatattttttggtaactcattttgtaaattagttcaaaatagttttcgaactcgattttaccccaaatattctcctcggggacaaagattttcactaaaatcgaattcgggagactattttgaattaatttacaaaatacgggagctttcaaacatagaattcaagaaaatatttagcgaaaagagaggatccaaaatgtttgtctttttatttgagttgagatttgtttttaatttttggcaccctattttgtaatttagttcaaaatagtttccgaactcaattttaatccaaatattctccaaaatcgagttcgaagactattttgaatcaatttacaaaatacgagatctttcaaaacataaaattcaaacaaatatttagcgaaaatataagaaccgaaatgttattattattcattattttattttatttcttctgaataggcattgaatggattgattacaagaagcagctgaagaaggcagagcaatggaatgtggaagtgtactaattcctctttacaattgttgtacaaatatctctcctttcttctttattttcttcataagggtttcagtttccactgcattggtgtagataggtaatgccctttattcctctctttttttttttgggtctttttttttatcttaattaaaaatgatgcagttgtattgttatggcctcaatatgaattttctttatgaggaaccatgggagagtacactatataagaagccaatttctacatcttcattgactgtctcttctcttgttgctttatcttaaattttcaattcataattttcattcttgtgttggttttttaggtttgatatataagaatcacttaattatgagaaattatttgttgtgattaaaaaattaaaactaaaagtgttactaaacgatacaattattttttaaaattaccaaaaaattatgagtgttttgtaaatgatttgttttgggtcttgagttgggttagcccgagatgcaagcctagtcgttttagcgctaaagaaaattacactctatacccttttttatattgttctcttttatttttatcattttttttaaaatctatcatttttacc

SEQ ID NO: 303040 - DNA, 1629 bp, Cannabis indica
ttgctttaagaaaaatgctaaggctgtccatcaaggattctccatttgtctccctcacatccaaaggtaataagaaacagaccatcggaatgttcagaaaccaccactggaaaacgacattaggaagtccaaatttgggaaagagttttcatgagagaaggacgtctaaaatgacggatggtgaacaatctcagcaggaggctaatactgggggtagagtcatcagggacatcttgaagagtaaagatgtcattttcctcaagggtaaggttcataggttgagaggacaaaagttgcatactttccatattgaaaaacactttgagattaaaatgaaaattaagaatatagaagagggaagaagatacctggagatagagtctcatgcaagctttaaatagtaaaaaccaaaagctttttgagatacctctactgttgtttctggtcatagcctcctctgtctaggaggtagagctcataatgggatgggtttttggagtctcatgatagccacctcttcctttcgctcccattagtgggagagaaagtagatgttcaggagatttcgtgatttgatggttaggaaaaaataagagaaaagagaaagaaaataaaaaaaaatggaggcaaaaatggatctaggtgatagatgttgcatttaatgcaacaaaaaaaatggaggagtgcatagatttgggggatattgaagatcagaggcattaattgcacaattaatgtgcttagtagtgaaatgattagaagggtgcgaaaagaagagacaccgtgaaccaccacacgacgccagagggtggaccagaaacccatcttgggtaccgaaaagaggaacacatgccaaatgcttgaacattctaaagagattcctctgtgtatgattgcttttgttgttaaatgaaaatatttgaaagtatatatagatgttaggctatttctagcctatattttggatcacttttatgttcgcttttcaatgttttaggacagaattatgcttgttttctatgttttcaagttcctcggagtaatggaggccccgggatgcaaaagtgcaataaacgacaagtggagccaagaaaaacaccaaattcaggctaaacacacttctggccgcgacgagataaccatggccgcagccataaagtccattacagaggcacgatttttagaagcccaaatcgccacggcgagatgacctgtggccgcggccagcgtctgtacgttcgggggtattttcgtccgacgaaccctaaaaatcagatataaatagaaaactgcgattggaaattagggatagtgatttggagacctaaaacgcagtgaagagcggcaagaggagcaagtgaagatccagagtctttccaccgacagtttctttctctattcctttttaatttctttatgttgaattctgctttaggaatggttatggatttgattatgaactaaattttcccatttagggaggatgatgattgttgtttaaagtttttgcctagttaatgactaattgccattcctccattcttgattgtgaaattatctatatttgtgtttaattccatgggtaagcttgatcaccttctacatgctctatgatctcaattcaaaatc

SEQ ID NO: 303041 - DNA, 2209 bp, Cannabis indica
tgattttttattatgtagtaattacaaattttaaaaaaaaaaaaaaaagttattttaccaatttgaattcttcacataaaattaaatacatcttcatgggctcaataataatgaggttgaaagcacacgatacacgcccataatctccagggagcccattgggctataaatcagtaaacacaagcccataaaaccaaaactaaagatcttaaggtacactaaattataatacacattataatttgtaattagttagaagtattaattatacaattgaaattaattgatgtgtaaattgagaaagtgactatcattattctttgagaaatactaaggagcaccttaccttaaggtgtcaagcattgtaagagatgatttatcgttattggtacaaattaatatcaaatcacatttataaaactattaaccattcataacgtgccaccttggtatggtgttgggtaccataaaatacctaatagcaatgctatattctttatgttgtaagagcaactccaatgcaagtattttaaaaaatagctaacaatttttacattatcttaaaatattatattttattttttctttcattcacattatttttgactactttactcttaaaattactccaatgctaagcaattttagaagtcaagagaatggacccacactctattatttaatatattattaaagtacatttaatattttaaatattatattaatacaccttttgataaataaaaaaataaaaaaataattcaactactattgctagacagtagcaattgtagtagcccacacaattttctttagtggtcaagcaatcaagattgcttttcttggactgacaaaggcttgatgagcaaccaatattagagctgcttttaagatgagtaggacacttaattgttggaaatgaggaagcatgactaagctaagaataatatgcaaaatcctagatattatgaagggtggcaccaattaactcaaatatttcaatgttttccattaatttctttatgttattatgctctagctcaataattttatatttttaataatgaaaatacttaaactttaacagttttaagttcgatttctaaattattgtattgcccataaaatttatcattcatctctgatactttcattgtccgaattgtctcaaatcttaaagtatttttatgatacaaaagtgtgaaacaccgacttaaatctaaaactctgttatgatctacatagtttagaaatactaactcatgaaatttaataatgatagtttatgaatctcatgtcatataagtatgttcaaagttcatattttggtcattgaaaatagatgaatttaaatattagattgataaaaatcacagaagaaaagcaagtggtaatatagctacaaataactatactttacttttgcctaaataacgtgggaccaaccaaagaaacaaatgtacatatataaatatgctcttcaagaaatttacattgtacaaacataacataatgactagtgacacatgaagaaccgacacaagatgatttccttgttgctttattatcattatgaatcctatattcatattcccaatctcaaataaatacaacttttatttattactaataactaagtactacaccaatgtgaactatactttatactaaataattatctaaatcaaaaaggtgaaataattaaaaaatatatatttttatattatctcaaatcccaatagtagtgtaacttataagaagggagatttgatttagacattttgtgatgtgtagtggggttaggttaggtgcaaactttttgggttgttccccccaaaaaaattataaaaaataaataaaaattatattttttttctttaatttgttgtacttatgtatttatgatgagtttgagttatgtattgtattgaatgagaaataataaaaacaagtgtaagaatattgtgaataagagaggggaaggaaagtaaaagcaaagaaaaagggtgagtgtgtcttttgtgtattggttgtaaagtgttttcttattaaccattcacacacaaaccacgtgcaccccaatttaatctccacttcctacttctctgtattactatttttgttgaagattgttattgggtaccaataatttttaatatatactttctataggtgacgttttataattggttagtaatatttcttaaaa

SEQ ID NO: 303042 - DNA, 1500 bp, Cannabis indica
attaatcccaaactccacccacctgatttttctcctcctccttatttttcaaaccatagctcttcttctcctacaatttctcttcaacaagaaccacatctatggtctgcattccaactaggataaatttctccgaaccacatatgaaccttccaagccacaccgatcttcctcactcaaaacgactacgcaggcttcactctcgatctccaaggccacaacagattcaacattttgaaatccttcatctcctccttgatctagtcatcgaagattgcctctcattcttcaattttattaaaaaatatcaaaattaaaacctccaatttcaaaaaatagggtttcaaaaaatcccttatttttttttctacggagaatttatgggaggagtgatttgtctcttaatcacctccctgatctaaagtgctttgacgacgttgctttggtcacacccatgtgtagaatcaacgaaaaattgaaacccagatgaacaattccttagattttgactcaatttgctaaaaaagaatccaaccctaactgtagtactgattgaagattgatgcccaaatcggttaggattgaagagaagaaattgctggctaatcaaaacccgatgaggtatagaggaaagcctaggtcatttggaatgcccaaatcagaattgtgctattagccaagtttagatccttctagaaaagatattctaaatgcaagttgaaccaagtgttttggataagaattcagtgagttatgcatgttttattgatgtgatataagtacatttcaactctaaatctgagatgtgccatgtaattacgaactgcgccacctcattgtgccaaaaggtggcgcaggttagccatgcatatttttggacatcgcaggttgtgttttgactttctttttaatggtgagtcatattttgcaggttttacttgtgccatctttggagccaaaggatggtagaggtaggctaggctattggaaagaatttgatggtgtttcttacttattttagtcatatgtatgctagaaaaatactttgatcacattaattctcggccaattggtgggggagagacttgtaccatcttttgggtcacaaagatagcccatgtcagacatagttattctacacctcttggtgacttttgtcatttgattttgatgtcttggcgtagaaaaaatacatttggaaaggaatctccccaccatcccttgtggccgacctgtgtcacttcattgcgcacaaagatggcacaggttggctagggttgatggtgaatggaatagttcctttcaattgtgttatgctccttgctgttggaaaaatacatttagacaagtttcctttcgtagtttgagagtagacatgtgtcatctttttgtgccaaaatatggcacatgtttgacatgccataaggaatgtcttccttgtgcaatcttaactttatgcttaacttttagtttttttatgcctaaatgagtcaagtcctt

SEQ ID NO: 303043 - DNA, 2218 bp, Cannabis indica
cgtaaaaatccttctctcaatttcttacaactcactaactttataatattttattagttgccgaaaacctcggtcagcacaatgaaatacaaatttatcttatttgtagtaaatatttgtgccatctaaaataatattttagctcatccctaactattccacttgggtgattaataaaaatttatgaacagcttatcaacattttgaggagggatattgaataatattatcacacatgattcttgtgagtatcattattcatcatcctagccagttgccacttccatctccatcctcttaaagcaccctaaagtgtgggtttaatatttaatattaccaacacaaaataattctacccagctcttaagtaatatactaaatttgtaagcaaatttaaaatatctgacatttggatggaaagagagagaaagaaagaaagaaagaaaaagtcgtacatccacaaatactttagtaacttagttaggtagttccggtagaacatgaagagtggattaattcttgaggaagtccgagactaaaggagaaaactccaaatttagaggtggatcaatcctaacattattaagcttattaatttctttataaagggctcatgtaggttggcatagcaatagtatcgagagagagagacatatatataaatataattaaaatcaagagatatatataatagtatcgagatgggagatgtagagcgcattttcaaggagttggacatagataaggacggtcaaatctcgataaaggagttgggtgaggcacttcaaaagcttggctcagttacagaggaggatgtccgacggattatgtctgagatcgacaccgatagcaacggctccatctctttcaaggagttctccgattttgctcatgctaacgctggcttgatcaacgatgtcgccaagatattctaattaagtgatcatcaatatcatcatcatcatcataaagtgcactcctgcacccattcatattccatattcattctttctgtctaccacctcatttttgtttcgcatattatatatcaaatatgtaatagatgttttttttttggattaagtaattagtaaaaataagtgaataactcatcttctttttgttttgtttcaattaattattgtacgtgttacaattcatacgtacagataataaaacaacaatatctatacaaaaggaaacttttttaattttgtagaaaactagctagctataattcaactcccatatacaaaggtcgaagttagttagaactgaggtgtcatgcatactcaattataaatatatctatttataatatgaaaatttaggactaatgaatgcagccttataacgatcatgctcattaattatagtatcatgttcaatggatgaaagtaggtacaatgggagtcaaaggaatggctgttattctagagcccaaaatattaatggctgttattctagagcccaaaatattaaggtccatcaattatattatttattatataatataatgtttaagattaaaattgtgatatgttatatatattacatataatataattgggaattatatgcatgtgattgggagttacatatagttgtaacatataagaggtggagttaatattttgtaacttccacatgatcactaattaagtgtgtaaagagtggttacacaacttaatttttgaaattcaaaaactataattcaaatatagttgttggggattgaattttatcatttataatgtgtataagtgatataaaataaagtgggaatggtttggaatatgttggagtgttatttgcaaaagctgaaaaatttagtaactagtaactagttactatttttttcagcattaatagtagaacgttttttgctattgggatggctttgaacaactcccataacctccaaatcacccatttaatcccatttacaccccattaagaaatggtaacagccattgggtgtgtgatgtttgaatttcaaagtttgtgatcctaaacactataaatagaggtcttggttcaccctttgagacacactcttctcttctatctttcaaacacaaagctagagagttctaaggcttgataattcctagaagtatttccacaaagccctaagtgtttcatagagggggaaataatcttcttggacaaaggtgtagaaactttgttcaagcttttggtgatccccatctccact

SEQ ID NO: 303044 - DNA, 4369 bp, Cannabis indica
agagagagagagagagagacgtgagacaaatagagagagggtttgggtagtttgtgcgtaggagagaatgaggttgagagtgaggaagggaggtggctgagggtgtgtagtgtaggttaaatggtaaggttttgttaaaaatgaactgacccatttgtctttaatttttttatatttaaaaacaactatattttcgtcgtttcataaatgatacgaaaaggaaaatgacagtttttaatcaacgcagcctagtgtaggttacaaacatacacaaaattcacaacccaaacaaatgtgtcgattttaggtgttggtcgtcctgttgaccgacggaaaaagtgacttttgtagtagtgtctattgacggtggaatctcatcaactaaatcacgactagaaaatcaaagcttaaactcaaaactttgaacaaagatgaagacaacaatgaaatttttttgaaagtgtgcaaagcaactatgaagaaaaagtattgtttgtatttctatatgccaagtgttacaataatttttccaaccccctctcacattaaagaatgggatatttataggctttaacgacttgtaatacacttatagtccccatggaacaagctggcatcctggtgctgcgagctgcaggtgtcggaggtggtcttgtgccttgtatcattgtttggtgtcaggtgacttccggttgcagaggtggtggccaatgtgtacccttcgtcaggatttcagggcctgcatgcatggtgcctccactactcgtaccctctcttgttaacaaaccatataggaggcatggtcgtcgtactcccttcacttgcatgtcttgtccttgagattgtacgcctacaaatttcattcccaacacttaggaaatttttactaagtattggttgcaccgttaagcaaggcattgttgggatgcttgtatggatgcatgctttccgagtggcatacagtgcatgcttggccgagtagcatgcttgatcgagtggcatgcttgcatgcttggccgagaagcatacttggcatgcttggccgagcggcatttggtcgagtggcatgcagtgcatgcttggacatgtgacccaagtgtgcattttctgaacgggtcacctttggttaactccaaaagacgccttgggtaatcttttagcttaatcatcggttaaactcagaaattaaccttgttaattgtcagggttaacacttgatctccagtctacaagaattcttttaagtgttcttgttaactaaaagaattggtgtttcatcatggttcaccttattgaattgttagccctatccttggcacgcgcattgagaaggtgccttgtatataaggagggcttcatgagttcttcattcatttcacataagcatccttagcctagtggaagaccttgcatcattctcttaagaggtggtgagttcgatccttggctaattcacttttcaattctattttactttcttttgtttagtcaattttccaaaaaaaaaaattgggtaccaaggatgccgagaggccctaaccaagtggccctagttgagtggcgttcaaggtggacctagtggccctttccaagtggcctcctctactataaagctgattagatgaacaagaccccctctcatgtgagcacaatcgagggaatgctaaagacctccaaggatgcaacctaaaagagaacaaagactacatacatatctgcttaaaggcacaatgagacaagagaactgaggctaaggaaattattgaagataaaatttggtgtttacattttggtgtttaaacatttttaaagtcttccaaatcaaaggaaatcactcaagaaggtcagaaacaattgttagaattcaaaattgatgcctacctggtagcttcgcatgaaacgggcttagttcacatcataaagtcaacctcacactagtgtaaagttgacttaggagactttacccaaaaaatgaccttgatgatgtggacatcaatgtttaacacgtgcaagaaggaaaacttccatggagctaagagccatgtgtcatagcaatcaactctgggaagggtccctagccttgcgcccaggttaactttgggagctccagaatgggtatttggatcccatcaagtcatttctaagtcatcgtcctttagtattctaaacaaaaaaaagtcaagaagactctaagtccaaagtctaagaactaaaagatgtcaatttggcatcccaaaagtcaacttgggcgcctagggtttcaccaagcgcccaagttgacatctcaatcaagagtttcagtttttaggtatgtgttagtgcaaaatgctcaaaatttgtacttagacatgaataaggcctgtcacaaacatgctagaggcactagaatcaaaatcggagcacttcccattggagacacctaggcaaccagtgcctaggttgacacgacaatgcacccggcatccaggttgaaaaattatcaacctagggcacttctaactatgttttgaagttgtttgcccaaaattttctgtcttcttccaaaataaggagcgagtacttttgggaaacaagtgacccagtgtctaggttgacactgggcgtggtcactagtgcccatgttgatattttgttaacctgagccatttccaatggaaattttgacaaattcttctgggtatattctctattttcatcaaaaattaaaatagggatgctttctggaaacaaacagagcgatctggttgccaaagagaggactcaatgcctaagttgacctggagctagggttctaacgccaagttgacattttgtcaatctgggcaacttacaagcatttttcccaggaagtctcctgggcattttctctgtatttgtcaataacaaagatacaagtgttcttgggaagtaaacgaaagcatctaggggctaaaacaatgacccaacacccatgttgacactagtgctggtccctacacctaggttgacattcaagttgatttgcatgtttttgttgctcaaatgtaaattctactctgagcagtcttcttatctttctcaaaaacggggttggagacctcattcgtaatttcaaataccatagaagtaccaaattgagtcccgagaagctcaatattgagcccctagtgcccaggttgacatatgatctagtgcgttgggtgtcgcttatctgattccagcctcgtctctaacatatggctatatttttatagcaaacaagaattatgacttctgataagtcaaatttacacattgatatttcacctttttcagcaaattgaaatatcggcaaaacaaatacaaatcgagtagtttcgagtctcttgtttctataaaaatacaaaacctccgagaattggtgaacgaattcaccagacccaagaaattggctaagtgatgttgaaatatcacttaggcttcaaaaaatatagttttggtaggattttccactcatacagcatctatgttgacgtcaaaatatcaacctaggcattggatgtcaccctgggtgctgaatgtcaacttaggcatcggttgttggacatcctttagtaactttagtaaaatggtcataactcactcaatattactccgatgaacgtgattttaagtgagtttgaaagcacttttcaagcaatttttgcacatgtctcactcatatctcaatttttaagatttcaagttgaaaattatccccacatcaaagtgtaattttgtctacaaaaaacctaaaaatgatctagcagacgcgatttgagctctaaaaatttacgataatcatctggagtcatttaaactattagatcaccatcaatggtcaagatagccgagaatgatttttttcatattttttgtattattttattaatattttaatggacctccttgcctataaaatgagaactctagtagctcattttttacattgtgccaagtctccataaggttagtgcatctctctctagaattcgagatccctccttagctaattctcttgtaattctcctgagcaataaacctcaaagtagacgtaattctattaccatcacgacatggagagttaagtactataaattgtgatgtctattttatttaattgaaattatattttagacataaaactcaacataagaagaagcaaaaaagtcttgtggttgattctattatacaacattggcaggagatgcatatgacatttggcttaatcgaaacacattgaaagaaattgcctacaaccaaatcatgtaaatcattttatcaagtaaagtattaagagtcactactaaaaaaatgggttttctcgatatttttaaacagtcatttaaaatattcctgtcggtttctataa

SEQ ID NO: 303045 - DNA, 4301 bp, Cannabis indica
tctctctctctctctctctctctctctctctaccatgatggcactgccctccaccaccacctccccacgatgccaccactattgacgccgcaaccttccatcaccattgacgccgcaacctctcatcaccattgaagcaactcatcgaagctctatatttctctttttttcttaatattttaataattcaaaatcaaatcaaaaacctgaaacatccaaggagattcacttaaacactaatttatacgtttcaaacacagtaatatatgattttttaggtttagcattactttttttatttattgctttaattaaaaaatctacatattttttagcaaaactatgtgtttgtgatgcccctagtgaagaatttagccaaaataaaatgacgtttaatgatagtttcatgaaaatttaattttaggctaaaaatgatacatttgtaatggtgtcataaaaacataatttttgacgcaagaataatacatttgcgatgatctgcgatgaaatttgataaaacttataaaatttacttttcactcagttatcaattcttgtaatttttttttttaaatggtaatttggagatctacacatttataatatgtataacattaaattctaagtgtaaaacaataaatttctagatctgcttgtttgataccataacgaagtttgaaacttaaataatttgaagtttaggttatacaccctcttagtttaaggttatactcaaaaaaaaaacaaaaaaaaaaacacctaaagtggacaaacaagtaaaaagttatacctcaccaaagcttttataaaattttatcacaaacgattgttaaataatatttttggcataaaatcacatttttatgagactattgttaaacattagttttaaatcatatttttctattaaattttcaaaagaagaagaagaagaaattgctaccaaaccaataaatcatgcaaatatgtgttcgaaaccataaaattagtgtccttagtgaatatttttatggggttaagtcttggattgaattttcaatcattaaaagtgaaaaataaattgaaggatatggtcattggtgggtaaacatgtcgttaatggtggttggcgcacgaaggatgtgttagaattgtaagatgcataaggttctatttcaaaaccaattggcaatgagaggagaaatagcctatgcatcttatgtatggtatttagtttccacacattatcaatgtgtgactccctaatatccctcctcaatatggtagctatttttgttgttcaccaatcttgcacaactcgaccacaagtggcttttttggctcacagcgactctatttggctcactatccccagatcacaaacggctctttttggttcactatcatcggatcacaagcggctcctttggctttctttttagaccgatttttggattttgatcgaatactcattagagtatagtttagctctgataccatgctaaaattgtaagatgcacggggttccatctcaaagtcaatttattaaaacatattaccgctactgctttagttagttagtcatttgcagagatagtttaggttagttagttagttataactaactcaactagctaagtaaggatgaatgtgtacataaagggttttccattttctcatatacaacagattgcattttaccaagtactgaatcaattctcacctctattatggtatcagacgtaaactagatctttcgcttatactctgttcatggcacgcactcagtcctctagttcatcttcttcacaagatccctttctaattgttgattcacccataactctggccaatgatttgcccatagcttcgccataattcttgccaatacatcagaatcacggcatgcaacgtcccgctccaatggttgttcctcttttgcaagcttctgcaattgataatgatggccatggcgttggttctcacaatttgcatcgacctagatttgatggtaatgaaccatattatgcttcgatcgaacaatctcaacctattgatcacaaaatccctttccatctcaacaattgtgatcaaccagcttatatcatcgttcctacacctctcagtggtcaagaaaacttcctttcttagaagggtactcatctatctccattgtaccaaaaaacaaaactcgattcatcgacagtacgttacctcgacctcctcccacttatcctaatatgagtttttggattacttgcaacaatatggtcatgtcttggattctccaatctgtttcccctgatattgctaaaagcatcatgtttcgagataaggttattgatatgtggaacgaacttcatgaacacttcaattaaagcagtggcaccaggatatttgagctccaaatctctctttccaatctcaaacaacgtgattccaatgtcagttcgtatttcacttgactcaaagccatttgggatgaactttgtgagtttcaatccttctctccttgcatatgtggctgcacttatggcaccatgaagaaaatataagattgctttcctaatgggtcttaatgagtcatatgtccaggttcgtgctcaaatgctgctcaataatcctattcctcctctatttactatttcctctgtgatttctcaagcagaataccaaagaggactcagaatcaatcttgtcattgctgccacatctacctttaagtcgtttgctcctaaagccaagaaaccacaccctacatgttccaattgcaagaaatcatgtcattgggtcgataaattttatttccttgatggttttctccctgtagatgaagataagaagaatttgaagactcttccaaactaggagttaacaatgttgcatctacaagactcttccaaaccaagagttaacaatgttgcatctacttcctctccagctccccctctctcctcgatgaatgtaaatcaagttcacgagttgatcagtcttcttagtcagtctcccaaacaatctacacaagttgaaatgactccaatggtctccaacttctctggtaacatgcatccactcatttttggattgtggacaatggtgctacatagcatgtctgcaacattccaaactttcttcaatcttttttaacaaaacatttatccctaatgttaccttgccaaatggagaccaaattcatgtcattgacactgggactgttcaaattaatgaacacattactcttaaggatgttcttttcattcctgaattttagctaaacattttttatgttagtgcacttcttgattatttgattgacttactgttgtttaacaacaatgcttgttttctttaggcacattcaaagattaggattgctaaacggcttcacaatctctacatgttgcctcgtactcaatctactcatcattatttttttgacattgcttgtaataacctttggcacgatcgcctaggacaacttactacgcaaattacacaaacaatgaataaagaaatttcatttcccaataataaatatcattcttgtttttgtccagtatgtccattgcaaaaacaaaaacgtttattattttcctcatcaaatgatatgtttgctcatatttggggaccttttcactttatgagcattgacggatacacatacttcttaacaattattaataatcactctagacatacatggatttattttttaaaaaataaatctaatgttgctcagctcatttctcaattttataattatgtagccaagcaataccacactaccattgagatcatccgttgtgacaatgcaaaagaattaaacttgcctctattttatacttccaaaggcattaaagttcatagatgtgtagaaaaaaatattttagttgaaagaaaacactagcatattcttaatgttgcaagggccttactattccaatctcatttcaaccttgtttaccagtcctatatcatacatactgtagtttaccccatacactgcaccccatctcgcttattaaagttcaaaacacctcttgaactactcaataaaacttcaccaaactatacacatctcagggtatttggtcgcctagcttatgctttcaccttgttaccaacgaggcataagttctctcctggagcttctccttgtatctccataggctatcctattgggatgaaggcttatacactcttaaacattaaaacaaaaaaaaatctttcgttttgacaaaccgtgtggtgcagtgcagtttgcagttttgaatttaataatcgcggttcaaactgcaccgcactatatattacaaaattat

SEQ ID NO: 303046 - DNA, 1622 bp, Cannabis indica
ttcgtcgtccattaaatgaaaatttattgttccaatttaaaaccaaagccactatttagattagaggtaagtttaaaatatttattatcgacgttttaaatacaccacctgtgtctttctcttttcgcccaagtttttctttatttttttggttttgtttttaaaacaagataacttttacactcatactcttaaagattaaaattaaattgtattctacttagttattttttagtcaggatataaatagtgaaatttagagaaaattatattaattattaattttttaaaagttactttctttttttttgaaataaaaaagttactttctaaaaggtttgacatataggaaaattgtttaagatatatgctttatttcttgattcttcatttaaagttgcaacaatcattggcgtttattttgtaatagtatttgaaaaactcatttatgaatagtgagtgctaccgtcaatttcttattataatatttaatcattttatttcttattataacactttagttaatttatgtgttcaaataaaaaacaaatactagaatattttttttttttaaaaaaaaaaaaaaaaaattatagcagtgtttattataattacaagatcaatcatgtaaattttttgaataatttaccgtgcttaaaatagatttgatgttttctaaacacacgtgatagactagaataccaagaaatctattttcaatattataaactatttaaaaaatttcaaacatttacgagaaaatattgtaattataacaaatattattataaaaaaaactaaaaattatttcaacatattttcagacataaaaattaacttaaaattgtaattaacacaaacatatactttcctttttgtttgttttcaaaaaaaaaattcaatgcttgataaagctttgtgaaaaagccgaaagagtttcaattgcttgtaaaggtcggaaactcatgtacagcaaaatacttagccaatcagcaaattaaaacttttcgggcacattatttgtatttgtttctaatattgtaagctttggtgcaccttcttatatataaaaaatatttatcagcaataatttaataaataatttctaattaaactaccaccaaattaatattcccatcctttaatgttgaatatattctagtactctacacctacaaatgcatggtatcctaataatttgtttgctaataaccatagtattggaaattccaaggatcacagttgaatttttcaattcattatattttaattgttttgcttatttttttagctacaacgcggattttttttttttaaaaaagaaaaaaggccacattagactatattgttgcttaacattatttataatgtacttacgtacttagtggatttctctgtggtaattattttctttttattttacagggacgatttgttagaaggccaaattcaagacatgagggaaagatataacatgtagtcaaaaggaattatactatttattattattattattgagaatttcagatgagatgagatcacgatcaccatttctggtgtcgacatgtcctttgttttttcatattgaatagttttttttttaattttattttatggttttt

SEQ ID NO: 303047 - DNA, 2726 bp, Cannabis indica
aaagggacattaactatcactaacgttagaaatatggctatttacttacatttctctttaaatttactaccaaatgctatcttgaattttcaaatatattaaataaaaacctgttataaaatttacaaaaaaaattatgataaataatctacaattatataccatcattaaaatatatatcatattgaattaaaatgatgattaattagtaaatcaacctaagtattaagaaatcatgaactcatgttcacattattaaaatctttgattcacttattaaaatttcttagataaaaaatttataattttgttttgggagtttaataatgtagatggctgggaacttgatttacaatataaaattctaactttcctaacagatagaatattagttaccttaaagtgttatttctgagagtgaaaaattgtgcacaaatttaaatttgatataaattaatttttgctagtgaattagtggtattaaatgataaagatgttattatagtaatttaaccaattctaattatggaccaatacagggacgtcaaactactagtattggttatattaatggacattgtaagtaagtcagtaaatataattctataattactaagagtgaaatattatatttatagtagataaatagttgaattactaaatatgattattcgattgatgagattcaataaataatctaattattagatcttagtattatatgttcgtggtccttagattaccattgtataacacaatcaaaggaatggatgttacgaaataaagaaaaagagagaaggaaatttattttgctattgcaaaataataattatttatttttgtaataaataatattttaattggggagacataaattatcaggacaaaaaaagatggcaccacctttcctgttaagacaaggaggtagcgccaacaatatgtaataatacagtgataggtgcctatcacttgtagtgggtcccattgggttaatttttgaattaattaattaattcaaaagataaacattaatttaaatatgattttcaaaataggttatgaacatttattatggttgagatatttccttaaagcggttgacacactgtcttaagtagttaagagattctctcgatcagttatcatatatttaatttaaatattggttacagttatttattaaatattataataatattatttaatattttaaataaataatattatatttaattgaacttttattattactttattgattataattaatatatcagttgttatcataaaatcaacatagagtgacatggcatttccctaggtgatacatggatcattttcgggcctggacagtatatagctcccttagtatgctacccagattgaataactcaccagatattgcttatttgaagaataaggtaaaggtgtcgcgtagagtaaacggtaccattcgaccagcgtcgattttactgccactctgcatatgctgctaggggaaatgcaatagggagccttaaagatactttcttcctttatttatctattaaatcccaatttttataggatttccatgcgtaaataatgtaataaaagaaagtaaatagtttccccttttatcttttatttcttttttggaaacttaatgaatgtaattattccctataaatagtggagcaattccacaatctagggatccaaaatcttattttcaagaaatctcttacattgcaaaattgtaagcattcgagaaagatcaaaaacttcttgcttcacttttcacaagtaatcaagtaaaaggggagaaggctattaccattgtcacgtggccgaacctctataacaaatctatgttctcaattttcttattcattattcaaattctactatttctaatttctttaaagaccattatattgggtgaatggtcagtgtaaaatccatcatcaacctgatatactgaaccaatcaattactgataacagccaaataaggaggcctcctagtgaatcattctttaatagaattggacccgtacacgatttaagagatgatctgaatcgtagaaggggacaggacagacaactcatccatcctaatgatcagtcgattaatatagacaactatgtgccctataatgttctaggagatcaagaggtggtacaagtcggtgcatagataggtcaagttgatccagtggccttgtacaaagcttcactagcacaaaatttaccgacctagaacttgactagactaggggatcacccttttcacaagaaatcaatgcccttaacctaccgcctaagttaaaaatgcctacatgaaaaatatttacgggcaaggaagatcctctgtcccacatcaagtactttgaaatgaaaatggacttacaggcggtgaagggtgatgtatgatgcaaaatcttttaagctaccttggtagaggccgcctagcaggggtacttcaagttagcgctaggaatattcagttcattgaactcttttaggtcagagtttcacatgtaattctgctcttctaggaaactttcagcttacttagaagacctagtcaaaataaaacaaataccatgggagcctttaagagacttgtaacgccctgacggtcagggacgccactgttggattttgtgccctaaataaaactcatttcaatataatcaggtttacttattaataaagatcagaaataatattttatgttgcatg

SEQ ID NO: 303048 - DNA, 1577 bp, Cannabis indica
gcataaaaaatttgaaaaaaaaacggtataaaaccgtattatttaaagcgaggccaaatccgtaaataagtacaaaattaggttccctggtgcaaaaacttctttatttatttagggagttattattattattattattattattaaaaaaaacatggtgccagtcactaacgcactaaaatgagcataatcttccacttttaagtgttttactaattacaattaacaataattttaatgtgaaccaccaacaaaacaaaaaatgatttcatctaaagtggtttttcttttaatttaatttagtggtataattaaagataaatattattaaagagagaagaatgttaagaataaaaatacaaaattacatgattaaatgtgttgtgttgtgggtcattcttgtttttagtttctaatgaagtttttatttcatccaccgactatttaaataataataaaaaagtagtaaatgacttcaaacaaatgacttttgtaaaattatattaataattcacttttaaatgataattaattaacaaaaagttttcacaagtgggaggatagatgcttaattagatttgttgagagtaatgataaaaatggttggctggattttaaaatatgcttttggatttctgaatcttcaaaactatttttgttgttgtttgggtaactaataaatttcaaattttaactttagaaagttcttttaacataagctttctcaaaagaaggtaaaaatgtatgcaaaatttcagccaaacaaagccttaaattatgcaaaattttcacaaataatgatatgcatttaattctagtcatatatattattttaagtaagaacatcacttttaattaaacaattaagattatttttaatatattatgcaaatttattgatagaaattagctaaaataataattaacaactcaatcaggacatcttctccattggaagcacaattatgattaaaattagaaaaacaaaccaaccaatcgacctcttaattcctaaatcgtttgacaaaagaaattaaaattaaatcaaatgaaaaaaaattgtagcatcataactaaccttaaaaacacatatattcaatttcctctaatgctcagaaaacacaacaatataaactgttatagcaggttcactcaacctattaacttaagtactcaactattgtgaaaggtacataactgcaccattaacaactcatttagctgcagaaaacttgttattcttaactactaacagaattttttgatggtgagcaattgaagaacaaagtcattcaaaataaaacatgttacatagtcaagattaatcgcactaatctaaacaaaaaaatattcaaaattaggctaattaggatttttctctctcgaactttgacatgtaccaaaattatgctccctgaacttttaagctcgttaaaaatgctccctgaactattgagattgttggatttaaggacttttgtccaattttagtaaaaacagtctaacatgaatgaaaattcagggggcatgatttagtacatatcaaagttcgagggacatgatttgatagatatcaa

SEQ ID NO: 303049 - DNA, 1219 bp, Cannabis indica
aaatctccgtaaaattataattcataactaatgtgcaagtttcataattaaaccctatttatctgctaatttttaaattaaagttaagcgatctttgcattcgggccagaggagcgatgactgggttcagaccaaggaaactaatggtcgattctctaatgaatctgcgtatttagtccaagacctacaacgagctctctagtgtgaggtctccctcactctttggaataggctttaggatagtaaaattcttgagcgtcataagatgctttggtggagtatcctttccaacgctcttccgattcagtctgttttgagtaagagattccacattgatgattccatttgccctatctatgggggtgaggaagaatcaatgaagcacctttttctcaaatgcaatttggcttttcatctgtggcgttcttccccatggggcattttccctatcatggagacatgtatttgtatgtggtactaggtcaagttcttatgaagcttaagaaacaaaggcatcaatgtcgatgagatttttctttctgcatccattattatgggtactatttggcaggattagaataacaaggtacgtacataataataatttgggtaacataaaatattacattgattctattactcattgttatacagattacaaagctactcttactcacacttcttctccgactcctttggatgagtggcgtcatcctcctcaagattggcttaagcttaaatgtgatgttaaagtggggatagagcacatgtgtagtttagttattgccaaagaccatcatggctggtggtttgggtgactacgaccaaattaaactttctgacattgtgtgtggcaaggccgcttcttgttgtgtgatgctagacataacgaaaggaaaagggttgcaagtttgtaattctgaaaaacgattttagggtagtaatcaactctctcactattaaattctagtatagtagattctagatgggagattgtaaattactttagtcattgtaatagaatttctttattttttgtttggttgttcatttttaagtattttcaagatatacaattttatggtataatatggtcaaatgagcgtttgctcacaattagtagggttatttaaagggctttttcataaatgtacaacaaaaataaaataattataaaaaatgtgtaaaaaaaaagatatttgaaaaatttatacatttt

SEQ ID NO: 303050 - DNA, 1067 bp, Cannabis indica
gtcaattaatgaaatttcccaaagtatttaggaactttagcaacctcaaatgcgcacgagtgcttagtattataataaaatattatattgttattaatgtgattaaagtattaagtctttacttttttttttcgatacaacttggtaccaatccaagttatatttagagaaatctcattggtttgtaagggggtgaggaaggggattggtaatgggtaggaaacctttttgtttcatgattcgtggctttcgaatggttcaattctgagtctaactagtttgaatcttggtctgactaatgaaaaagtaagtagtctttttatggtaggtgagaaagtttgggatgttgatgttgtcaagggtttgttggatgagaacgagaagtattcttagtattcctctatctaatttggtcttagggattattggtattggaattttgattcgtttgggggtatacaattaagagtggttttaaattgttacaagtagactcaaatggtagtgtggattgggatgttgcggtgtttttgtagtctaagacttcctccaaaagcaaaaaaaattgtatggatgacaattaatgggtgtattccaacaagagtacagttgaaaactaaatacgtggatgtttctttgttgtctctggtttgtcataagggaagtgaatcaattttgtattgtttagtttcttgtgatttttgttcaaaattattagtggatagctggtttgtggttttagtttctttcatcattcggcgactagttctttcacttttttcctctactaggtgaggaacaaagtgctcaggcggtgatagtggtgtgggtaactcggttcatgcggaatcaacttttgtggaggggtaggaaaattcgggtggagcttgttgtcaatttggttcatatcattcttaatcaatggagaaaacccaagaaagaagttagtttcctgagaaaaaagcccaaaaaagaagtttgtttccttcaattgatacatggtatctttcggatggggctgagctatggtctaaactaggtttcgaaaaattcaaggtgaatattga

SEQ ID NO: 303051 - DNA, 2204 bp, Cannabis indica
ttgtaatttttttcctttttgtattttttgttttttccctactttttatacaaaataaaaataattacatggagtgtttttatagatttttggggtgcacaaataaaacttcctaaataaaattaataaaaattgagcataaggtattattttgtacacattttagaaaatattgggaacaaaccaaatcatttaacaaaacatataatctaattctaaaacatataatccaaaatgatatttatcctattaaaaaagacttttatagttttataaaataattctcacggtttaataattgtacacttaacttaagtcttagtagtcatcgtagagatgaatttttaagacatgcatctacaattaaaaatttaatattgtaatgatatttatactaaacttttcctatgttaaatcaactgtggataaaagatccataatattctttttaaatagtatttatgaatgcttaggttaaccaaattattccaagaataattctacgttagtataaactatttgatatcaaaatttatcaaaattttcagattattaagatacaatcaagaatttgtaataagtttcaatcaaattatttaacttattaactctaagtttccaaaactaaagaaaataatttaaaatctatgttaaataagtatattaaatatttaaatttaaattaaagttcattatagaaaatacacttagtattttaatctctgaataatataattaagtaaggttttttcaaaattaattacaaaaattaatttataaaaccataatattttgagtaattttgaaaagtttaacttagatatggtttggaataagttagtgaaagcggttctttaacagatagtttggtgtgtgtccaagcaattcagagcggtattttgatgccttcacagtttggtcttattgttcaagatgttcgaaatttacttttggctttatcttttgttgatttgtgttttgtaaaacgatttgcaaataagtagactcattacttggtaagagattcttgtttctctacaggtcgtgtgcttcagctggagtactgttcctctgaagtacgttttatgtttttattgttttgaacgaatttattaattaataaatcctataatttttattaaaatatatatataaagtaacttttgagttgctctatcaagtaacaagtaataagtaaaaggtaaatgtaatttcttttaaaaataaatttaatagttatgaatattcttgaatggaagaaaatccttcatttattgtgtaacttagttattattttaatcttattggttacccttcaaaaaaacaattaatccatatatagttacttatttataactttattttgtaatttgtacatagtaaaagctgaagttttgtattgttttttattgtccaatgatagtggaagaatagtgatccattctctatttattattaatgtaataataaaaaaatacaaataattggtttgtaacaacataaccctttttaacccatttttttttattctaaagaaataagttgatggcaataatttgtaattatacgaatttgactcattagtgggtagtaattcatttcattgaatcgtggtacataacaaaaataaaaatgtttaaatttgcaatgacctaattaattagttatttattgttatattttgtcctttactaattgtaattctaggtctgactccataataatcattattacagcgttggaaaataaaaatgattatcacgtgtttaggctgacggggtttgttcatttattatttgtagttgaaatattttttcaattattttttgacatcattttttgtcttggtatttaatttttttttcttaatatttttaaagctatagtaaatatttagagtgtaactgctagaaatttataggtagaaactaagtattttgaaataaataaaatgatggatacaagcaaacatattcctctagaccaaacttgtcctatgtgtaaccaggtgcctgagaccatttaccatttgttggtgcaatgttcttttgcacggtcttgttggcatctttcggttctaaattggagtcatacacctatagagtctttttgggattggtttagccacattctgctacaacactcatccacggcccaggaagaattgctcatggttctttgggcgatttggtatgcccgaaatg

SEQ ID NO: 303052 - DNA, 4722 bp, Cannabis indica
ttttgtaagttgttttgtgaaggacctacacttaggggtggcaattcgtgttcgcgggtcgtgttcgtgtcgtgtcgagacccatgtataacaggtacatgctcgacccgaacacgacccgtttaataatcgtgtcaaaaaaatgaaacccgaacacgacccgtttataaatgggttgacacgacacgacccgtgtaacccgtttataagtatattttgtttaaacatgtcaatcaataacacgtttatgaagcattcaacacgtttgtaacccatttatgacacgttaaagtactaaaataactttaaataggtcattaacgggtcaatttcatgttagccgtgtcaacccgaacacgatccgtttattaaacgggttagacgagtcaacccgaacacgacccgaacccatttaaggcaaacccaaacccgctaactctcgtgcgggtttcgagtcgtgtcatcgtgtctaacccgttttgccagccctatctacacttaaagagaatttaccaataaatttaattttaaatataatatgtttgatattaattttcagcagttttaaattagagtgctagtatgttgttaatagccaaagggtaatacctttggctagttatacttagaaattttgttcgttttttagttttttgtaatgttgaactagtgatatgggttgtgtgttaattctaattttgttttttaatttttattttgaagattgttattctaatataactgtgtttttttagtttggtgtcgcgatatttttttcaatttttttagctctggcaacaacttttaataatgggatggtgtttgctgcttgaagacgttatagttttattgtctaaatttttgggggcagttttgtctcatgtggctcgcaatttgaattctgcagctcatggtttggcaaaacatgcctttcggtcagacgataagttatcctggttcgaagagattccaccgccgattataatttgctgctttattaatcatgtgtgattctattcacaaagtaaaaataaaataattaaaatttacaacttttacaagttcaatatatattttttccattattttggttggttgtgttgattcacaaattataaatagatttaaggttcattaatgttataatacattatttgtaaacccaaaaataatttcaatttgttttattttatttacttaaaaaaattaaataatttgcatggtaggtaaataaccaacaaaacatttttgaaagacaaaaagaaatctttgttgatttagaaatataatgtggtgccaagaaaagatgggagagagagagaatgagagtgtggataaaacgtgcaatggattggccaatcagaagacgctgaaatcagcaaagtccatcaactccatctcttccaaacatctttaagcccaacacaaacccatacccattgcctgcctttcattgcctattgaaaaaaaaatcttattttatttggattcttcaccaactcctgagttcccaaattctgaaaattcaggtttaggttctcatctccgttttcaaccaacaatggctgtctctacaagtttcgccggtgcaaagttggaggctttactgttcaagtcctcttcggctaataccacgacgtccacctccagggttgctccctcttcttctccgctttcatctttttgcaaaccaattcgtgccagaagagccctgattcagagaggggtcgttaggtgcgatgtctctgcttctgagacttcggttcagactaatgagccgggtggttctaatatctccgcgcttgaacagctcaagacctctgctgctgatagtatgtttctcataattgttttgggattgtattcaatttgaaaattcatagttaataaattaaactgtgcttactgtgtttgtgcaaatgttgtttgaatattgttacttgttgctgagtcttttgtcctttaaaacatgggtctgtgaatgctttgttattaatatatgatctcctcacatttcaattcgatgtttattgtgataattgtcttaaattacataatgtaatgacatatatttgtagataggagacaagccctgttcactaatatgcaatttgggatttgattctatgtttagctgcatatgattttctttaagcatccaaattctatcatttatgaaatatttgtcatgtaatgattcttgccgagagagcttttctgaaatgtcacgttaggggttattgtacaacttctgctcacgagattttattgtacccttttttttgtggttaactgttggtgtgaaactactgtatgtttttatcagggtataccaaggagaggagcagtattgtggtgattggactcagtgttcacactacacctgttgaaatccgagaaaagcttgcaattccagaagcagaatggcctcgagccataggggagctttgcgggttaaatcatatagaagaagctgctgttcttagtacctgcaacagaatggagatatatgtggtagctctatctcagcatcgtggtgtaaaagaagtgacagagtggatgtcaaaggtgccctcaaaagctatatttgtttttttttcttcattgccattatatgtttaatgtagctgtaggaatttattactgataggctggagaataaaagcattttatagttaaatgacaggacaattctttgaattttatctaaccaatattttctctttatgttggtagacaagtggtatccctgcttcggagatttgcaagcatcggtttttactgtataacaaagatgcaacacagcatctctttgaagtatcagcaggtctcgactctcttgtccttggagaaggacaaatccttgcacaggttaaacaagttgtcaaagttgggcaaggaattgttggctttggtaggaacattagtggactgtttaagcatgcaatcactgtgggaaagcgggttagaactgagaccaacattgctgcaggtgcagtttctgtgagctctgctgctgttgaacttgccttaatgaagcttcctgaatcatctcacactactgctcgtatgttggtgattggagctggaaagatgggaaagcttgtgatcaaacacttggttgcaaaaggttgtacaaaaatgatggttgtgaatagatccgaagaaagagttgcggccatccgtgaggagattaacggtgtagagatcatctacaaaccccttactgagatgctaacttgtgctgctgaagcagatgttgtgtttactagcacggcatcagagactccattatttttgaaagagcatgtgaaggatcttcctgctgttgatcaagaaactgggggttataggctcttcgttgatatttctgtccctcggaatgttggttcatgtgttggggaggttgagactgcaaggatttacaatgttgatgatctgaaagaggttgtagctgctaataaagaagatcgtctccgcaaagcaatggaggctcaggcaattattgctgatgaatcaaaacaatttgaagcatggagggactcactggagactgttccgaccatcaagaaactgagagcttatgctgaaagaataagggctgctgagctagaaaaatgcttatcaaagatgggagacgacatctccaagaaaacaagaaaagctgtggatgatcttagccgaggtatcatgaacaagctactacatggtccaatgcaacacttgagatgtgatggtagtgatagccggactttgtcagaaactcttgagaatatgcatgcacttaatagaatgttcagtctcgagacagagatatctgtgttggagcaaaagattcgagccaaggtggaacaaacccagaagtaagatattatcgtgaaaagctttctttcactagacttctttattactttttgattctgaataaggggtaacatccccatattcatattctagtgtttgcatggttgtaacttccattgccacgttcatatgaagtgactgtccttgttaggattttccactccatttgttgtaagacacttgcctaactctcacttggagttcctttttatgtcctataatcggccttgtagaatgcattgtgaggaattatgtgatcagttttatccatgtaaggagttgctttttctaaatctcgagtcagtatctcatcttatgtaaactctcaagtcttgtaattaaaacttactgattatttcatacagtcaaactatgtttgttctttttttatatttaaacaacaccagaatactcaaggattcaaagtacgtttgaacattgagggataaatatgtgaatactctcttcaaatatcgagcactcaaagaagatagtgcaagtatgtactgatggataaaaaatcacagaaattatagtagtttgtctcgagatttgagcctacatctgaagattacactttgatgcatttgctgacgacacgcgcgtgtaggaggcgcgtttcttgggaggagttgcaatgatgacagaacaattgaggtgacctctctttaatgcgtacaagacacgagacgtgtaataatgaatattaaacgtttagactatgcattaaatgcagtcttttcagctccccatctgttggacggaaagatgctttttgggaggaataatctaggtcgtttatttcaaactccaaagattgaaattggagtataaataggtgttggaaatttattttac

SEQ ID NO: 303053 - DNA, 1011 bp, Cannabis indica
atttttatattatcactaaaagtctatgactaaaagtattatgtggcgtttaattggaggtaaagaagtgaaaataaaataatttttattctattaatttgttatttgttgcattttaaagtattaataatattacttttattcttatttttttaatttttgaataatcatttatgaaaaatgtgttatacatggaccttgaattctatcctaggtctgtgtactgaaattatatatgttgctagctaaatccaatcactataacataataagttagctttataatgtaaaaatcttatatgtaaaaaaaaacctcaaaaattattgtaataatcaaataaatagttaaaaaaaaaaaggttgttatcactaacacatgaaatataatttgtaagattcaagactaaataaaagattctatgcactaaagataacaatgattccacatatatgaaaaacctaattacaatacaaaatatagttgttatataatctcaatttatatatatggtggtatagtaagtgtcacacaatttttttttttaaaattttaaataatttacaatatactttaatattcagtgatctatcgagatggtaacaaattttgttcactaatcttaaataatcactttattataagtggccaatttttcgatttttttttcctaagcactatcttagataactacatagaatgaatggcccacaaggaataataataatgataatcatgagtttctatcttaaaactaaaagacttagttgtattaatctaataagcttttgcttaaactatcaaagttcaaattctcatcttccactttcgatgaattcaatattaacttttagttgttacgatattccatactcaaataataacagaaattaaccaaaaaagtattaggggtaagttgaaaaatgcctcttttattaatcaattaatcaaatttacctttaattttatatttatttgaaacatacctctttttatatgtattgtacccaaaa

SEQ ID NO: 303054 - DNA, 1182 bp, Cannabis indica
ttatttaaaaaaattagttcaaatataccaataagaaaatgacatgtggatataattacttaacatttaacagttaggtacccagagttccagaaatataacttatgtattattaccgccacaaattaaacttaagtatttatttataaccgaaagttaaaatatttatactacaaattactctaaaataatgtaactaaatattatttaacctaatttatatactataaaatcttaatgaattatactgtttattccgatttcgattctgattttgattgttataagtaaataatttattgaatggttatgattcatcaattcagttgaggataaatctaatttctaattaatttagtttttaatcattaattgatttatatactatgtaaatattttattttataaatatgtgtacacattattattctacttatcaccattttgtcttctttttctattttttttatttgtttcttttttactttatccatcacctatactattgcttgcttcttctgtctccacaaaatgaagacacttaaacattgctttatcttttcttgaaaacttttggcagtctaccatgtatgttagtcaaattttggaactattttaatttttgaaaaggaaaaatgttaatgttatgtttgagggttttggatttcattagaaccagctaataataaatgagttatttaattaagtaggagaaataaagatcctcttcacaaggttggaaaagaaaaggacaagagtgaggaaatcaatgaggtttaaatttaatataagagatccaaaaaactgttcttaaaacaataatacaataatgatttatttgattaatggtgaaaaaagagaaagagagagtggagtggagtggcagctaagtaagaataagaaagaaattgagtagtagttggttggtagagtagatggtggtgatggacactaccatgtgggtatgtatgttttattgtcctatcaaattaatcaccctattatattaccaaattctatttattttctctatttaggcataattttttaattttgttatcatatagttatttagaattaattaacagttaaagaaattacataacatgagccttttcttaacctcctcaccttactttgtaattttagtttctctttctttatagagagagagagagagag

SEQ ID NO: 303055 - DNA, 1681 bp, Cannabis indica
tagcccgcctatgcccagagccgggcttgctaccaccactatgagatgaagtcttaaaaatgactaacaattctctgtaatctttattaaaataaaataagtggagtttgacattttggataattttttttaaaaaatattcgttttcgttaaactagatcgctaatcgctcaaaaggatagcataaaatttagaaaggacatcccccttcttaaacatacgaccaacataatatcgagattgtctcacaagaaaatgtgcagctcgattagcatgccgtttaataaaacataaagtaatattatttaaaaatcgcaataaacttttacaatcttcaaccactaaactaaaagaaaaagtattttaaaataactatgaataccttgaatagtaacaagactgtctgattaaatctccattctagaataattttgaaatttcaaccaactaagaatctccttaatccctattgcttcttccaaagaaggagacaccaccccttgcgttaaagaagcattagttgctaacaatttccctttgaattcagaaccactacaaaagcggcaccaaacgacctatcttcctcaaaaataatcgaatctacatcatcataattgtattcgtcataggtttagtctagctctctgcccccatcacatgctagtaatgggttaagtgaaggtatattcccaacatcttgagcaccattaatcaagaattaacaaagaaaatgataatacctcacaaatagacctctccaacttggaactcaatgaaaaattggacaagttcaacttctctccattccttaacatcaccatcttcaacctcaacaacaacaaacttgttgccttgataccaacaaccattggtaatctcaccaagctcactttgttggacttgagtgaaaattattttgaaggagaaattacaatggagataagccaattctcagagctacaatgagtattttataaagtacaaccgttaacatatgcttctagggcatgataactcgtatctaggcattaaatgcctcaaatgtttaaaatgatcgcctatattttcatgattacctattcttctatatatcactacgtttgaattgattgggggtaaatgttatcttaaattttgttcagattatgtggcacatttctttgagtgacacgtatcatcacatcaagccttgggcagagaaaatagcctcatagagtattcgacaaagatatatactcacttggatgtaataatagacgagcaaggtaagactcactgcacggatgaaacgtaagctaacctgttcgaagagaagtggtcagaaactcgtatggcccgactaagggaaaaatgcgtggcagaatatattaaagatagtttcctattttaaatgtaatcaaatcctaatttaaagagatttttatatatatatatatatttcttataattgaggaatgtcatttattctctactttcatggattgacaacttttagaaaatcaatatctagtgtgttgagaatcatggggttccatctcaaaacgaattgaaaatgagtggagtagcccatgttcttatatatggctcaatacttttacatttaatccatgtgggacaatgttgtccaatatccccctcaagatggtggctatttttgctcaccaatcttgaatcaccttat

SEQ ID NO: 303056 - DNA, 3046 bp, Cannabis indica
ttacaaaaaaagaaaaaattaaagtctctaacttgtcattgtaaagttactagcagggtatacttagaagaacgacagaatgaaattctgataaaaaaaagttaaaaggaaaatgatgtgtcattgaaaagtaaaccaagtcgaaggtggtccaacaatggcatgtgcccccacgtgtccctgctcccttgtgtgtatttatgtttatacaaaaatctcattaatgcttgattaataaatatttttcttttattattttttccttaaatgattgcatggcatgaactttggcaccattcaaccttacaattccctgattgtaaattagctagggaagtcaagtagcacaagcagaggagcctcataactatcatgtatatttttagactacgaaacatgagaaaaaaaataagactgacatatattaattttggcagaatgacgaaaggggtaaatcttgcattaatatcgtttttaacttgtggatcacaaactttcgaacaagaaacaaatataaacaaagaacagtgaaacatattaagtaataatgcaatgaacaagtatatatgaacatagtgagttacgtggttgggcaacaaaaatcagtttggttttgagcttaatccatataagagaaaacaacctttaatttaatggctattgtatattgatttgaattgccaagacagagtttactaaaaatggatctaagatcctatacttaatggagacttgccccttacaactaaacctcactgagttctctcgattagacttgccccgttttatcgtgtgtggcaagcctttttttaattccttttaacacacctttcaagtgtgttttaggatctttcttccatttaatcttgtggtctaaacagtttatgcttagtaaattttggatgtgaataaatttaatataaataataatttcctataccaagcagattaaagtattgagattaagaacatttatagagtgtatcgcaacagaaatggctccttttgttcggtgattgtatatcttgtttatcgcagaatattaccaatactgaagccgaatattttatagaaaactcgaacaaaaataactggttcttcacaatcttctgcggtgctctaggtgttgtaatagcaaagtgtgggctaacgctcaacactaaagggcatgaaaaataaaaggaaagagagtgtatgaagtaattagaaaactaaaagcctgcaaaattgttggatgttgtttgagcaaaatttagatttattaacatgtatgtttgattatattctataatctaacaccctagaaaaccttacattggtggcagcagaatgttatggctcttttcgttcagatctctaacccttgttcctttctgtcgcagagtaataacaagatttgaacttaaattttctttaggtgttggaattaattctttaaaatcttccatattatgattgagtactgacttgatatcagtgggcaaggtactctatcactataggggcttcgaaatttgaagagagaagaaagagagaattcgaaaaatagagaggagtttttattttcaattatttgacagaatagactaatgattgcttatcagctattaggaattcgttctatttttttaaaagccacgccgacaactcgcatcttcaaaagagactttgaaagccctttaaactagtgtagattaccttagatgtgggggcagaactcactactattgagtggatggggcgagtccctttgagctaagagaaaaaagaacataagatattatcacagagcccgattgaaagaaactcgggtaaatgttggtaggccatgcaatgggccccactagtttcaattttgccatttatttaacaacttatcttttcttttataaataccatattttaattttaaacttttaaatgtcaattctatttattcaataattataattaattatcaaataaaattgtcatttaacttgtttcttaattagacctttcaaagtctcttaattaacaaataaacgctaaaagctcaattaagccctagtttagtgaaaatttataaataagacatagtctaatttagaatttaaatagctaattaaaaccaattatctgagtctacaagccaatattatctcaactagtgtggggagcataagtctatataatcaagcttctaataagtagttctagaatttaccgagtaaatttcttaacttattaattcctcttgattccattatagattcagaattacactcttaattatatagaatgttctatatgttccaaatataaatacgatattaattatctattgttataatgtaaataatcaaaggtcttctatagatgatttacattgagtaggcataatttaccgttctacccctcatattttatccttaaaatactcagcttcctataaatgatatttcagtaaactaatataattactgaaataaaagctcttccatttatctctattaagccaagctcgaaagaaatcatcatttcacttctatgtcaatatagaagctatagattatgtatctatgattagcgctctcactcaattgtagtaccatattttcaagatgtaagtattagaccaatccatttggtcagctttaatgaacaaatcaaagaacacaaataatactgttaagctagaacctaaccatctcaggattaagatctattgatttatgatcaactaagtgatatttgttatacccaaatttggctgctatctcagtggaggacatgtgtcaagataaagggaatatggatcgatgcaatcgctttttatggaataactcattaattacataagtatcagagtatatttataatctgctgactgtgaggtcttaggcgaggaatcaatatacaaactggtgcttagtatattagcgagaaactatatgtcgctgaatgcgaatagcaaagcatcaaggacaatacacagaggaaggcaaaagcgacacatgtcaactgcaaaagcccttagtgtataatgtacaaacttgttgggttt

SEQ ID NO: 303057 - DNA, 1396 bp, Cannabis indica
tttttgggccccttttacatacgaagtcctccaagtcttccaattctctcgttaagcatgttgttccactaacttactttttcggaccgacgcctgcaacgatggccatcttgtgctcattctagtcagccttcctaccctggttgcttcgacattgaagcgttggactcttaaggctttcaacatctctttgctcaatactttccatgcttgttctagagatagtatagtttctagatgcatgatgttgggccaggaattcatcagtgagttatttccaagaggtgatagatccagacaccagccttttaaaccatttgtacgctgcccttttgagcgtcaccacgaagcactggcacgtcgctttgcttatgactctcttcatttttattatctcgttaaagccatcaagatggtattttaggtctgttaagccctcatatggagcatgttgggctctttgaagttcacgggcaacggctccgcttgaatctctcttgagaaaggggattcctcattgaagtcttgctcttcccaattacaatatttggatgcgggcgaagctattctctgtcaaaggtcttccatttctttgtctaactctttcctccttttagttaacttctctcgtagatcagtggtggcttgctttgccttcttctcatttcaaagtgagtccaccgtcagcgagcacttcttgaccgtggtcttctggcaaagattttccctcaagtctccttagatcgccttggattctattctcttaggtcgtgaggaaggtttaggatttctccgggtggaagctctacgcagtgaggactcgggggtgttatttgtcgaatacctcgatacgctttcgtcctccagcttgttcgctttcttttccccgcctctggccctcttagcccgactaggggtgcctcaaaacggcctttcaggagttcctccaatgccatttgcatttttgggacgtctcttccagccgcaaattccgtatccttagttcattcatttcctcattgtgcagttgggttcgtgagctaaaactcacggagtaggctcgcttctcctttcccggctaatggtgagaggttcgtggatcttttggctccagtggcaacgaggaccttattagagacgaagctttcgaccgtcgagccccgttgtcttcctcaggcgtgagggaggcgatcgccccatcttgtgggttattcaccaggttgtccttgggtcgcccattctcctcctccgttgagggtctttgaccattggtgccccccattctatggagttttatcatcagcacctcttcgttcggagactgacataggcggggcagacagtgaagcgatcaactgatggtcatcgagcagtacctctgttgggttttatgccc

SEQ ID NO: 303058 - DNA, 2232 bp, Cannabis indica
aatttttagtttagtttttaatttttttttaaaaaaaaaagtaaaaaataaaataaaaagtaaaactacaaattttaaagttttatttggcattcctcattgactttttccctatattttgtaagttttttttagttttttttttttttataaaattgccatatttagtgtaattaaatttttatgccatataaaacttggacatggtgccctgttcgggtctgtagctattttatctttccaactgttttactttcattttaactgttctttccttcaatcttcttttaaatttgaagcagcaaccgttccccctcttttcttctccaccatctttcttcaccgccggcgacttcacacctgcatactgcctccattttttctttttcatttccatggatcctttgtcggatgacatccgcaacactctttctctcacagaggaagaaagctccattttcactatccccgaatactgtcccacttcaattgaaagtaatgctccaactcttctcgcaagagttcttactcatcaaactatgtgtaaacaattctttatcgaccaaatgtcaggacactggcaagggcgtttctctattttgatttctgaatacaagggtgaagagggtttgtttcatattaagtttggttgtgagggggacaaaagaagggttcttaacaaagaaccatgacactttcagaatcatctcattgtatttcgggcgccaggtgttctgcgaaatgtcataaaggaagatctcatctacactccgttttgggtacaaatttatcgcctccccttcctaagaaaatcgaaagtgttggttgaagcactaggcaatattattggtgagtttattgaagtttttgatgattctactaacgaaggttggggaccattccttcaggttcgagtcaaacttgacacaactaagcctttgtcgagaggccaaatgatccgtttacccaggatcaaggatgaattttgggttgactttcgctatgaaaggctgcccgagttctgctttgaatgtggtcgtttaggccacccctttgaacgctgtgttgcttttatggagcggatggatagtggtaatgatgatgacttccaatatgggccatggatgaaaggctctaaacttccaaccaatggatatgatcgttatcggactgattttgccaaaggcaatgcttggcctttattgactagattggctcgatcaaccttaacctccacactaccggcgttaaacgttcgtcaccaacctcatccacgggttttacttcatggggaatcatccaatagcctgatgcataactctacaaataaccatgctataaacaacactcctcgatctactaatacacacccacccgtggcttttacttataccagcactcccattgctggtgtaatttccacttcccaatcagccctcactcctcacaatcacccacaccataacccgtgtaatactgtccctccacccattatctcccctggctctctcaaccccactaactttccccagaccaatactcaattatcacaaacggaccattcttatctcccctatcatcaacacaactcaccctccattggacaatctgaatcacacaaattctctgcttcatattcactccaaccctctctgccacatgattcctcacataatcactccttcaccccttcaaccaccaacaccatgcacactccaccacaaactcagcacacaagtagccaattcaacaaaccaccatcacttccacatgttcaacaccagcagcctgccatcaaaattgacagcaaacaaccagttcatgcacctgtacaatccaagaataaggagttgttgtcctataccaacacccccattccaccagcatctaccacacccaactcaatgactatatcttcaacttctactgctgtcactgatcttagccacatttatatgcccgccattgagaacaacaccttcgctacttatcctccagtcctagcatctatccccattaactctaatctcccttctttttcccagccacaacccaaatcaccactcttcacatacacggctgcaaaagtgtcagactcaaaagaaaatcagccaccaagtacaactttcaagagacataatgactctctttccatcagaaaaatgctgaaacgatgtcgtaatgttgaaggatcgtcatcttctccattgtcaagggaggatgatattgaga

SEQ ID NO: 303059 - DNA, 1826 bp, Cannabis indica
gacaaaggtaatccaccataaacatagagaaaaggatattaaagacacacatttctataatcatctcatcatctatgtgcatcaaggttatgctatgaaaatgattggatgtcatggctagcaataaagcaagtgaatggaaaacgctaacatgtgatactgatacagccatgacagcgaacaaacatatacaactccggcattatcaaaagtcaaaatacaaaagggcgatgcaattacacctgacattaattcagaagctgcctaatcgaaaacacagagtattatattcaatatcacaaagattctcctttagtttccaattgcattcacagaattaacaattttagtgaaatgattttataaatataaacaaggaaatgctacgaaagttgcataccaatatctcattaaggcatgcatcaaaattaacaaactctaaagagtaagttttatcttcgcaagctaaatattaagtaaaggtggtgaaatgcacatacctcagcaatgacacagcagctccaggttcaagtgtgtactgccccgagatagactccatccaggtgctttcaattttgtgaaacatgagctaattttttcgaagtgaaatcccactactgtgatgattccttgccactaaacccatcaagaatgcaatcaatatcactacaagaaccaagtaactcactggccctataataccttgtcccaaattctcgatgagaaaccaattgattgaatccaatcaaacgaaccaacgtactcttatcccccatagttaccaagccaaccaacttctgaacctgctttgtattcaaacccctacccctctccacaaccctcgcatccctaaacgacttcaagcaccgttctttggcgaatccaaaacacttctcctttgccaccgccaaacagccgttcatttcacgctcttcacattgctccctctccttcaaatccgaagccgtaaaaccagtcagattcagccaccacgagggcttgcacttgctcgaggcgctgatcgagcacccgatcctggctccagagacgcactggtcgataatcttggactcacaggctctgtacgctttcgcccaagctctggggttacggaatgcaagaacgaacaaaccggtggatgaatcatcaaggggaccaaccgggacggggccacggagcaagggaagcgggcgatcaaacccgataagtgttgatgacggtccgtaatcttcgaaatcctcgggtggtgagggttccatgttagggttttggagtttgcgtcagagggaagcaaaaatgtgatttgataatataaaaaggaaatttaagctgaaagggcatcagggcttgccacctgagatagctactcaagcttcttccgagcttccatggctaggaaatggggttttccttttttattttgtcgtgtaccgattgactggttggatatttcgaatcagatacgacacgtttacatgttgaaacgacaatatattagctcgatataatagtggaaaaccacatgtcactggtgtaatgggctgggccgagtttggaattgaaatcaaatagggaaatttacaaaaatactgaaatttgggttaacttttacaaaaatgttgtcacacggatatcttttcaaaaatattgtgtttttataaaacaccagtaaaacacaaagcagaacaactcaaaacaacagtagaacacctaaaaagcaccattagaacaccagtgaaaacttaacacagtatactgtagtatgaaacttataaaaaaacacagtaaaaaagtaaaaaataccgtctgacagtatttttataaaa

SEQ ID NO: 303060 - DNA, 1760 bp, Cannabis indica
tagggtacttttgccggcgcaacaatgcgccgacaaaagatgattttcttgtagtgattttgtagttctgtccgaagtgtgtacggtagtctatcaaccacggcgttcccaggataaaataacatctgtatacaagttgctctgcattgaatgatatctctcgattacacccactaattgctctgagaaaaattgtaaaaaagaagagacatttatttgtgttttaaaagatgtgttctcctattgttctgatacgacttatatagagattgccgatcacaataaaacggtaagaaaacaataaatatgatcgtgagaggaatcgttggttcatggcagtaaaaagtagatcattgactgattgcttttattgcttcaattaattaatgttgtagaattaattaagtaataaataaatattattaattaaataattttttgatagaaaacaaagtgacatcacaaccaaactactcgctagcttggcacgattggacagacggcaacgatgcatgtgacggtcttatgtgtgagtcctcaccctgtgcataaaattaggtaacctttagggcctaaactcaaatctcataattacactttatatacacttctaaaaaaaatattcttattccatttgggactcattgaactattacatatttcacttttcatatattttgtaaaattttaactaaaattccaatactaaagactacatccatgaccaaaaagtttatcaaaaggatgtattataattttattaaacttaatatataactttagtaataatgtcataaaataaaataaagaaagaactatatattatataatttattttagacactatattatcttagaaaaatatgtacagcattaagagtactgactttacttcgattaatcacaaaatagagaagaaaaaaaaaccagtacatgcatgtttttctttatttattgattttgcacatatatgcacatactgatgatttcatattataggaacaaaatagcttgaagaagtcctctgattttctgctgaagatttttttcttggatcttgagtgattttgctagtgcagttgtaatctgttgaaaatatacaacaaataatatatacataaataataataaatctgttgtaagtatatatatgttctaattagtagattttataccctaatgttattgcttttggtggagttttattggtttgaggttgagacttagagtgagattgtggttgtggccgaggctgtggctgcggcggcagcagctgtgattgcggttggggttgcggctgacttaactgtaaatgaatggttggttgtgcatgaatatcatatttgtttgtaacaatggtatattccatactagagcttttattgatttggtttgtcatatcactagctccatatacctggtacataattttgtaattatgaaaatttttagggttagaaagaatgaaaacaaaataataataataataataataataataataataataataataataataataagaatagaaaataaaaataaaaataagaaaaaaaaaaaaagtgatataaaatcatcaaatgaaggttacaaggattgaactcatgtcaagtgacatgagttaggaaaacttaccatatctgctagaataatttatgatagacttttattaataatgtaatttatgtaaataattaattttatatctaaatattttaaatacattgaacattataatcttgaaaaataatattaat

SEQ ID NO: 303061 - DNA, 2327 bp, Cannabis indica
taaaaaaaaaaattaaatttttactacttgttcgggttaagggttagaacccgactaaaaaacacccactttcaacacccgaacccgaaacccgaaacccgtgtggagtattttcgggttggacccgactcgaccacacgggatttcaatttttccgtttttttgcagcaggtcggggtgggtgatcgggtttttcgggtttgcaagtctaaatgttcagccctaaatattaggtttgttctctaaggctaatttcaattactcttatctgccattctcatcaattgagagagaatccatagagagaagattaatctgtagaagattaaatagagtaatcttgataatctgacatgaatttatctatatatattttagatctaatttttaacaagtggtatcatgagccgaactctatgttaaattattgggatttatcaatattaattgtgattattgaattttatatttaaacacataattttttacatactgtgtgtatttttttctttaatcatgattgattatttatgaattgataaagtataggaatattatttcatatactattttttaatttttttttttaatttatagtttggattgttccgataatttttatgtaagttgttatgtggattttaattgtgatttagattgttctgttagttgctatatgaatttctataaaaatacaaaaaaaaaagaacaactttcaagtgtaaaaataaaatactcataaaatatagggaaattatcccatatactatttttttaacttttttttttaaaatttacggtttgggtttctgaagtggtttctctgatagtttttatgtgtgggttgcggtttttggttgcgatttaagtagctccgctagttgcaataagaattttttatgtagaatttcataaatatatatatataaatatattttgaatagtaaaaataaaaaaatcctaaaatatatgggttaatgtaaaaatgaaaatattatgattttgtcccgtcattgtactttcacggattgtaatagtgatgtacggcagccatcagatgagggagttatttgatctgacggctgagattgatctatgagtaattagggttaaaaagtagaaacgtaccctgacactcatttaatataccctgagatccatctaatgtaccacagaatacatttcgtgaaaatatatcacgggaaaaaatcatatccctacatttatatatgtagagtaaatatggtacaaaagctatatgcatttttttttttttttccttaattttctcaaagaccattttgtgtttcaatgtatgggaaaagaaggggcttcatattgaaaatttcttcttgatattttcagtctcatacagctcatcagctcagctcagctcagctgtaaggtgggtccagactctgaagctgaaagtccaaaagtaatatggatgtaacatgtgtgcatgcacatttaataaagttttggctaatatatattcataacaagacaaatatgcaataattgtaacgttgtactaatgaataatttattttgaccacatttttcaggatttggattggatcaaggttcgtcatctacctttttttaagaaaaaaaaagttgctatttcaaccaagtactatttttttagttaataaaaaaaactctttcttttttaaaaaataaaagtgatttgactatgtatacataaaaacactacgtactctacaatttgttttacacatgttatgtgagaaatgaattcaataatcatttgttattgggcaaagggcaggctttcacatttattttaggtgggggcgaagcagtcttctccaattactgaaggagtagtctccaagggtagttcgaagatactggtccttagggcaagaatttaatggggtcaacagagagtgagtggaagagatatttgtagaattattgtggcacggtggctcactacaaggattagcactttcgcaggcgcaatttagcatctgcaaaagtccaatacagcgcctgcaaaagtattgtagacgaattttcgcgcgtcctccagcgtccacaattgcgcgtctggaaaaatccgtgcagacgggagttggggcgcgtacgggaagttaaaaactctttgcaggcgcattaatagcgcctaaaaatattattagaaataaatttaattttttttaaattacttttgtaggcgcttttagtgcgcccacaaaaagctgataatacttttgtggacgcatttaaagcgcctgcaaaggtattttaataaaagaaaaaaattaattatttaatacaattgctttccaaaatta

SEQ ID NO: 303062 - DNA, 1842 bp, Cannabis indica
aaagaaattatttaatagaaaaaattgtgataattaaaaaaatatttaatttaatttaaataaatttaattattctaaaaaatgacttcaggaacgataatttcaattctgataatagaatagttgttcctgataatgtgtaaaaactaagttacaagtttaattttttggaacaagttttacttttcaggaacaactcatttttgttccaaataatctagcatcaaccacgtcactatattttgttcctgatattgattttcaggcacgagttatcaagaataaaacatcaggaatgactagtcgcgccaaaaaatcttctggaacgaagttttctggaacgaaaaaaagtcgctcccgatgacagtttttgttgtagtgatgagcttagttcaagaagcctttactaaattctataaagcaacaggtctgccagctaacaagtctaagtctcagatcttttttggggtagttaaagaaactgttaaagctaagattcttgaattggttcaaattgaagaaggttcattccctctcaaatacttggggattaaccttcgtcctacaaaagggaaagcctcaaattatggagtgacaaactaaataagaatctcaattgttgggctagcaggaatttatcgtttgtaggccgagcgtagctgattcactcggttttgcttgaaataagaaattactggatgagtattttaattattccatataagataattgctgccatagacaagagttgtcgagacttctatggggaacaaaagggaataggagcaagatgcatcttgctttgtgggaaaaggtttgtcttcccaaaaatcttagtggtgttggtttctgtgaaggcaaaaaatggaacaaggccttaatggctatgtttctctgggcaatagctagtaaacaagattgcatttgggttaaatggatcaattcaatatatctgaaagatcacaacatttggagttgccccattaaataagatacaagctggtatttgaagaagatgttgaatcttaaaaaagtataccaatgagactagcctgaatcttgctgtcaaatgtggtaaattttgtgcaaataggttctataacatgttggtggaggagaataaggttggttaaggtagttcagattgggataaacttattattccagaacacatgtttttttattggcagattgccaactcccagctgctaattcgagacattttgagtcaatttatgcctatgcaaaatgtcaattcccctctctgtgactctaaagaagaatttcatgatcatcagttctttacctgcatttactctaaacaggtgtttgaagtcataaactcttggcttggttagatccaatggctaacttcgatagctgatctgctttataggtttaagactatgtctcatgactctcaaaatcgtgtgattaatgcaatgtctatgtcggacattgttcacaatagttgctacagctttgtacctgatctggaagaacatgaataagtgcatgtcttcgacctggcttgtgtttcaactagaagttgaagtcatgaagttaagaaagttatttaacttagaattttgagtaagggtccttataaagcttgtaaaaagaacttgtatttattaaatgtaattaatagttggtaggtcagctttttactgctgttggtgcagtgtagctgttgcgtgtttgtgctatggtgtttgcttcaaccggtttgtacttggtttgttttttgaataaaatttcctcttgttcaaaaaaaagttgttgtgactaaaaatcgcatttaattacaaaaaaattatgttgtgactaaaaattgttact

SEQ ID NO: 303063 - DNA, 2614 bp, Cannabis indica
gaacacaagctcatatgtgaaatcatgaagacataaactgtgtagaaaaggcaaactaacaaagtaaattcaatattcacaaaatgaaaatccagggtgaaacaagctacctcttgtaaacgagttccatccatagtgttgaagattctaatcaaagtaccctttgcactagcagtagcaagaagcagaccatccattgttattgtaaagcatgcaatatgagaatcatgagcgttaattaacttagtcatattcaacccaaagtgttcaatccgaacatgtcctcgttgaaggcctgggcacaccaacacagatgtatttgaatgatgtgacaagcaacatagtcctcttggatttgccagagtctcaatctggtgaagcagtttcagatccataaagttgtaaacatatatcttgtgctctagaacaaccacaatgcgatcttgccttaatttcactgcacgaacgtcagacctaaatgcaaactcaccaatgcagcggctttgatgatcatcccaaattacaactttattaggaggatactgggcattagctcctccaccaacaagtgcaagaatgttgcaacgaaatagcatctcaacaatcttaaatccaccactttttagatcacgtctgaaagtttccttaaaagggtcacagttgtatatgcgaaaaccatggcttgtcccagcagcaaagcaaccataatcctggttccaggatactgaaagtaattctgtctcatcattgtcattcatctctggttcaagttggttaaaagaacctgaaggccctctttctggggattcatatgcaccaacccttgttggaggaagtattcctctagatgttgaaactgttgaactcatgtgagaagaacactccgttctcagcagttgctgcaatgaaaaatcatgtgaaactataggtcagtggtaagcaaagatgacaaatcacaagttgaattctaccacattgacgatgacattcaatttctaactctttaaagggaatataaagtctacgcgtggataaaccaagctactgcgtgtttccaacaagcctaggtgttgaaacaaacagttataactaataaattttaaaattttgttcacagttctgataataatttcaaacaagaacctattatacataatgctccaccaatgccaaaatccacactagtaagaagctatccacattgaaagtcgtggaaaatgagaaatatcagccactgctagttgaatttataattcaactaacattggaaggtccataatgcttaaccctgcttcagcaaatagttacctccacttaaaattcatcgtaactgttaacagtcacctctttcggtaatcccaaatgttaaatcaggtaatacccataggcagaagccctttccaaattttgaaccgaatctccaaatccatggtcaatactccatctaaacttctaccttcattctaataattaaaatgttctttgattataatcattttatcccatcatgatccttctttatcgaaaacgaaagttggaaaatctcataaaaaaaaacaaataatctttttatttttatttttctttcctattttagattaacattactgtcaagattattaaaaatgaagaacgaattaattaaaactaatcaatcaacctacaacaacaactacatccaaatcaaatcaaatcaagatcgtgaataagatttgaaatacataaaagttgataacaatatgcataaacagatatttatgatgagaagaacagaagaaaaaagaaatggggaattgggtttgaagaaacaattaagatggcacaccttcgtccgattgcagacactgacaaccgatatctggctatttgcctcagacgacgacgaaagctagctctctctttccggtagactcatactttatatttaaactatatttataattatttattatgaatttgttctcgttacttgtatttctcgcttacctcgcttacgctaagaatgtcgtttaagaaaatattatgtcgtttaaacaatatgattttcattgtgtctattgaatttgaattttgatcacatattcacatattagtagtagagttgaaggtggttaattggattgaatttattggttatttttatatcttaatcaatttttaattcgaagaagtgtaaattttaaaattttcaattttattcaatatgttgcatgattgaattgagacatagggattgaatttggtcatatagattttatgaatattcctaacataaatcataggaaaggagttgataaatcttgaaaagatgatagatataactctcttttttttaatgcttattcttaaatgactaatttagatttttgttctcaatatttatgctaattaaaaattctctttaaactattaagattgttatatttaagtattgttgtccaattttattaaaaaaaaaatcgacgtagatgaaaatttatagggcacaattcagtacatgttaaaattagggcataattttgtaaatatcaaagtttggaacacaatttagaatatgggcaatcgccatattaaaaaaatttgaatgaaattagataaaagtccttaaatcaaa

SEQ ID NO: 303064 - DNA, 4204 bp, Cannabis indica
gatccttgttgcggatacaaacgacaagcattgatagccatgtttgcaaggggttgctaagctcagaagtgggagcattaagctggtcaaggcaaagctcctggaagcattgatattcatgatcaaggtctgcatggttatacgacaataactcttcaccaaaatatactgaatgttgtgcttagccttgtttagaatgtggaagtgtggtggagaaagtagaataatgtaaggtgtatagtaaaatgtatagtgttttatcttaaaatgaattggtaatgagtggagtttctaatgtgtgatattaattttttattacattatcagtgtgagattctctaatatttccttcaagatgttgacaatcaatcttgaatgactcgatcatcaatgattctttttgactcaagatccccgaatcacaagttgttcttttagctctactttttagatcggtttttggatttggatcagatactcattagatttattacgctataatacaatgttaagaacgtgaaattatggtggagaaagtagaataaggtgaggtgtatgataccatgttaagaacatgaaattttggtggagaaagtagaataaggtgaggtgtatgataagatgtatagagttctatcttaaaactaaagcccatacattttatgtatggtattaagttttcacatattatcaatgtgagactcgttaacagtgctattattttataattatgtcaagagattgaccctcaactaattttacattatatacacaatggctgaatattccaaacttatttgaatatgttattttgtcctaacaagggcattcaatgttctacaaatcgttaaacaattacaagaagacaaaacaatgtgacagtagaaacttctgacattgtgctcttgatattcaattctaactcctcataagtgagtcatattccaagtcagcctttccttcaacagtatgcaatgacaatgcttgacatggataagttatcttcattaaatattttatacaactattttataatctttacttcttccattccttgcccatttttacagtggatagattgtctagtcaagccaagtggctttttggtgttgtatccctttctatttttaattggtaatttaatcctgcattgttagtgaaaaggaccactcctcttcttatgttataggccaagacaagactggatgaaggtcaagaatcgaagatggagtggcatgttttcttaacattctcaagcttttaaattgtagggtgatatttattaatggatgaagcgacataggtttattttttagtgtaatgattcaaacatcattcgaaacaacataattttttttagaagaaaaattatgttatgagacgattcattcatttagatatacatactgaagttttacacaatatgttttgtggaataagcttatattggctttgaatttacaatttctttgctttgataatttattacatatgggctaggctgtttgttttctaatctctgctcttaaataatagtcattggcattaaaaattctgattataataattgctttaaactaagaatgttaggatcaacctgttcgttgaggttgtcactgatcaattttatctaattagcgtgcaatgtattaagagttagtcccgcattactaatgtgtggaaataaattgtgatatataagatgaataggctactcctcccattaccaattggttttgacatggaacctcattcatcttatccccaaattctaacacaatgatgatgtatgaatgctcacgagggtccaacaaagtttttatgtactaaattctagtctcaagctgtgactgttgatagcttaggagtatgaggctgcagaagagaccctaaggccaactctctttttgtatctattgcagaataccaaaatttagttttttgtcttaatgtaatttatttgcaattgctaattgtcatttgaaaagtttctaatgacttcagtactggttttgaatgattttcaatagcttattctggtccaataaacttaaacttgagcacttactccattctagttcattaagattctagttgacctcttctattatggttttgtatatatactttttgtctactattcgtagattcatgatgaatgcgaattcgtttcttcaatgtattggccaactcaatgttataagttttgccttattttgttttaaacttatttttaaatcagttctacttagtttgactcacattttaaaatagagatgacccttttaaatataactaattacaaaacttatcagaaagatatgagattgctccaataaatattgtagatcgtattaagacttgagagtatatatattaacataggctatctatctctgtatggccattaaaattgtagagaaaaaaaagagaaaaatagaaaagaaaagagtattttcttatgatcattaagggaaaaaaattgtgatgaaaatgatttccttatagaaatacttttattgtttgacaaaatttgaagaaatatttttattgtttggtttttcatctatcttatataaagaaatgcaaaacagagttaatactcgaagccagaccacgcaaggaacttcttctaaaaactcaaatcctttttctgttttagagccaatttctcgtgctcataatgatccaaatcgtgatccctactatctgtccaacaatgatcatccaagttccaatcttgttcctaaagttcttactagaagcgataactatcatccttggaagcgtgttatgacagttgcattacttgccaggaatacgatgcaatttgtcaatcataagctgcaagaacctgatgaagatcacgaggattatgatgcttggcatcgatacaatagcttgactgtttcttggatgttgcactcaatttcaccagaaatctatgatagtataatgtacatggagattacagctgatatttgggatgatcttcaagaaagatttcgatagaggaatgcaccaaggatttttcaagctaaaaggtcatgcagctgttaaatcaaggagccttggatgtcaccacctattttacttgaagaaaatctttatgggatctcattcaagagtacagaccactacctccttgccaatgtggtgcgatgaaaacaatacaagaatatcaagaggaagacaaagttcttgagttcttagtaggtttgaatgaatcttaaacaatgttagatcccaaatcttgatgcaagaaccacttctagctattaacaaagtttatgcttctattattcaagaagaaaggtagagagaagtttgtgccagtaatctggaggtaaataaagatcctaattctcctacatcaaatccttcgaatgatcaatttgctggaaatgcaaatttcaatagatccaaagtggcatgttcatattgtgggattcttggacatactatgtctaagtgctacaaaattcatgggtatccaccaggacacaagttccatggcaagttcccaactcaaaattctggacaacaatctaatagaaagactgctgctaaaatctctggatctcagcaaaactagagtaatcaatctgaccaaggtggagagaatgatcaagatcttatctcaagtcttactgtgcaatgtcaaaagctaatgacagtgttatctcagaaaaatcaagatcagaatcccaccagtgctgaacaaccaattgtgtctcacttttctggtaaggcaaattttattcattgtcaaaaatagattattgatacaggagctacacatcatgtgtgccctaacatttcattatttgttaatgttaaaaccaacacatcctgttcttttgttaagctacctgatggccgagtgcagctgttacttgcattggtaccattcatttatctcacaatattattttggaagatgtattgtgtgtacctgcttttgaaacttacatattatctgtgacaacacttactaaattttcttcttgttccttcctttttcttatcctgatcattgtactatttaggacattatgtagtaacggcagattgggatgggtaaaagagatggcaactcgtactacctaagtctacctaaaagtaccatttgtaccactatttgttcttttttttattccaaaattattgatgaaactgtgtggcattatagacttggccaccc

SEQ ID NO: 303065 - DNA, 1567 bp, Cannabis indica
caaaacatacaaatgaatgaaaaatacttctttttctttattgatatttgaataaaatggattaaattgagatgagttttatttagcgcataaaacccaacacagtcttggtcatacctttctttatatataaagctactgactgggaagctgaggagttacacttatccatgtggtgtgttcacttagggaccatcgtggaagagaatggaatcaggccccaagaccaaggtgtcttccaccacttggcccaagaaatggaaacccataaccacaactatggagggtttggggcataaagccaaacacgtctcatgtctaccgcgatgctctcgcttcaaaattacttagtaaattttttagtttttgtaggactagcctcgcgtcagttgataccacaggggtactgcctattgtcagacttatttattttttatgctttacggggttggcctgctcctagccttgctaaaatattattttttttatgaactcttttctatcccaaagaagggaggtagacagaaggatggtttttactccctctaagctcattcgggcaactagacagatgtcccgttcaatcctcaaaagaatgtcaaggattgtctccatcagttcttcttttcctctagtttcaaagcctttgagaatccagattccctaacagagtggactcaaattcccccactactttgaacagctcccaccaaactcttcttgagccacactgctgttttttagactctcacccgggaggagctcaacgtgggagatttagttacgattgctaactgctagagaaacaaactcattgaaggccaacaatacgttaagtacactaaaatgtcatagataacgtgcccaaattcttggaatagggaggtcgagaggaagctttgggaggagtatatccagaaggctaaaaccaagcatcaagcttaccggaggaggaaaaagtaggaggacctttttgcctgcgccaagagtgcagcaaatgaaaagatacaaaagaaggcggacaagaagtttgtggctcctagacctttgtttcctttcccggttcccaactctagtgctcctcaagccagtacttcaagtctccataagtctcctctatctttccattatgttccttatgctagaatttatgcacattccaagccaattagctttgatgggaagttaattacgttacaaatggcccattcccagtggggcgatagggagagtggtacttttccaacaatagagatctttagggtaggtcccgaatgggatctgtgttggattttgtgccctaaataaaacccatttcaatataatcagatttactaataaagatcagatataaaattttatgttgcatggttcacatgatttatttcatgattatatataatgtataaattctcttaagtccagaatatatgtatttgttaatgattatagggttgtcagcacagtggaatataaccttgattatatgttcgaaagtttattccctgatttgtcagttcactggaattagactggcatgataattagcgataggtattcttacacc

SEQ ID NO: 303066 - DNA, 3339 bp, Cannabis indica
aaacacattgaacttgattgccattttattttagacaaaataaattactccaccattcgactcataccagtctccagcaatttacactcttagagctttcaccaaacctttaccagctttctacactttctgcccacactagcaagatggatgtacacgatatttatagtccaccttgagaagggtaatacgatatcagtttaatcagcttagtgtgttaagcttgtttactaattactggtttaattttagttagttatttctgttacagtcaattttatctttcttggttagttgggatatcaatatcattagtttggtctaaactattatctttcttggttagttgggatatcaatatcattagtttggtctaaactattcagagttagttttattttttgttttggttaaacaatatactcttctctttgagctatatatattgaccatactttgtattttgctattcaatccgattcaatacaattacacttctttttcattttcttattttgcaataattattaatatggataattaaataaaacattattttttataaaaaatttacgtttaaatatttattttttatatatttttatagtgttttataaaaacaataagaaaactatataaaagtaacaggaaaatagtatccaaataatatcaaaacaataaaaaaaaaacataaaaaataacaaaaaaattaacaataaattaataaaagtacaatataaaaatacattaaaaaactatattttctataaacaaaatcataaaaattataaaaatatttaaaatttgtacaatcgtatttttataatttttttattattagttttgtgtatttgtgaaataatcccttattattagttattattggctttgggggtgaagagaaggtgctggagaggttggacaagagaagagtaggataggaacaggaagaaaatgaaagtgtattttgtctggttgtattaatcaaagatagggtagctcttgtgtggatctcatttcatttaatcaaattattataattattatatgaatggtcctgtatcatacaacaaagatgtacaactaattttattttagggctttacattacataataaaaagttgaaaaatgggaacacttctcttcattctcgtgagagtcagtaatggaaagagaaagacacttttcttctttgctttttgtctaataatcctaattatattgagataattgtctatagaaaaacatacacataattgtctcttgtttaaaatttgggacaactctagctatggaaatctacttcatttatttctttcacatgagaaaaagggaccattacagattcactggattgttcatcttatccacccattctaaccaagtcaaatcataaagatccccaaattatagccttagtggtttgattatttattttcaatgattaacttggtagtttaatgtatacttacatggggaatgtatttataagctcattgtgtggctattttatgaccattgatcatatgggatttggtgtgatcttggtcatccattttttttttattttgaggagttgattatgaacaggatttactggacataaacattgaattagctagccctattgtctcctaattagccattattttaaagtgtaacatcacacctacaacctacatccctttaagtaaaacacttttccattttacaattcaaaatacaaaaacaattcaatgtatattagtattactccactacttgtttatttacactccacaaaataattaaagaatgattttttttttaaaaaaataaattacattaaaatctttagggctcgtttggtacgctgtataagggtcgtattgtattaaataataaataacactatgtttggataaaacaatgtattgtattaattattacgaccaaattttttaatacaatatatgttgtattatttaatacataataaatggttcgtattagcttgtattataatatttacaaaggatttaagatcaacaccaatccgacccggaccccgaccccgaccccgaccccgaccccgaccctgaccccgaccctgaccctaaaccgaacccgggcaccggacctggaccctgaccccggactcggaccggggcccagacttgtgatccaaactcggcctggacccaaacccggcctggacccggaccccagaccccagaccccgacccaggacccagatcccgactcggacccgaactcggacctcgacccaaacctcagacctcgaacccgagacccgcacccaggactcggactcggacctcagacccgggacccggaattcaggcctggacccaggacccggacccgtagttggtattgggatcgagtgtattaaaaatatattattactttacacaatcaattaatacaagtcaataccaaacattatattgtattgaataatactaatacaatacaacacaatacattacaatacggcgtaccaaacgagcccttaatagttttattttgctatcaattaacctttaaaatctaaatttttatagtaaaatctctaaaactacgataacgttattaatttataattctatttaaatttgactgttaactattatgttaaattgtctacgtggatacaatgtacacgtagtgcacttttattggtccacataaaattttataatttaattatttaaatattataaaatttatttaaaaaaatcataataaatttataaatttttattttaaaaaatcccatactttcctaaaaataaaaagaagacgcatgcgcctaaaaatctaaggattccatcactctcttctacctttctctttctgccttagctgtggcaactatttttttggcaaagctttgacttccacgatcagccaccaccgcaccaagccatcttcgaccagctctagtcagtggtcacctccgttccagtcgctcaccattttcattccttaaatgatttaaagtttaaattcagctcatattttagtaatcccgatttagtgagattaggctatgtttatcagaaaatcgtagcgtgcctaattgttagggcgttataatttggtcttagagcacaaaggtttttaaagaacctatagaccggcagaacatgtacaatcatcgtcaaagacaaggtcgactcgtggtgcattaagtgttgagagtaaatacataactgcctttgtaattatttatttatcgctttctgttttaggcaatatatgagcatctagaaatgaattttatatgaaaagcatgattagtgttttaattgataaatatttatttaataaga

SEQ ID NO: 303067 - DNA, 2453 bp, Cannabis indica
ttaatcatcaaaactcaaatttttctaatattacgcattcatggtaatacacattaaaaatgtaccgttatatgtatatattacgaattaattttggaacaacagctccttaattactaaaaaaaaataggaacaacagctttgtacttaatattatttttaacaataacttgtaacttattaatttcccattttgatgccttataatttattaaatgccttttatccaagaaaaaatatctgtgttaccaaaaaagaaaggggtttttttttcatttttacactttgaaatagttttttttttttttttgtatttttaaggaattctacatagaatcccttattgcaattagctctgcaacttaaatcgcaataaaaaattgtatagaaactattattgcaagtagcgctcgtaaatttgaaaacaaaaacagtatatagagtaattcaaaaaaaaaaaaaataccgttgttgatgtatgaattaattaaagatattgatggccgtttgtgcccaactatataaggagaaacgaagcataattaatgatgatgtataattaaaaaacgcaaaagagtttagaataaaagagataccaatctttaaagtttcattcaaccacataattcaatatatagatatgatctgtaaattcagagaaaacacctagcaatgtgcacgcgcgtacagccttatatatatatatgaataatacttataggttataagtatactcaatagcaagtgttaaaagaagggaagaatcagaaaaggaatctgaactttatctaaagatgtttagggatgaaattattaacaaaagttttcgagaaaacaatataagctatgttgttaactctcaaaatgatgggaatttggctgaaaaagtggtcctacattttgctatatttattttactttgtaaataaaagtgtctaaactggtcaaaatttgacaaatgatcccataaattttatatacatggaaatctaattaatcaatacacttgtcttatttagccatcgagtgcctataaataacatattcttttcgtacttccaaaattttttagtattatttaaaaaaacaatttatgctaataatcctatggaccatgtatatataaagttcagggctctattatgattcataaaaaaaaataaataaaataaaaagaccaaaaaagaaagagaaagaaaatttgaagggaaggccatatgatatttttaaatcctatatagagctagatattatacatagtaataattgaatttatagtactttttgtagatccaaatggaactctatatatttgataagtgtgcttgatgtgcttatattatttaccaagtttcttgagacaacaaaaaactatcaataatttatccattacgtaccctccattattcatatcgtttaatttaaggtgtggtttgtatccccaatactaattcatatattaataatataacttttaaaacatcatttgcaattgcaaaatatatagtttcaaatgtcacgagcaatatataactgtcgtagctgctggtattaactttttatataatacgtacatagaaatatatctttacattttgttacatttaattagccagattttacgtttagtatgtaaaaccttcaaaatcattattgtattggcaaattttaagttacaagcgaccgtcatccccatgatcatgttagtaatagtacgtagctaagccatatgaaatcaagttaatgtcatcgacatgcccatttgttatttctgcatcaatattcctacaccagcaatatacattgcagccatacaattcagtagtcccctgtttgtaaccgaatttgtgtaatttgtcttgtgtaaattctgttatgccttgtcattgtgtaatcattaggggaatatttaggctgaatattctagtcctttgctcatgtaatcactaccagatgtcatgcctaacagatgcattgtattatgaattgtgctataaataaattgctctcgctcatacacaaaatgagttgagattcatattttgccttctccctaaaatctaaacttggtatcagagccattgctggcctctgccatgtctactccacaagacaatcaacccattttagctgcaagttcaccggccaactctagtgttgccggagctgcttcgaataacaacaacaacaccaactaggcatctcagctcccaaatgccttcgcccagccaaccctaaacaagcccttttcactcaaacttgaccgtaacaatttcacactatggaagacaatggtctccactatagttagaggtcacagacttcatggatatctcaatggaaccctaatgtgcccaccggagttcatcatggttggagacgttggaactttattttaccaggatcttagatctactcacaagtatgttgtttaacaccataaatatgaactt

SEQ ID NO: 303068 - DNA, 3165 bp, Cannabis indica
gaaaataataccaaacatgctctgagtttctggtgataagttgtctttctaaatagtttaggaatctttttatacgcaatttgaattaattaaaggtaattgtgtagagcaggggtgttcgcggtatggtttttgattatttttttaaaccaactcgtactagcgatttttctaattttccaaaccgcattcgcaccgcgaaactaaaaaaccgcaaaaactgcaccacaaaaaatggtgcagtgcggtgtggttttttgacgatttaagctatcaccaaataattaaactatcacaaatacaacaaaacttaagcaacacttgtcaaaaataccataacaattgaaaataaatataagaaaaaaattcaacaatacaataattattggcctttgagttgaacattcacatattggacttaaataaatataaaaattagtatttttataatgtgtggtgcggtgcagtttgaaccgcatattaacaattcaaaactgcaaaccgcgcggtttaagaaaaattcaaaccgcgaccgcactgcaaagaatttcaaactatatttttttaattactgtgtgcggacagtgtgaacagtttgaacggtttaatgaacacccctaagaacaattgttaaaactgccactcataatctagtaaatggtaccagttcaagaccaaacggtcgtaaaccagttaaatatgtctacttttagcttagggaattttaacaaatatccaacaaatccacctttagttatatgtccatataatgtttcagcttcaagtcttcattgagcccttttaataaaatgcacgtaattatatataaatttgttgatcctcttataattataagtctccattaggtatagtagaaagtgatatatatatagatatatgtataataatatcatgtaaatatataaaattatgtaattaattaattaagaggaaaaagtgaacaaagaaaaagattatatatgggaaggaaaggtgagacaaataaagagtacgtggccgacattattgtttgaggttataaagtgggacctttctatggtttcgcccttttactttatcataccttaatatttaacttaatattttatttaattttatataatttaatataataacttttaaacaaatattagtgatcaattatagagcgtcgcgtttaggtggtattagacaacagtaatattaaataacatataggaaaatgttaaaaaatacttttagtacttttataaaagtgttatattattattagtgtaattactaaatgaatatttttcgtcgattaactgaagggaaattttaatgggaaaatttattgttggttatagaattcaatgtactacaaaaatagtctactccatcgattaaaaattgattaaaatttttttcctgttgccataaatgtgggatttagccgattcaaaactaatgggtaaaagagatatacattagggttaggtttaagttcataatgctgatgcagttttatggtgtttcttttcacaagaaattaatatggaagttatttgactttactttcctattatgtcagaaggaagatatctctttcaaagatgtcgtcttatatgcatcggagattctaaaaaaaaggctttcaataagatgtttgttgatgaaattgaactgggcttgttctattaaactacatgttaatgctattattttattctttatcgttagttatagctttgaataattctaatgtatttaataatgagctaggagttattttttctgacattaaggtgttgctatttaagctttcagagtcatttctttctcatgttagtagtaattttaatattacatgtcattaattggttaagcatgcccttgttagctagacgatgagttttttagctggaagaaactcctctcatttgtaactcgcctccaagacttttttaatacaaatatcatattcttaagaaaaaaaaaactcttgtgcatcattaaccagaactgacacaagctagcgtcaatttataatcaactcagaagatttttgtgagctaaaaaaagtcgtttgtaattgagttatttgaaattggtaagtaaaaaataaataccatcttaagagagattattagagaatcacattattaatatgtgaaaagattatagcatatataaaagtcataataccatcttcttattatcaattaattttaagatagaacccgatacatcttaccattctcatgtgtcttaatcatcccaccaaaattgagggcatgagccgaggaataaggagattgaaagagcttaggaatgtctcaaaggtagacaggtcaccaatcaattgtaattttttctaagtgctgtcatgtttcatatgtgaaatatattattaagttaatatataaaataatattcttttttcacttctgactttaattaattggactatatatattattactataatagtaagcgtggactctccctttcaaaactatatatatggattattttttaaataggtaatatggggacttttttttttttctttgaaagggaatatggggacttttaaataggtaatattttaaaaatattaatttttaaaaaagaattttaatctaatatttgataataaaagaaaattaaaatttttgtatttaattctactacttaatttaagaaaaaaaatctttttttttacattatatcaaaaaatatatttatataatatataaaattaatatatatatatttatagaaaaaaaaaataatttatactatatacataaccatgatgagtactactagagtagaaaatatataagtctaagactatttaaatttcaagaccctcacttttagaaatataccctcacttttagaaatatataaaaaaaaaatatattgaaaataatattatgcataatataacgaacataattgtgaatatttgttgtataatctacttaatttttattaaataaaggcctaatgaaacattttaatttttattttgagtcttgaaaaatgtaagtcctaagcacaggcctaatctatctataatgagtatattacttttaattattagataattattaaattgttccgattaattctaaaacttaactaaaaatagttaataaattatttgtaacctga

SEQ ID NO: 303069 - DNA, 1982 bp, Cannabis indica
taataataataataataatccctatagtagagacttgagagagactcaaaagacaagagggtccctctcctcacaagatttgagggtcatatgagaataaaactacatgggcatttgttgaactgaaagtgactatatataatagatctgatccataatttttgccttcatttattctatgcttatatccaactagtattgtattgcatgacccgacatgacattaagttgttataatgtaattatgtgaattgaacatggattgtttttgttccttcatcgtttttcatagtcaaactttcgttatatatatacaactaattaataactactacacttatttcaaggtcaatctagttcttttacttttttctttaaaaaaaatggcaggatgtgattaagatataatctagattaagttagtaataaataattaattacctagattagtgaaagtaatgagtgtgtaaacccataaagggaatgattcactgtaccaagtagagtctagagatagagaatataattagtagtaaacggttttagtattgagaaagttttggaaagatgaaataatgcaatgaaccaaaagagtagttagacaccaaacaaacaaagacccgacaccgtgttttaatccgagacccatagatttgttttgtttcttctgctgattatgtgtctcattgtgtttaatttcttttataatttatatacaattatatttcataaataataactattaggtaaaattttatatactacaaatattaaaagatatcagtggtgtttagtatttttctacatgttaatattgttattggttcaactaaatatcgagtctcgtatagtttaatataataacttttaaggagtataactaattataaagtgatacgtcttgaaggtggctagcactatttgtgcccaaaaaacaatcctctttatatatatttacttaattaacacttaagtaattgtacttttggatataattgatggatttagtttccaataataattgataaaccatttgatcaatccaatatattattgcgtggagcatttttataagagcactcacaataattttttttttcctattatttaaagtacatcgtaagaaaagtcattttgtattttacactacaatatcaattaacttttctttatttttctctatgccccattaaaataatattattttttattttctacaccattaaaataataatttataatatatataattaaatattataggtatattattacaataagttaagaaaatcaacttactatttattctctacaatgcacaccttaaaatgggacgaccgatgcactcctatatctattttgatatctgaaataattatttcgtccaacttttttaaggatatttatagtgaaacccctttagtttgtttgcaattattacacatatacataaccttaataaaaaatggtagaaaaattaccttattttacgattttattgcagttgtagcttttttaagttgttaagtaccaattaaactcgtgaaatgttaactcaaaaatacgtaacaacatatttctttagtttatttaatacataatcaaataatatgtcgccacttgtttctgagttgacatttaatgattaaaaaaagtatgacggtaacaaaatcataagataaagtacgtttgccactacttttttttttttattagagtcatatgcattgtgaatgttaagggagtttcaccataaatatctttattatttttttttatagtcgtctgcattgtagttatttaagatgacttataaaatttgaaagattcggaaaatttatcacgccaaaactagggttcaaatagtctgttgtacgcgagactctttcactttatacgtgtgcaaaatagactgtttaaatcttatttttgacatgttaaattttttttgtaatttttaaaattttgtaaaatattttaaa

SEQ ID NO: 303070 - DNA, 3446 bp, Cannabis indica
ttgggtgtctacacaatttagtaccctttgttttatctaaatacaagtttggtaccctgtattttaaaattatacttatttggtaccctaaattcaaatttttttaataaaatttaatcaatactatctatcgtctaaaattttatgaattctaaattctaatttatttatttgattacatataactgagaattgtttggttaaattaataaaattgtattgattaaattttattttaaggtaccaaatatgtacaatttaaaaatatgaggtaccaattaattaagtattattgaaaacatagggtaccaaatatgttcttcataaaaacacaaggtactaaatgagtatattcccatataaattttagaaatattaaattatcaaattttgatctaatgacgaataataaaagagaaatttgaatttttattcttagtttaactacttaattaaaaaaatatcaaaaaatatctctttttacaatatgtaaaaaatatatgcatgttaaaatatttaaagtaaacttaacatttacttatcttttttttgttgctaaaaaacaatttttttttttaatttttttttttttctaaccgatagaacaatctcagcacatacgatgtaaaaataatatatttttctaattagataaaaaaattaaataaaaaaaattaaatttttctaatttacccattcatatgtaatatacattaagaattaagagtgaactcatatatatatatatactagataaaagttacatgcattgcacttatggttagtttattatttggatgttttattgatttgtttttattataatttctaatttcatattaatttaaatatgatggtattatccgaataaataacaatgtcatataataaaacaatatataaaatatgacatggatacataaaaattgcaataacctaaagttccaataatatagaatcttgaccttatatattattgaccaaattagtgtaaaaattatattcatttgtaatttaaaattaaaaagtgtaatactggagctaaacttctaattaattcccagcagtcaaaagtaaaaataaagaactccaacttgttcatgtggtatagactcatcctcctgcaacatttaatcaatctctcaaataattaaggagaaataaatcaatgataaatactccgaaacacatgtagactcgacaaactaactcatcatcattcaacataaatcatatttgataaatcgtaatagtacatataaatggtgacaagtttatataacaaaagaattctaaagctccaatggagaaatgattgatcaataaaaatattgtcaattgtacttttattgtaattagatggagcaggtaccctttatgttttaagttttctcagggcaattgagcttcacaatcacaatatgcagagctatattaagtaagctcagcaacgagctacttggtaagattcaatgaagaagttattgtccagattttgctacattaacaaaatttacaagcttcaagagccgcctcatcaattatcatcattgtccttgttgttaaatatattgtaaatatatttgtcagaatagatatgattcttcatttattgccttccgttaaacatatattcagaatattgcttcctagtttgtagcctagaatcaagtgatattgcttcctagtttgtagcctagagtcaagccttttattaggcatatacttgtatatattatgagaagatgaatgagaatggcacggagacatttcataatcttacatggtatcagcttgcacagggtctttgttctctgtcttccgctttttccgcttgccctagctttgtgttcttgcccactatcttcatctccctttcttctctttgtttttcttctctcaatggcttcaaacaaaacctcttttcatccggctcttgccgtatcgaacatcaaaaatcatgttcccattgttcttgaaatggaaaacgttcaatattcgacatgggcagaactcttcaagattcacgcacgatcaaccaaggtgattgatcatatcattccttcggccaacggcaaggagacggttccttctagtgaggaagagaaggagctatggtcaactttggatgccacggttctttcgtggatttatgctaccatttctaatgacttattgcacaccattattgagcccgactcaacggctatggaggcttgggatagattgcgtgtgatatattccaagataatcaacattctcgtgccgttgccttggaacgagaattctcgaccactactatggagaatttcccaaatgtttcatcttattgtcaacgtctcaaatctctagcggatcaattgaagaacgttggggctccggtgtccgctagtagactggtattgcaattggttgggggtcttacacaaccgtaccatggagtgggtacgctgatccgtcaaagcaacccccttcctcctttttacaaggctcgctccatgctcactcttgacgaggccgggatggctaaggacgcagccactgagtctgctatgataacttcttcgattgatgatggttccaaccaatcgaagggaaaaaatggtgcgcaaaattctggtggtggacggtgcaacaacggaggtggtcggaagaatgcaggttctggtggtggccggaactcgaccggcggtaaaggcagtggccgggggcagtcttcgagtagccacggtggaaccactcgtactccaccatggcagcagccccacccatttccatggggatggtataatccgacctggcctattcctccttgtccattcgcaaatcaaggatgggccaggcccaatactcctcagcaacgccagggaggtttgctcggcccaagacaacctcagcatgcctatgtgcatcaagtagcatcgcctcatcctcttgagcagtccggttcatatgctcctacggatatcgaagcggcaatgcacaccatgtctcttcaccaacccgacccgtcatggtacatggataccggtgctacatctcacatgacttcctctaccggtaatctcacgtcttattttaatttgagcaatcatcctcataataaaattattgttcgtaatggtcacactattccaatttttggctatggtcacacgaatttatcttccccgtgtcaatccctctctcttaaccatgttcttcatgctcctaaactaattaaaaatctcatttctgttagaaagtttaccaaggataattgtaaagaccgcttagtttaatttggaaattagctgataatcacgtttaattatgaaattatttatagctatttaaataatttattatactgttattattgaattcagaggtgcatttttatgtcatttagtagttttcatatttttgcatttccggtgcccaataacatggaactcggtgtttgg

SEQ ID NO: 303071 - DNA, 9901 bp, Cannabis indica
ctctaggccatacacttaaaggaccaaactctagttagatttttgtccactttatttcaaccacttattcttcttttcaataataccatattttccaattcaatcctataaatgccaaaactatttatttaataattataattaattactaaataaaattgtcatttatataatttattaattagaccatacaaagtctcttaattaataaattgaccccaaaacctcttttcttcacaattaagcccttgcttagtgaaaattcataaataagacatagtctaattttagaattataattgattaattaaaatcaattaactgagtctgcaagcagtattatctcaactagtgaggggaccatgggcctatataaccgagctttcaataagtagatctagaattcaccaagtaaattctctaacttattaattccgccttgcgccactatagatttggaattgaatagcactctcaattatatagaacgctctatatgtaccacgatatagatacgttatgattatccattgttacaatcctaatagtcaaggatcctctatagatgatctacactgaatagggacaaatttaccgttctacccttcaatgtattttatccttaaaacacttagctacctataaatgatactttagtaaactaatataattactgaaatgaggcctcaatcatttatctctattcagccaagcttgaaggaaatcattgtttcacttctaaatacttatagaaattatagattccatatctatgatgagcgctcccactcaattgaactaccatgttcccaagatgtaaatatctgcaagaaccataggttagtatccacaaacaacttaaagaacataaataatacaactaagttgaacctaactatattaggattaagatccataaacgtaagatcaaccattgatattgacttagttagatataacggtaagtttatgatatcttatctaaaatcaatattggccccttctaatgtatactccatacatcagatactggtaaacttcgctaaaaccttggaaaggacataacacttatccaaggtgtatccaaaagtgtatgatttttctttcaaaaaatttacccatttgaacccagagaagtcatcaacacacaccatgacatatctttttctagctatactttcagtctgcataggccccattaagtctacatgaatgagttcaagcactcgagatgtcaaaagtgcattaataggaggatggtaggatcaagtttgtttcccttgttgacagggtccacaaagtctatctcttctcattgttaactcaagaatcttatgaacagtcttcaacttgacaattcgttttagatccctgaagtttagatgtcccaatctatagtgccacaggtcaagtttatccaaaaaaaagtgcgatggcgtctcatctgactgccgagagcataacagtgatcagcatcatataactccttgttgagatcttgaaattccttaaccctcttggccatataactccattgagcaaacatctcttcataggctctatttttctcggccccatccgaatctgaatcagagacagattcctcaggttctaatactcctgaagaacattctttagccatgaatgcaatcatggacttatcatcttgggagccatcacttgcctcttcctcatcactatcactccatgtcactacaagggccttcttcttttttaaggtgctagcacactcagcctgtatatgaccaaaaccttcacattcacgacattgaatacctctgtcctttttctcacttgattgaggagctttgttgaaattgggctgatttttgctgttagcaatttcttttccaacaaatgaatttttcttaaagctcttcttcaggaatctggcacagttttttgcaagtaaggcaaagttttcatccactgagcactcgggtgatttactcagtttgttggtttcctctttatgaacaaatgcgactcccatttcactcttgtcttttttggtatccttctgtttcttgcccttagaccatctttgtaatgtcatttcatagttgtgaagagaaccaatgagtccatcaagatcaagggcttcaatgtcatgactttcctcaatcgaggtaactttggacatgaattttttcagtagaactccaagaacctttctcacaagtttcttatttgagtacaccttccccagagcatcagactcatttgagatatcgcacatcttagcatgaaattctgtaactgactcatcctcttccattgatagattttcaaaggatttagctagggctctcaatctggctttcttgactgcctttgtaccttcattcatgatccttagcttctcccaagcctccttggtgatttcatagtttgagataacttttaactgattagtcgaaactgcattaaagagagcatgaagagcctttgagttaaagtttgctctttccatttcgtcaatgctccaatcactagttttctttagtttttcttcctcttcattagtaacagaaggaagggaccatccctcaatgacaaccatccatactctttcatcatccctcaacgacaaccatccctcatcttggttttccagtacaagtaattggttcctttaagcatgggagggcgtgaggtggaacctccttcccgaaacatctccatttcatgttaacctgcaatcacacaaacaaaaagaccacaggtgtaataccttgacacgcaactcgaggtcagttagttttctagaaatataagaacagaaaagaacaatctatgagcacataaagagacacaaatcaagaaaactgtagaaactaaaaagaaatacacaacacaccaagatctcaatctcaatcgtgagaaagattagctctgataccaaatgaaaaacctaacagtgtcaatttcttcttagttgattttaaagacccaattcttatcttagattgcaagaaataaatcaaaagacacacatatttacaagcttcactcgaccttggaaactcattccaggcgactatttcttgggttcccttgaaccagggtaataaccttcactatgaattaattgaagtacaatatccagtcttgattataatttttcaaaattaatctaacatcaactcatacaagggttaccctactgatttgatcactatcaaatcccaaaacagtctaagactccttagacttcaaaagtcaagatccctttgcttcctcgtagctaaaatcccttcagcaacgtgatctgaactcccttcagacaaaaatagatcactgattctcctttggcccttaaagatccaatcaacaatgacctgtaaattaaccaagaaaaacaaagaaaagattttccctagcagagcaaaaatatccaatcaaagaagaagagttagttagaaaattggtagtccctgattatatactaacaactcaataacaacgaacttaacaactcagtacagaaagaaggatagttttccaatgttttgctaaacccactaagctgacctgtcaagatgaaataataaaaaccaatattatgctaaaacgacaagatgaaactagccaatatatagatgaccagaacaacacaatttgccacacataacaactgaatcttatagaaaacaacctggaaaaggctttgacatagcaacgatgatcacactactacaattacgtagtactgcaccaaaggcaaatgtttgtgtcactgtgttagcagtagcatcggtatttaattccagtctactcgatggaggattcatccattgaggagtcaatgggacatctcttgttgtggaagatggttgaacagaaacatcattagatgtatttctagtagaatgatactattctaaataagacatcgcaaaatataataggatatcaaaaggctttggctttaacttggatccatgtcgttctttgttctgctcattccaaatgccccaaagaatacacgcaaactgctcaagttggagagaagtctaatcagtagaaacatgcaataataattctttgagactcatttggtttgacaaaaattcattaaggaagaatgaagatgccctccaaacacgtttggaccttttgcaatgaaaaagagcatggagaatggcattgattttaataaaaaaatatatgcaatggtcttaagttccaaatttagtaaaaataacttaaaaatattacaacattttgtttggtcatttttttgcaacatttctaattttttaattttttatggtatatgatttgtcatatttttaaaacacttaatttaaaagtttaaatttaaatttataaattttgagtaccctacatctttaaatttgcatttcttattatcttttattattttttcactttttttattattttaattatttattaatttattttaattcattcaccttatttttctattaattttccatcatttttattttattactttttattttttttcaatctacttttatttctctcatttttttacttcattttttcaatctttgcgtttttttattttttttctttatctttttctacttattatttatcattctattatatatatagtttgcttgctttattatttttgttttctttttcccccattttttatatatattttttcgttttttttataattttaattcttttctgtttgttctttttttccttcttttttggtttcaagtaattttttttcctttatcttccaaatatatatataaagttacataattaaatttaaaatatcgagaatgagagggtagagagagagagccaagcttgttgagagagtttagttaatcgcttgaaatgaccacattagctatccaccaccaaaatataaaatttcaaactttcacctactgacagttcaatattttaacatccattcaggcaatatctcatatatatataaaaataaaatcatgagtgttaatctcgcttctagctaaagatattgagtcttaattaaagcgattagattaaataaataataggatgcaaagaacaataagtaaaaaaaaagaccaaaatttctagaggtttggccccgtgatagtagtaatagcctactcctctttttattatattgacttgtaagacaaagaataaaatatttctccttaaaagctcttacaaaagatctctgattaattctctcttagtcactatttctctctgattcaatccgtctccctcaatagtgagatgaaaccactaatctatagaggttaattatataggtatagtttctcttaatatataagaaataaaataggaaattaatatgtttctataattacattaaaggaattggaaaaatccaggttgattacctttattctctagaggtactaatcaatcccatagaagaagggattactccgtgttatgcaagtttgaagatactatcgatcactactgaaatttacaactcacatcccctagccggtgcatgcaagttgatcacataatcaagttggtcaaatgtccattgatgactctgttcggacatcctgctatgtatgtacaacctagagcttcatatcaatccttctggggtgctaggagtaaatctatctgtccaggttaaggaatgtaagttttaacccagcaatgagtgcttcatactctacttcgtggttgtaggctttagatccaaatttaattgctccatgaaaaggttgcccccaggtgtgatgagagcaattcccacaccggataactgatcagtggctgatccgtcaacaagcaacttctagataagtttgtctttttcaatttcttctagtggggatgcttttttttttggtctttagtctggctcaggattgtcttttgaactgtctgattctttgcccgtgcattcagccacaaaatcaacctaaccttgcccttttattattgtacggggctggtaagttatttcgtactgaccaaactctatagcccatttgagtagccatcaaaaagcatcgggcttttgaaaaatttagcataaaggttggtcggtctacacataaacaggatgagcttggaaatagggtcttaactttcttgtggctaagatcagatagtaatttagtttttcaattaggaggtaccggccctctaccttaactagtcttttgctgctgtagtaaactagatattgaacattgttctcttctcttatcagcacgaaacttacaacgtattcagtgactgctaggtatatccttaattcttctttgtccaaaggttttgagagtacgggggttctgaaaattgcttttttaatttttgacaagcattcttacattcctctgcccgttcaaacttcttgttacctcgaaggatgttgaagaagggaacacacttctctgttaattttgaaatgaatttgctgagtgcagctatccgagaagttaggctttgtaattccttcaattttgttagcgacttcatatccaggagggcttgaatcttctctagattagcttctattccacgtgcattaataatgaatctaagaaacttacccaagctgaccctgaaggaacactttaattgattaagtttcatgttgtattttctgaggattttgaagcaatccctatgtgccccccagccttcctagatttgacgagcatgacatcctcacacacttctatgtttcatccaatctagtctttgaacatcttgttgactaacctttggtaggtagctctagcattcttgagaccaaatggtatgactttatagtagtatagaccaatgtctatttggaagcttgtgtgttcttggtcaggttgatgtattcttatctgattgtaccatgaatacgtatccatacaacttaagatttcatgcctggctgttgcatccacaagttgatctattcttggaagtgaaaaatagtcttttagacacactttattaaggtcggtgaagtcaatacatactcaccatttgttgtttggcttgggcaccattacggggttagccacccaagctgggtagaaagcttcaataataaatttgtttatgcggagcctttctacctattcttttagtgcttgtgcacattttctagatgaaacgaaagtctggatcaatatttagggcatgagacatgacagttggatcaatcccgaccatatcctgatgtgaccaggcaaaaatttctaggtttgctcttaggaattttattaaggctaattttatttcaagcaacaaacctttacgaatttagagtttcctggttggcacggttggatcagtctccacttcttctagttcatccattggcctaaaatttgtgtttgtttccctaaattggggatccatatcttcgtccctgccttcggtgaattcctattgggcaatgcattttcccttctctgaactctagctgtaagtatcttctttcttggccttagatagagcaaggttataacattcatctacagtcctctggtttctttttagacagcctattccactccttgttagaaacttaatgcacatgtgaaagactgatgtgaccactcttaagtcatatagggttggtcggcccaacatgacgttaaaagctgaagggacatcaatcactaagaactgtgccattactattgtgctcgtaggagattgtcctactgtgagtggtagggaaatctgttcaagtggtgcaacgctttggccagagaattcgtagactaaatgagtgcaaggaatcaaactttaagttgaagccccattttctcatatattttttgaatagaatatttgagggagcttcattatccaccattgtcccaaccaccattttatttgcaattcgcacttcaacaaccaatgggtcgttatgcaaaaaaatgacgtggctagaatctacttcactgaacgctatgattggttcttcaacacacggttgtctaggctttcttttctctacggccaggactgcatccttttgttcatattgcaaggctcgagcatacttttctctagcttttcccaaatctccagcgatgtgggggccttcaatgattacttgaagacatttatccactagtgggggcatcaactggttctagttagtacctacttgagcgaccctttgttcttggtcgaccttgacatatttttgcaagtacagtttgtttttctgatgagaaatttaatttcccgctttaagttgttgcattcatttgtgtcatggccgtagtctgtatgaaaacaacagaacttggtggtgtcccgtttgctcatatcctttttcatgggatagggtttcttatatggaaccataaactgggtagttgatagattgtctctatgtcttctgttaggattgtgaatgcagtgaattttgaggcattatcacgaggatgtttttcggagttgccattgaacttgcctttcttcccattaccctgtctgttgccatcgtgtgacctttatccaccatgattagaactactaagattttgtgaattctagtctagttggaaagatgtattgactgcagtgatgtgttgttgagttttcttttgtccaactgtatctacacatcgtacttcttcttcgagcttgataaatatatttgctcgatccaagaattcccattgatcccacaattagtctttttatatcattccataacactcctagagatctccaaactcttcatttttgggagtgatggaaataagaaatgaaaagttgcgaatttgatttctctaactttatagatcattgtatttatgaaaaactagatgcacagtcgaaacaggatcagcaagtgataagcagaacccaggcatcaggccatttgttgacttaggcactgggccctttcatctaagctcttaggattctatttttgatacttcccaaacttgaggatggggtctcctcccctgtttatgaccatgcttaattcaatggtcacattagatttggcatttgagcaattaaaggaagcatctcaggatgattgtcaacttaggcgctaggccctacttccagggactcgagtttgtgattttctctccaagtttacttgaatcttcattatgtctaatgacataaaaaagctcgaaatactttttgttgaattgcatcagaaacaacccatgttgataaaatgtcaacttgggcagtggacccaattttgccccttcgaaaatttcgtttggttcttcaaaagagttgaatctcaatattttataaagatggagaatattctcaaaagaattcttgaaaaactccattttaaatggcctaggttgataaaatgtcagcttgggcgcaaggccagccccaagtgtcaacctgggtgtgggccctatatttgtgcaggaattgttgtttttcctctaaaaggacctatttccctgtttttgatgaagatgaatttgatgcaaaagttagatctccaattggagacttagaaggtgcctagattgatagattgtcaacctgcgcaatgggtgctcgaggcctcggtgccccaagtgctcaaaaataaacttgctctgattctaattttgatgcctcaaatatgttcatggaatgtataattgatgtcccaatgtaagttttgaacaatttttactaagttggtcctaaaaactgaaactgtaatgaccgctttagtaattgggattttttgatgaaatagtaattgggattagtaaacgcaattagcactaatttctgacatttttataattatttatgaatttaattatctgcggaccccattgttagaaatgggcattggaattataatttctcaattccgaagattttattaaactctaagagtattatttgacttatatgt

SEQ ID NO: 303072 - DNA, 1787 bp, Cannabis indica
gagacattaattccgctgcatcaatgtaaggttttgttaactttatatgtgtttattttgtcgttttagaaagtttatatttagggtgttaaacaacatacttgtgagtagatctaagatcctgataaaataatttccaacacatacatggtagtaaatctagatcccgataaaaccataacccaacaataaggggattgctactgtttgtggaaataaaaccaaataaatatgtttaatagacaacttattaccatcaccaacaacgagagaatccttaccatagtacttggttttctggtttatgtttccagctccaaaagttatgtgattgctggcaccactatcagtataccaagcatcagcctgaagcatctcaagagtagcaacaatggtaggaacactttttccaatcttgttattgtcatttgagcttctaggtggtgttgttcccatatatgcttcatcatatagattatagcagtgggctgcagagtgtccataactcccacacacttgacaagtgggttttggacctcctctgcaacctctgcctctgccaccagatctaccatgattgttgctgttgttaatggttcctcctctacctctgttttttcttggaccaaaatttccaccaccagaggtacctctgtttgtaagattggcagtgggagaacctctgtttgtacctatgtcaagcttgctgtcaaagcttagtagtaggccttgcagggtttgccgagttgttttctctctcacttcaatctgcagaacaataggcaagtattctgtgtccaaacgagacagtacattagaaacaagatgtgattgagggtagggatcacctgccaaagccaaaacatcagcccactgcttgttttgtttgagatatttagccatgttcatggatccctttcttatagtttgtatcttagttctgtacgcatccattttagcttttgaatgagctccaaagagagcttctaaaccactccatagatctgcaagggaagagcatcccatcacctcagtagcaattccttcagtcatggagccatagagccagcccgttaacaactggtcattaactatccattgttcgaactcaggattaatctcagatccaacttttggttgtccttcagcatcagatgctggtaaaaactcctctggtattgatctggctcctgttaaatagccatcaagctgatgtactcttgcaatagccatcaccattgtcttccacaacgaaaaattatttctgtcaagtttgagagaaaatggctggtttaaagtgctcccaaaaatgaggtacagaaatagtggaggaagaggctccatgcacactattgtttttggttagcaacattgctaccagactgagctgaaccatttcttggagtttgttcttcagttgccatgaaatcgagctagagctttgataccaagctaagaaaaggaagatgatgaatatttagctcattgagctactgttgtattgatttcaatatatagccactagggcaacaaatggtacaatctagaatatggacacctcattcctacaatattggaatacaatgaatacacaaaatattctctctctaacacatattgttggaatatattttacaaagatctagatttactaccatgtatgttatttaaacatcctaaatatgaatctctaaaataatgtaaataaacacatataaagtttgagaaaccttacagtgggtgcagcgggattaaatgactcctcccactcagatctctaacccttg

SEQ ID NO: 303073 - DNA, 2547 bp, Cannabis indica
ctctctctctctctcatagtaataatataaggactcctctttctagacgtttaccgttttttcttgttatctgcttctaataatttcatcatggtcatcttctagtttgattgtctgtctgatccctttcaaaaaagaaacaaagaaacaaaagcaaactacacagaaccaaagaccaagatccactttattaacattctcatctcttctctctctctctctctctctctcctatatatatataatacctgactgacagtactctccatatccctatctttcttattcttcttattctgtttcattcattccctaatcatcatttgtatttgatccaatggaggtacatattaattattatatctctttctttgtttatctatttatacatataaattattgtgttgaattttgacttactgtaatatgtaatgatggtattttgtagagtgtggagttgaaggttgagatggttggtatacatgagaagagactcaggaagtgcctttccaaattaaaaggtaatataattaagaaacccaaaaacaactaaccttattcatcaattcaattttacatatatgtataccatatatcagtttttctatatctttatttaaattattaatataatatttatagctcaataaataatatttgttaagagtaatatttttcatcaattattacctcttagttaaattatttagctattttaactactctaatgtgagtgctgttcaatttttaagtagcatcaagtaattgtaaaagcctaaattaagaaattataattaagtttgattaattaatttaaatgagaatgcaggaatagagaaagtagaagtggacacaaatagtcagaaggtggtagtgacagggtacacacacaagaacaaagtattgaaagcagtgagaagaggggatttgaaagctgatttctggtctgcccaaaatgaacttcttcaagcttatgctggaggtggagttgcctattcaactttcagattctccacctttaatttcttttaattatatatttatatgtattattccttttcttcttcttcttcttttcttttttacagagggacttcaacatatgtaacatgataattttatttaatttatacaatgagagagagagaatgaaccccccccaaaaaaaagtgaagaatcctaagttttggctgatatttttctagctttcttttcttttaccttcttttaatcatttctatacaataatcatagcgtaacatataatagactaataggtatatatataaagtgcaccgtgtttagtaattttttataagacaccataattggttagcaatattatattatgttatatgagactcgatacttaattacactaaaaataatattacaccaagaatgatactagaccttttagcatttctcatattagaggtgttcgcggtgtgacttgtgacctatttttcaaaccaaacagcgtacgcaatttttgtaatttctcaattgcaattgcaacgcgagatcttaaaattgtaaaagtcacaatgcaaaaatgcagtgtggcttggtgtggtttgagcgaattatattattataattatcaattattataataaaaattcaaaaatcaatcttataaagttttaacgccattatatgtatactaatcgtcaactcattatattgaattgtctttaaaaaattatgtaatatattacatatatttgatcatacatttaaaaaataaaaaattatattgtaaaaaatagtaattttgtaatatatggtgaggtacggttttaaccgcaaaccaaactaaagtttaatcaaaatacaaaccacaatcacaccgcaaagaatttcgatgtagtgcggtgcagacagtttgtgcagtgtgggcaatttgatgaacatgtcagtctgatggtttttgtctcattttattatttttttttctaagaaaaatatagagattatttcaaaaatacacaaacaacaaaaaaattacaaaaatacaattgtatgaaatttgaaatatttttacaatttttaagattttatttatataaaatacggtcttttaatatatttttatgttgtatttttgttatttatatattgtttggatgttattttcttgttatttttatgtgattatcgtattacttttatgttatttttataataattgtaaaaatataagaataattatttaaacgtaaaataataatttttttttatcaaaactagtaatttatgtaaatttcttaaaaatataagtaatcacgtgtcataagtccaattatatctttctttaataataataataaaattgttttagaaccaaatcataataataaaagaactaattcaagcccttgaggagtctgacatagggaaagtgcattcctctactcctttcttagtttgaaaatgggtaagttgaaaaatacctcttttattaatcaattaaccaaatttgtctctaattttatatttatttgaaacgtacctctttttgtatgtattgtacccaaaataccc

SEQ ID NO: 303074 - DNA, 8456 bp, Cannabis indica
atagctacacaattacatatttagtcttttacattacaaattactaataagcccctgcactatttcatagtgtaacactttcccatatttaacaatagctacacaattacatatttagtcttttacactctttacaaattactaataagcccctgcactatttcatagtgtaacactttcccacccttcaaaatcaccttgtcctcaaggtggtaaaactaaaaaaatggttacagctttagcaacatctcagtgtacatgagatgctataggggataaaagaaaacccaaccaagttttatgggacgagatcataagaatattttttgggtttccatttaattttatgatgtataagagttcaaaggtaaatagtaatggaatggggtttaatgttttacattagtactgttagtttgctttatctccccccttgtaatcttacctagaaattgaatgggattttcctttaattttttttgtagaaataaataaatgataaataagagagagaggatgtctaggcaagaatttattgtcacagtgaatcttggtgatggaggcacatagaagggaaaaaggaaaattaatgtggcaacattttaattttcaatacaaggctataaaagcataaaaggagataggtcatatctcaccagccattaagacattgagaagtgatgacagcttccttgcccacaaatttttctggtgtccttctgttgccctgcaaaattaagtattttcttcaaagttcaaatattggtgaaaccaatttctcattttaatattattttaataaatgattaatgtagtttatttatttgaaaatataatcttaattctaaacaactattaaaatcttaataaggggtcactgaaaatgtaatcactatagaaacgtaactgaaaactcttaaatatacacattcaaaacaaaacataccttaattaccactttttcatttactgaaaatggatactgcacaccacgaatcatcccgtcttcaccaatatctccattttcctgcaaacaacttatacacccatataaaaaattgttgaacccgagcaaagaattgaccaaaacaaagaaagaaaatgaaaaaacaattggcatatcgctctaaactactaaaataaaccattttctttcataagcaaaccggtaaaaattgaaatgaaaacacaagtgctggggacaacagaaaaaaataacattaaatagaggccaaatcccctaacaaatccttacaaaacttaactcttttgcaccaactaaccataatagtgtccaatactaagatactacgagaaataatcataacactgtgggtacattataaaaatattctatgtttccctaaccataatgtctgtcagacaaaattaaattccgtaacattaaattcgacccaactatgaaatgcaatattaagagaatgatccacaaactgagtattgctcacttcgtgagtacctttccaaagatgataaccagtcaaaatcttcagctttcaaagaagcacatggcccttcgtcatgaattaagaaattatgactcttccaatgcctagattcttctgtcctccaaacaaccaaagccccacaatatttactgctaccacatacaaactcaatatttccttgcttatattggtgtaattaaatctaaccaaaaaaaacttgcttatcttaaaattcttcttggtcacagatcaacaaactgctgagtaaactgacttccccacttgcagcctcaaccttttactgcagttaaggtaactcatacatagaactacatcaaccttatttcataatggtctggttctatttctatattcatctgtcaagcctcctagcacctcaataataaccaaatccaaaaaaacataaccaagaggatttgattccaaacatttaactggccaacttccaacagaacagataacacttttgctagactttttaggataagatcaatatagatacccaataacacaattttcttcatatttcatgcattcatcaatcaaaagatttatattagctaaaccaaatgtattatcagaaaacttaaaatgagggactttgatggcatctttccaatagttaacctaagaaactatttctttgttcagcatcatctattagtctcccaaagccatcaacaactatcaataaaatatagggaagaaaaatcaccttgactcaaaccccaggtactaacactaaaccaaatgtatcaaatcaagggagatatttctgttttagagtgacgaaagtgactcaaagttgcataacattcagtacggctctgaaagatacaaacaacctattctaatatataaaagcccgtgttttaacttttaacactgaactcccattaaaacataaaagtgcctgaaaaactatcatttctatcttcatatgctagactcctaaaactactgaattttcaaaatacaaagtatgaacagctttccagctattttaaattaatctttcgacatcatctgtcaacttcttaatatcttcttccattccaatctgaacaaaaattacttatacattgaaataaattggtgaatatccagcacccaaataagcgaccaatcaaaaagtactaggtgtacataccctggttggtctcctcaatggatcaatttgatcacctaactctttccgacgctttctgagagcagcattatgaaaaagcctgcgattgtcctcatgcttcacagctgcagccgcagctcttagagctggggagtaaatagttttacaatataaagatataataccaaaagtaactctaaattaaataaataataatggtactgttgatgaaaatgacagagtttattagaacaagagaagtgtagtagcattgggaaatgtcagaggggaaaatcaaatgtgatgatagaataaactcataaaaacttaaattaaaaaggaacataccaatattagggatcatcgccccagtcgcaatttcttgactgcagagagtacatctggactgatcagttaagcaacatttctagtcatgattcaaacaaatcttattcatctagaggtaataaaaacatcatataagggagacagaaagcaagattagcaaaaaaacaatagaggcttagttcaaagtgtcgaaaaatctgcattgtaaagatactcaaagtaaaaagtaaatacaccaacaaaaagaaattcataagagtattggcatgccaaattaagaaaaatatacaaattttgtgaaaaggaaagaaactgtattcacgtagtaacaatatcattaagcaattgtgataaagtaattaaaagtccactaaattaaaatagggggattaaatctacttaccatttcaataactcttctcaacattagaccaccaaatgaatgtccacacgaaacaaatgtagcatcttcgagaaatgcaccactgatcccccaaaaaggaaataaattaatgttagtaataataacaattacacaaaaatctctcagacatgctatccaaataaacaatttcatcttgaatgttcattcatgagaacaaagtagatgaattaaatgcaaaaaaaaaaaagattattatttgcacaaatagtcatcaaaagcctagtgcatatgcttctaaaacaaaatatttaatataactagctttgaaacaccccaccccaaaaaagatattaattgaacagataaataaccaaaaaaaatcactcacgataacggatctgagagaacacttcttaatgatggttgttccgtatttaaattgttccgagctatctgtgaattaaaaaacatgataaggaattcagacaagacataaaatagcaatataatttcacccaaaaaaaactgcataaacattaaattggaaaatataatattttccaatttaaccacatttaaattgaagttttgtgctaaaacttctgtaaccaaggttttcctccaccacaaggcacaagtgagggtcttcaatacttaacgggggagggttcaatctaagacaagtagcctctttctctttttcaagaaagaaaaaagaaaaaatggaaaaattattttcttatgacattttttttctacacttttatcttttctcaccataaaacttgcataggcaagaagtctatagaagacaaaaagactaaacaaaaataccactagacaagggaagagttgaaccaaaccccaattgataaaagttttcaaacatgagattttagtttttccgcataacatttaatgaactgtggcttaatttataggttgatgatcaatagtattaggaaaaagaacgctttatttaatgaaccaatattactatactgctaatcctattactctgtagaatattctcaacaaatatcatatgttataaacaaaagcaaataaagcaaccagattgctgaagattgtctctgctctaaagttgtatcagagtagcagcaaacttttccgcaattgtacagaaagaaaacatcagaaaacactagtaaccaacatcacgacttatgtgtgcatattacttccatttttcatataattctcacttaaataatatttcgcttgtaattttcttctcgatcaatagcttgttttgttaaaaaaaaatgtattattttgtcatctaccactaccacacatctttaatagtaattttctagttcatgtagatacatacacatatatcgcacaggcatatataggatatatttatgaataacttacataatcattgtctgatcgactacacaaaatatcttcctcggctgaaagatcgtccataaactggctaacagatattggcacataactctgtggaatgatatgaccagccgctgcaattggagaacaatctaataccgcattgccttgtggcataagtctaaatgctagtgatgccctacaatcacaaagcttgatagggtaattcaaaatgaacttcgagagaaaaaaactccaaaaattcgaacaagctgcaataaatccatcacaatgttcaaatcatacaaaagcaattataccttccaccaccattattggccaagtattcagaagaagctctataagatgcagctggtcgaaggccagcagtagtatggctaagtgccttccctgtaagaagtaaaagatctccaggacttaatccgctgtctgctaaataccagcgaccattgggatcacaaacctaaaaaaataaatgattagtttcaatgccaaaaaattaaagttaagacattacaagtcacctggttctttttcacttaaaatgtcctcaactagcacatacgactgacagaaacatataaatatatacatgctacaactgttcataagtacatgaaaagcacctgcacaccaggactatccgatgaaaataatgtcaacaatcccttttcaatctctccatttattccaggcttccctccacctgtgctacctttcacattcagtatggaagaatttgagtaggaagcgacaagcactgatgaggacacctcattagcaggcaacggcatgtcatcaagtaagtggttaaaaacactgcaaatataaaattcctgtaagtagatatatagacttgagtattttagaaaagaataaataaataaaataagaataataaaaaagcaaaatatatttagtacttactcgcttcgcaaacgaagatgtcgtgctattgcacaaagagcagcacgtgaagccttccccatgcatctaaaaatatcagccatgcaaggaggggatgagtcccaatcttccagagccctgcaaaatcaaaagctcatgattactgaacaagctacaacactccctatcgacagcagattttaagatcatgtctttatatcatataaatctcaccgagtagagtatcatctagaaataatgctctttctcaagtaattcaaacacacatatgatgttgtaactactatttctgatgagtttccttattctctttttctgtaactccatttttttaatatcaaaaagaaagtttttttaaaaaaaaacgccagtgtaggctagagtagcagaatccaccgctagctatctcttctttttcttaactgtttaagaatcactacgagttacagaaaaagggtatcatccatcctatcttacaatcaagacaccaaacatgggaacattaactgcttctgcttctttgattattatggaagaactaaatgttagtaattcttcttcttgattattatcgataactgaatgagagttgctttcattcagttaccaatactaatcaagaagaagaagcacaaactatatataattcttccataactttattttagcactactaaatgtactatggtaagcaaataatcaagaagcagcagctaaatgtttacctattccatagcagattttttaccgcgaaagttctaattcatgtggtaacaacaaatcataacaagggttcatagaagctataaatttacatataaaagagtattggtagaaatgttggattacccaagaaccaaccaacgtgagtaaaatactttcatcacctctgctagtattgtaacctaaaaacagcaaaaatacataacttcaaagccatttgttgccaatttgttttgatatattcagcacttaattaatcgttgcaaatatcttcataaatcactggaattcaactttattcaagctacattgcacaatttccaaatcccaaatttgcacgcaaccacaattttgtataatcacaacacaaaaaagtaacaaaccatacacaaatccaaataaaaaaagaaacttttttcttaaaaaataaaacaccagagaaaggagcttcacataccttccagacctgtacatgtaaacactacgacctcccttcccgccactcagctgagccttactcctaaaatacaacctagcagcttccaagccacatcgcataacagcagcatcatcgcttcccaattcaatcaccgccgcattatgcctcatcaaggagccagagagggcttccacagccctcaaataaggagcaacaggaacaccgtcgtaaagagcaatctccgaaagcctaaccctggccaagcaaggcgacgaagaggtgacagcaacagcagccatggtgtcacaaattgcatggtcagaagggttgcgtaggacggtgggagtggagagaggagcgagagagagaggggtcggagtcggagtgggagttggagacctaagagagccagaattgttgttgctgctgctgttgttgatgatgataccggttgtagtggcggtggtggtggtggtggcggcggcagtggtggtggtggcgccggaagagggctgttggttgttgttggtgttgtggtgatggtgatgatgcatggtgagcatgataagaatcaatcatgatgaaatgtgagaaaatgttttggtttggtttgttggatttttgagttgttgagtttgagttgcctcagatgaaaattcaaattcaaccattagagactttttcttgttttaccattttagggtttcttttccattaaagaaacaaaaaaaagtactatattgggagactgtgtgtgcatataattatatatatcaatataatatgtgtatgtatgtgtatggtgagttagacaaactttgctttggattttcagaacttgttaaaagaagaagctgaggaagaagaagaagaaaatttgtctgattttttttatattatttatttattaattttatatatataaagctgtttgtttttgaagtatttatttcaaattataataaattttaggaatttttttatttttttatttttaaaaaaaattatatttttatggaaattcaagtaaaaattcacatagtaaatgatggattaactaaaattcacataccaattcatataaaaactattttaaagaaacttaaacagtaaattaaaaaataatatataaagtaattttctaaaatttaaaaagtttttcattttataacgaaaaaatgccaaaagacattaatccaacctaacactaaaaatcttatatataggattatctacaatatctaattattattagtgggacaacgtagattacaccaaaattatttctttttttaatttttaacaattaaataattaaatttttttaatatatgtatttaatttatacttatatataaaaaagccttacaaaaagttatttatctataaaaataataaaaaatatgtgatagtcagtagtcatgtgatccgtaaagggacatactggataagttgtgcatcgcttggggaagatcaagtgggatgattttaagactatgtaggtatgagactacacagttgaaaatggcttaaatgaattgattagtactacctatatcaataaggtgcatcttgtttttcggtagtccatcacgaaagaactccacgattaag

SEQ ID NO: 303075 - DNA, 5704 bp, Cannabis indica
aatattaattattgtttgttattttttttattttttataaatatgtgtgaattggattagagttgttacttttacatgtcaatcaatatccaatccaatctaatccgcacaagtgcggagattgatttttttatgaacatcccaattacacataatattatttaaaaattataatattttttactttttaactattttatttttatttttacaaacgtgtacaagagtgtatagtttatggtggcaattaacgggatgacatctaaaatttgctaacagttcagtcgttcgaaaaattttaccgccaaaatttgaggtcaagtaaaagtaaaataataattgagaagatttagccgccaaaagctctaataataatgtataaatactaagaaggtaataggcacagcgtgagccagtgggctttcgtacgccgccgcgggcctgtaaatgtaatcgtcggtcaattaacaatttaagcaaaacgttcatcacatgtcacacatgcacggttaattatgttcaagtaatcacaacttcacatgcatgatagtaatgtaagcaatgggttcttgatccagaaggttccatcaaccttgagaatttggagatatatgttcgaatcatgtaattttatatataatatataattgaagggatggggtgagatattaaagatcagtgtcaagccagatagagggatcaatgcagtcaaatgatgatgatgatgagttgtacatattcaattgagttgtacatattcaaagttatgtataattatataagtattaaagcttggctagcatgtctccatttggaacgatagatatgaagggtccataacttcatatgaaaaggatccgtaaaaatattatcttctgagaaagatagtgaaagatcgaatataaagttgtcggaggactcaaaaaactctaccgttatagcataatcaacttcttaatttctacaaaacaagaaaaagacgtaccactgggtgttttctgtaactaacatgtgcttttgtatgttctcgactttatatataatcacttaaataattgacacatgtgcatgttatggttacccaataacatgcatatattggtatagtagccattataatactcaaaatatttgatagtttatacaatggtatatcatcatgtacttatgaagtacctccttcaaatttttaaaaaattcattatatataactatagcttttatcaaattaataattttgaattttaaaaaagggattcaaattataagcatattcatggagaacaagattgcaaattgcaatataaaaaatgttagaattataattgtagactaatataattataagcttaatactataaacacaattattaactatatgctcaatatttatcaacaaaccataatggaatagttaataattatatattatatgctagaggcacatgagagcacccttaaaaattataattggcccattaaattatagtacaccattattgaactacttaagcccaattagtgtataattccttaggaatagaagggtgtgacatatatatatgtcttaagtaaaaagggtttaggttaatagtaataaaaagaaaagaggacatcgctccacattgcgcttctctctaatattactctaatcttgtgtttgtgtcgaccattattggagattcttggaagcaaaatagctcacatggatggatcattagtaggaggtattatgtgtttatcttattttaaatgttctaaataaaatattgatcttggattagtgattatgaggaatgatgattagtgtataatatgtgttatttaaggttcataatctgtgataattaacaattggtatcaagaatatttgattttagagctcataacgacaagctcatgaattgttacaaaaagcttaagggcatgggattagatcttgatgtggattacatggtgtggttagtgatagaaatcattccttctcaatttgattcaatcagatcaatctacaatgctcaaaaggagcagtggaccattgaggatatgactgctattcttgacaaggaagaagaggacatgaaaaaggaaagagcaagaagtatctgcatagagacaaacccaaataattatcacaagagaaagtttacttccaacaactctagtgaccaaaggcttcaaaagaagaaagccaccttttattcctcacatttctaggctagaaaccatgggtagggtcggtattgtggaggatgccacacattctctagacggtagagagccagaggttggccaggcaaaggcgcctgtggccaaccatgatgtagagatctgggatagcgagtccgaggttgaggaggttttacctgcaaggaggaggtagtacaggacttgttctggtttctccaatggccctatgtgctcatacaatggtgacgggcatcccttgaataggcttggtcagtcttcgatgattggtgtagaccatgttttgataaaggctgctaagcctcaagttctcgatcaggggccgtagggagactgttgggtctttccttcttctcttattagtgtcgagactctcaacaagattagagagatcggacttatagggggtgtccatagtgagtagccgttgagggactaacgagcattccaattggccctcaacttgatggtgtggtaaaggcgccacattcattaggggaaatatggcatatgcacccctacttcagagaaattgcagcatacttcgaaatgtgcctaacataaatcaccatgaaaggtatcaagtatcctttagcgatgtttgttctttatgttgaactaggttggccttaacctactctttatgagattggatacttctttgacctgaactctgctccgaaatagaattggacaggatacttctactttggccagcttggctattagtggttgggttataccaacagtacacctttgtcaaaggtgggggatatgcctagaactatttcattgcctaagatatctaacaaatttaccaccatcgcttctagagagtgcccacttacaaatgctccattcctacccttcaaatgtggatagagctaaccactttctgtcccttccagtagagaggaggaatatactaaggtttgcttgtgtggcaaacttttggagatacagcttgtatcccccagagtttggagttgcgggggctgagggcccatcgggttgtccagacagagctccaactactgaggaggctagcccaagaggaagacgtactcccaatatggatgatgatgttcttttctcccaaataggcaagaacttggagaagagagacggagccctcttccagcgcttgactcgcagaggcaccgttggggacgccacactactaatcaggctggaggccagatttcttcccttcccacttgcccctgcctacatctagaggcaagggaggcaaggacaaggtgcccactgatgatagttcggatctcctcttctgaggatgatggtagttgattgtaccaaattttccacttttccatcgtattaaacatttgtaaattatattcttaatttgttactttatttttgcagatatggcttctatatgcagagatctagttggaaggccttcaggcgaggcttcaggtctccttagggccaaggtggcctggaccattcatttcggtgatgttgcatgatcttctcttcctcctcctccttctaggcttccaccagttaggcagccaatgattgttgaccctccattgaggaggacccaaccttcaagcaagggcacccataggcctaaccgaagggtagatttagccataaggttgagagctttggaggcagatcataggagaatggatagtgtcttacgcaccgtcgatgatgagcttcgagagctcggtgatggcaagctgaagatgttgtcttctagttgtcgctagcacttgatctcagtaagttgcacatctaactttactcacttttctgtattgttgaatgttggccagacataagtagttataatgcaaggctggtcggctagtcctgtgttcttgagaagctgattggccctagaagcaccatagaggggctggcctcccaggcatatcttttggtactaacttgccattgtttggtttttaggccttttttaagttcaacattttgcatgactactccaagaggtccttggacgctctctgggagaagctaaaggccaagtagattgagctttaggtaaggggcgaagcccttgctaattctgaggttcttcttaaaagaagaagaacgtgattactggtttggagggcatggtcaacaccaagaactaggagattaacacacttgctgctgacatctctaggctagaggcatactcaggaggagtaataaagcattgaagcttagtaaagaagaattgaagcttgcccttgatggctagcaggccattaggaatgagtatgttggctagtcttcagagatcatctatgagattaagctacacaatcctaaggttgatctttcctatattggagcatctttccttgagagcacattggctcaagggaaacagttgtatgagaaaaggatggagaaagaccagaccaccgctttgctagaaggatcatcattggggcagtttgataaggccatggccgatacacctactgaggtggtggatggctagggcatgaccaggtggccgaccagcctatagaggccatggccggcccacttttggacatctggacactgtaacttcttactcgactccacctaaacctccacctaattctagaaacataattatccttactttagtttaagttttatgaaacatcttttggtatgtttaaatttcatgtgacatttgtatgttatttttatgagatatcttatggtatatttgaaatttgtgtgatattttattcatccttagatgttctagaatatcatttcaatataatttgtgatgcttacacctcaaacacctcgagacttacaaaattactaactagtaactaattatactatactaaattactaactagtaactaattatactatactaatttactagctagtaactagtcctaattttactaaaattttggcagcataacggctataattgaacattctgaaaaaatttaatgctattaatcactacaaaatacaatccaaaataatatcagacaatcacaacaataattggcaatacaaaaatttgtcaccccttcgactgtagtacatgtattcacggaatctatttcactatggatgatatttaagatatttaaactcatcaacatgcatactattccactcatccgaccgcagtacaatatatcgcagaacttacttcactatagataaatatttaagatattcaaactcttctaagtattcatcattaattaataataaaagttaataaatatatacctcgaactgatcaacgtcaagtaggccagatccttgcaaattgacctcacaacataaataaatactataaaattgaaattttaattatttaactacttacaagttatataatttttgagtacttgttactaactagttaagttagcaatttattactaactaataacagatgagtaactagttagtaataacatatgaataggaatagtaactaactagtaaaaaaataaaaacacataaatag

SEQ ID NO: 303076 - DNA, 2231 bp, Cannabis indica
tagtgtgttgcatgcatgactattttattttatacgtgtatgaaataatctatttgaacactgctttctatattgtaaattattctaaatatgttttaaaattttgtatgatatcttaaataattataacatacacaaatataaaaataattagacttaaattttttttctagatgtacaaaacaattaaaagtgtatcagtacattacttttaaaaagacacgttgtaaaattaccatatatatttcttttttcatatacttagtcataaaaaaaaattgacattatagttagttttgaatcctccaaaacacgagttgttggacaattagtctgagaaaaatttcatttaagaatattaatataattgtcgatatataaatttcaattttacattaatatttaaactcttatatgtcataattaaataatgttcttattttgaacgttagatcattacctttttttttttttttttgaataataacgttagatctttttagttatcactttttttttattattattatcacattaaaatttattagacaagatctgaggattatatataaaaatattaaatcaaagcaccatgattcttatcaaaatcaaatgaatatgtcgatatatacataaaaaaagggaataattaattacctcatcaagctgagaaaaggtatttaacttgggttcatagctgtgggaaatgaacaaaagaaatcagtacttataatatatgcagtatattaattaatctgaaataatgggttggtttgtgtgaaacatacgaactgatgatattattacaatcggcatgagaaaatttgaggtgagatggatgattagtagttcctgggatgatgttcctatcgtgatgattaattacatctcgtggaggccacttcttctcttcaagaaattgacacggtctaagtggaacagttcttgttattgcatctcttacaccaaacatattaatattattatcattattatgtgatgaactaactattggtcttattatcttgtttccattttggaccataactttttcacatatggagtttttggtcaaacctgcactactcaacgaaccattgactcctaatgcccaaggatgttgaaatctagagagagaaagagaagagagatatataaaagaatatataatttcaaaagtagtgctgtaaattaatctgaacaaatcgtgtgtgataataccttgaggaagtaattgggtgtttaaaggttgaagtagaagaagtaggactactatagcttctgttgtccattgtaaactttccgccatacggactaaatctttggcacatttgtataatgtgatctctttgcatacccatatttctatgagataggactgtacacgtaaacataattaattaatgcaatttatgtattgatttttctccctctcatatttatattttatttcattatatgcagttattttcacgactccctcatatcatacataaatttgactttgattccaggttaaaataatatctaatgttttacaatattatatttttatattattttttattttgtggtaaatatacctaatatataaaatattacacttattttattttttctaatatatccaagagaaatctatcctaaggaactcttttttctactctattttgaacctcctatttatataaatgcttgaaaaatgacattagttcaaaccttttatattttaaaaaataatcaaataataaataaaagaacatgtctaatgatagaacgagatagtgcaaaatagagaataaagtgagttttctagcacttctctacattccatcactactatattgcctataaaattgcattattttgaatatatataaatattttttggggcaatattgtgaaaagattagtcacatttactcctaaaggaaaagatagggtacgaaaatataacattttacagccaattaattagtatatttaccacacacaaaacaaaaagaatatagagatatgtatattatccaacatttagaaatattgaatattttagtcactgttatatacaaagtgtgtgcatcatagctagtgactacaaaacgtatccatggtcatgatctccattaccaactacgattatcaaagaaattttttgttaaaataaagttattctacatatcatcatttctcaaaaaaaaaaaacctataatttatcaaatacaattatt

SEQ ID NO: 303077 - DNA, 869 bp, Cannabis indica
aatataaaaaataatattcaaatagtttatttcacacacgtaaaaaataaaatagccatgcgtactaaagacggtttgaacccaatttttgaagtattaaattttttttaaatttttcaaaattttacaaaatatcataaataacgataacgtatacgatcataacaataaaacaaactaaaaacttttagtgaaaccaaaacaaataaaaatatattaatatactccttttaagactttgtattgtaaaattttccaacttttataacagtagcacaatgattaagttggatgcaatcccaactcgaacaatgatcatactataatctcgattggcaatttataatataatgccttttttccatcatcgagtgatcataaatcgatcacaggctaccccagttgtgattgattaattcagctacgctgttattaattaattctaatcaaattttattatgaagggcaccacgtttattagaagtgtgcataaattaatttaatttaatgataattggtcgatctaattataactaatcgttaaatattaaatgtctaattataatcgcattagattagatgttatttttgaatatttaattggattcattaccacaaatattagaattcgcgacggtcttaaaatcgattcttttcgaggactattataaaaaaaaattaagtaactatttaaaactgtgtcgggaaaaatttagtattcctgacggtttaaaatcgtagtaaacaaaatagacgatattttttaataaaattcgattttttaatggacccttataacgacagtattaaaaaatcgtcacctacttctcgccacatttttcacgtgcccacctatatttttttttttt

SEQ ID NO: 303078 - DNA, 5920 bp, Cannabis indica
tttgctatctgttttcccttttatagagtaaattcttcactacattctgtctcttgttctttagtcatttgagctatttttacttctcatgatattcaaataacattcatcaattttgagtgttcttaggcaatgatttctgattgatttccagttttgacatgggacattttacttactaccaggcaatgagggtcgtgaatatgttcttaggcgtattcttcgacgagctgttcgttatggaagtgaggttctcaaagcgcaagaaggattttttcatgggtaaaaaccgatacttttcgcttcactaagaataagatgactaccattttttcccaagtagctatctagagtatcctgtcacccagagattttgggttcagtgtgaagaatctatcattaaaatcctttgctttttgcagttgattgagtttttgtgtatgggggagtctttgttgtgttgtatttttttgtgttccgctattgtttgtagtttattcatttgaaggaccattttcctaagattactgctatttttttttatgccctttttctatttctaactattcaacatgccatacgagatttgatttttttcttctacctttcaaatttgctttgttgttaacatactttttgattgcaggcttgtaagtattcttgtgaatgtaatgggtgatgtatttccagagctaaaacaacatgaagtgcgcattagggagatcattgctgacgaggaagctagttttgggaagaccttacttaaggtgagcatttttattatctttatactagaggccaaacatctgaaaaggaaaaaaatgcttaaattttggtttttgtctttcaaaaaaacaagaactgaagttttcgatcaaaaactcaatggttgttcctcctcttaattagtggttgatcagtcttttgggttgttgctatagtaattctagtcacttttgttgcaagctatacacttcactgattaatgctatatgcaaactactatgatctctttgtgtgatgcattataattattttcagagtctacttttatttgctgtctattacatcatctgaagcttggaaacaattccatataggttgtatttatgtgaggtggcatcctgaggggattaaataaatgatggtttttcttgattttctttctagagttcataccatatccaccatagtaactttttttttatgtgcaacaaagctaattcaatcacccacttgtctttttagggaattgagaagtttaagaaagctgctcaggatgtagaagggaagacattaagtggacaggcaagtaatatccaaaaaaaaagttcttattttctttttgttacaaattgtttcttacaaggaaacaattacgggagaaataattctctcttattttcttttgcttacaaagtttgtttcttactacaacaaaagtcatgtggcttttacttatccttcattttgttcattgttgtattaactctgttattgttcgtggtgtaggatgcttttgtcttgtgggacacatttggtttcccactagatttgactcaggtacacgtagttcataattgttttctggtgagtgttttaagtatcatatcctgataactttgtcttgcagttaatggcagaagaaaggggcttacaagttgatgttgatggttttaataaagccatggatgaggctagggaaagatcaagaaatgcccaaaataaggtattatttcttccccgtgttctctgtaatacatccaattaacataatttttgtttgtcattaaatacttcaaatttcaagaattttggtgaatggagtagagtagttcttttaagaattttgtaatgatatttttgcagcaatctggtggtgctatagttatggatgctgatgctactgcagcgttgcatcagaggggaattgcagcaacagatgatagcttcaaatttacttggttcaaggttaatgccactgattgttactattttcttacgtatatatagcttatatctttagatatttgactactgttacaccactggcaagcattagttttacttctagtgcacaagagtaacaaatgttgtttacactggttctgtgcccatcatttcaggaccacaagactacagtaaaagcaatttatacgggttctgaatttgttgatagtgtttctgcggatgtcgaagttggtatagttttaaactcgacaagtttctatgctgagcaaggtggtcaggtaatatatagtcctgtttttattttattttctattggtactacactaattaagtatgataaatttttttcctgttattaattgtttataagaaaaagaagcagcaaagtaattattagaaggaaacaaggaaagttccaaacaacagaggtacaaatccacctacaaagaaaaaacagacaattgggaaagggaaatagcatattttataagctatacatgcagatccaaaactactacgaagaagaattcaaaactattcatgtagaatgatcaaatgctatcactgttcaatgatattaaatgggcttttagcaattcagattattagctattgtgtatttgtagtcaccaaagatggttatttttagctaaatgaagggaaagttgtctgagtgtactcatgcacatgtatgcgctcatagtattatattttgctacataaaaaaaactagaaaggcagagtcgctagaagtttgaatatgtaacttgaatatgagtattgtaagcaatcttcgtttttgtatgctgcatcttactttgctgttctgctgtagatttttgatactggagtacttgaaggttcctttgggtcatttcaagttgttaatgttcaaatatttggaggattcatccttcatattggttattgctctggaaacagtggcagattgtctgtaggggacgaatcaatttgcaaggtaattctgtttttgtgatgtgcatctagtagctagtaccgctagtaaatcactgtctctgatacagtgagttgtattttaatacaattatgggtgtgctaattactttctattctctgttacaggttgactatgaaagacgtaagttaattgctccaaatcatacctgcacacacatgctgaactttgcattgagggtaatactgaaatatttttcattgctacaaagagttgattttcttttagaagtgttctcaaactattatgtaatgtgactgcaggaagtacttgggaatcatgttgaccagaagggttctattgttcttcccgaaaagcttaggtttgatttttctcatggtaagattggccttctctattgctattgatagaacttctattttcaggttcctcagcatttgttatgtcttattcttgcttttcgttaaaaatcaaacaatcttcaagaatgctattaagattcatgtgtatatcttaggttatctgttgcccacctcttaaatactctgcttgaacttttcagggaagccagtagatcctaatgatttgagaaaaattgagaatattgtgaatgaacaaattgaagcaaaattagatgtcttttcaaaggaggtaaatctggcagatgctaagcgcatcaatagtttgcgagcagtttttggagaagtaagttgattatgttgacactttttttcctttctcttgataattaatgttggacatgttctatgtaatgatctgatcttgataaaaatattataattgtaggtctacccagatccagttagagtggttgcaattgggaagaaagttgatgaccttctggctgacccagaaaatgatgaatggtcctcaatttctgcagaactttgcggaggttaatatctggtttttatatatatgtgtgtatattatattagtttttctgcagcgatataatcttccatggagttatcggtgttaaggtttactcgtttggttatgtctagggacccatatatcaaatacaaaagaagccaaggcttttgcacttctatctgaggagggaattgctaaagggattagaagaataactgctgttacaactgatatggcttctgaggcaagagaattagccaactcacttgagaaggaagtagatgatgcatccagggaagaaggcagctcgctagaaaaggtactattttcactatctgattatgtactatatttttatatagggatacttatgtcatgaaaaatgatatataggccaagaagtgtgtcaaaatagcctgatttaaccgcttcaattcaaactttcctctcagtgtgttttgaaacttcagaaataaaacccacaccataattagttaaggagtttgctttgaaccatcattggaaaacataagcaatgttttttctttcttccagtcttgtacttggggaaaaagatatcttcaaatctcaattgaaatattttgagttttcgactgtcttatctgagattgttcaagttttaagacaagactcttcttcaataatgactatattactttacatcataaaacacttttctgtgttggtaatgtctattagtatatttacatcaaaatgaaggtatgattcatcagatctcgcaataactagtcgtgaatttatgcatttattttaaatttgcaggtagtggcatctttgaaaaatcgtgtggattctgcaccgattccagctgctaagaaagctgatattaggaccaagattgccctgcttcaggtatttccaactaggcttatcattgtcttccctttttgtctatttatttataatctttcttcattgttcttgtttaaataaatttgttctgttgctgtagagtcaagtgagaaaagcacagaagaagatcgctgaacaaaatttacagaaagctatcgaggttacgattatgtttgctgagaatgcattgtcagagggaaagacatactgtatatgcaatgtcgatgtcggcttggatgtaactgcagttcgtgaagcagtctcaaaagttatgaaggacaaggttattggcaaaattttcacttttattttctgtggattattcttaacttaggtagacaacttaaaaacttgacgagccaactttagtttaagactcggtaaattctaaaacaataatgatggatgtacaacaggggatatctgcaatggtattcagcacagatgaaaccacaaataaagctgtggtgtgcgcgggagttcccgagaaaggagacaaaagtaagctattggaggtgacagactggttggcggcagctttggagccccttaaaggaaggtgcggcaagggaaaaggtggtcttgctactggccaggttagttaattagttatctttggacgacataatcgcttaaagttagtctttctctttataaaagtgaatcaagaagtctgattgtgatgtccgtacatcttatggtatacatttgttttttaaattttcagggaacagatgcatcacatgtacaagaggccatgtctcttgcagcatcatttgcagggatgaaattgaaatgaggaacgccatggcacacgacctttttctttcggaacaaacactagggggttgtctctaggctagactggcctataggaattggtgaggaaattcccatgataatttatttgagaagcattgtcttcaattgacataggtgtttttttgttgaagtacaacaataatattagagatacaagagctatttcattgttaaatttataaattataccattattgaacaaaatgtaatttacataatgatgatggtcttttgattttctctaagcttgtctaactgcttatgggttgaacacttgaactactaccatgtagtgtatttatatatatatatgggtgactattcaatggacaatggttatatttttattgtaactatatggttatatttttctttgac

SEQ ID NO: 303079 - DNA, 3629 bp, Cannabis indica
cggccctccacatcagattttttattttaggtggtagttttagagaccaaagcactttccaaaatgctgatgtattgacttcagtagccagccctttcattgattgaagcaactggtatgcacttctcacagaataaacaccagttgactcagtaaaccagcagagaatgtccacggactggtttgagcatagaggaatttgcttgatcaatcttggtctctctcctcaaataaatcctggagaatttcttcatcccggtaggatctatccataatcattaaattacacaccttggcatgttgaagagccgggtgagaagaaatcacaaaaggctagttcgtgttggtagccacggttcatccattacattaattaaagagccattaccaacactccatcgaatccccgcatgaactagagattgagcttccctcacactacgccacacgaagcttggattattcccaatagtagctgagagataggatccattaggaaagtagcgtgctttaaaaattctggataccagagactcaggtcttgttaagaaacgccacccttgcttacccaaaagggccaagttgaaatcacgaagattacgaaagccaagacccccattgtgcttactatggcacatacgctatcaagacatccaagggatgcctttattatcctttgacgaactcttccacaaaaatctagccatggtactctcgatatctctactaatctccaatggtagtaagaacacattcatagcatagctaggaagagattgcgctaccaatttgattagtacctttttaccagcacgagatagcactttcgaatcccaaccttggagttttttccgcactctatcctttaaaaactccaacacagccgacttattgcgtcccatagtactaggaagacccaaatacatactcctttcatctgcttgtagcatctgaagcagagtattaatttcctctctaacatggctcacggtattagtactataaaaaatagatgactttcccaaattcactttctggcccgaagcagcctcgaattgattgaggacttctctaactcgagtagcttcttggagagtggtggctttgcaatacaggtaactgtcatctgcgaatagcatatgagatactttcggggcaccatttgccactttgcaaccgtgaatgaagctcatatcctcaaatcttttaatcaaggctgatagcccttccgcacaaagaatgaagatatatggtgacaacggatctccttgacgaatacctcgactaggagtaattggccccataatcctaccaccatgaatcacattatacttggccgaattaacacatttcattaccaacgaaatccatttttcagagaaaccaatcttcctcagaaccgaatccaaaaaggtccactcgatgcgatataagccttactaaggtcgagttttagtgccatgaacccttccttacccgtccttttcctcttcaaataatggagcacctcaaaggaaactaagatattgtcagttataagtcttcccggaatgaaggcgttttgagattctaaaacaattcgatccatatgaggcttcatccgattagccaaaactttagtaatgatcttgtacaatacattacataaagcaattggcctcaaatcaaccatactttcaagaagtttctttttcggaatcaagacaacattagcatctccaaaaccttgatcaaactgacccgtagagaagaatttctaaaccaccgcaacaacatcagcctgaataatgtcacatcatttttgataaaacgcatgcgtcataccatcgggaccaggactcttatcgggatgcatactaaatatagcttttctcacttcctctgcaacaacaggctgaataaggtcttcattgatttgagaagtaacctttctttggatgcatcagatcacagtgtcacaatccacattcgaagcattgaataaagtcgagaagtaatccacaacaacatcagcaaggccattttcccactccttccaattaccactggaatctttaagcttcgaaatttggttgaaacttcgacgattgctagcagcccgatgaaagtacttactattttgatcgccttctttcaaccgaaattgctctgccctctgcttccaaaacgctttcttttgatccaaaaccaaaaaaagctcctttttcaccttttcataacgttggaccgagagagaatctctcttgttcttcaatctcttcaactctgttcccatccaatatttttaatccaatgttaattgaatttattggatccatccaatccaattattaaaacaaattaaacatgatttttgatccaaatgaatcgacaaatatattagttcaaattattataatccaacataaattgtaacatagatctaatctaaattataacataagtccaacccaaattgtaacataagtctaacatcaaatattgataatacatgctaatttaataaataagagtgcacaaactacaaatatcatagaatataaatccttcatcggttcgaagtgaaaatatcgctcaattttgatatcaccaattccaccaattatttctgaaaaataaataaattaaataataagtattcaatattgaaaacacttatagaatattgtaaaaatataaatgcatttactattttcttgcttccacttttttaattttcggaccacttgtaattttttttaaataatttacaatattaaaaaataaagttcaaataattatttaccatgagtattaaaaaaaaaaaacagtcacgcatgcaataaaatattttaactttatttttcacactgtaaattatttgaaattttttaaaaatttataagtgaccttaaatagttacaacatagacgattattagaaaaaaaaaaaaaaaactctcacaaatgtcaaattagataagtctactgagggtgtacatatgggtgttcattagactacattcaatatttgtaggtctatccagattcgatccaatagatgtaaaattttaccatttaatctgatcaaattcactcattcatccaatcgatccaatatccattggatatatttcatatatatctattaaattaattcagatttatttaatattttagacctaatatttttttttggatcagatcgaattcatccaatatttttgatctagcatttattggattggattggatccatccaataaaaaagtaaaattttaatgttaattttcatatatacatatatttctttacatataataatgtaaaatcaaattaatcatccaaactaaataaaaatattaattagttcgattgaatgttggatgtattaaatttttaaacatctcatctaacatctgatccgatctaattagatattaaaaaataacattcaatctgattcgattacaactgaatatctaatatttggtggttgattatcattagattagattgatttatacacacctctcgtatactatagacattctctagctaacaaatataacaaaagtatataattgacatttacactctataccctttttatattgtcttcttttatttttaccctcttttttaaagtct

SEQ ID NO: 303080 - DNA, 1020 bp, Cannabis indica
atcccagcatagttacaattttttctaccattattgttgttacgtgtgattgaataatatatagttacaagtttctatcgattatagtttgtatttttttaacatcctttgtattgtataattaaaattcattattatgttcgcatgcatgaagtttttcgtttctctctagctaatacttttacaacaaaaataccaccaaatattttcatacattgttcaaacattaataaatattctacctcatttatgtttgaacaaactcttatattaaagaaaataaagaaagtgataatgtattttgttccaaaaattattctcaccttatcaatggatcccctatatcgtttagtataattttttttctttctaaatcatgtgttttaataaggacatgaccaactgattttctttatgggacataacacttatattttataactagttaattacaggtcgtattttgggtgtgtttatttgtaatttttttaaattatttataaatattataaattgaacaataaaatcgtatcaaataattttaaacttatttacatgtatatttttttaaaaaaatattaattaaaaactaataaatctatatagacaactgtaaaaaattctaaaaagatatcatacaattcttatataaaaaaagcacacaagaaaatactttcaaatgttcgctatagtgaagaaaaattaaaataatttaggcatactttcttaatatgacacttagaaattatataattaattacaatctaaaagttattttatttataactgttccaaattgagacaataaattagaggttatttctgaattaatagtgtattcttaaatagatattttactgtatatacgatagatgtatttattacttgtgtttatttacatacatattagatgtatggaaataaatatagtatatagatacatatttatatactagcaaaaactacgtgcgaggcacgtatattaaattttatgctagtttttttctatgttatttgaaa

SEQ ID NO: 303081 - DNA, 3229 bp, Cannabis indica
tataatatcttaatattttgccacataatatatctaattcaccaagtatcctctctaaagttttactattgaagattctctaatgtacctaacacctcaatacatattattttacgattaattagcgatattctcttaaaaaaaaatattatatcaaactcgatattaaattaaattaacagctatattaatatatagaaaaatgctagacaaacccgcggcaaaagcttcagagtacttgccaaataaaactttcttttttgttgttaaatgagtagtaagtaaggtcacggtctctgcatgggtgggtctcctttcttccccactacaccactccatttttctctcattggtcggtttatttaagtagttttgaaagcactactacagtctttttgccattaacaaataccatagtgtttgactttgactgctgacttttcccaccttctccaaacccaaaactcacttctcttcttaattttctaagcatttaatatttattatcaccttctcttcctcttcctcatcttcttattcttctttctctctcttttcccattttttttggtgctgtaataatggcgtttctttccctttctctctttctctcctttgcctttcttctactctctcctgccatctccacaaattctgaaggtaaccccttttttctttttggctttcttcacataaagtttgtatctttcttcatcttttcaattaaatatggtaacttagaaacaaaattgtgtgtttttttgtttgaaaagctttgattaatggtgttgaatggtttcaggaagtgctttgcatgctctgagaaacagactatcggaccccaccaatgttctgcaaagctgggacccaactctggtcaatccttgcacctggttccatgtttcctgtgataacaataaccatgtgatccgtttgtaagattccttcttcttcttcttctttctttgattttgtgctatctctgcctgtattttaatacttcatattttattttgttgaatttttcagggatttgggaaattctaacatttctgggactttggggtctgagcttggtgaactcaaacatcttcagtacttgtaatttgctctttctctttgtaattaatcagtgatttaatggttaattttatccatgaaaaaggtttttcctttttatttgttttatacaactagaaagacccagaaaatgggctttagagattattcactaccaatttgattagagatctgttctttatatggttttatttatttcagggagctttacatgaatgacataagtggaaaaattccagaggagttgggcaatttgaaaaatctagtcagtatggatctttataacaacaaatttgaaggaaaaattcccaagttcttttccaaattgaactcactcaagtttctgtgagttaactttagactcattagccatttatatatttagtaataatgccaactattttttggtaatttttttggcttaatgtggataaaaatctgaatgtacagacggataaacaacaacaaactgtctggaacaatccctagggagctcactaaactcactaatctgaaagtcttgtaagtttttcatatttttcaatttgttgggagaaagaaattttgaaaaattgggtgttttcgattaaattcaatgggttttgattgttcaattggagatttttatgacatttatgatttgattcagtgatgtctccaacaatgatctgtgtggaacaatacctgttgatggccctttcactacgtttcccatggaaaggtaccatttgttatatttctcaacttgacatattttaggctttgaaaaattattcggtttgatgaaccaagctatgaacaatacaacattgcgccaaagattgtgttgagtgcatcatgtacgcctcgtgaagagggaaaagagtcggtttttttgtgttttcatctctagcgaaaagggtttaacagtgtttgtttcaattgttgaattctgatttttcgccattttatgtttcagtttcgaaaacaccaggctgagtggaccggagctcaaaggattggcgccctatgactttggatgctgaagaaaggtataggaataggagataggaagttaagtaaccatattatatgatgataaaataggtatgtccttataaatctactagtggcaaaagtcaagccagtaaataaggcgactcgactctggattttgcatgggaacttgttaaattattgcccctttttcaattataatgttgttgatttagtataaatcaaactaatatatattcatgatcataggatatcccaaaaatgttatatttggttctcttttgagctcttgcttgcttccctatcaatttcctaaattatatacacattttgtgtctagatgaatataaaagaaaaaacgttgtttcattttgtttagatcaagaattggagttccattgtttctttcttggagcaataatcaattggttatatattaaagttagtttcacattgttaacgtgtggaaataaattatcatatataagatgaatgagttactcttattattggttttgagatgaaaccttatttattttatcccaaattttatttctattttttggagatgaagatagctgaagaaattcagcactggtattgtgaatcacttttttcagtcccactctggccatggagaaacacaataccatgccactcttaggccatcttcaacttggacactaaatttggtgttcaccaataccaaatatgatgttatagattctttgattctaattacaacactaaaataatatttttcattattatattttttttagccaaattatcaatctttattacattaaaagtagaagtgttcataaaatattcactccaatttctaggtatagtagatatctctaccatgcccgtaacattgttggcaaatgctcatttgaccacattatgggccgcgtcgttacagtttctagttatacaagagaaattacaattagtcataaaagtagagaggagcttgcaatgacgcacatagttctcaatctcccaaatagagtcatccccttttatgttcttgataacaattttagttagacctcataattattacaaaagatattaacaggtatagtagatatctctaccatgcccgtaacattgttggcaaacgcctatttgaccacattatggg

SEQ ID NO: 303082 - DNA, 2231 bp, Cannabis indica
cagagcaaaacaaataaaaaaatttctaacaactatccgacccaaaaaaaaaagccgatcaaagtagagccagaaaaaagagccgccaaatctaaagaaaaaactgataaaaaaagtagagccaaagtcaaaaaagtcacttgtgatttgaggatagtgagccaaaaaagccaccaaaaaatccaaaaattgattcaaaaagtagagccaaaagagccacttgtgattcaggaatagtggaccaaaaacaaaagagtcaccaaaaattcaaaaatatcgatccaaaaagtagagcaaaaagaaccacttgtgatcagggataatgagcaaaaatagagttatatcgacttatccatgatgatgagtaaataaaatagctaccatcgcattttagttataataaaagatgatatttgtagacatggtattagctttagtgtaatagttaagatagattgcatatagcatagagataaaggttcaaatcattttttttcattttaagtttactttcgcctcagtcttaaaaaaataaattacgccctcttaatttaaatcttgaatctatcactgattaaattgctcaacaatatacttcttcctctatttttttcatttttcgtttagtccaacatgaagtagtaaaatttgaagaatttgttaggtaatagcggagaacctttcagaagaagaaatccatgggttgaaacaaatgttcaacaacatggacacagatggaagtggcacaatcacaatagaagaattgaaaactggattgtccaggctaggatccaaactttctgaagccgaaatacaacagttgatggaagctgtgagtactaaaataaatctacaaacatccttccaattttactttcttgatcatatttgtccataaaaaagaaattggatctcatccttcttcatttccttttttttacacattaatgtctttcttggtcatgaaactaaatcaattgttgttttaacaggctgatgttgatcgaaatgggactgtcgaatatgacgaattcattactgctaccatgcatcgccatagacttgagagagatgaaaacttgtacaaggctttccaattcttcgacaaggatggcaatgggttagtatggtttaaaaaaaagttataatttgacaccagacaggtaactaaatcatttttcaactgtaatgatttacattatttttcttaccaggtatatcactagagaagagctaaagcaagctatgactcaatatgatatgggtgatgaagctacaattgatgaaatccttgacgatgttgatactaacaaagtaattctttcttctaattcttttttttcacacaattgtttttgttcaccactctttggtaataataataataatgatgatgatgatgattttggtgcttttttatgtaggacggaaagatcacctttgaggagtttgctgatatgatgagaaaaggaacatagattagagaaacaaataagatgaataagcattaagtagtgacatgtgcatcttgcctttaatatatttttttctttttatcttttccaaaatttggggactctgtagatttgatattactttgtaataagtttctcttaacaaagcaaaataaaagcttataaaaatggtatttttacatgtttaatcgtatttcttaatttaattccaaacataacttgcggatcttttaattaacgaaaaattgcggtatacgttcccaaaaattttaacttgatacagataagttctaatctgttagaatttgggataaggtgaatggacttccatctcaaaactaattggcaatgtactattaaaaaaacatcctttaaaggcggtttttaaggcctttcagcatcgattttaatgaacttcactaccgacgctgattcaaatgacgttgtaggtagggctgtacagaaattttcgtaaaccgcccaacccgaataacccgaccaaaccaaaccgacaaaaccgaaaaaaaatacaaaccgacataacttgacaaaattctaaaccgcccaatctgtaaattgggcgggttgaattttgacccaaaccgcccaatgaacccgcccaaaccgatttaacccgattttcagttttttttttttttattatatattatataatatataatatatattaaaaaaaacccaaaccctaaattgaatttagatttggaatattatgtatttaatgttattaatttt

SEQ ID NO: 303083 - DNA, 2691 bp, Cannabis indica
aatgataataataatgtcgactatttcaagagtccaacctttgatgttaagtttggtgaatattacggctttaaggggaaaagaaagaaagaaagaaaaagtactttgtctccgtagtttatacttctcattaattattattctttgaaagctaggggaaggaggctgtgtagataatttgaattttcaaacgttataatgggtcggtacgtacgtggataaatgctctaataagtcaaaagcttaggataattatagatgcattcttttgcttttacagaaaagaaaaatatgtattatatatattttataatttattatatatagctatatatatatatataatttgattggagatgtaatattgaaatattgaaatagtggataattatttccataaataacgaaacagatacatttcttgaccaaactctagtccttatccaaatggttttcttctagagatgcaattgaatgaatgtgtaaaactagtaagagttatcctcatgtattgacatgtccattggctccagggttgtaaaaggcaatatagctctgtgtcttctgtaacaaaagtttcgtactacgcgcaaatgtatatatataccaaagttgagatacatacatgcatgcatgcatgtcatcaaaattaatactacattatgcatgtaattaattctgattatatatcatcattatgtatcataaatttaatcgcttgctccccctgaattatagtctaagaaagacaaattaggccaaatatatacattcatgcatataattatggcttactttatataaatttatgaccatgactagctatataagctacgtatctagctatagcttactaaatagagaatatccatgcatataatgtaaacgagacatgtttattaacacacaaaaatattaggcctatattctttagcgtatgtacatatataattatattaattaatggagtatagctagctagctagctatacaggaagagaagaaaagaggggccggtccaatttagtgtagacaaagtcggataatgaagttgtttcaagtcatttaagacacgaggacaatagatagatatagccaaattaaggcatatatagaaatatatatatatttatatatttatataagtagtctctagctagctcattcagtgttgaattaattaaataataatacatatacttggtttcattttcaaaccagatcaaattttgtcttgtacgtacgttcctctctcgatcaaattgggggggccataagggttaagcagtcaagcatggaaggttgcctcattcacacaccaaagggggtctcactatttaagagccctactcaagctaattatatactgcagccatctatatatgtcaaaacaatggagtccaaatccaaatccaacacaaccccaagtcaatgttgttttccctattgcatttcagatggggacttttccagcccagctttgaaagcgagtttttgtatacatatatactcacaaaacaggactatatgtagtaactaataacactactacataacattggattaaaaatttaaaaataaataaactaagaggttttgtattgtcaattcactacaagggtgtatgttcaataaaagttgaacatggtagagccttggttttattggttggcaactatttataacccatgtgttatatatgtgtgtttggacttagtgggcctgatcagaagttaatagtaattagatgggtcaattgagtcattgggctatgtgcagatgataagtagagaggcccattagtagtactgaattaaccgacaactgaagacacacaatatgggatgttaatgcccaattggtgtgtgacttgtgtgtatgtctttaagagatctcaattgacagctagttttatgttatatttggctatagcttaactgctgtagaccaggtcaggtcaggtgagctaacattaacaaacactaggaaaagaaaatccctcatatgcatatttctatttttcattggaagaaatatgtaggattacatttacatggtgtgttgtggacatgtacgattcatttttaatgggccctgtccaactaagaactgggcccagtttgttttaagtgatgagagcattttgtttgttgccaattcatggtcatctctctcagctgtctcaggtggcaaatatgctcgtctgaatctttgtcaatcacatttttcattacctgttttgagtaacaaattatgatcatgtgttaactaacatatcatattaatgcatttcttttgtgatatatatgatcatgtgttaattaacatatcatattaatgcatttgttttgtgataaatatgatcatgtgttttcagtaacaaattatgatcttgtgttaattaaaatatcatattaaagcatttgttttgtgataattatgatcatctgttttgagtaacaaatatgatcatgtgttaattaacatatcatattaatgcatttgtttttgataaatatgatcatgatatgatcatgtgttaattaacatatcatattaatgcatttgttttgtgataattatgatcatgtgttttgagtaacaatatgatcatgtgttaattaacatatcatattaatgcatttgttttttgataaatatgatcatgatatgatcatgtgttaattaaca

SEQ ID NO: 303084 - DNA, 3507 bp, Cannabis indica
ataatatttttgttagtgggggctatagccaccacactaatacaagtgagtccgtcactgagtccaacaatcgtaagggctggttcacaaatttaggtaggtattgtagattttgggcctgaattgagcaatcagaatgagcttctccaaaaataccattttattaaacaaaatatcatttataccaaaatataattaaaacaaaagatagacctaacacattgcacaacaaggatgaaacattacaataagtacacaacaaaatagttaaaccttagatgtagaagaaattcaaatgattttaatttgtaagctaaaaaggattttgtcaccataacttttatatgtatcaaatgaaacgtcttgaactttttaggctattaaaaattctatcgaactattgagattgttgaatttttcaaagacgtttgtctaattttactaacgaaagtcagacgtggataaaagttcagggagcacaatttagtacatctcatagttcgaggaggaacgatttgctagatatcaaagttttggaggccacgatttagtacataaacaatcgtcatgttagtaaaattgaacgaaattggatagaactcgttaaatacaacaatcttaatagtatgagaaaattttcaacgacataaaaaatttcgagagtattatttggctcatgccaaagcttggagatagaaatcttaataattagccctaatttatatgataatgataaaattaaatatatttattcatttggtactcaatattttaccaaaatattacaaaatttgaaaatgtatatcaaatgataacttgagctccatttttttagaaaatagaaataaaatattatgataaaaaatgaattttgaagtactctttatattaataataattaactcttttgtacttgtccatgttgtagaagactagaagtactacttttttttcttaactatttaaacaataaaagcagaaaatgacttaactattatatttttagttgaaaaaaaaaacttcccactaccatctaatttatgtataattaattcaatttttttattaatttttaattaaaaagtaaaattaaagatataagacctagatgtagtgcctgaacattattgattgcttattaatataattaattaattaattatattaatgggttgagattaatacgagttttgtgtttcttcaaaccaatcatcattacaggttgtggtgaaaatgaaagttatgaaaaatcttatttaaaaaatataaatgtaaaatttaatattaaatgagtatataaataataataataataataataataaatctacacaaaaaaactaaattgtaaatgaaaaaaaaaaaaagattagtggactcacctctacttatctctaggtccccactaattatgaaaatacttaattaatagtaaaaaaactaaaatttgagagcttaaaatttaattgaaaatatattaaatgtgactatttaacatacattattagtttaacggtttttttttcgttaaagttaaacagttaatactaacatcgttaaatcaatcaataattatttttttaaaaaaaatagttttaaatatctaaatttaaattatttattaaaatataatttcgataattatttaaaagtatcaataaaattaaataattatttttatataaatttaaatttaaattaaacgctaattcaattaattaatcaaacattataaaaaatttattagctatattgtttaaaatatttaaatttatttacttattttattgtttaataaaattagttagatatattttattgtaaataaatttcaaactaaattaaattttatatattttacacaaagcaatttttcgtcataacaaggcccaccttggtcataacaagcaataatatatattgtaggttattattcatttacatgagtattgttattggacacaaatagtggccaaaaaattataggtaattattaatatatattgtaaaattattatggcatatacatgagcaatgacaccaaaaattatatgacatgaagaaatgtactaaatactagtaatatcttttagcaattctcataatatataaggaggaaattgaattattcataacataatttttttttgaaactgagaaatttcattaaaaggcatcaagccaaaagatcgggatacaaaagataggcaatttaaactagttaaatcagcgggcaagcccgactaccacattcgggcctcatctaaatttaatgctcgttttgctaaagaataagcaacatggttttttgaccgattacaatacgacagaaatatgttactgaaagaattcttaatatgattaattattcatagcttaattaagagtacgaattaattaagtagtgtttcacttaattaattaacctaataataatgtcttttactgcagtgagctttggtttgacaaaggctctgctaccttggtgggtatcaatttcttttcacatgattaaccaaatctttttttttggaccttattctttgtctactattttttttttattatttgatattaaatgtcttttaagtaagcatgcttacactaatcatgattataaccataaatatgtgataaaaaccctatttggtttaattaacttctagctgcatgcatggtaattaataattatctctatttatttactatatatatatgtagtacttattaaatttattgtaactaaaatacatatttaatcaaaattattaatatggggtctctactcttttcggtgagtaattcttgttgtgaattttttagtattaataagtatatattttcttaataataaatttaaaatgaaataagaaattataagttaatgtaatttactttgtttatttatttaggagaattatgtctttgtaaatttgataatgagaatgatgaagaaaagaaataaaaaaaaaatactcacattattttattatattttgtgccatacaaaaagggaaaagaaaaaagattaaatatctgaatatattgatatgaagaaaagtgaaaaattaggatggaattaaattttatttgtaaattctatatattaattataaaggtaattgtaataatcttttaacataatctctctcatcattattgtgctaagcactcttttacctataatttttcactttaatatataattaaaggtaagattgagtaataatctctaattcttatcttaaaaaatagttactcctcacaattaattaatattgaggaaaatgcaattgttttaatttttcattggataactcctaaaaattaattaataaacttttgggttttcttttttctaaagagataatggctgaaaaataatattctttaaatggtccaagaagattatgatagtaagaaagaaatcaagtttaatgtgtctagtttaaaatattatataaaataaaaattattaaattaaatgtgatttcaaccaaactttgt

SEQ ID NO: 303085 - DNA, 1730 bp, Cannabis indica
tttttttttttttttgcaattgacttgcttgatatatattttttaatagtataaacataagatgaacaaagaaggtttctcaaacaaatttgtataaacattcttttttgatggaaacaagtcatttacttttattttcatataaaaataaaacatgttaaaacgagatttcactccttattattttatttgacatgtgagaagatatatatattaaacaaaaactttaaatctactttccattttccaattaccatatttgaatagaataaaataagttgaattaaatgcctaatttctctgacttcaaccgtactagtactttagggtcaaattcacaccaaaacacttccaaaataagtcactgtaactttttttttcttctttgcaaataaaaaggtaaacatattggggatatggtctgaattttctgtacagatttcgacctagtattctgttcaattatttattttggttagaaaaagtataaggaagaaaaaaagaaagaaaaacttttcaaacttttgaccttgtcaagtttttgttgtgataatttgaaatttgaagtcatccaaattttttatgaagggctttttataacaatattttagaaggatggatggatggtccctaatatagatatgaagagatactggttttgaataatagaatagaataataaacaaatgtttgtgatgatgagtaggattttgaggtgtaaaactgaaagcattggttgtggttgatttttaatatttttgagtttgagtttttgacctctcaaaatggtgggacctctttccatttgccatatatgactcttctaccctcttacacgtgtgtggacccttctctttttcataccaattttcttccttccattcaaatgtaatgctttgcaaggtaatattctcataaaagataaacccaacaatatttttgcattctaaatgtaagtaattatgtttgatataacataattatgtttatttttaattttattttgaagaatctcattctaatataactatatttttttggtttggtgttgtgatgtttttcagttttgttatctctaacgataactttatattgggaaggtatcttttcaatgtgatagggtattgtttgattgtggtattagctttattatttaaattttcgggagcagttttgtctcatgtggctcaggataagaattctgcagcgcatggtttggcaaagcaagcccttcgattagacgatgagctatcctggctcgagaaagtgtcatcgccgattgtagattgatgttttgtttatcatgtatgattttattcaccgcgtcaaaaaaaatattatgtttgatatactttacccttttgaaaaactactttgtaaatgaatttgaatataattggactaattattggatttaagatatttttatttacgtaattatataataattatgtaattagaagtaattaaggagtgtcgatcacattattcgtatgtcattgtgaagataagtgttattgcctataattacgaaatattattatttataaataaataattattgaataatttttaatgtatttactaacacgttaacatacatttgcatgtagtaggacgagagctgttttgtcgtaaatatttttatccatatttatattttataaataagggctatttataaaaatattagaaaataaaaataaattttgatatatatagcataaaaa

SEQ ID NO: 303086 - DNA, 855 bp, Cannabis indica
aaaaaaaaaaaagaagacaagttactcacatatttttctgaatcaaatgtatctaccagattaatttaggaaaacaaaaaatattcaagaccaaactatttttattatagaaacatttctctattaaattccttagattagtgtaatatactaatattaataaaaagaattacctacaaaaaaatattaattaaatttagtattatatcaaaaaactttattgaatatttaagtgcagctattaataactttattattattaacgtaaaaaaaaaattatttgaaaaactaagcttatatcttattttagacaaataaataaaaaggtctgtcctgtgatttcaatcaaattctcccatttcttttccggatgaaagattatatttagaaataaataatttattatttaaaatttgaagatggctaattacaaattcttatgtgcttaaaatgatatgttggaataatttttttcaatttatttttatagcagtatttgttctggttttaatattattctttaaatttgtaaataatttattgtattaaaaatagagtttatattctaatttattaagtatgtttaaaaaaatttaaatttatttttaatattataaattatttaaaatttttacaaaaattaatattgtgactgtaacaaagattgtcataaaaaaaaaacaatttacatttttaagtactacgaaaattaactaaaaatattatgaaaaaattataatgctaaactttttcttaaaactttttttggatttgaagtaaaacatttttatttcatgtcagaataataatgttaggtgagcaacatggcaaaaaatgatatgcatttaatgtcct

SEQ ID NO: 303087 - DNA, 6010 bp, Cannabis indica
ttttgtaatttttttttttgttaaatccccaaataaatatataaattttgcaaataattttcttaaaatcaattattgcaatatattggcttgattcttcttattacgtttgaaaatcaattctagcaaaaatccaatatactcaaattaaagttctctcaatactttagaatttcctacagtaaatttttcctaattttatataatttggaataattatacttatgcaagagcaagaaattgtgaatatatatgtataattactaaaatatctcagactctaaatatctaaaaataaaaacaaaagaacttttccaccactattttttttttatgaatcagcgagattatcattgctccaataatcaattacaacttaaacaacatctcaaaagtgagacctcaaatatccctgtacaacaacaagtataagtgttctattactaaactttcaaaccatattctatatgtagcactaacttttttaggccaaacacttttgattctgtacagtatttctgtttttgttttggtcactatacaatcggtttgaattcctttttcttcccacaacagcccatttcttgcccgccatatattgtatgctaatgctgcgattgcagcagaaaaaactctatatttaaagctgtttacctggtttctttgcagccatcgcaccagcccatgaagagatctcgaaaacacctgccaccgaagccattttttaagctgtggcagaccttctgctgcaacattgcagcagataaacaagtgttccaagtcttccttgccatccctgcaaagtaagcatctaccttcagctgttagattgattttgcatagtctatctcttgttcttagcctattttgcacagttatccacatgaaaaagctatgtcgaggcatgttcattctattccaaacaacctgagcccattgcactttgtctccttcacatttgatcaagctataagccttggagatttggaaattccttgcattcatcaattgttggaattccatgaatttcttaagcttttctttggctgtcactatctttttccagtaccagcttgcttgaagtggagcttgataactccaccaatcttcctctttgatgtatacattgtgtacccatttgatccacaagttatcttatttattcgtaattgcccaaatgtatttagtcatggctgccaggttccaatcttccacattcctgaatccaatcccccctgttgatttggtttgacgtaccgagtcccaagcaatcaagctcgcaccctgtgatatgccatggctcttttcaccacaattgagattacaactaattgagatgatgtttttgaggtagtggcatcgatagtcgggatggatgaacaagcaacaccaacgaatataaaaagaggacaatgatgatgatgaacgacgaccgaccgacgaacttagttaattcatggcatgtaattcttttaatttatgttttaatataaacctttagattagatttaatctatgtctaaagatgtaaaaaaacagtgtagaaaaatatgtctataaaatcctttttttttaaaaaaaaataaatttatgtgtatagtaattttaaattataaagagttttgctataaatatttcaaaaatttaagtacaaaaaaagttaattattgtttactaagattttcgagaactaattaaagaagaacttgagaaattaaataagtaatagagatgaagatttttacgtggtttaggtgttaacaaaacctagtccacgagtcgatgtattggacaaaaggcttgatgtattccaaatgggtcttacaagttgaagaaccctaattcctgaatatgtttcctcacttgggtatttcttgcatagagaagaaaaatcctaaaaatatctgaagtgaatcatccccccgcatgatagtataatgggggtatttataggctagaatccaaattggggcatacccatgacccactcgggttactgtgcaaactaggcccactattggagtaaatacataaaatacatgactttaaggcccactacaggattttggctcatgaggcgaaggtttcgtacgattaggcctgcacaatctgggataggtgtcacgcacgggcactgacagtagacaaagatgtcaaataggcgacgttggaaaagtggatgtattccttttggtggtgtgggcactaccatgttctgacataggagataaaatctgatttggtgggaccaggcgttagagggtagccacatcacccctcaaagggcttccgaaggcgcctcttggaattcccctccgagtgcatcctagtgctcatccggaggtcttcgcttattacgtcttctggaaggcaggaagccttccacatctggaggagcctcgtctttagaggcgaggcttctgggcttcatatgggctcgagtacatcttcaatctgactgagtcttcttgtgtggaagggttgtgatccaagccattctagactaatcatacttcaaaaatacctcgtgtcacccttccaagaacacggataatatttacccccaagcttctgagacttgagagtggtgaaagcttacagtctttctttcggattgccttggacatgtggataactttgaaaaggaagagatcatttcatctttcgtgctttggaatgtggaaagttaggaacatttagattacgactagcaccgcatgcgtgtcctcgtcctcttggtccatgaattctatgtgtctcgggagagcgtgtgatacttgggatatcgtcatgatagctgattgatgtcagcactcatatcaaggaaaattctatgatgaaaaaaatcatcaactccaatgaagtgtaataaatgcagtccttccagctctccatctgttggatcaatgttgtgttttttgagatgaaatttaagcccttgattggtgagcactcgatcgcccccttcaggtataaataggagcagagaagaaccatttaccacttttgcacattcaagcctttgaattcaaattcaagagagaaaaatccataaaaccccactcttaacccaggtgaatgtctgatcccttcgacaccattatcaaccatcttttgtgaatccaagccagagaggactcaggagcaccaccactgaacctaaaagtaagacacccttagtcactggagcccttgaacattcaagtaggcattgatcgaattctcgattgggaactcacctttgaggtcagtcaccgtcgcattccttcacctccacctacaagtaagttctccccatttttttgaactgtataatttctataatttctgaacatacatgcttgaactttaaataggaagaactgtttacatatgaatgtgaggtttgaatgtacaatgtctgagctttttagaagttgtagggctattgtaatgcaaatgtagataaaaatatggggattttagctcgtacttttttttttcttgtgttggctgaatttgaattgtgtgtgcgccaaatttatcttaaactccttcgtctaaagttattagggcttcacatgagatttttgggtttttgtcatttattcttgagttcccaatttggttgtttagaagtatagctctacaaagacctagcttttggatgacgggtccagtagggacctctccaagcaattttagttgtggactctcccatacccttgctaataattttttgtttagggtattaacttcttggattttcttatgttctttctagccataaacaccatgtctaacgatgagttcaatcttgagatggtggacctcattgaggagacagccgaagcaggggaactggtggaagagccagttgaagacattgtcctagagactactctgagaagaagacgtccaaagaaaactgccccaattatttataaatcgtccacatgggaaatggaccaaattccaaacaagttttagaacttcaagatgctgcagagatacgatgaatattgtggggtcaacaacgttctaggaatcaactagcataggattttcctttttatggagtctctagttaagtgtgttaacggtttcgaagcatggagctgggtacacatcatctacaaagcccgtctgcccgtgcgggcttatttcaccaacttttttgctattgtagggaccgcgcttttccagcttatcccatagtcttataagctcctagccgactggtatatcctttgcaagattcaagatattgagattttgggcccagaagaaatacaatatttcttcactatcaagtcacagcccatgctaaataacaagacaaagattagattttgttatcccaatttttgtactctaacgtggcatcgcacgatggtgacacatggaatcaactctatgtacctgctcgcaagaaatatgtcgaacaagacaccgcatacattcgcttggacgaagtcctcttagcttgacagtgagcaatccgcacaaaaggccaacacttagaaaatttaaattttacatcgtgagtcactgaagaaatccctataactttgggatcagatcacagagatatggcaagctatctgtatcccacgattagtgtattctgtatttactatgcaatctttctacttatatcaattgtaaccagaagggaaataattccctcccaagcttatagccctataaatagtgattcatattcactgggcaaatggtcgaaaaatctatctaagaattcatatttagagatactattataagagctataagaaaatgaatcattttccttattcgtaagtcaataaaacctacgaggattaggctaatactgaactggttggggttgaacctctataaagttcttgtgtctttatttgttttgttatattacactcgtattaaactacttgtcacttacaaattagactcattgtcgttagctaaaagcgaggtcaacattttggtgctttaattgagagttgaaatcaaggatcgttctttatctcaaatctaatcgcaaatacaatggtggtacagactcgcagaggcgtggttgacccaaaaaatccactgggggtggatcctgcattgcaaaaaccctgggaacacgagggttccgccaaccacgaatcctaaacaaccattagctgtaggtcgcggtgtgacaactcttgtggttgaaatcgcgcctggtgttcaagagactgggaataccagttcagcagctaaccagggcattcataacacagacgttccacccgttaccaatgttcaaacaaccattggagatgacactgaaatccaaaatctctgtgctgctcttggagtcatgcaaggtcataccaacaccttgcatcatgatcagtaggaactccgtgctgcaataaatcttgcgttcgaatagcagaggcgcatgtttgccgaatggagggacaaggactgttggaattattttaccaagatcttatatctactcacaagtatgttatttgacatcctaaacatgaacttctaaaacgatatgaaataaacacatataaagtataagaaaccttacagtggttgcagcggaatataatgtctcattccactcagatctctaacccttgtaatctttctgtcgcagagtatcaccaagatctgagcccgaatgtccttctgttgaatctgaattcttcacgatcttacacactatgattgaggtaccacttgatgtgtgtgggcactactctatgactcaaggatttcaaattttaatagtgaagaagaagacttaaagtggcggctaggttagggagagaaggcactcagtttttttctgaagaaagatgtgttatttttctgaagccatcactacctatttatagcaaaccactagggtagggttagaattatttggcattaaaaaaataaagaaataaatgataaatccatataagactggtcggccatgtaagtggataatgggccccacttttgcaattttgctgttttatcatttctgcat

SEQ ID NO: 303088 - DNA, 2954 bp, Cannabis indica
taccgccaaaaattaaacttaggtatttatttgcaactgaaagttaaacttaagtatttattccgcaaattactctttcaaataattccactcacaaacatctcattcccctaaacttattcctaagcttgtgacataattaacagtacaattgagacgaaaagtagtgaatagatacattatgggtttaaataagtggtaaaaatttagaaacaggcttagactcaaacttggtaatctagggataataacataaaggtagactcgaaaagctcaaacgatctaaagaaaattgcctaaatcatataagcaaacattgccaatgatttcgcctcaagagaataaatcatgcaagttctatctcattcaagcaattactacaaattgaagtagtacaattatgaatacaatttaaatattgacaatttacaccgatacacaatttctaaaaggcatccaaattaatccaaagaataaaagaatcaagcacacagtttatgatttcaatccaacccataaataacaatagcaaaaaaatcaatctattatatcaccaacttaattagcaatacactaaacaaagaaaactcaaaaatattcccacaaagtaataaaacaaaacaaacaaacaaaccaaagtaataagtcgcctaactaaaatttcaaattgtctcaaatgtaaaacaaaaatttaaagagaagaaaacttaccttaggtctatgccacatcaacaagcagttgacgcccataataagcgtcatgcaggacaacttgaaaattgtttttgaaaatgccttcaagcttggtatacgatgagtttgaaccaaaagttgttagggtttatgtcttgaaaaacttgcaaggataattctgattattaaatagagagtaaacatttgatatatatacatgtgaatattaaatttttaatatttattattgaataatttatattaaatataaaaaaattccttattcatatataaggttgtagcttgtagctgtacagagaactaagaccacttggctatgaataaaacagtcaataatatgttaaaattatggaatcttttatcaatggttgctagtacggttcactgatacctgttcttcgatgtaaataattttggtttgaattacggatgtagtaagacatcaaaatgaatgttctataaataatagagattatatatgacaaggactggcataaatgaagatgtctttactaacatgccatttaccataaacacctaattcatatcataacgatgatcaatagtagattgacctaaatcctaagttatcatgaactcttgttcatgttattagtttctttgattcactcgttaaagtttttcagagaagatgattatttcaacttctattttgagaatctaataacatggatggttaggaacatgatgtattatagaatcttaacggatcaaatgttgatttcctttaagtgttaattatgtaactgaaatgttgtgcacaaattcagatgggatcttgaattatacttttactagtaaattaatggaactaaaggataaagaagtaattagaaaggtaaaacattattttgaccaaaactaattactaaccaacacatggagggctaatcactggaattgattatatcaatggacactgtagttaaatcagtaaatataattttataattactaagagtgtaaatatttatagtggagtaatcatagaattaataaacaagggattatttggttgatgtgactaaataaataatctagtttattggagcttggaattataggtccatgtttcccaaatcatcaccttgaaacactgtcaagggtagggataaagagttgtataatgatgttcgaaaagaaaatctattttgaattagctaaatagtaattatttattttttgtaataaataaataaaattttcaaattaattaaataggaaaaagataaaaattgttaagataaaatttatcgagacaagatttgttaggacaaaagttttcaggacaaaagacaccaaccttgtcctaaatagacaaggtaggcacctaagttgttgtccctatccctatggattttatctttttgggttaattaattatttaattaattcaattaggtaaatatctaatttgaaaagtggttatagatatttcaatgttgttgagatattctcttaagtggttgagagattccctcatatatacgagttcagttatagatatttatttattcaaataattaaatatgatttaattgaagagatttaactactataaataggagcttgatttgagaaattagaacactcttcctgaattaatatttttgaaatatacagagagaaaaagaaaattatttttttttctctcaattgttcttgctcatgtgttgagaattcaacaagaataaagcttatacactttatcctaatagcctacattattctttgtgtgtggtggatcaatttgaaagacactggtttgagtccaaattgcatattcctcatcaattggattaagaaatacaacttacgagaagtttcaagaatacactgataggcttcaagaggtatactctaaacttattattttcatgttttaatttaatgtacacacatatggagatcctaggggctatggtacgatgataatcagataatatgaaacttttccaatgcgtacttgatttagtatcataaaaccaacaacattagactttggaagatatgcttggggagaaacattcggtagcttgtagaggatgtaatatggtggaggtgacattaagggaaaataaggatccattggcggttcataatataatagctttgatgaactcaaatcagcaactacaagtgattcaccctctaaggacacttttttttctccatttttcttatgacaatccacaaccttgactgtgatttgatcttca

SEQ ID NO: 303089 - DNA, 4824 bp, Cannabis indica
cccaaaagcgacttcctggtaggtgaagagcgaggctctaaacaaccaaagcttggcaagcccacgatctctttctcaaaaaggagatcatgtccaagacagtttcccacacaatgaccccttggtcgttaccgtacaaattggtaatataactgcagcaagatacatggtggacaatggagccttccttaacattcttttcaaaatcaacacatgaaaagatgaggctccaactcactgacttggcgccctacaatcaagtgatgtatggcctctctggccgaagcatcactctcatcgggtatatcagattacctcttactgttggagaaaatccaaccactagaactctgatggtgcaaaacatcatgatcaacattccctcggtttccaacgccataataggctaaccaagcctatacaatttgaaggcgataacatccatctaccacctttgcctgaaattccaaacaaagcatggggtggatgtcaagaggagatcaacaatctgccttgtccaaagccaagaaaaagaagatgcacccaccagatcaggagtatacaagctttgtgacagacttaggcatgtgctgctacaaagtcacgccctttagggctgaagaaaacaggggccacacataagaagcttatgaacaaaatgttcaacgatcctatcagtcgcaacatgaaggtgtgcgtggacgacatgctttctaagtccaaaagggttaaggcatatggaggccctagacagattatttcaaaatcctccacagctacaacatgaagaaactcaaacccatacaagatccaagcccttttgaacatgaagtcgcacacaacaatcaaggaagtacaaatccaaatgggatgcactgctgcacttagcggacttgtgcctaagtatacagacaaatgggtacccttcttcgacacgaagcagaagcgacaataaatttgagtggacaaaggaatgtgaaattgcatcccaggagctaaagaaaacgattggctcgaccacctgtgttgcccaaatccctagacaaagaagagctaggcgtggaccaagcagtcacaacacatgttgtgagtgctgccctcacaagagaagaagacagtgtacagcaccctgtatattacaccaacaagagagtgatcaacattgaaagttagttcccactcatggagaacctgacccacagcttgctcttggcttccacaaagttaaggctatacttctagatacaccccatagaggtgtacaccgatcaacagttgcggtaggttctacagaaatctggagcattatgccagctactcaagtgaaccattgagacttggctaacataaaagcacctcacaactaggcatggccacaaaaggccaagctctcactagcgtgatggctaatcatagaagcacatctacccaaatccctcaaagttcaggagaaaatcaagagccagagaagaagcaagagcgagaatccaagaggtgcattgaccacatgcctgatgcaagcctggcccttaaggcgcaaggcaacaaagtcagttacaaagcttctaacaatgagactaaacatgaagctccaaatgctggccccaaggttagcactcgaagcgcgagctaaccacctcaacatgcaccacgactctcagctagtcgtaggttatgtcctaggtgaatatacagctcaatacaagaatatgatggcctatcagagttgttaagacaactcaaaggctatattagaaggcaagcccccaaagacagcacaacagccgatgcactcgctcaactagccagatgcgccttgacaaccaaggcaaacttggtacctgctcaattcttcaaagaactaagtcctatttcaaaaagaacaaaatgccatagcagacgcacttgccctcctagcgagcagtaccatagctgacaaagaaaacttggtgcccatttagttcctagaagaatctagcatttttgtcctagaggaggtcaacatctagatgacactccaacatggatgacacctattgttgcttatttctccaaaaaaaaagaccttactagagagtagggattaggaggacgactacaagatgtccaatcttgcacaacctaacacacagaagtggtactcaaacaccaccaaagaccatttccaagaaagaagctatatagcttatggcagaagtgcacaaacgctctatgtcaattatgctgggggaaaagccaatcgaatgcaaataggatccaaccactacattgactgggcctttagaaggttggccaaccatgtccttagcaagttggccggccatagaatccacattctggtcggccaccacctccacatgttggccagccatggcctcagccaatctcccaagcaatgctctctcaatatggctgaccacctgtccacttggtcttaccctggccagcccaatccaccaccagtctgctctcatacttctggtctacagtgaccaagaggtacacaacatcttgctagcaggatcccttaataaaagggaaagaagaagagaccaagccaactcaaagtagcatgcctgcgcacaaggagttactaggctcgtcaacaaatagatcgagaaaagaaattcttcacaagagaattactccttgaagaatattccttgacagcagatcccctacagtaagcatgttcaggcaaaactgagaaggtccacaccatatttcctaataacagtaaaggtgcacacaagtctggcaagtgcaacgagaacttgaagttagaacttctacccaaaattttttttttgataaatcagtgagttatatttcacaatcatatttacagtctaatagcacctacactagggcctaaacatttatacaatttcttttcctcaattcaaatctttattttacaaatccattataaagcataaaaccaatctctatactttgagttttctttggaaaaaacatgttaattcgggtcttcaaactccacttgatgtcttcaactatttgacatttattcaccttgcttccatgccaaacgacctcattccttgcttgccaaatgtggtataccactgctgctatagtaacagccagcattaattttttaaacttagaaactcttgccctaccaatctaccgaaccagttgtggaagagacctggtttttgccttccaatcaagccattccttgatttcatcaaagcattaagtagatagacagcaatcaaaaaataaatgctactcattttcaatgttagaatcacacaaactgtagtgatcttgcaccaggatgccaaactttttcaatctttcttttgttttcagtcgattaagcattgctagcaatagtatcacactatgttttgttctgttatgttttggtgtgttcattcgagcccataccttcttacaccacttcactctaggctgtggagcagtaaacaagctataaccgtctactattgtatattttccttgctgaaatgaaacacaatcagctaagttggtgagttggttcttgatggttacaagcttcttccaataccaactcgcatgaatagaagcattgtaactccaccaattttgatctttgatgtacacactatgaacccattgaagccaaagactctcttggtggttcgagatagcccacacatacttactcatggctgccttgttccattcttccaactttttgattcctaatcccccttcagcttttggttaacacactatatcccaagctactgcccctgccccgtgaaacaatgcttgccctttccaaaggaatgctctacatatagattcaatagacttgagaattttctttggcataatcactatttgactccaataaacttgaatagctataagaactgagttgatcaatgttattcgacctgcaaaggagagattccttgaactccagctcctgattcttgccgtcattttctgtgctagtagttcacattccttccctaatatcttctttgcacaaattgggatccccaaatatgtgaaaggaagattttgcctcatgtatcctgaaaggtgcaagatcttgtttacacatccttgatccatgttacagcaataaattgccattttaattggattagaatgaagaccagatgtgatagaaaaaagcttcaaagcctgtaacacatacatcacacttttgagatctccatggaaaaacataagaacatcatccgcaaaagcaaggtgattcaatttaagaccggcacatttgtcatggaagtaaaaatcctctttgtctccaatctttcccattaaccgagacaattattccatacctagaacaaacagcaagggggacatgggatccccttgtctaagccctctcttagattcaaagaaaccatgcaaggttccattgaacataagagagaacttaggggtagagatgcaattcataactaatcggatgaaactttgggggaaattcaagcctgttaaaacctcctctataaattcccattcaatagtatgatatgccttttggagatcaagcttgatcatgcaacttggtttattcgcttttttttttggtaaattagcaagtgtattaaaaccaaacaacaatttatacaacctaagagcaccctcaatagaaggcctccaaaaaaaaaacctctataatctttacaatgtacttacaatgagttgaaacaactctcttcactactagttacatctttaggccatatacaaactattctattcttaatgacagctttaactttgcaaacaattctatcataattttctatctccccattccaa

SEQ ID NO: 303090 - DNA, 1288 bp, Cannabis indica
tttttggctctatgagcgctaaatcaaattaaatgtggcttctttgagacgttaaagtggggatattttttttggcttcttttgcttggagtgtttaatgaagtataaattgatgtgatatttcaagtgggtttgctgaaattttacacagcataacaactgatttgtctctatttttcctctcaaatcaaggattaaatttcttcccactcttaccaaagaactctctctctctgcacaaaccacatctggctgtacctcatttctcctcaaaaccgtttatttggatatggccttacattttcttatttgggtataactgactaataacccctctagctgaggttgaagtctgttgtagctgtctagcaagggaggttttaattatagtttggtaaagttatcatctttataagttatgtatatatataatggtatatggtgttgaataatattagggatcttgtttgacatttttgattttgtgtattatttgggagaagattatttttctgccttttgaaagatttgtgaattaagagctttgcttattggaaaaatgaacttaaaaaagttatgtatataatcgtttgcaggtgttaaaatgaatgtgactcagaggaggaaagctaatggtaatggagagaaacctttcccaggatgcttgggaagaatggtaaacctctttgatttgagcaatggggttgcttcaaataggatgcttacagatagaccccaccatgatggtaatttttgattcacactcatatttggtttatgcatcttgaagtataatcgtattttgtgaacctgacaagttatttcttagaattgttgctgaactcgaaaagttatgagtaaagccgtgctctactaataaatccttttgataatattttatatctacttttcttgttacagatagtataaatggtgcttagtttagcattatctgatggattttagttacaaattgatcagttcatgatgtaaatgttatatttgctaggctcttcacttgcgaggagtcaatcggatgtatcaagaatgagtttgccttttggagataagatagaggataaactggtaaatcttgatggatttatttatcaatctcttatgatgggagttgtattttacttactgtacagtacactcaagttccctgatattattgtgtgtttgatgcgtgcagatcgtatctgagttcaggagaacttcatccaacaagaaggccaatgggacacctataaagatgctcatagaccaagaaaatgtcaaaaagaga

SEQ ID NO: 303091 - DNA, 1900 bp, Cannabis indica
atatataaatataattagatgaccattagatggtaattagatcggttcggtcggttatcaattggattggatgtctcatccaacaaccgatttgatccgattagatttttaaaatttacatttgatacaatccaattatgattggatatccgaggtcagttgggattggataagtcggttgtaattagattgggtgactttctgcacacccgttaggggctctttttgagcattggcttggcagtccacactttggttatttttccattggtcttctatggaaatggaaggtacatgttctcttatgatggtgaccagtgattgtcatctgagtgaactccattgtcttggggatgttgtaaatgtctaggcatgatgattgattaatactaagggaaaacgtagctatggaattttctttcccacaaatggtaccaaattattgacgaatgattctcgtgaacgaattaaaggtcgaaaatccaaaattaagttatcaaatcaaagagtaatataacttaaaatgcttgaagattgaagcttagaacaataatagagtaagagaagcctttgtatttcttagggagaagtattacagtgatttttcaaccccctcttcaatgaaagagaatggtatttatagtgaggctctactgaccttgtgttacgaattgattttcggggtccctaaggatggccaatacatggtacactttctaaccctcgaatatcagagttgtggttgcaagggtagttgttgcagaggtgtggttgtcggggtacttgattgtcccagcggtaggttcccttgtgtatgactctatcactactacttgttggatgcataggtcaggtgagtacatgacacgctcaaaatgacatttgttttaccttttaatgctccttgcttcattactgcttggtacctagtccatccccttcaagacacgagacttatgttttgttgtcctattgaatgagaaaaaaagaaagaaaagaagggattcaagtcttcttggagccaagacctcttggtgctaaggagagagaaaatagtaaagatagaaaaagaaaaaggaagatggtagatggcgccaaggagaggaaagagagaagagaagagaggaaatggttggtggcgccaagggggttggaggtgtcaaggagagagaaagagaagataagaaaagagaggaaagtggttggcaacgccaagggggtcgaaggcgctaaagattgagaaagagaagagaagagaggaaagtagttggcggggtcaaaggggttggagcaccaaggagtgagaaagaaaaaagaagagaggaaagtggttggtgccatatactccttgggtcatctactctgagaattgttacctcttaggactcaccttgattgtcacgttattttacctcttattataattataacttcgacatttattgcatcccaaatgttagagttaatacttttcaagtattaattcttattcggacttaggattctaaaatttacacttggtaaattttggaggtcaacaataacatactactattatcagtgtgtttacttcactattttttatatatataataataataaattgatatgataaaaaccaatattatcaatttctgaaagaaaaaaatattaaatatggaaaaaagtttccataaaatgtaaaactttagaaaaggcaacacacaaagttaaaaatctcatttttatcaaacttaaagaaagaggaaaaaaaaaagtttgttgtaatttcctataatcaatgaaggttagtaacaacacattaagtcaagcacaaaagtaatttcaatttttaatttatagtagaagtgagcatctaatccaattcaatatttttttttctcatccgatccaatccaat

SEQ ID NO: 303092 - DNA, 4483 bp, Cannabis indica
aaaaagtgtccaagtcctatttttaagaagggctgcaatctcagttttcctaacaaagttccacacatgggtttttaagacttctaagacagtaataagttcttaggaagctataagaacctttggcttataagtaccaactttagctcaagtgaccatagggtgattgttgactgagggaggtggaatggtagtgtttgttggtgcaatgctagtgtttgttggtgtagaagactcaggtaaaagattaggcaaattggatgtagatcaaggaggcacaacaaaagtgtggaagaaagataaggaagggggagaaggagaagaagtggtgggatcaaaatgacttgaggactgagatgaagatgatgatatgatccgtagggggatgggagtggtgggagaaattggtataaggatagatggtatactagaggtatcatgacatgaggaacaaagctgagcaaaagaaaaagaatactcataaaaaaaatgacatctcttgataataaattctaccattgtcaggtaagcatttataacccttatgtttaagtctgtagccaagaaaagtgcacttaatatatctgaattcatgtttatttctgctttttggtctagtgttggaataaactagtaggcctaaagatagacaatttgggccaagcccaatttgcataggaccttctaggaatgtacctttactccgtgaacaaatggtcttctgccagtgataattcgtatctagaagcagctctaaaactgtgatgctagaagttaaaacaacgtgttaatggaagaccagcccagtttccttttttattcaagcgcacaaaatagggaaatgaatgctcttcaaatctcgataaaagatcatatcaagctgaaagggaaaactacctaaataaagattaaacaattaattcatgattgattgccaacaattataggacatagtttggactaattcaactgtatctaatttgccttgtcagcagatcatcttcttcgtagcctggacttcattggacaacccaaattatgtaactcaatgtaatctcccaattagagagaaaaagggaaactaagtataattctcttaacactataaatacccaatgaatccttcgaattaacggttgaattctctgatgaaccttgcttaggcaaaatgagaacttatgctcattgtattcctaaaggctttttagcttaagttacataataatatttactcctgaactaaggctcgttaacgccccaaccacataaaaattatttgtgttgttcttactctttctctcttaattatttatttctatagttctaattatttataattggtttttcaaaaatctttgtaaatattttggtactttcattgagagctgtaggaagtagtgataccatctaaagattacgcttagtaatcatggtactcacctataacaaatatggtcttcacttcattgatcctaatgccaaagtaggagatgcagattatcaaaatgaggtgactagctgtcacaaggatcaagtcggcaaagatacagatttagacactcctgtatttggagatgatgacttagaagagaacaattctgatgatgttgatgatgatccaagaaccaaaagatgatcctcaagacacatcaaaggatgatttgtaggataaacttgttgaaggcagtgttggaggaaaggacaatcccgacgagtcagataccgtggtctccatggccgaaaggttccagttaattgaaaataggttatctcgtcaagattagttcaacgagatactgcttgagaagatgacaagaatggaggtcgtgacgacaaccaaagggatccctaataagcaaacacctccaaaaattgatgctcctagaagaattgatcaaaaagatcttggcacctcaaatccttgcaaggataaaggaaaagggatagttggtgaaacatcgaagaagactaattctagaggaagagtcgcatagaaagataagagtgatgataaagtcaagaagttttcttataggaaggaaaatcatcgtcacaacaactctagtagtcaaagcaatgaagttgatgaggtacttcaagttttagacggtaatggtggaagtctctccataaatgatcttcgaagaagattaaatgagaagaaagagaaagctagaccccgtaggaatgatttgagaaatcatatcaatgaccgtgtttacggaagggagtcttcaagtgacataacctaatgtttagaacgcaaagtcgaagagttgatgaaggttgcagagaagatctccagaaagaaaaatggtactgtgttagactctaaagaagaagacacagaaccatgtgtgaaaagaataatagatgcaccactgccagagcgcttcagaatgccacaaatggaattgtacaaaggcaggacggacctcagggaccacctgtccaagtacaaccgtatgatggaagtcgctaacgccagtgatgatgcaaaatgtctttgctttccactgactttaagcatattcgtggaagactggtggaagatgttatcttcgggatcgatccacaactagagagatctacaagcaatgttcaaaaagtagtttttatcaacacatgcctttcatctggaagctagttctctaaccagtgtcaaacaacaacctagagaaagcctaaagaaatacacccaatgtatggtgatgttgctactaaaacaaaggttattgattgtaggaagatggtggttttgacatcaggattaaccacacgatctttgctatggggagatctttagcataaaagagtagatactttgacttatttctttacaagagatcaaggattcatgaacttagaagaagcttacgcttaagtttatggagtacttccagtttcttccatagacatgacatcaacccaaactttgcagatgactactccatcaattttaccttcggcaactgcattcacgaatcctaccatttacggaccaagtgtttctgtacaaccagctacataggctagtttttttggattcagagcgatagaaactgtattcagtgtcactcatggacaaataaacaaaaaaataggagctccagatccaacataagccaatcaaggagcaagaggagttctaagggcccacaacaaatgattctacaaagaaaggaaagattcaagagtcaagatactttaagtatacaattcttgtggatacttgagagaatatttataaggaaacttgtaacatggtccaataaagaagcctcagccaatgtaaaagggcagaagaggaaaaagagatcctaataagaggtgtaaatatcatggtaatatagggcacaccaccaatgatgtgattatctgagggatgagattgaaggatttgtttgaaactggcatctatcaaattgggtaagaattccagtcatttatcctagatagggggttgcacaaggacagctttttattcttggacaacatggagctaataatcctccttagggattaggacattcacaagctcctagaattcaaactctcaatgcacaagccctttagcgggtacaaaatgctccaatagtaaggcttgttgtagctcctagtcctacaaatccatatcctctaggagcagcccatcctatgctagatggtcatgtagcaaccatttcttgtggcccacacattgcccgaagcacccaaaatgcactgaaaaggtacttgaatgagttggatcaagacaaaacttaaaatttggtacaagcacctactcaaagtcctcggatgatgaatttgccaatgaatttcacagaagatgacactaagcatgtgcattttttcctcaatcatcctttgtgatagaagttttgactgcgaataaaagagtttccaagattctcgtagataatgaaagctctatcaatatcattttcaaagatgccttcaaagccatcggtcttgtggaagccaacttgttaccttttccaattcaactgcaaggcttcaatggagacacgctgatcccaatgggaaaaatacaacttccaatgacaataaatggagaagtctttggaagctatgtgatgtcctctttcaagtacaacaccttcgtagtagttgattgcccaaaaacttacatcgttatcctgggatgacaatttttggttgattttggagaagtaacatccatcaaccacttgtgcctgaaattcctaggcgatgccaaaatgctacaatgtttcaaccaagactgttctcatggtccaaggaggaaatgaagtagaagctggaaccacttctcagttagaattgggggtggtccgtgaagaagatgaactagatcaatgggtaggcatggaaagaacaattgagcctatggaagagctagaacaagtatgcattaatgatgaagatcctgttgggttttatgccctttcacatacttaatcctgtttattgtgctgtcaac

SEQ ID NO: 303093 - DNA, 2358 bp, Cannabis indica
tgtttaaacaacatacttgtgagtagatctaagatcctggtaaaataaattccaacaaaaatatggaaggaaaatccaagcagttaataccgtatatccaaatgacaaacagggtaccaggagaagcctcccctaaaaattctttgagaggtccccacaagactaatcattgatagggttactctcaaaaagcaacatattatggtaaaaaaaaatcgggattctagacacacaacagtaggaaaaagcccaaattccctttttcacagacaaagtaaaatgcatacatgtagtagagcaaaggggaactatttaaaaaactatggcaaacccaaaaatattcaacctaattatatgaaccagaaaacgccaaataacaggaaaaattattaacccaaactaaagggaaagtacctagacagagcccaagctcatagagaaactgtccccaagttcatgcagacaaattctaggcgcaataaccctaattcctaaaaattaaaccctacacatgcaaagcaaaaatctcttcaagcacaaaaataatatagtttaagtggaggaaataattacttgtaagacagattaaaagaggagaggatggttgttcatcatcatttgaaatttcactgacttttttgtgacaaggccttgcctatctccaaaaggggattaatcaattgggaaggtgatgcacgttagagaaacatagcaacaatgttgaagaataagaggttaaaatttggtttagaaaggtgaaggtttctgggcaaggagtttttttgagagtgttctctaggaaaaaaatcgcttctaaagtgtcgaaggaaaagtaacttcaatcgccaagactttcattttggtccagattgagttaattagaatctatgccatccaatggttttggatacgaaaggttttcatttaattcacctgaaggaaaagaataaagtacttattactcatcattttgtggctacatccccaacgtgctaaaagcctgacatctttttgaactaagccgtcactcgctccacacgagaaatgtgcttcaattcacagcgtaggcttcacgactccacaagcaccacacttcaacaaataaacaacaatattatagatcatgaaaacccttcagatgctcaaggcagtgtggaagacttattccacattccaaatgcttggtcaatgaattagagacatgaggcaagcatctaggagaaagatacaagatctcaacactcctaagtcccgatagcttgggggataaatgttattcatattcccagatgaagtgtatgtgttaatcatggaaggatgccacattaaattacgcattgttaatgtacaccctctgtttattcaattcatggaaggcattataatatcaaatgtcatctgaaggccctccctgctagaaaagacagaaaagagtcggtgattctcataaataaaactactaccaagagggaacaaaagtcactcgtgctccagaatggtaccaggatagtttggtttgggaaagacttagccagacgttcttggacctctcttataccttatctgaaggcaatcccaatggttgcataccttctgacaccgaatcagatattgtccccagcgttagacctcagtagtgcgcatgcgtgctctacagcaccattttatccaacgggttgaacatacacaaaattttcaaggtttacccttgggcacgtgtgtccttagtccgacaggttgggtagcagtagtcgtgcagcacacaactaccctatttttcatatgtgcctataaataccctatttttcatatggaaagggtgaacaatattttacttacagaacctttgcaaaaattcctaagagctttcttcttcaaaaaaaaaataaatacaaagttaatgttcgtactgtaaacatttgaaatacttaaatactccctggtaaggctaatacacaatagactcgtggactagggataattaacgcccgaaccatgaaaaaatctatttgtctattatttattgttttatattttctttaagctctatttaataagtttttgaaaatctcggtaaacagtttgtctttctgagttaattaattatttaattaattcacttaggtaaatatctaatttgaaaattgattatagatatttcaaggctagtgagatatttcgtcaagtagttgagttattccctcttaaatatccgtaaccgaattctgttatagatatttatttatttgggtgcactcttaatgggtattacccgtaaatgggtaaaattagaaaattttgaatttttatgcttaatttttctatctaattaaaaaaaatctctcattttcatatcat

SEQ ID NO: 303094 - DNA, 2628 bp, Cannabis indica
aaatcagggaattaaacttttgaacatataatcatgattatattccattgtgttgacaacactataatcatgaacaaatacatatgttctggatctaatagaatttataatcatgaaataaatcatgtgaaccatgcaacataaaataatttctgatctttattaattagtaaatctgatatattgaaatgagttttatttagggcacaaaacccaacacattctttatccttacagaatagcagcttgtttttagttggaataacttcatctaaaattatccacaagagcacaactatcctcggatgtatatcatcattccgaatccatttccataattctctctttggaccaaatctaaaaccttgaccaacacaataagtgctcttgacagaaaatttaccattcaatctttccttccaatcaatctaatctggatgatttgaagggatcctcagaatctcagcaatcttccttccaaggccttcttcaaaaatttgatccacaccctccctattccaagctccctcacaggataaatctgcaattggccttgcagttaaacatctcctatctagactctccatcagacaatgaaattctaaataatttaaccatggcatccatggctatgtccaaatcaatggaattaccactagtcgccaaggacaaaaaacccttcaacacaataccatgagcctccaaaagactcttccattagtatgaatcattatttttaggagaaacagaccaaaaactctcttattgataatatttactcacaagacatctaacccaaggcttgtcctctttctgacccggggaccaagccagttttgcaaggagggccttattcatatgttcaaatctccacaagttaaagccccctgacaatttcgactagcaaatcttatcccaagatttgagagccaggaacctactcttctccgcatgtttaacccactagtaccttctaatgattgcatctaagtcacagcagataaagattggaactttatggtggacatataatatacagggatagaggcaactaccgagttaattaaagttaatcgactcgcataagataaaagtttcatcgtctatccttcaaggcgcttcatcatactagctttcaacatttgatagtcctccttcttcattcttttgaacacaaacgggttctccaaatgcctttcatcacctcaaatttgagaaatttccaaggttgagaagagctcatcctttcgggactttgataggtttttggagaaaatcacactagacttcaccttacaacaaacttaacctggccatgattcatacaaagccaaacaattcagaatatccttgcatcacccgcatttgcccgagcaaaaataattatattgtcaacaaatattagatgggaaacggctagagaagctttggatatcttaatgccatgaatttttccattatgttcatttctaaagataagttttgacaaaacttcctgacaaagtaaaaataaaaggagagagcaggttgccttgacgaagctctctcctaggaacaaactttttaagaggactcccgttatggagaactgaataggatacacttatcatacaattcataattaatcgacaaacgtgtccatcaaatttgttatgctcaagagcactagaaatgaacccccgctccattttatcataatctatgtgcatatctagcttaatagccattagaccaccttttcctctcttctaacgaattttatagacaagttcttgagtgagaattgaagattccgcgatccaacgaccaagaatgaaatgttgactgaactggggacaccaaatcattcataaaaagatacaatattttagctataatttttggtatcaccttgtagtaagaattacaaagacttataggtctaaattgctcaatcttgtcagaattatccaccttaggtacaagataaataaaagtatgatttagctcaaatccatagttcccttctaaaaaaattctttgatcgctccactgaaattttggcccacaaggtcctaatacctttaaaaaagcaacccgagaatccatcaagacttggagccttaagggtatggagactgaacactgcatctttcacctcctcgttcgaagggataactacaatactctgattagcctctctactcacttgcttaatatgtgggattatgatcctactaatctatttcagcatagaatttaaatttgttataagtgagtaaataaacgtaatttataaatttcgaacatttatatagcatgtgtgaatgtaataggagttatatgtagaataaaaatattttttaggttcaacgaccctgaagacccaataagtggataaatacgtggatataatatgagttatttgttaaacaaaaatattttcaggttcgacgaccttggaaacccgattggaggccaaaaatatcacaacaattttagttagaaatattgatgggattattgagataagttgattttagaaataccggagtattttagggtactcgaagttggccaaataccctagaaaaagaaatttcttagtggctaaaaaataataagataactattaataataattttttt

SEQ ID NO: 303095 - DNA, 2047 bp, Cannabis indica
aagaaggaggaggaggaggaggcgtaggatagaagaagaagaagaaagaaaagaaaaagaaaaaaaaaattagggttttttttagattttcatttttttaaattgttttttttaattttaaaataataattttcttttattttttatttttaaaataattattttttttaaatatttatttacgtgaaacaataaaattgtgccatgtgtacactgtgtacacgtggacattctaccatggcagttaacaactaaaaatggatggaaatgttaaactgataacagaacacgagttaaggaggctttaccaccaaaattttagaattgggggttagttgcaaaaacctggctacttcaagaggttatgccgcaaattactcacataaatatatatatatatgcaatatatataaaatataaatgttcatataggtgatacttgatgatcatatgaattgtgaggaggtttattggaggcaaaggtcaaggtctgaatggcttatgcggggaatagaagcacaaaatatttccataataaggctttgacaaggaagaaaaataatgctattactaagcttttgactaagaatggacacaaactgaatgatgtagtggatattgttgttgagattgagcgctatttttctaatatcttctaatcatctagacctatagtgcaacatattcatttgggtatcgaggcagttgggtcgtgtgtttctgatgacgagaatgctcggctcctggccccttccacaaaggataatattttgagtgcagttaaagcgattagttctacaaaagctccaaggccctatggttttcatgctttattttttcaactgttttgggatattgttggcgatagtgtttcctgtgtgtgtctaaatatcttgaatgatggtgtatttgtgcggcaattcaattagacaaatgtggtgttgatacccaaagtacaaaaaccccagtttgttaaagagtatcgacacattagtttgtgtaatgtcgtgtataagattgtggctaaggcactagcgttaaggttgaagaataggcttagcgctttaatctcatcatttcaatgtgcctttgttgcaaaacgctcaattcatgataatgtgatggtggggtttgagttgctccattcactttttaagagaaataatgggacgaaggggttcatgggccttaaacttaatatgagtaaagcctatgacagagtcaagtaggattttctttagggcattgtgcgtcggtttgggtttgcagatggttggattcaaagtatcatggattgcgtgaccacccttgagtatgctttcttggttaacgataaacctaggggttgtgtcatcccttcgaaggatacggcaagggtgcccactttctacttatttgtttctttctttatgtggaagctctgtcctcaatgatatctcgggctgagacaagagcagagttgatggggtttaggtgctctcggtttggaccacaaatgtcacatttatttttttgctcatgacagtctaatttttgggagggctaatgtgggggcagttgatacaatatgtaatattcttcacacttatgaacagtcttggggccaaaaaatcaactttgataagttagctatttcatttagtccaaatgtgcatcaacgggatcgtgatggggtgctctgtaggttgggcctgaccttattggctacccatgataagtatcttggtctccttacagttattggtaggaataaaaacacacttataaagggatatgtgctaaggtttagaagcgtgttcggggttggaagcggactttctttttaacaggtggtagagaggttcttattaattctattctccaagaaattttgacttatcttatgagtgtgttcaagcttcccatgtctacttgcaatgagctgaagtcgattgtgtgacagttttgatggggtacgaagtgttggattttgtgccctaaataaaacccattttaatataatcagatttattatttaataaagctcagaaatcgcttttatgttgca

SEQ ID NO: 303096 - DNA, 2849 bp, Cannabis indica
atttaaaaatttcacacgacacatgacaccaaaaacaataatttagcttacaacccgccaacagggcacgaagattttgcgggttcaacacaacacaaaatttattcgagttatgttcgtgtctgtattttacaaattcgcaatttttcaataaatttaagatctcaacacgaccgaacacaacacgccaatacgaattgcacccctagttttagcgagtttcccaaaagttgtgttgagaattcatggaagaaggtttgtaaagagagaattcgcattggaattgttagagagaagttgtgattatcgtttgttaggaatgagggtgtcagttatttttttttaagaatttgggagttgaatgatgatgatgaaaaattattatggtagattcccaagagtctgtgcttaaagttttatgaaaaagaatcttcctaataacttacatgttttcactcttcaatccctaatcctccatctccatggcctattcaataaattaagctctccaatttccatgaatgatcctcacaagcattcctttttctttcttcaatttcttgtttcatttctagtttgttataccagctattctctatttcttatttcatcatttaataaagagttctttgttttggtttcatattaaataatttagattaatttagtatcatatatcttgatttgttatttatttccatccaaaggcatttgttaaaaaaataatatctaaacaactgttaacatgtgccaagtcagcatcttctatttttggcaataaaaggtagttaattaggtacttgcttgggttaaaagaaataaatagaatcacttttcttcagggaagaaataatacatagaatcttttatacataattttgctattgtgttctgtaatgacagtaatgtatacaatcaatctaatatctatacatcatgatcatctttagccaaatgatcttcacctttgatgaactgaaaccacatctttgatctgcacagattcatcaaaaaataccaaccaattccaaacagagtcaacaaagaactaatgaagagaacagttttggtagccacagtcataacatacaccaaaaacacagatggaatcaaacacatcacaaccaatcctggaaactccaatggtacactgaatggtctcttaacttctggtgactttcttctcaaccaaagaaaagaagcaaattctaataacattcctaaactatacaagaaatttgcagaagatattatgtctgcaaaatccatgtatgaaacaactaatggtactaatgttgagatcagaattcccaaccaaggagtgttgaaccattcagaccgagcaccgaaaacccgaggcaagaatcctaattctgccattcccaatacttggtatgcactgctagttaattgagcttcatacaatccaattacagataaaacagcaccaaattcaatccaaatctttaaccatttcccagctatcatttcagccacattggccaaatacccttctgtccaatcctcttgatttagaggaatagcaccagttgcagccatgagaggtaataagtaaccaaaacaagagagaatcacagcagagaaaagagctattggaaatgttttctgaggttgatcaacttcaccagctaaagtactagcattatcccaaaaattcaagttccaaaaaagagtattgaaaaacaaggtccaatctttcttcacattcacacccttttgacccaaactaagccacctaacaggttcaatcattggaatagcaaaaagggtcatcaccaaaaatggcaaaagtgatacaatcccaagtgtcacagcagtgtaaccaacaatactcaaaccagtataattcaaaaatgaaagcattaaagttgaaacaaatatagcaacataacgaggaaacccagatgagaatataggtattaccaatttcaaataatccacacaaagaacaggataagaagctaaattaataaccccactaaggaatttccaagctcccattaaagaaccccaaaagggtccaaaagcatggtttgcccatataacaaacccaccatttccaggaaaagcagtagcgagctcagctgttattaaagcctctggaatactccaaatgaagggaaagacaagaaaacccagaattgcaaagaggggtccggcagccccaacggccgattcctcgccgtaagggccaccggagacttcaaagtagatgaggaaaacgagtggtagtaaagctagcttttttgggtttgaagattggtgttgaggaagaaggtgggatgttgttgtgtcttcattggagattcccatgtgtgttgtgttatctttcgatctttggactggaattttcccagaaaactggtaaagtttgcacctttttttcttttttaatgtagtggaatttattatgtttgtgttgttgttggaaaaatatctttgatgattgatttgggtagttgtatgtggtccaattaatcaacaaatcaatcatgtaatataataattatttgaccactttgatttgggcatttataatttgcacacgttatatatatacatggtaacaactatcactcccaattctctattctagtgattattgcggcaagagtttcaaaaaaactgattttaaggtgtgatttaaaaaaaataagggtaatagtaaatagaaattaatggtaagagagtcattcccctctatttgtttattttatttattaaatttagaaaatagagaacttgattaaataagagataaaagattctcccaccaatttttactaatttttaccaattttttaaggaatgtgagtaaggataataga

SEQ ID NO: 303097 - DNA, 1323 bp, Cannabis indica
aataatattcataaaattaatttaaaatattgactaaatgcacatgtggcaaagaccactctatgtataacctccattgaatatgctctaagtatattcttaaaagttagaaagaaaatataataaagatatttgattttgaaaagttaaaatataataaaatgttggaaacgtagacccctaaaaagatgattaggtagactctctatctgtttcggcatttagaaaactttttagttcaattttttttttcatgattacgtatgttgtagctatttaagatcacttgtaaatttttagaaaattctgaattgtttacggtgtcaaaaattaagttcaaataattacttacgatgcgtataagaaaaaatagtcgtgtgtgcaacaaaatatataaattttattttcgacacttgaaaatactcaaaaaaatttaaaattttacaagttgtcctaaataattataacgtgtacgattataaataaaaaattaactgaatttttttttttatatggcaaaacagataggagttctactaaaatatttttttaaggaagtgcactgaggacgacttatcctgaaatgttaatatagaataagtactaattattgtataaaaaacaacattgaataaagaaaagttaaggggtagagcctccctaatgggtagttaatgggtagtgtagtctgtccctattgtggacagtttgcactaatggccaaataattttgataattatatgaacattaataaaattacattatatagttcatttataaaactcataattaaaaatgttcaaacaaaacaataaaaataatatacaacatatgtaaataatataaaactaatataaaaagtaaaggatggcaaaaagtctcactctaatctgattgcttagttgttgttcaagcaatacacagttcggcttctttaccttctgcttttggcctgctggtttatgaatgccaacagctcttggctgatctaaataatgttaacttttattttataaaacgttctgctaacaagacggtgcatttccttgcgagacgttcttgttttttgtcagttcgtattttttatgattacaactcaccttgtgagtttgtaaagattgttaagaatgattcatcttattaataaattgatccatttccattcaaaaaaatataaactatgatatgtacaatatgttagactatatatatagtgtatgtaatatagcatatacaaatgatatgaaatgcggaaaataaactgtaatcatatcaataatatatgcaatgaaagaatcgatgtacctccagccattgatctt

SEQ ID NO: 303098 - DNA, 3674 bp, Cannabis indica
agttggtatagttatatgaactatgaactttggcgccaaagccgttgagtcaaaagtttgagattttagagtatgaacttggcttccattggtctctccacaaaatccaatctttcatcttttcattctctcttcaaattttatttcgataccaaagatccaagacgggtattacttacttttcgtgaattgttgaattacaatgagaaacccaacgatttcacttttgctttgctcatcaaggcttgtgctttatcttgttcttcttcatttgggttcaaaccaacatttgaagcaaatcagattcatacccacttgatcaaatcaggtgctgatcaatttatgcacctcagtactgctcttcttgatttttatataaaattgggttgtttgacatttgcacagaaggtgtttgataatatgcctcaaagagatgttgtctcttggaatgctttaatttgtggattttcgagaaatgggtatcatttcgatgcgtttgatctctttgttcagatgtgtagagagggatttagtccttgtcatacgactttggttagtttggttccgtcttgtgctagacatgagttgatatttcagggaagaaccattcatgggttcgggattaagtctggactcgattcgggttctcaggtgaagaacgcgcttacctctatgtatgcgagatgtgcggatttggaagctgctgaatgcttgtttgaggagattgttgaaaagagtgtggtttcttggaataccatgattggtgcctatggacaaaatggtttctttaatgatgcaatgctttgcttcaaacgaatgagggagggaaatgtcgaagcaaatgaggttaccatggtgtgtctcctatcagcaaatgctaatccagaatttacacattgttttgtgattaaaactggtctaatcaacaaatgttctgtaaatacttcgcttgtttgtgagtatgcaagacgtggcgattcgaaatcagcagaagtgctttacaagtcattacctcagagaaacttggttcccttaactgcaattctatctagccacgcggagaatggtaacatgtcatctgtaatggaatgttttgctcaaatacagcagttagacatgaaaccggatgcagttactatggttagcattctccatggggttactgacccttgtcacttcggaattggacttgccttccacagttatgggatcaagagtggattgagtatcgataatcttgttgcgaatgggttgataagcatgtactcaaaatttgaccacatcgaagctgccttttcgttgttttttgatatgcatgaaaagccattgattagttggaattctttgatttctggctgtgttcagtctggaaaggcaactgatgcttttgaggttttctgtcaaatgaagatgcatggacacggtccagacgccatcactattgctactttactatctgggtgtggacaacttggacacttgcaattcggggagagacttcataactatgtcttgagaaacaacatagaagttgagtctttcgtcggaactgctcttattgacatgtacaccaaatgtggaaaaatagaacgcgctgaaaatgtgtttaagagcatcaaagatccgtgcttggtgacatggaactcaatgatttcgggttatagcttatatggttttgaacataaagctctttcttgcttctccgaattacaggaacaagggctaaagccagatcacatcacctttttgggtgttttagctgcctgtactcatggaggtcttgttgatgaaggaagaaaatattttgaaattatgagaaaggaattcaatgtaatgccagggctgcagcactatgcttgctcggtaagtctgttaggtcgcgcaggcttgcttgacgaggcattgatactaatcaaagacatgaagataaaacctgattttgctgtgtggggagctttgcttaatgcttgttgcatccatcaagagctcaaaatcggggagtacttggctaagaagttatttctcttggacaactcgagtgggggattctatgttttgatgtcgaatctttatgctactaaaggaaagtgggatgaagtagccaaggtgaggaagatgatgagagaaactggaggtgatggttgttctggtattagtgttattgaggtcaattcattgtaatacaagaatacaactttctcaaacgataccaagacgggtaattctcagtctcaatatccaactggagaagagctgttactgctacaagatagtcctcaaggacattccattatggataatcgctccatgctcggaaaataggcagatgctgattcacctcatgccccacaggttatagcaaatccccatttgatgacatttggaggcatggccatattcatgtattttcagatgttagcttcatttatgaagttacaatcaactcattccttgataatattttttcttgattctgtctaatgtactcttacttgctcttcttacattgttgcagttgctctgcgtgtagcgagactcgaaagaggaatctcaatttaccactttggtacaaagctggtgcaattaaatatggatttgtccatctaatcttgatggggtaatttcactactcattaaataaatcacagatcattttttttttgtagtttattagtcttcccttgtgcatctatatatccttgtatcatgtctagtcacaaatttggttaaacaaaaagatttatggattttgtgagtctttggtctcaagccaattataagattattttccaagttggaaattgctttagaggatctaggaaccagggccggccttgggcataggcgggctaggcctgtgcctaaggcccacctattccaggggcccaaaaaaatttttttccctattatacaatttttttgttgattttgaaaaatatcattttttttttctaaataagggcccaaaaataatttttttctctatagcccactaaatttcagagccggccctgctagaaacctacgaagtatttttgtttttttaagacaaagttccatcttttattctatttggaaacttaataaataaaataaagaatggtcaggattggaagcttaaggagattataaaaatggtggtggggggttggtggttcagattcagtcatttactgatattttttaacatttcatagcatcataatttaaggttcgagtttcgtaaaactgtttctcattgcaggacgccgtacaataatggcgatgcttggcttctttttgttcaaatttcagtagctcatgttggtccagttgataatcttttggatcatttctatgatctatgatctatgccacaaaactattattcaaaaccttagctcttgatttgaatatctcccaagaccacattttccatcacaactttttttaatgtttgaatagtcatactttgttgtactcatttatgactaatgattgtaatacaagttggtattattttacatatatttgttgtttaaagaatatatagtattcccacttttatgtcatacaaaatggactatcaaaaataatgtaaaaaagcagccacctaaggatattataatcaactaagctaaagtgggatatgttaaggttgattagtaaatcataataaaaataattaaaaacaa

SEQ ID NO: 303099 - DNA, 1776 bp, Cannabis indica
atagagtgtaatttcctcaaagaaaagggtgcaagtgttgattggagagagaaaagttctcttgggctgaagcttagtgggtcgaaccttttgtgtttgggctgaaacaaagattgcaaaattgtattagtttataaaattgacactattattttgtggacacataaaataataaattttagaaaaataccaatttgcatataatattaattttgcttctttaagtgtgttagttagaacaaataatttccaacaataggaaataaaactttgcaaaagttagaggtttagtgagaagatcagctgattgttcctctattggtatgggggaaattgttattttatgctgagagagactaagtcctgaacatagtgaacatctactttaatgtgctttcgtccttttgagtgaaaaacaagattagaggcaagttgttgggtatcctaattatcacactaaatggtagaggtagtaggaggtgtaatgccaagttcttttagaacagaagatgtccaaactacttcagtagcagtagaaggcaaattaagattgatattcagattctgtacttgagcgagcaactgctgtttagttgtttgcccccatatgttatttagattggatccaagcataacacaatatcaagtagtagatttttgatcatctaaattgcaggctcaatctgtatcacaataaccttccaatgtaagatgttgtgttgatttgaagataatgcagagatgaatggttcttttgatatatcttaggactcgtttgcaagaagtctagtgtgtatttgttgattgttgcatatattgactatatttatttatgacataagatagatttggctttctcaatgtgaggtattgcagagattcaatattatttttatagaaagttggatcatgaaatagttcacgtaaaaagcttatggccaggagacataggagattcgggtcgatgtgatgatccccaaaactcacgagagttaatctataaaagaaggaagacaaaatgtgagcgatggacggagatacaaaaggaaaacatatctaatatgtaaaccgggtcgattcaaagggaaaaggggaagaattaattttattacaataatgaaattcttaagtttaaaagtttgaaacacgatggatatcttgaaattttttagaaattcacgtttgggaaaattcaaattatttttggccaaaatggtaagaaattaaaagcttaaaagacctgtgcgtacatcaatcaaagtaaaaattcctaatatctcctaatctcagatcagtcaagaacaaatttaagaacctaaaattttatagtaagaaattcaaaaaataatgtatgtatttaaagaaaattaattgcataaagaaaagaaaactaactcacagattgacaactattaaatgcgcctagacagattttgaaaatcgagcttcaagcaaaattttcttcgaagattccagggagaaaatgaaaattactcttattatgcaagaataaaattagctaaaggagtgtaaagctaatttttatccctaatgtaggtggttaaaagggctgaaagtactttaaaatttaaatttttgggttttttctctaaaaaggaacatttgtactcattgaatagtataaacgtcacacatgtagtgtcacacgaccgtcattgtgtgtcttgagatttagctttcactactacaaaattgggctttagaggcggtttttaagggctttcagcgtcggtattggcgaaattcgctaccgac

SEQ ID NO: 303100 - DNA, 1521 bp, Cannabis indica
gtttagtttttttttttttttttgagtagggttatgcaattaattatatgatcaaagtgacaaactaagataaaaagaaccattcaacaaagattactaaggattacaaagaaatttgtaagtctgtcaaaagagcactagttttaccatttttgataatggcaatataatgaaggactattatataagatatttaactagcatatgcacttaatatagatccaattcatttgttttgtatgcctcatatttgagaaaatatataatttaatccaactatacgattacttttttatttaaacaaatttgaatagatagtatttgtcaaaaaaaaaaaagagtatataacagtatagtatctaaggctaagtcccttcattatatatttaatttgagtaaatcacggccagatgtgcggcatgtggcttgaccaaataaagggtcactttgtgatcattttgttttgttttttattcaaattaagcaaccgaacaaatcagttgttacttgttactactataatattgaaactttctctaaataaaataatagattatcggtggtttaacaattaacacaattaaacaattcattattaaattaatgctattaagagtaatacccactcgaagcaaaattcaataaactatgattaaatttattaatttagtgattaatcggaaaagaatttgaaatgatatggtaacttgtgaccaaaaacgtgaaattgccaccagaagctagggccaatgtatcgccacatatataaaacccaaattatgaatggtaacagccgttcgtagggtttttagggacccatttaaaaattaggtgatgatctcaaactctataaatagagaccaaatgctcactttacaagacacgtggtttttatatacaaaacaatggactaaaatgaatagtgcttgataatttcatagagctattttcactacttgaatgtcttttaggtggcatttaattaagagtaatgaaaatatatgaataggaatgaaaatggaaataaaaatataagtagaatagaataaaatttaaaatacatacaattttttttgataaaattattcaattttctctcatcttacattggaataatttttccttcgataaactgtagtggcatacctctttcttcagagttgaggctagtgaaacctttcttttctcaaaattaatgagatagtcttgagaattaatgaaattccgatagtgaaggagctttaacatgatactgtcatttgaaaggatgctatgaatggtgagttttcagttaaaggtgtctattgcattgggttgattagaaaaagaggatcaaagagcaacatcctttatggaagttggtttggtctagtaggatatcaatctgaggttgagctacaagaattatggttaataccaacgccactattaccaacgccaaaaagtcctcattaaaaataagagtatcaataacgacacttacttgtcgttgggaaagttattcaatttttttttaaaaaa

SEQ ID NO: 303101 - DNA, 7677 bp, Cannabis indica
ctctctctctctctcagttttttagcgaaatgcaagaacaggcgacgagttcaatggcagctagctctctaccttcgagtagtgaaagatcttcaagctctgctcttcatgttgaagttaaagaaggtacgatttttctatttgttaaagaataataggtaaatcttattaagtgttaccatagatcaaataactgaaatcctatcatttcaaagaaaaaaaataaaaattatttctgataatcgcatttctagagaaaattagctcatgctttattggctggcttcaacatttttagctatggaaagtgatgaggagatcaggagagtcccggaaatcggcggtgagtcggctggaacgtcggcttcgggtcgggacacgggttcagtggccggttcagaccgggttcaagtcactggagagggccagaggaagagaggaagaaacccagctgacaaagaaagcaagaggcttaagaggtaactaaactaagtaaacccattctatttaaaattcactaatctattaatataaagtcggtgacattttggatataacgatttctcattttgattttgtgcttgttaagattgctgagaaacagggtttcagctcaacaagcaagagagaggaagaaggcatacttgagcgatttagaaaccagagtgaaagatttggagaaaaagaactcagagcttgaagagaagctctcaactctgcagaatgagaatcagatgcttagacatgtatgtccatccatccccattattacgattatcttcctcattcatatttttcttatgttttgtgaccaagggctttttggcatgttgttttttttttttttttgataaaaagtaaagtaaattttaaaaataaagatacttttactaagatttgaacttacacttttataatatatgtaaaataagttaatgaatcttaagttaatattatgattatatttatcacatttaatacaaatatatattataattaattaaaatacatatatattttttcacagtttttattcctctcgtttctatataggtccgcccatacttttaggtataaacgtttatttaatgataaagtccaactaaagctattccaaatcgccatcccttccgattaagagaccttgtccttaagttctagaaccttaagttctagaaccttggaagtatcaaaacgacatcccgaaagcttcgaaataagcacccaacacccaggttgacaaatggcatgatgcgttggatactgcttatttgattttaattccgtctcgaccgtccgtctagtttttcacaataattgagatccatgaagttaagaaggcaaattcacaactttgcatttctcatttccaacatgggaaaaccattcggaaatgaagagatctgagactctcaattgagcagaatagcaacatctctgagagtctaaatatcacttaggcatcataaagtacatcccctagaagtttttttcacttacacaacgtccaggttgacatatgacgtcaacctgggggctgaatgtcaacctgagtgctgatttatgaactgtcttctgtaaaacgattataactcactccatattgatctgattgacgccattcaacttgcgtttcgaagctatttcaacgctctatcaagtcatgtctcacacttcaatcgcaattttgaagttatcaacctcaaatttcaccccaaggggcgttacaaaaataagctttgacttactcaaagtgggttctcccgctgtgactcgggctcaaaaaattgattattaaccttagaagttaattttgaccgttagactatcatctacggtcaaaattagccaatttaaattttttcatattttgaattattttttcctatatttaagggcttctttcacctataaaataaggagagttcatctagctcatttttcatatttaaaaaagtagtcttaaggttagagcacttctctttaatttttctctcttacaattagagcttaagcatttagctatttttctgtaattctatcccatgagaaaaaaatatcaaagtagacgtaggtccgttaccatcgtgacatggggagtgaaatactataaattttgtctctttaaattatgtacttacagtcattattcatctcgctaatttagggagctggtgttgaccacttttcagcatcaacaacattgtagagataacccatagttgattctttatcaccttcaactaaccttaacagttcaactaaagcttttgtggtcttaaatatgacataagacgcacttgcccaaaaacatgtgactttcaaaaccatgtatcttgcctcttctccattagctgtagatgcccaaggacaagttgcctactcttcaacttgatgtatcttttgtaatgtaagaaatgcagatgcaaatcttgtagtagtaggtcttataatatctcttttgtaatattatcttgtcaagtttaacacccattgattattgtgaaagaacttgctcgatgtttttcctttggacaaggcatttaggtgttgtggcaattcaccaattctttcaagcatcaaaccaagataatgtgctggacatggattctaatatagatgctttcttttctccattaacaatttgcctgccgttttgtaggcactagcattttcagtgaccacttgaacaactagatactctctaattttttcattgacattatccaccattttaaataatctttgtgcatccttactaaatgaagaaccatcaatactttaaagaagcatagtgcctttgagattattaactaaaatgttgattatgcttcggtttctaatgtctgaccaacatctaacattattgaaactcccgttagtgaccatggctgcttaatatcctcaactatagcttttgaagtattcatcctctccttcaatatccatgttctaagctcatacatactaggagttttcaatcccctcgcaaaatctccaattgagcgacacatattgatgaaagaaggactcttagccaagtaaaaaggcaaagcattcttaaagaaacacctcccaatgtccatgcaaactttattatgcaatttttttctcatttttgggagttatttgagtttgttcagttgttgtccctccattatcactacccataaacctatccattgggcttcttacacctctaataggcatgggggcaaaatctttttgagaatagtaattacccgacccaactattttttaaaaattcatttgactcacatgctttgataattttttttttgtttcaagtgctccacaaattcatcatttacttctttgggaacctcgagacatggtttaatatctttcctagtttgagcaaggtgttgtttcaatcttgtcacaccacccttaataacttgcttgcaataattacactcaagataagcataaatcttctttttccagttactcctgaaatatcaacctagaaaatatgtcttctttgttctttaattttaaattgtctaggtttagttttcagttgacatttttttagttattcgtttgggtgttatagggtttttaatgtgttttattggaccttttttaagttaagtattattaggctttcttttaaattgctgaaggaaaatgggctaagaaaaaccctaaaattggttttttatttgaggtgtgtgcctcacaccatttttgaccgcctctcacagttgaggcgtacacctctcttcttcatgctgaggcacacacaatagtgtgttttttcccgcctcaaagtgaggcgcgcaattaaaatgtagttttaaaaattgatttacattacattagatattaattttttgtatcttccttatattatatataaattatttattttaaaagtgaataaataaatagtaccttatgtaattattcctatgatttatatcatcgttacttgtctaaagtcgacgcagattgtcagggcgttttaaaagtgataagagtcctaagactaaatttgaaaggaggtctttatttttttaataaaaaattaaaaatatatattaattaaattttaatataatattaattttaattataagtaataaataattattttgtaatggaagctaactcgataaaataacattttattattagaagtgtctcgattaaaatgttatgtattttagtatattttaaaaaaaaaattaatgtgttaaaattatattttttttatatatatatatatcttaaaaaacatataataaatatatattttattcattatgaaaagtactatcgttaatattttaaaaataaaaaaaactttaatacatttaatacaaatatttaagttataatactattatttatttttaaaatatttaatttatttattattatctttataatttcttcttttaattataattttgaaatgctacaaggccttttaccttttttctttttttatggaacaaaataactgaagggtgatgaagggagggatcaaacccttaccccaatgtcaacaaacaattcacttatcacttgtgctatatatttttcatgcaattaattaaattaaatatttatatattatacctcttgtatatatatatatatcaattttaatttgtttgagaactccaaaattgtgatgtctaaggcttaggccccgttgattcactctctggacggcttctggccagccctgcatattgttatacattaatagtatctagtaccactacttgtaacattttatgaattgttagcgatatcttttaatggtcatcaaattacaatgagatatactttaaggtggtacattagtagccagagacggacacagtaataagagtgcagtgtgaaaaaaaattaaatatcttctatttagttaaataattatacaacaaaatagtaaaaagctcccataaaatagttataattttaatgtaaaataaatattaaatatttttataacacttaagcccccagatcaaaaattctgaattcgttactgctagtagcaattcttaaagttagtttacatttttacgagccttataatcatatggatcaaatgattatatcaaacttctcgtgggtaccccctcaaaacataaaaagttactattatttgcttctagtccccgaaagaaaataaaggaaaagctcaactaggttttagccttttagataaaccgtgtgagtaagcgtgtcagattgtcagttttaattaaaaaattattcaattattttacatactacttacattaaatatttataagaagatgcaataaaattactgtaaatgttttgtatgcagatattgaagaatacaacggcaagtcggagaggaggtaatggtaactcaaacggtgatgattgcttgtaagtcaaaattagagtgtcgagatggttagtttctctaagagggtaattatcttaagggatatgtatgatatataaacctttctttctatatataattttaattttattgtttcgaaaacgctgaaaatcattcttctaaactcatccaatcttcatttcttgagttccacttctcttcgaattcattcttcgatgtataattgattctagtattcatggtgagcaatttataaattttaggagctgaattattatttactaaaagtcaattaacttaaatttgaaaaatattttttaattagttaaaaaaataattatactgtatttggacaataaattgagttagatacattattaaaacccattttttaatcctactgtaaactcttattctcttcaatgcatgcattatgtctgcaatgacggatcttcacttttagatcaattttctattgttatccataaaatttagcaaatgttgagaagcaagttaaaggcgtttggaaggacagtctaccaaaggcttcgtgcagaaggacacccccctgagggctatgtctgtaaggacatcccatgaggacacatgccaccttcggaaaggtatgctctaggtgtctccagaggtatatgttcggtgtgcttaactctggaatgaaacgtttggatggctacttatggaagctctggtctggaaggtgttatattatttgataatataatagatagtttaatatatttttatgagaataatatatattaaaatgtttggatgttaatcttatatgagatataatgtaataaacaaataaaaattataacaagagaagttacaaatttgaatagaagatttgtaagggattataatatcatatttgataatatgtaattatgtgaataaattatatgtgggagttataaaatcaaatggtgtcgtttctatgtgttagaaattgttacaatattcatttatattgtttaaatgatcattgggatgtttgagattgagttggttagaagaggggagttaaaacttaaagttggtgtgcgaaatttgtccgaggcgacatgtcttcaagtactttgtccgaggcgacatgtcttcaagtactgggcgacttgttacctaaatcaatgcatggagttttttgacgttatgtgacgtatctcgagaggttcaatgttattgcttgttgtttatcaaaaaaaaaaatgttattgcttgttgcttggagcaagaatctttttgggtaaaaatgttacataacgttggaagttcaataggggcgtttctagtgtcaaggccaacgttctaatctccatttactgctaaattatgacttgtaacaaccattgagtgtgtgataccaaatgtggaatcataaacactatattaagaggtctaaaacgctcatttatgtaacctaggtttctatcaacaagcacttgctagaaattacaagacttgataattcttaaaactatttcgtaaagagttcccttagtacttagggtgtaatatcctagaaattaattataattaattaaagcatattttacgaaatatgtgtatatgtgtatcaggagaataaattgagtgacattataatcttactaagttaatctgtgaaaatttgcttattttaagaaatgggcaaattaagcgtcatttattaattatggagattttattagaaatatgaatgatatgcatgctatttgtgaaaaaaatacttttaggtccgacaacagtggaaacccgattgattggcctgaaatatcacgattgtattagtatgtgttatccgtgttttcgaaaaaaggacacgtggcataaagtgagaagcactagattaaacaatcactaattaagttcccataattagccaggatcacggagaagctatgcaattccaggaaaagactaagctcgatagctacatggagacttgtcccacagcataccgccatccgagacccggaggccttaccatctctccggaacctagagaagagcaagcttaacatatctccaagagacacttggaaggcactcaaagagtctaacacggacaccaatcgctcagaggatgccagacgtctaccatgaggagagacccaaattgctccaacgacagttatacattttctgacacatgatcagatcttgtctcctgtattataccatggtagtgcacgctccccacctttgaatatacctttttgcttgaaggtttgtctaggcatcttcttttcaaggtgaaaccttttggc

SEQ ID NO: 303102 - DNA, 2336 bp, Cannabis indica
gactaaatgtatttttagtcacaatagttgttgtgactaaaactaaattactcacaacttgtatataaatactatgttttagtcacaagtaattttttattgtgactaaaagtgacttttaggcacaaaaaatttatgttatgattaaaagattgtcactaaaagtaacgttttttttaaaatatatatatagttaaaaatgtttgctcttctctcagcttgagcttgtgctaatggcggggagaaccaaagttgcgaagaataagatcatggtgaggaagaagagagggccaacatcttcagatccagtaaaaaaaaaagaaagaaatctatagctaagattctacgagtggaacctattgatttcaaactggatgtagatgaggaaacagaggatgagattgagaaaaaagctccagacgaatagagactggaatcgccagagagatcgcaaccaaagaaattgctaacgcaacagttagagattaaatcgtctctgaaggagtggataagagttttgaaaggggattctatttcatcttcaaaaagctcaagtaaccttattccaattctgaatattgatttggaaggctaatttggggaaatcagggaatgattggttcagattgagcttgaagattagagtgtgttggaggttagagatgacttttaacgacatgtagcgaattttagcaattttttgtgatgctgctatcgatatctagcgacatgagtagagtgcgctggaggctagatgacttttaacgacatgtagcaacatgtttgcaatgaaatttacgacattaggaaagacgacagtgaaatgctcaaaaatcaaaagcttaagttcatgaaccatctaactactaaaacacataaaacagtgtcgcaaaaagttgcaaaataaatcgtcaaatatcgcaaactaagtcgccataaatcgacaataatcgctaaatcatacacattttttgttagaaataatccaatgaatatgtcgcgacatgtcgacaaatgtttctccacatgtcgctaactacagcaaggccttcatatgcaatcaaaagacattatagtcgtagactatgttgacaacatatcgcttcatgtcgctatgtgtcttaacttccaataacttagctaatatcgcgagatgtacgaactgtatcgaccaatgtcgctaattataatagcttcctagccaactatgtcgacaaaggtcgataatatgtcgacaaatatcgctaaaagtaaaataattaccatatcttactctattttagacaaagtcaaaagacatcgcgaacaaagttgataaatgtcgataatcagcgaaaaaccaaaaattgaacataaaacaatgaaaatcaaccaaaacaccaaaatcgaacctaatctaaataaattttcttataattaaccacaaacaacaaaagaagagtgggttttgcgatggcctcttgggtttcgtcaggggtagagaggagtgggtttcgtccagatgggaggccgagcgacgatggtgcagtggttgtgggtttttttgggtggatttggtgagagttagagtgagagagaaggagagatagccgagagaaagataaagagttagaattaaatgaggagggtattttaggatttaaagaattttaaagtattaaacccctatatattttaaagtgagatacgtactaaaagaccatataacctcattttaagcatggatagaaaattttcctatgtatttatatatatattataggcatgcacgtacactttttttttatacatgatgtaacatatatctatatacacacacatatgatcaaaatagaataacttcactttaagaaattggaatttatcagattattgaattttttcaataataaacttaaagataaggctcttatatattatagtctaaattcatgattttctaaccaaaggagatttaattgaggagacaatatataattctggatacacacttatttcacactataatattcataaatattagccacttatatatatcattaagtaagaatcacattactcttaattgtttagttaaaattaagaaatttttacatcaaaaatataaaatgataattttattacctaaataccactacacggtaaactaaacatttatatccttcatctttattttattactattttatcacatgcacactcttcccatgcatcaaacatgtgtgtgaccactatcaattaatcaaccatccatcatttccctttctttttttcttctttttccttttatttttcctatttcttttcaagtttttttttttaaaaactttaaaaaa

SEQ ID NO: 303103 - DNA, 3062 bp, Cannabis indica
tttgcacatattttttgtaattattttatttttgttgtacatttatgaaaaaagccaaaaaaaaatatggcaaaaaaaaaaatcaacaatattgtatcatataggctattataaaagtgctcattatatatcttatttctctaatttataaatgaaaataaagtttatgtcaaaaatctgggagtcatttatgctaattatttgaaatgatggattaaacgatgaacttagttcaagagtgatacaagcattaccagagaggagactgtaaagagagccattagccataaactcatatactaacatctgcacagtagagtaatgacatgattgtcataaaaagcacacacaaataaataaaaatcataaaataacacctcaataacgtaaatattttatcattgcaaaacaaaatacttactttttttttatcaaaattagtaatactaatacaatgaagacatctaagttaatttgttagttacatttttatcaagtgaacatgtactggtaacattaaaatcatgaatttatggtattatatcaattgaagttgttgtacctgttctccatcttcttcacaaaagccaaccaatgaaaccaagttgcgatgatgtactcgggagagtaattctatttctgtaaaaaattctctctcaccctgtaaggatgcttgttgagcacgtttgactgccacaactgtgccatctgctagaatgcccttgtaaactttcccatagcctccttgcccaacttgagaggtcatattaaaattgtctgtggcaatttcaagttcaacgaagctaaatccttttacactatcaaaatggctaggagctttttgtgctgcagagagagagagataagattaatcatctacaatttatttaccaaacttccctaaaaaataattatgaactattattgaaattgacttactatattttcttttcacaactttatcttcttcattatttctagaaataagatatgcaattgccccaagtactgtcattccacaagagattgatcctaagacaattccgaccaaaagccttttgttcatacctgatcctgactgtgtgacaatgataactggaccaataagagataagatcaagacacgcacatcagatcaatagaaaaagatttcaagatcacatgaataccttaagttataatttatttgtagttatggaaagtaccccttgacttgacaataatagattatgatttcttttcttatactttgagaatttttcaaaataccatttttgttttgcgcaaaatccatcttagcaagatgtgttaaatctaccaacaaattatccttccaacccatcccaaacatagtttcattatacataaagaacaggataagagataatgtgaagaaaagaaaaatgtttatctataatgaattaatgatattttgcaattaacctgtcaaatacaatattttctagagacttaccatctttataaggtccaaggagagtaaaatttaggagatcatatgggccaaagatatcatttgaaggaaatgcaaatgtagcaaacgtgttcatcacacgttgaagctcacttgtatttaactcattagaattattgttgtactgagggaatacttttagaagcattagtagcctaggaccctcttgccatatgaatgaacctaagtcaagttgataaggttccactaaaagattatcagccatatatttctgaaattgaccaacatatggtcgaaaatcccatatgctaggacttctcaatcgtatcccaactcccattggtgcagcacaaaagcaaggagtaggagaatttggaacatactcataaaactttttcggacatgattggggtttgcattcgtcaagggaactactagaatttcttggaggttcgtcaagttctttctcttcttgtccacagaatcgaactatgtcttgttcatttgctcttgtacaaatgggattaccttgcagcctaatttttatacataaacatgtacaattctaattaattgcagctgacaaatatgaaaaataaatttggtttttttgttcaacaaagtgaaacagccattaatataaataaacattaatatatagtcctaagaatgcatataattaaatatgaattatgactagcttgatatagaataaatagtaattgaattcgaatgtaagaaatgtactgaagtagcttgaaaaataaaaaatagcttagttaagttgaatgcatcaaattaattgcttttgagaaaagacaaaaagtaaaaaagatgctaaggagtgtatgctcaaaagaaaaataaaattcagaagtgacaaaaggcatttaatatttgtaacaaacatattattggaccaggttctattaggaaacataagatcaaaattgatcttatcgagtgagtatcataaaatacttgtatgttatgaatactagagaatgagctccttatgtataaggaagaccctgttgggttaaaatcctcaatatgggctcatatgtatattagtgtattgctatttgaagcttggcccaaaataaagtgatcattttagtaattgtgggtcattgggtattaaagtgtcatgggctaaatgtgtagataccctaagcgatatttctaatttattgaggggctaaattagaaatacttaaaattaataacctagctatgaggttataaattggtagtggtccccaagaaacaagagccaatttctattctcatcttcccccatcaagagagaaaattagaaaacctaagtcttgttttcttggaagatcattacccaaaatcaccacaaagattatctctacaagatggattaagatcatcactatctatgaattaaggtacgcttccgccatttgaattcttctctttgaatcaacaaaggtattctttagatctatagttatacacttataattatatgtaatatgtttatctatagaattgaattttgttgttgcatattttatgagtgatatagaaactaacaagtggtatcaagagccactttgattgattctttgagaattta

SEQ ID NO: 303104 - DNA, 1706 bp, Cannabis indica
aatttaaaaatttaatacatataatataaatatatttcaaaattaatagatcaaatgtatattctattcttatatacagttttttttctatgtataatttaaaataatattaaatatttctttctacatacaattttttctttcttcgaatttgttatttgttattttatttattttaattgttgttagagacataaaacaacaatattagttatgtaatatttttttttaataaatattaaataatttaatgttaaaaataaccaatccaatctgcacttttacagattagattgtaatcaacatatgaaattcgcacttagtgtagattagatgcactataagaaaaataacgtggattggattggatgaatatccccaatatcaattttgtggtagcttgtcgttgatcctcgaattcgataggcattgagcatgtgtggtatttttcataattctgattattaatgtttgtgtgttcccattggaacaaaatgggtctttaaaaataaggtagatgagcatgtggtcattgtgcctaacaagattggattagtggtctaatgttacaaatgatataattgaatatgaggaggaaatctttgcctcggtagcaagattatagtccataagagtgttgttagctttctcatgccacgagaattttatattgtactaattggatgtcaaaaatggtttcttaaatggatacattttaaaagaggtttatgtctctcaactttcgattttcaaaatcacaagcactctaactatatttttaaattaagaaaaggatttgtatagtttaaagtaagctcgtagagcttggtatgatcgattaaacacttttctaattttaaatggtttttaaatgaataaagtagataatatactttttattaaaagaaaaggcaaatacattattatactacaaatttatgttaattatattattttttggtactactagtgatatacttttatgaagaattttctaagtgtatacataatgaatttgctatgagcatgataggagagttagaccttttcttttggactccatatcaaacaacaaaaagattaacaacttaataagtagtttggtttggtttggtttgatttgctgttaagaattctaaagtcatgatcgaaccaaagaatcataaatgcttcaagattgagtaagctactaacatcagatttatttgaccaaattttaaataatttgattcaaattaattgagatttgaaattagaattgcaaattgcataaacaatcaaattaaaatatacatattattattgaaaataggaaacgaaaataattagtgtcaaaacatataaatgatataaataattataatggaaaattcaaaaaaatacaatatttatagttaatttataatatttttagcaaatggctatttctaggagcatctctctaagagtattctctattttttaattagaaagttaaaatagagagttatttttttattttttttttaattttagttagtattttattattgggaaattatcttatatattattttttttaactttcctttttttttttttcctaaatttacggtttgggtttctaagtagtttctctggtagtttctatgcgggttgctatacgattttttgttacaatttaagttgcagcgctagttgcaatagggatttctatgtaaaatttc

SEQ ID NO: 303105 - DNA, 4445 bp, Cannabis indica
agcatgcctttaaaattttgggatgaaacatataggtcagttgtctttcttattaacagaattccctcaccccaactaaatcatctatcaccaatagagattctgtttaatgtcaaaccagcctattcatctaaaggtctttggatgcctatgttatcccaacttgagaccctataataaagtcaaattacaatataagtctcagccacgcacattcataggttatagtctttctcataaagcctacaaatgcctatccaaggaaggaagagtgtatagctctagagatgttctctttgatgaactcattttcccatatgctactgaggcagctcaaaattcaggtcaatacaacatgcctaaacatctttctgcagctattcccactgcaaattcatctcagagaaccactttacctttccctccttctggttttcatcatcctacacatactgcttctactcccgtttcacaagcacccctacccctacttctcaacctgtgctaactcagagcaatgatcctccaagtcatttacctgctgccattgctcctatcactagtgctacagttgcttcaaataactcttcacttgaacatgcaagcatcaacactacacatgcataattaaattcaaatgctctacaacttgctcacacaactacttctgttgtatttgattttgctgctgcagaaattccaattctacctgatgttgctcctactactagccatactgatgtagggacatctcaaacaactcctgttatttagcactcaatgacaactagaaaaaaatttggtgttcgaaaacccaaggtacttatggcttctctaactcatgcttctgtaaaaagttctttaaaagatgcaaaatggcttgttgttatgtctgtagagaacaatgcattgagaaaaaacaagacctatacccttgtcaatctgcctcccaacagagaacctataggctgcaaatgggtttttagagtgaaagaaaacaaagatggatcagttgacacgttaaaggctcgattagttgccaaggggtttcaccaacaagttggttttgattttcatgagactttcagcctagtgattaagcatgtaacaatccgtgttgtgctcacaatagctctatctaaaggatggactataagacaattggatgtcaataatgtattcctcaatggtgaccttaatgaggaaatttatatggtgcaaccaccagggtttgttgatcttgagcatccaaacaaagtttgcaagttacataaggctatctatggcctcaaacaagctcctcgagcttggtttgaaaagttatcatcagtcctactacaacttggattcacttcagcaaaaactgagcattccttattcaccttaatcacaccaacaagtgtcatctacattctcatctatgttgatgacatcctcataactggtagtgattcacaacaagtctcgaatctcatccaagctctcagctccaaattttccttaaaagatcttggtgtcatggattttttccttggaattcagataattcacacactagagggtatcattctgtctcaacaaaaatatatccaagatttactttgcaaagctgagggtgtcattttatactaatgcacatatataaccataaacactaattaaatcaccaataagctactaatatccatgtctaaatatgtgatcattacagatgccttcaagaaagtcatctatgcattgtaaattaatgctaaaatatagtaatgcattgtaaatttaacattatagaaatacggttagttaattaaatattagatcgatattgtgtcaaaattaattatgaaagaaaagtcccgttttaaatttcaccctaggcccctcaccagcttgagatgaccttgatctcagccatgctcaccaagtgaccatctcggccaagttcatgcaagcatcatctcagccaataagttcatgcaagcaccatcttgatagtgtatgcaagcaccatctcgaccaagtgcatgcaagaaacatctcggccaagtgcatgtaagcagcatcgcgttgacgagaatcaaccgtcaacaatgccatgcttattcttctctccattgttgtcttgaacattcactcttctttaagctttctaatcctcatcattctttctaattttaactttggctattctgattttgattttgttaacgagaatcagctaccaacaacatcattggatgaacttagggttaggagtagtgggtcggagaccatttgagcgggagctttcaagaaagtcatctatgccatttgtgtaaatgaaattctccatttgtgcgtgccatagaagaaaatcgattcggtctaatttgacagaaaggaagtgattcaaatttcaaggcataagataaagccaaaattttttgttgttgagttgtaagattaaagttagtagaagagggagtcgtcattatagaaccaaagaaaatttctagagaataatagggttgaagatcgaaatggtctaataccaaattaacacttgagaaatgagaatgtaatggtgttgattaatatgatgagatgcaccagctgaattttgtatttatagaaatagcaaatataagaaaaaggtatctacatatagagcggaaaacaagaaaagaaaagtaactaatgcaactaattaacaaaaacagttagctaacaaagtttccttattttattggttagcaaatagtattaatgtgaataatagcattgtaatattagtgaatagtacttattttaattgataactgatattattacaaaaatgtgaatgaactcaaacaatattgttcttagttatgctaaataaaatcaagtgaataagtagtactggcatactattatttatctgttcacatatggaagattctaaattgtgaggtcatggttactacgtaataaaatggaaagaaggaagaagtgttggactcattcttggttttacaaaacaaaacattgacaaagctaaagaaaattaaagtagaaagtagtagttgatgacaggccataaataatggtttaaaacgtgtaatattagaaagaatagttcatcaatttggtcttaaatctacactaatttagggtataatattatactttatcacatcaaatattccacaaaataaatatatttcacttacaaactattttatattaattatctatattaataatccaaaatagttaatttataataaaattatatcataactaatataagaattcaaaatcttaaaataatttagtaaaataaaattttattatagaataaataaaatacacacataaaatattaaaatactatatttgatcttaatatacgtgtaaccattttcaaataaacaaacaatgattatacaaaaaaaaaggtcaccaacaatatcaaccattttaagaatatcatgaaattctcaaaatacttcaaatctatatagctaatattttgatatttttcaagactaagattctcaagtaatcagtttgactattaaattattatttttttaatatttattttcatttatgttgttctttttaattttataattatatagtttttattttattaagttctataattatatttttttagtattttttattttatatttttaaatatgttagtgttttaaaataattatttttataatagattttaatttgagaattaaaatgtaagattattttttaaaatacaataaaataagggataaaatgcaaataaattttttacatttctggtgtagattgaaaatctaatactattaatcgtgtaaaatttggtgtacaacaatttaatgcataatttagtgtgcctgccagtagggtaaaattgtgtagaaattctacactaattctcttagctagttccttaatcgtggatttagatatttatttgattaggcccaaatatgatattgggattggcctattgggctacttgtctagcattgcttactgccaccttacaactaaccgagtaaaaccaatggactacggaaggccacgatgacacttttcgtttattagtttttaattttacaattatcaatcatcattcgtcacgataaataattaaatacattttaattcatcccctaaaaaaatgtgataataataataataataataataagaacactagaaacagtaataatataatttgtgtaaatcaaaatagcataatagtaagagtgtcactaatataatttactgaatgacttaatatctataatagctagcagtttatttttgtcacagtttgtagagtgtgaaacagaatcaaaatactatcttactcattacatgaaatggagtatagaaggctgtaaaattgtgatgtaatgggtgatacgtaagagattagtcagtccaaaaatgaagaagaagaagaagag

SEQ ID NO: 303106 - DNA, 1354 bp, Cannabis indica
tttcttgcatctctgaagtaaattaacatataacttgcattaaattcagaatctaaaattacacaagctatgtaaatactctcgttttatatcaaaacttatgtttgtccttagagcattcataatattcacttctcagatttcatactaggatcacaattcacatttaagatgaccagtctaaaatatgttactcaaactaatatgttactcaatcttttctgggtttaatcaatgaactgaggttctttcaaaaaaaaactaataagaaaaaatcacacaataagggaggaaaactaataatcacattaactaaattaaagatacgtcatctaacaattatcatatccctaagttaggagtttagttcatattcatatccacaataacactaaaacaaaacttaacataaaaaaataaaaggagaagaaacaaactgatggtggaatgaatctgggctgccactctactcttcccgcagtccttgactgcttttaggtctaaaattctctgtccttgcttccttactcgcaacctatttagatagattcagtcttagactttaaacaatcgagaaaagacaaattttgcctcgaattgtacagaacctcaccgcagcgagatcattaagcctaatttcgatggtccttgccagggtctcgccgcgaccataaataaatccgccgcggcgaggactgctttggccgcgaccatggataagctcgttgcggcgactgggccaactaggtcacctccattctccttaattttggtcacggccacaaataaatccgccacggcccagaatgaaccaaatgctacgttttcaattatcttgttgaagaccttgaaaattatttaagattgtatgttttaatattttcacttgtcattgaaaacacagaaaataagcgtaattttgtcctaaaaacatcacaaatgaactaaaaacaacttttattaacacccgaaagttaggctaaaaatagcatagcattacccaaaagagtaacctttgttaccttttgggtaaccccaattggtagatactaatttttgttaaatgcattagttgttccaattaagattttaaagtaattggaaaattaacaactttccaattttaaaatttttagaaaattgtaatttttattatggaaaactataattaattaaaattgaaaatggaaataactttattattttattataaatatggaaaagaatgataaaatttccttttttatcaaattatttattattggataaataataattatttttactttttatttttttttagagtatttgaactaaagactataggttcaattaaaaattaaatttttttttt

SEQ ID NO: 303107 - DNA, 1592 bp, Cannabis indica
gctaggcatgtagcggaaacaaaagtaaaagcatgagcaactaaaaacagagagaaaaagaaaggcaacctcatctgccgttctcttttctttttgtagtgtcagggcagagaatttctgcattacaacacccgcatcaaacctcagtgcgtaatttgaaggtgccaaatgaatggctctcagaagtgtctttttgcagtcttgccactgttcagcttcatagtgagtgcgagctaaatagagaagaatctgagagtctgtgttataaaaaaacttcctcaggcaattctgatactgcaagaagtggcatgacacgcaatcactaaaacgtacaaagtaaaaaacaacataaagatgcatactaaaatatgatgcaacaaactgaccatttttacagccaacgaaaaatttccctgagcaaaataaacatgtgctatatttatccagacatctggcatctgaacaaaaatgcttccacttgcagcttcttgaacctaaaataattaaagacataagtaatactgtagcagaagtaaaacttgaaatcacacatttcaaaaccagggcccttaaccatggaaaattatacacgcgagcccaaaaaaaattgtcacactagccgcttcttgaatttacatataaaaatactgtaacagaagtaaaacttaaatcatacttttccaactatgattagcaaggccctttaacatggaaaatatgcataaaaatagtttacctgggtgaaaatatcttttgaaacatcaaagtgacccttttctgcatataccactccagcaccattggcagcatacaaattggcagaatgttgagccagaacctacaagtaaataaaagttgagtgctaaatacacatgatcgtgtggtctgttcacaatgatatataatattaaaaaaaaaaatccctccaacctgaactcaaacaaaggatgttcttgatcactgaagaaataatattgaatgcatggaaagaaatgaggatagaaaatatacacgagaaagaaaataaatgctcacttaccttagtgtaaagttccttagctttttctaaatgtgtagcttccaacttaggatttcttttctcattacgaactgctgcaaagtagttccagtttccctacaaattccaaaaggcacttgtgagttgaagataaatgcttgattaactactagaatatcaaaaaggtttcatgtgtcttcacaaaggtaggtattccatgagacagtaagaaatctcagatatgtatactctggataacatacgaaccagagaaagtgtatcataggaatccttccccgctgttgcttcactagcagcgcgcaaagtctcttttgccttgacccaatcatcattcttcaattctaagtctccaagcatcgataatacatttgggcattttccattaaccttcagagcatcattgacctaacatagaagttattttgagtaatgttttagagagagagagagagagagagagagagagagagagtggtataccttagtcccaatttcagaattgaagtcgtactcttcgatagcagagtgaaaatcatcgacgataaaagtgact

SEQ ID NO: 303108 - DNA, 3471 bp, Cannabis indica
gcataaaacccaacaaatacttctctgtcaatggattctcttacttctgcaactcagtccaaaccttctgctgcagtggtctgtctaagttccacacctcctgcaatatttagtattcctaacctcaattgctctttgccagcagccccaatcagtatggcttttgctctactgctaataaaggtaaagttgtcatgtcttttgaactccctagagttgttcattctcccactaacatttctggagtgaagaggtctttcaccaagcaaaatgttcaggtgggaaactctgtcagggagatgctgaaaagggctcgggctgaagctgaggatgaagatgttgctgtagttccttccatttcaactcctggtgaacaggcgagtgttgcgatgcaacccctcccagaaaaatgagtctcataagttggaatgctctgaggcttggggagtcctcaagcattctgaaacctctccctgttagttaaacaacatcaacctcaagtgttttttgtaatggagaccaaacttagggctggctccagtgatagatttaaggttaagttgtcttttaataatgcttttgaggtgcctaagaatgacttagggggagatatttttcttttttggaaagatgttgttaacattaatgttttatctttttctagtaactatatagactgttgtaaatattgatagtaatataaattttcacctttcttattactatggttctccttatttttctcataaattagtttgttggactcttcttactcggttatgtgatgttgctcctttatccccttggataataatcggtgactttaatggttatttaggtcgtaatgataaatccacatgttctaaacctccaccttatgccatgtccaattttcaatcttttattaataagtttaatctctctcccatgccttacattggcaatcattttacttggaagcatggtaatatttttgaaaggcttgattggagtattgttaataaagcttggttggacctttttcctaaagttactcttagacatctttcctattttggttttgaccatagggctttaaaaataattgttattgattcgaagaataaaagttctcacaccaacaagtttcattttgagaattattggctttcagagcttgatttttttagcattgttcagaataattggtctttggagagccttgatgtccatagtaatatcctgtcttcctttcttaattgtcaatccaactgtgtcaataaaattaaagaatggaagagtcaaaaatccatttcaggcataccattaagaatcttcagcttctttggaaaatatctattcttcctcagcagtcaatgatgctgatcttcagcatgctgaaaaacttcaatctactctggatgctgccctatataaggaagaagtctattggaaacaacgttctagaacttcttgacttaaggctgggaaaaaataccaagtactttcataacaaagcctcttctagacgtaggactaataccattactcatatcacccttgataatagtacggttatccaagatttccatcttatttgtgacaatttttgtgcttttttacacaaatcttttctcctctcaaggctgtgactctcactcattaaactatattcttcagggggttaatcattccctttctaccagtcaatatcagctcctcatccttcctttcactcctgatgaagtcagatcagcttcgttccaatttgctggggacaaagctcctggttctgatggtctaaatgcacatttttattagaagaattggtcaattatgggcagcagtttttgttccgcggttcttgatgtattgaataatcatgctgacatctctcctgttaatgaaaccattttagtttttagtccctaagaaaaataaggcttctttcattaaagactttagaccgattaatctttgttctaccatttataaagtaatctctaaagttattgcaaacaggcttaagttggttttaagtgatctgatttccaacaatcaaagtgcatttcttagtgatcgcatcattttttataatgttcttattgcgaatgaggtcattaatgctattaacaacattaaaggaggtaaagttggttgggctgccctaaaacttgatatggataaagcatatgatagggtggaatggaattttattgaaggcatcttaaccaagtttggcttcccttctagtttgtctccctgattcttaagtgtctttcctcagtatcctttagattatctataaataatgtccgtatgccttctttttctcttactagaggaattaggcagggtgatcctctatcaccctatctttttctccttgttgctgaaggtctttctgctgccattcgtgtaaaatccagagctagtggtttcagtggcatttccatttgtagatttgcacctccaatttctcatctactttttgtggatgacagccttatgttcactattgttactcatggtaattgtagagccattcagtatatccttctcctttataataaagctactggtcaatctgtaaatttttccaaatcttccattctttttctcctactactaatactcatgataggaatttattctataattctcttggtcttgataataaacctttcgtttataaataccttggtgtcctgcaatgctttggcaggtccaagaagtcttccttccattaccttctccaaaaagcaagtgcaaaattaaatgtttggaataataattttttctctaaggctggtaaagagactctaataaaagcgtttatcgaagcaattccttattatgctatgtcttgcttaaaaattctggtttctatttgtaaagaccttgatagacttattgttcaattttggtggggttctattggtgataaggctaaaactcattggaaaaattggacttccctttgtatttctaaattttatgggggattaggtttccggtctttcgtctttcacaatcaagcccttcttgcaaaacaagcctggtggatcttcatcaatccaaattcacttctctccagaattttaaaagcgaaatattttagaaataatgactttcttactgcttctaaatgccataatccttcttactcttggagtagtatcttgtggggtagggattttctcaaacaagggctcctatgaaaaatagggaatggtaaatcgatctccacccttcatagcaactaggtccttggttttaagattctcaattttaaagacaacattcatccccctgaaaacattgtatccttcttcataaataatcttggttgttgggatcttcataagcttaatactttttctttgaggatatcatgttggaattattttatcaggatcttagatttactaacaagtatgttattaacatcctaaatatgaacttctagaacgatatgaaataaacacatat

SEQ ID NO: 303109 - DNA, 2982 bp, Cannabis indica
cacagccctcgcgtgcccagcctgcctcgcacgccaacctgtgcgcctgcctcgcgcgtctagcctgccctgcgtgcccagcttgccctacgtttgagcccccacacttgcctcgtgcatcaagcctatttgtgcccacagcctgccccgcgcgtatagcctacccttgcacgcctagcctaccccgcgctcgcatcccacacccagtctaccccgcatgcttgcctcgtgcgcccagcctgccttgtgcgccagcttgtgcgtctgcctcgcgcgccagcctgtgcaccgcatcgcgtacccaacttgccctcgcatgcccagcctgccctcgcgtgcccagcatgccccgtgtgccaacctcgcgcgctcagcgtgcccagccccatggattcgtctgctcgcgctcgtgcacgcccacactcacgtatacttatgacgttgatgtccgcagccacaacactccgcccatccacctttccttcctgagaccggtagaattactgagaagttgtcaagggggacaatgacggctaaacctacttaaataacaggaacaagttttagtttgtctgaggtacaaaatgaaaggaacttttttggtgtaagttaggatccaagacattgcaggttacttaggagacaatgtaatgatcgattaaagcgactggtcatagggtgtatgggagaaactgaaagtgtaagggcaagagggcttattataaattagactctccaatccattgaaggggaaatttttttccttttgaattttctgagtgccaaaaactatattattggaagattatttatgagataccatttttcaaagatattaaagactcttaaattatttcttcttagtactaaagtcaaggtttcattaaagtttatcaatattattaatttaaaaagtttatctatatcgttaacgagttcaacccattaacaaagttatattaaaaaataaaaaagatgagagaattaaggagagaacaaataatattaattagagagattttaaagtgccatgtcaccttgttatatctctcttttatgtatatatatagatagatatagattttgcttctctggttaaacttatttatttttttccaatgtaagagcatcttatattttaacacttttatatttattacttttttaaataaaacctcactattactagtattgcaaaaattgtattaaagtaagcaaatgttacaaataaaatcaaatttatgtgatttttacaatccaaatctgagtaaagtggaaacggtttttgaaaaatattttagtttctcattaatgtatttacaagtactaaatctacactagaggtttaagaacaatacctcttgtagaacaatcaggtcatcctcaattatttttgtataataattgagcacctaaagcacactttgtatttggtaagatatcacaccacaaatcattcagatcggtctcaatactctaggaggaaagtgggtacgtaggaaaattatgatgattattttcttatcattgtgtgtactctaatcatgagacacggtgattgtaagagagagatactactacaaaatagtctttttgtgtcgatattatgatgattattttcttatcattgtgtgtactctaataatgagacacggtgattgtaagagaaagatactactacaaaatagttttttttgtgtcgataatcatgttggccaatgcttaaatatgacgcaaaaagattacattgaaattttttttcattttggaattgacgcagatttgagttggtttaaagattacatgcagcatcatttccaaaatgatgcaacaattcaacaaaaaaaacaaagtccaggcccaataacacataaaactctactatatataataattaacctaaatttttattcagccgcaccccatcaaaatcgcactccattctctctcttctttctcttttcttgggatctttctcgcacgcccatccaagtcccaccctgtacagttgtgggctcctactgtccaagggacacagtactgctctctcacacagttcctatacggtggtggccactcgaaccaaaaccatcgtgcaacgttcacgccacaattgaactcaaagaattaatgttctctctctcaagatctctctctatctctctcattcttccgagatttgtgtctcgtaaatctaatgttttcctatttcttttgcagggactaatgctgatggcaggagctcccatggtgtttgcacaatttttcgttgacaacgacaaggatctttagttgttttcaatttattattttgtaaaaactatatatttgtgtttctgatgtgttgagggatttgaatggagctagattctatttttttattattttttagtatgtgttgatacaaaattgacaggaatataattaaaaatttaatttttactctatttctatcggtttcaaaatgatacaattttttaataccgacagttgcaaaatgaagcaaaataatatttatttctgcctacaacataaaccgagaaaaaaatttaaatgtcaatcagaaaccgatgaaaattggcatatttatagtagtgagagctctacacgccaccagaggtggctaaattttcttgtttctattaaataatgtaacgattattttaggtcaaacctataatagtatattcatagcctttattaatcacaataaataaagataaataaatcatttatttaaatttagattcaaattcaaataagtaaatgaatattaactcaattagttttattttttatttatacaattatttaatactcaatatcttatccaataaagtatcttattaactagttatttatttgataaaataatccaaacaatcctataatatataatacattgatacacgcttatgactgtatagtcatagacgtgtggtatttttataaggctaattagtaatttttcccctgaacttt

SEQ ID NO: 303110 - DNA, 2792 bp, Cannabis indica
cttggtaataaatctagatcttggtaaaataatttccaacaaaacttacctcaatctatgcaatgccttgtataatttgcaaaatggatgaggatttttagagttcacaaatccaggggctacaacatgtaaacctcatcatgcaggtcaccatttaggaaagtattgttgacatcaatttgcttgatagtccaatgtcttgacaaggcaacaataagtataattctaattgttttggcttgaaaaaaggactaaaagtctctatgtaatcaaagcagtactctttaagaaaagccgtggctacaagtctagccttatacttttcaacagatccatcagggttctcttttattcgaagcacccacttacaaccaattgcttttctcccatgaggtaatggaacaagtgtccaagttttgtttcaaactaaagttggtattttagagttgatagattgattccattttttttatcttgcagagctttagtaatggagttaggtacaaaagaagcaagaaaaacttttggctttttaatacctactttggctcgagtagtcatggcatgagtgtttacattgggtgctgtagtaggttgaggagggataggtgcaggtgcagaggtgacactattaggcgtgtccatatgatgagaaaaagttgattaaggggtggtggaatgggaagaagatgaggaagactctgatatggaaacattaggagtagaaggagtagtggaagaagaattgttggaagtagagatagtggatgcaggtgtgtttggaggatgagtgaggatgaggggaatgttagaaagtgtagaagctttgtgtgcagtgggggaaaagggagaaaggtgtgtagtggcaaaaggaaatgaaatttcattaaagagtacatctcaagagatgtatattctgcttgtgcttaagaatatagcctaggaatgtacatttaacagacctaaactgaagtttattttgattataaggtttgatgtttggaaagcatgcatagccaaacactcttagtgaagagtaatcaggcattttgttgtaaagaaccttaagaggacgcctattttgaagaacaacagttggcaacatattgataacaaatgtttttgttctcaatagcttcatcccaatatgaaagtggcatggaagcatgagcaagaaaggtaagagctatttctataagatgtttgtgtttgcgtttagcaacactattttgttcatgagttgttggacaagatacccgatgggaaatgccatgtttcagtaagtaaggctctagagattggtattcaccaccccaatctaattgaacagatttgatggtgcaattaaacttatttataagttgagttttgaagtgtataaaggtaggtagagcctcaaatttagataaaaatacctatgtgtatctagagaaggcatctataaaatgaatataatatttgtagccttggaaagaaagagtaggagaaggacctcaaatatctgtgtgaattagttgcaaggggtgagtatagatagtatcagaatgtggaaatggaaacttatggattttgcctttgcaacatgcttcacaaaaatcatgaacaattttatttaaatctaaaatgttaaaagattacactatgctctttacaactttagcagaggggtgtcccaacctgctatgtcataagattttttttgaaaaaaatggtacattgagttgcacagtgtaattatgaatagaacataaatcttgacaaggacttgaagataaagttgaagatgaatggtgagagagatgcatttgtgagggatgtatgacataaaggccttgattaagatgtccctgcagaaggacttccttggaagcctggtctttaacaaagcagtgcttaggaaagaatttaaatatgtattgttatcactagcaaattttgaaacagacatgaagttctttgtgatagtagggacatgaagaattcaattaagaagtagtgttttagaggaataaggagttgtgaatgtggccttaccaacattttgaatgggaatgcctgcaccatctcccatatgaacctgctcagagtcaaagtaaggatccttttgagtgaaattgttcacatctgtagtgcaatgagatgttgctcctaagtctagataccatgttggatcattgactgaatcaaaggtagtaatattagtagattgtcgatctatattggctgcaccaacacctgtaaactcaagattgaacctctggtagcagcgagaggcaatatgaccatatttagagcatagctaatagataggcctatttgcattatttggacttaaagatgatctagactgtggtgttgtgcctcgaccaaaacctggtggaggtgtagagtaatctggcgataaattaccatgaggattaacaacatatagattccatgttcctctactagaaaaagtaagagacggaggcgtgttacctagaaaattagagaatcatgagcttcttccacgatttggtcgatttattgcaagattaacagagtcaggatccttggtatgactgtcctttctatattcttgagagagaagaagagattcaatctcagcaactgcttaaggaatattttgagagttaacagagatgacaaaagtgtcatagtcttatgggagacctttaaagtttgcagctacatgttctttgacagaaatagcaagacctactaaaatgagacgatcaacaatcatcttgatttaaagaagataatcattaatagagagagagagagagaga

SEQ ID NO: 303111 - DNA, 1656 bp, Cannabis indica
aaataaataaaataaaaaataacagtgctggagaaaaggggcccacatgagtcttcgtttgtgtaggttctttgttattcttctcttttctcttttggttcttttgatgcaaagaagcaacgaacgacattgtgtttttcagactaatgagaactgtgaaagtttcctctggtctgattagcgaagaagctttttgtggggtccatagttgtcgatgatttgacgtggaaggatcttaatgggtccaaattatgatccaacggtgttatagaaatgggacccaattatacattctcttccacttaggacggggcatgttacatggggggatgggacccaagtattgttcctgttgattcccaaatcccgactagagtccccaccccataataatctaatcccaccaaacaaaatttgagatttgtttgacctccaaacactttgattgcgtggcatgttttggttggtcttacgtgtttggtgggtccataaaccgctaattaacggctaacttccatgaccaagaaaagaacaatatatatatatatattgttattttttatattgttgactgttgagtttgattagattagctcaattattaattgatgtttgatgtttctgtgtgcggtggtggttgtacaggtggcaataccagtggtccctacagtgagagttgtaataacatttacaaagtttgttgagcttcaaccagtggagcaattcttcacaccactttcaagccccagacacttcgtctatggtaatggcctaagccaatcggaggaagaacaaaagtcaaggagtcacaattcatcgttaccctcgtcctcggcctcgtcgtggctgaggcggaacagcagccagtcgagttcagccaccaagcagcaacggtctgctacaatggcactagatactgacccttttgctattcctagtggatatacatggacaagtgttgatgataaatctacgaaaatgaggaaatctaagtcagtccgaaagtctaagtagaaaaaaagaaaaaacaaaggtggaaaatcaatttaaggatattagaagtttgtttagattgattgatagaaatagtagggggtgtgtttgtatacatttgtagatataccatatatccgaggttcaaaagttgtttcccttggaattatatggtctaaagagatttgggttaacaaaacaacatctgaattgggtgtattaaattcctgtaattctgtggctaacaattttgttttgtttatccaagctttatttggaatatgaagtggtctctaacggtctaacctaagccatgatttgatctgctgctttactttgtttattatggaactaaaacttagtgatataatgatgatgctttaaaaagccaaaattacattagcttagcccacacgatataatcagatctgatatacatatgtgtaactcattactatccacgcaataataacgtttgaaccagtggtccataggttggcagcaccctttatttatgacattattgcagcactcatgggcgtatggcaggcttgtaattcttccctctttaggaatggttgaggctgtaatctcacgtggaaaatccttaaggtaataaataacatgtactcgataaaattaaaaaaaaaaacaaaaataaga

SEQ ID NO: 303112 - DNA, 2201 bp, Cannabis indica
cctcaagatggtagctatttttactcaccaatcttaaatcaccttatcataagtagtatcatttgtcacttatttttgtttgcggctgggagtttcatttgctcgcttattcttgttcgaggctgggagtaccattttgctcgcttgtgtctggctaactatctaataggtgtggatcgaaagcccactagggatatggctctgataccatgttgagaatcatgaggttatatctcaaaatcaattggtgatgggtggagtagctcatgtttttatatatggctcaatatttttacatttgatccatgtgagacaatattgtccaataatgacataatagttaattgtattaatggttatggacatcaatctatagcttagaagatgaaactgggcatcaaccctgtattacaagtatattattaagttgttatttatgtttttcttcaactcacagatactttatgatgcagataaaggaaatgttaaaattgaacaatcatgagttggagcactttgacaggtgatgtacatattcgaccaacttgactcaagtggtttgacccttttggaagattgtttatcagaaatttatgttttgctgcataggtcgacttttgagtcttatgattaagtttaaactttagaatctaatctttgggatctcgtaaattttataaaagaagtttattccactaaaaagttttaattattacgatgtttagttaaattcacactttcgtatcaaaaatgcattgcttatcaaggttaggacatttttaaactctctgtaacaactcttagctattggggcgttacatcttcacttccgattcaaggccttggacaatgaagtagaatatgagacgctcatggttgaatttccccttatccaggaggtaggagttaaaaatattgaagtgcatagtgattctaaactagtgatgaactaaatattgggacattatgaaacttagggtgaaaaaatgacagtttatgcggtgaaggcccaagaactgctctgatgattcaaaaggtaccaagtaagaagcataatctgcatgcaaacaaagaaacgaagaatttggaagtggtcctgattgactgcgtgtctgcgtttagcatcttggtcccaaaaatattaaacgtgattaactattccacatcttggatgagaccatgttagatatatgaacacttttatacatatatatgctaaataatatataaattgcacatataaaaaaatagatgatcgtgatacctccaactattgatcttggtagcttcgatctccaaaataaaagatgaacaaaagtagtgtaggtaaacgaacttccaaactctcgccaactctttttaatacaaattatgggatagattatatgaacacaacttttaacacaatatgcaaaataatatatagattatatatatatgttgacctcgcttttagccaacgataataagtcaattaaagtaattagaaacaattactaataattattgagcaataagaacacaaatttgttattgaggtttgaccccgtgatagtggttatagtctactctccttttacttgtattaacatgtgagaaaagaaactaaaagttcttaatcttcctcgaaagcttttacagagattttaggagctcgaattctctattaaatgaatgattttggttccctgaatagggaaatgattccactatttatatggaataattacatcaatttagtttcccaaaaaaataagaaataaatggggaaactcaagtactttcctaatttaagagaaataaaaagaaaactaggagattttctcttttattctgtcagtgtatatctatcccacaaaattagggatgtgattgcttgaacatttaagggggatatctctgaatatattctaatcggtgcatgcgagctgactgcgaggtgaattttggtcggacggtgtaacgtacattgtctggatattccaatttcttctttaaatcaattgttcacgaatgacaaatcactttgaacggtatgtcatggagcgtacagaccgtccaggtcatgaaatattctccacgtatcactcaaatggatgtcacatcactctatgcaaaaattgagataatatttgcccttaaatctatgtgggaactctttgctcgcacgtggacttattcgacgactaagttgtagggct

SEQ ID NO: 303113 - DNA, 1170 bp, Cannabis indica
aatcgtatttttttgcggtgcgggcggtttgagcggtgtgatgaacactcctacaaaaaacattactggggatcacctccaaagagatattactagttttacaaaaatgaagtgcacatttagtagtgttgtgagctgcaaaattaaatggtctaaggataaaattaaagttacaacaagagaaaaaaaggacttaatgtcgtaaacttcagtaacaattctttcaatttctcaaaaggaggcctcttttttcattgcattaatagtattggtcgagtcaccctcaaagatcacatatgggtgtctgctgcaattatagctattgtgactgcaagcaagactgcagaagcttcagatgtaagaggggatagggaaccaaccagcttggtatgaacccatctggtgttaccctgatcgtcacgcgcaatggctacaagcatagtgaacgacgaaccccaagctttaacggtaagaaaatttctaactacttaagagaatatctcaactattttgaaatatctttaatcacgttttaaattcaaatatttatttgattgaattaattaacccaaaaaaacaaacgacaagcgtttactatgtcttgtttaggacatgaatgatgctttttgtcctgataatttttgtctcaacaaatattaccttgaattgaagcaaatacaattaacctcatcatttgaagaagaaattgatttaaaactcctgagatggtgaacttcaagaataaaatatcatttccttgagtattgcaacccaaactgattcgatggaatgagtactgcaactcacacacatatatatacataatcactcacatatatacacaaaattataaaacaagatctcatgaaagaaaaaatcaaacttcagacctaactcatggtttccatattagcgcgatgctcgagctttggtggtctcggcccttggggttatgatgaggaactacgagtggtgctcaccattgatactagagagagagagagacatgagcaagaatgatgaaggagtaaagaactaggggaaagagggtggaaaaaatcgagacggacgagaaggagggtcgatgacaagggaatgaaagactctagggtctatttggcaacgagaaggagggtgtcatcgatcgaagcttagagagagagagagaga

SEQ ID NO: 303114 - DNA, 1822 bp, Cannabis indica
ctctctctctctctctctcactcacatgttatcacttgatatctcactttcaatcttacaaaaaggtaaatagtcccttcattttcaaacaacaagagtaatgaaaaattaatattaagaaacactatatatatacatagaaaaattttataatgcaccctctaaaaaggatttactgatgcacttcctatatgtttcggtatttgagagaatattttagtctaatttttttatgattatttacgttgtagttatattagacatcctacaaaattttgagaaattcagaaaattttaacacgacgaacacatgggtcaaacagtcttttacacgcgactcttttattttactataataataaaaaattaatcctaaatagtcaaaacagataaggggtgcatcaatgaacccctataaataatttattgtgtctaaatataagttcaaaatagtcattttactaatataaacataacaaaaaactaaatttttcaaaaataagtttcttactataactacaataaattctatcataattttgtgttaaaaataatatttcaaaaattgtgaaagaaacaaatgaatccaaagtattggtagtggctattggataagaatagccatagccaattctcttattcaaacacacacaacaaagtattgtgattttcaggggacaacacacatcaatgtatcaatcttcacaaaaaaattatagtctcaatgttatattatgaacaaattctaaacacatatgttctcatcctttgataaagtttaagatttggtagtaacaaaatattccaatcataaccaaaatatttttgcgcatccgagcattttgttcaacgattacgagaagaaaccgaatcgattgccctaaatctttgatggaaatattgcaatactcactaaaattacaaagaaaactatctaaataaaactattgagaaactagaatgagactaccacattggtgaacaatcttctaaaattaaaataaaactatttaaattttaatatttgttgtgcaaaatagttaattgataatataaatattaaaaatataaaataattgcctgaaacattgaggtcaaatggtatcctttcctttgggttgatgcacccgtgcatgtatcgctctccaaataatagaagaaaaaaaatataccttattgcattagcatgtttttccagtgcaatttaaggcatcatctcaataaaaaaataacgagtaatcaacttcgcaacaaatataaattaactataaataataagaaaataattgatctttttgttttttcgatagttgataatagtatgtactcataatagtttgatagcttaaatagtcgacatgtaatatactaaaaaaatttaataaagaaaaaaatagttaatttgccaatttggttgtggaagattagttagtaggacaaattataaagccaagtggtggccactaacaaaaggagaacattccatatttgtgaaagaaacaagtagtaattggattctagtgagtgaatcaatcaaaagtagtggataagaatagccttaccaattctcttattcaaaaacacacaataaagtattgtgatttttagaccaactccatcaatgtatcaatgtttaacattgttgactttaatttagctttgagctcttataaaacaaaattacaaaagaatgaaagttagtctcaataattctattaagttaattaggttttttgtgccataaattttaggctaattagcatttttgcccccagaacttttacatgtaccaaattatgtcccttgaacttttaaggtcgtt

SEQ ID NO: 303115 - DNA, 2722 bp, Cannabis indica
ctggatttaattttgaaaatagtattttacttcaatttacttttccaaatactcctaaacaaaatagagtggttgaacgaaaaaataaacacttattagaaattgctcgtgctataatattttttatgaatataccaaaatatttatggagagatgccattcttattgcatcacatctcattaatagaatgcccactaaaattttaaattatactactcctttggcatgtttgaaaaattctttcctgcatctagaattaattttgtcttgcctcaaaatttttagttgtcttaattttaccttctaaaaaaatctaagtcaaaattagatcctttttagagattaaaatactttgtaatagagtcctcctgttgtcctatctcaagtcttaaattcaactcaaatatttgaaattaattcttcatatcaaattacatttgaacaacattctcccaaagaccatttgctgtaggatagaaaatatagttaaaactaatctcctccatggaatttacaagccacactatcaccattgaattttcaacatctcaggtcacatacgtcgaatcctcctttgcttgtctcttctcccgtatcaagtatcccattttccacaaccacgcatgtacatttgtacaaactgtgaccatatgaggaagttattaccattcaacagaatggtggtgatttagacagtgagagtcaagaaatgattttggctggaatagtggttaacttgactggaatgtttgttaatttatttaaggcgtcaaacatggtgaaaaaggtaacaactttctatttactagtgggattcgagtgatccgagagggaccaccacaactcctcttcttaatacacacaacaagaaaaaaaaaaattctcttaacaattcattttcgatactaattgagaaatttcgttgttgtgtaggcctataattagaaagtggttggctcataacaagtcaaaaatgggtatataagattataagaattgatataaaaaaaaaacaaatcaaagaataaagaagaaaataatctctttccttactacaaaaggataaccacatcacgtgaaacaagagatgtgatttcagttagatgaattgttgtgaggcaaaggcaaatagtgtatctatcatgttcagtctataaatatcatatacatcatgttaaaaaattaaaatatctcggccgtgtttatctgcatccgaatcccactgaattaatacaacaaatatcatggaacatccaagctagaacatattttgtataaccaccagtgttgtgaaagcctctcaagaaagccaagtatctttcacattaggcatgctgagattaatgtgcccacttgcttggacgtgatttgtgaagataactaatcatatcacttaagaacccttctaccttttacgtagaggacgctgagaaagggaaagaaaaaaaaagttaacagattagcaaataacctttgcaaccacaaaatgtttttgagtttatgacatactctttgtccatgatcagctggtgctggttgttgaaatctgttagagttagacattctctctggattcggaatgagatctggactaccgtgcttatagaatgcctgtagcgctcgaccaacaaatgggcggactatattcacctccattgcagacaaattcttgatctgcaattacatgacaatggaaccttaggatacatatataacagaagcaatatagtgaaggaataattggaaatgaaaacattggaaaaggaattgcaaatttctctccctcgtaaacaagaagcattccaagagtaaatccacatacccagaatatcaatgcagaatgagataatcatattactgaaactatgtaggggtggatttgcatagctacttaatcaccatcattaattcacatataagctagactattcatatggaatctcattactatttacctaaataacttttattctcctacatcagcattaactttatgcaagaaagtctgaaaattgagagatttacactataatataaactagtttcccagagactaaaaagaaaagaaaaagcacagatgccgcataatttttatcaagtcttgtcactttggggatgagattgagaatggcatacatacaaaaatggtcagttcaagaatctttaaaaattatcaaacgatggatattgtgcaaaataactgaaaaaaaggctattttgtcaaacacccgaacaaaaaattataacacaaaacataacataatcagtttcaacaaactcatacccgcacagcagaagagcgggcatcctcaaaggattctaagctggtctcaactttatgaaatcttacatctctgatgtcctcaatgagagatcttacctgaaggttatgtttcgtagttaaagttaaattgataattcagaatcaaattattaaatgttagaaagagagaaagttgaaaaatgattactcaccatatatatgtcaggaatgtcatcgcgtgcactatcatcaacaacattaaaaccaacaccaatatatatatacatatatatatatataaatgtatttaaatttgatagaatcatctttcaatacttactgatcaaaaagaagccttgagatttccacataatggaaaggcaagacttggaacgcttcttgagactcccgctctgattccaaaatttgagtcaagctttctgcaaaaaaaaaaaaaa

SEQ ID NO: 303116 - DNA, 1625 bp, Cannabis indica
tttctctagcccatcccatctattctaccctagtgtgttggctattttatttatggacagagttgagagttttgccattaacctaatttttatgtgattcaaagtgaaatgacaagaaaaaactctccttttctcttcattattttaaaaaataacagcaataattctctctcaaatttcgttccattggtgaattgagtaccaaaccacaatattcaaggtgcaatttagatctttgtagaagattgtgaagaattgtcgcttatcaagtttaaggaagcaattcaggttcatcacttggcaatagcctgctacagaacgggaatcgaaggttagagtgattaaacaaaagaagtcattagtttcccctacaaccaatgtaagaattatattccttttatgtgtttaattatcgttttatgaatttcatattttaggatgttagattataatgtatataatcaaacatacttgttagtaaattaagattttggtaaaataagttccaacacatcaatgggatatatctttgctccaataatatttctctcgattggatgtggagagaattttaacattgtctttaagttattttcctagtggagacactcttatttggcatcattatgacacggggatttatacagttaaaactgattatcatttggaaacattacttgaagctgatgttgaatcttctccctccacttcgccagcctcatggtggaattatttctagtcgctacagttgccacaaaaggtaaagatttttgcctggcaagtagttcacgatgctctctcagtcgccacctctttgttcatccggaaagtaattactgattccacttgctccctctatatttgggcttgggaatctataggacatgccttgtttgactgtaaatatgcacttttctgcttggtgatattcaggtttagtgtttgattggaattattcccattcaatgaaaaaaagatgattacctaatgcacctttcaaatatttacaataaagctggcatggaattaataatatgcactttgtggtcaatacagtttgaacgaaacaaaataacatgaggggggttgcgaaaccaacaagggtatttttttctcgctatgaattacttgtagaattttcattcagctcaagccaaatatcaatcggatgctagtgttgcaccacgacttcctccaccaacccaagcacctataccgtggcatcctcctactccaggtgagttaaaattgaatgtcgatgcgaccttagatataaatagaaacatcattggtgttggagctattattcaagattcacatggtagtgtggttgctcttatttcaaagcccattatagataactttgcatcacatgagatggaagcaaaagctaatttctatagcctgaattgggtttacaaatgcagcaaccaattgcacaagttgaaactgatgctttgatgggttcgaatgtgaaaaaccgtgttcttgcaaaatgtcagttatataagaaaatataaaactgtaagcgtttgcagaagcagaaagtaattatgctacagcaaaacgaaacaggcagaatataaaatattagcagaaaaataaataacttgacacaagagatt

SEQ ID NO: 303117 - DNA, 3286 bp, Cannabis indica
aaacttttatatgtattaactcatgccccctaaactttcatccatattagaatttttttactaaaattagataaaaattcttaaatttaacaatcttaatagttcaggatgaatttttaacggccaaaaaagttcagggcatgatttagtacatgtaaaaattttgggaaaaaaataactaattagcctattaaaaaatatgaatatttcgtaatactcaaaaatgataaaaagtttcaaaaatacatatttatagttttttaatatttttcaagaataaaacaaattgtttttttttaattttttttcatattttcactacatgaaagcaagcaatactaatgtgatacaagtaaaaaatatagagcaatttgcggcgaaatatttttatgttttaatttttatatacttaaccttctttattttatttttttgtgacaaaacttccttatgtttattttcttttgaaaaattgacacgcaaattaaatatcaattggatgaccactatatatacatgtgcatatgtaacagtaaaactttaaagttaatacagtaataattcaattggtatttaacggtgatattttactgaaaccttaaatttgcaaaagaaaataaacttaaaagaattttgccacaaaataaaaaataaaaagaataaatgtataaaaattaaaacataaaatttactgcaaatttctcacaaacatataagaataagcaataggaaacttcacacaatcgcattgtatatagacatcgtacataaataatggtagtgcttgacttagaggattactactgtgaaatcataacataacattattctatacttaatcataagtatccaattgtatctaataggaaattgaaaatttaaacaaatataagaacaagttactaatttataactattttataggtttgatattctcatatatatacgaaacgaaattattgaaaaataaaaactaagacaagaccaaactgctgtattattttctttgcaccctctaactcattcttccttgcggccaagcaatttaatttctatgacaccatcgcctgagaacattacagtattacaccaccatggtaactagtttttcttcttattaaatggtaactcgtaaccaaaactgttttggtaataaaacttttagaaaatctaagagttgatttttagggaaagttttgcaataaaattgttcaaacagaaaacattataccaaacaatttatgcaaaagttaaagttggttgcaataaaattgtttaaactgaaaacattatacaacaatttattcagctattttttcccacacgacaattcaagtttgattgttaaataaactgtaattatacgcccatgctctgctaaatatgaaaacaataataatatagtaattagtgaccaatttttctgagttttggagtcgtaattcattactagtttgctaaaatatagaaagcatgccctatttcctaaatattagttttttttttttcatttttcaaagtgataattggttacttatagttatatgcaaaatctaaatcacactaagtaaagtaactagtattcaatttttcagcttttcgagtagtaattggtattattgtgacaaattttgaaagtactatcaagttactagtaacccttttagattttccagttttcattgctaaacaattactagtatgctaataaaactaacaaaaaatgcaaagcatgtgcccaaaaagtcaattattttttattttttgggtaagaaaaaagtgtttaaacccaaaatggcgtgtaaatgagatacggtgatagttgaacatctttcattattagtcagcctagtgtaataagaagaataaaaaaagaaaaaataggaggattcgaattagaagttgagagaatgttgaggagaaaatgtcaaatttattggttttgagtaagtctgagttcataatttcataagcgcatgaatgttgtccacgattgatctctaaaaatgttatattttattcattgtgattatgttacaactctaagttaaaaaaataattttgagagaaatctgagtttgttaggtgcaacaaaaatctaaaataagatgatattttggatttgattattcaaatttgagattttgatttttcttttttcttttatctcttaatactatgattagttataattagttaggttaagtgagtggaaatctcggttagattgttagctcgttagctattttttcaaactaaatcatctcatttttttctgcctaattaaaaggcttgtatattcaaaacaaattaagtaatgagatacatttctttttactttctctttttctcatatggtatcgctcacagcttccatggcaagtccttccacacgctatcaaaatggtgttctcccattcacaagtgagacttcttcatcgaaaatcaatctcaatatcacttccgctccaattctaacacatctcccaatctaacagcatatgtagagacaacctctctcgctcgaatgttcaagtctccttttttgcggatgctgattggggaagctggacacaagacgctccattttaggctattgtatcttcgttggcaacttccttgtatcatggaaataaaaaaataaaaaataaaaaaaaaaaaagttagtgtctcgatctgttactgaagctgaatattgtgtcaagacaaacgcaacctctgagctcacttgggtcattgctctccttaaagattttggcatctctcacaacacacctactatgttgtactgtgacaatactattgttatccacatcagtaaaaatcctaactactacaaacgcaccaaacacgtcgagatcagctgccatttcatttaggagaaggttcaacaaggctcactcaagcttcttcatgttccatcacaacataacttagcagatatagttacaaaagcattacttcctattcccttctccaatattgtatccaaaatgggtgtaatcaacattaacactttatcttgaaggggttattagaattagttatggttaatttttcaactcaattatgtgagtggacatttcgccttgttttatctttgctggtttatcttgaggggattattagaattagttatgttttatattgaattatcaaaataatattccttctccaactccattattattgttacaaattaacaacctcagcttgatttgaaaatatgaaattaacaagatatataaaccagaaaaataaaaaccagcaagaaattaataacaga

SEQ ID NO: 303118 - DNA, 2552 bp, Cannabis indica
atcgactcttacataataataatctattagaggtctattacattgacgggttgacgggttgttagagttagttataagttagttgtttaggttgttctgacaattgttccaccgatcttgattgtaaccaactccttgagagttagttctgtataaatactctgttttcatcatcaataatacagttttgatattcaatatattctaatatggtatcatacgtttaaagctttcttctccatctctctcgacaaggtttctacgttgtttcactatggtctagacacgggctactagttctagaaattctggcaaaactcctccgccgcatacctgttctttgattccagatgcctcttcgattaacacaccgatcatccctccattttccaatacccctagagaacatcagcattacaatcttctccctattccttgacctgcgcatgaagatagcttaagtttgtattttctcaacttcagtgaccaccctagcctgatcttggtcactcctcctctatctgatcacaacttccaaccatggtgtcgtgattttgaactttctgttggtgccaagaacaagactgtctttctcaaaggcactcttcctcctccacctgaaaccgatccccttcacaaccattggatttgctgcaatcaaatggtcatgtcatggatccttcattctgtgacctctgagattaaaaggagtattatgttcttggacacagctgctgaaatgtggagcaagcttcattcaagatttgattaaggcaatggacctcagatctttgagcttcatgaaaccttgatcaccctgcgtcaaggcgaagatgagattcaagaactcagaccaagaatcccctgcacttgtgctgcatctactgataaattggcttttttttaaaccaagaacaagttttacaatttctcacaggattaaatgaatctttttttcttgttcgagctcaaatattactcattgaaccttttccttctctgtccaaagtgttctccatgatcattcatgaagaacaacaaaggatactcaaaaaccccccatattccccttattgcttctgtccaagaacctaatccatctgttgctcttgtccaaaatccctcggcatgagcatgtaattataattatggacgcaataaaaaaatgagaccttactattcaaattatcataaaccatgacatttgaaagataaatgttacttctcaattggttttcctcctggttatgggaataaacgttcatcagataaagaagaaactgctcataatgccactgtctctactgatcaattgttggctaatctaaccaaacatgaagatattcaagcactatctcacagccaaaagttgcaacatgcatccctgccattagaggtctattacattgactagttgttagagttagctataagttagttgcttaggttgtcatgacagttgttccaccagtcttgattgtaaccaactcctcgagagttacttcagtataaagactctgttttcatcatcaataatacaattttgatattcaatatattctaatgataagtttatctgttacttttttattaacttggtaatattgcatataattaagatgatcgagtgactttattatcaataaatggtcattgttctaaaagaaaatataaataataataacaagaaatgagttccctcgtaattttttttgactatgctttaattaaagatattctagattttattttcaacatcgtccagagtttaagttcattaatacagagaatagtttatttttcgttttgttaagatcaatttcgcaaaagtaacgcaaatgtttgatcaataatttttatacagtgataagaacatatatatgattatttctcgtgatatgattcattgttcttttttttttttggttttttgagatatacagttaactgtttttaaacttttgatatcgtgataaggttgtcagttactttttaattaactggataatattgcatataattaaaatgatcgagtgactttattaacaatgaatggtcattgataaaaaaaaatgatctactatgaatatcttcaaaatattttcaacgttgtccaataataagggacacaatgatcatatatataaagtaactatgatttaaccttttattttattttttttatatatatttcaattacactcataacatttatttaattatcaaaattttaatttaatttaataaccaccttaacattgcataattattatcatttctaattaaaatctgtgtgatgtactatttaatttaactcataatatattatactatagggtgttgattagtatatattagttatagtgtcttagagcactttcattagctccattttatatttcaattttccttaaacttttatatttgattatacattattggacaatattatcccacatggatcaaatgtaaaaatattgagccatatataagaacatgggctactccacttttcactaattggttttgagatggaaccccatgattttcaa

SEQ ID NO: 303119 - DNA, 2746 bp, Cannabis indica
aaatattaatttgtaaatttattgattaaatagaatttataatgatcttaattgatatgacatatttctttaaacataattttaataaaatacatgattataatttaagaattttgaggggaattacatgcatagtcctccacgcatagaatacgtagatagaacaaccactcctaagtacgccttgtctttttatattttaaaataaatttgatttgcttatagtaaataataatgtatcattattgcgagtgtgaaaacagagtaagagtcaagagaggagtgttgatgaagccttaaattaaaaggaaaagagaaagagaaagagaaaatacaggcaaaaataaagaaagaaaaaacaaaactcttccacatgaaaaaaagagatcaaattttggtcctgttcttaatatcgattctatatacaacaactatcaaaggaatttcatcaaacactacaaataatattaataactgcgtgcgatcatgtggctctggccgccacggccgaggccgacgactttcactgccgtacccattcggattctcagccggttgtgaaatccagctcagatgcaacaccaccggaaaagccttcgtgggcgaatttccggttcgatcaattgggtcagacagcataaaaatcaacatcgagagaaaatgtaatcgtcccctgaatacaagcgtgggtcagctcttcggcacaaactacgccccaacgtctcgaaacgctatcctcttggagaactgtacagaaccaggtgcggcctgtgagattccgacgattcttgtccagacccacttctcgtccctgagctgtagcggcgacgatagctccaactccagcagcatcagttgttactcggagagtaacaccagcaccttcattaatttccacacacttagaaagaaaaagtgtgagtttctgttgtcgtccatatcggcggcttcacttaatagctcggaatcgccggtttctttggagatacaggtggcagagcttggttggtggatggaaggagcgtgccagtgtgatccgaatgccaattgttcaaagcttttcacgccaaatggcagacccggatatcgttgcaattgcaaacaaggtttccaaggagacgggttccaggccggttcaggctgccataaaggtcagatttaatttattttaattaataataataataataataataataattaaatttacaggccaacctttcttgaataatatatattggttgtttcattaataacccttttttccttcattatttatttttcacgttaaattcccggcgattaagttaaggttgtcttttatgctttgaattagtttaattttaaccaaaatcaagtattactgactttttaattagtacttatctcatattttaatcgcaaccttatcatcttttgtgctagtaatagacgccactaataccaagccttaataatagagttttggtaaatagtaattgcactaaaaaatagaataagccaataataaatgaccaacaagttcgaccacgctccaatgattttcagttggtttattttattatgcgcattaattcataaggttgagtttttgtagattttagagtcaaatgtccccaccgtgttaatacataattaaaagcaccttcatttcaaaaagaaaaagaaagaaagcatctattgttaaatcttcagagaaagaaaaaaagtatttatttatacattttgtctaactacagcaatgaaatataataatattactcaactaaacactaattaaccagtttgaggaaaaataaacatatttaatacattcttatccttgttgtaataatatagcttaagaattttaagttcgaacacatatacttcctttttcccactcctcccttattactgaactgataaagtttagagaagtagaaaatgtgtacaagtaataagcattaaaatagaaagaaaggaatgcaagtatcatagggattgttaaaagtaggaatgctaattacaacttcctagtcaactttcacgttcgaaattacatgccgaatatttttttttaatttttttaattagcgatattcgtcatggttacagtatcatccctgtaaatttttgaaaaaattctgaatagtttacagtaccgaaaatagagttcctgatattccagtttgccacgcgcattcaaaaaacttcaaatatattttcgacatcgtaaactatttgaaaattttcaaaattttacaagatgatgttgtaagcataacaaacactcccgtgaaaaaaaattgaaaaaaaatattccgacatatatttttggacatagaagttgagtaagagattgtaacaggaagttgacgatagtactcctctaaaaatagtgcatgaatattgtaggagtgctctgagggtttctttagggttgaaatgggcccatgcagggcccaaaacattgagcaaatgtctcttgaagacatcatagaacttaaaatgcgggaccagtacttcatcattttggagaagtcaaactaattattttggcccaacttgtccattgccaagaataaaataataaaagtagtgagttttctttcttgtttttttagatgattttaattgacctttcttcttgcttccggcttcttttgtcgagcatgcataagatttaaaaggagaatagcctaaccaatacaagaatgatagggttaattttcttccagcactagctaggttataaaaatatata

SEQ ID NO: 303120 - DNA, 746 bp, Cannabis indica
acataagtctatttaacacttactaacacacacactaccatttattacaaagacacaacaaactaaacacaattacataatatagacactaatttctccacaattcagcttaaaattcacgcttaaagatataaaaaataactctaaatcttagagttatcaagaagcctatgttcaacatacattctcctgtagcattttcttcgaggaagagtattgttatggacatgctcgaccataacatgttaaaaacctagtaatcaataacagttatttctatcattttaagtagaggcagttatatctactttcctcctgttgaaaaaatatatatgaaacgtaaagaatgcctatgtttcataaccgttaactagataagataaaaaataactgcgatcatactcctataaataacagtaacaacaatgtacaaaagacagccaaatttccaacttagagaaatttatgccaaattgtatcttcattcataaaattttagaaataacattgacccgtggagtatgtagagttaatttaaaaaccacacaaaaagtctttctctttcttttattatccagcatttaaattcattgcatttattgtcaatagacattcaaagtattaattattaagtctcaattaatactaacgaattttggagttaacacttatttaattggttttgggcctaaagcctaaggcccaaaagaaaaataagtaggtgtggctgttgggttttgtgccct

SEQ ID NO: 303121 - DNA, 2798 bp, Cannabis indica
acctagaggagatcggtagacgtggctgcgatggagctcgatctggttttttagagaggaaaggggaaatagctgagaagaaatgtgtgtgagagagagagaattgaatcgttatctaaaggaaaatttcggttctcttttaattactttcaaaaacatcggtggcgacattgtcgtcattaatgtccacaaaaaaaaaaatctttctacaacagtttgatttgcaaaatcagaaaatattagtgaccattgtcataatttaaaaaaaaaaaaaaaaaaaaaaactttttttttaatggccgacttattgttgtggtcattaatactccaaacgactttatttagtcactgtaccttcaattcttgtagagtgatgtcatcaatttggttttatgcatggttaattagttaatgttgtatgtatgaagatgactattgataatacagtaaaagttaaagaaattataagaataagtgtgagcttagctatatttatctctcactaaatacaaactgacaataatagctatggctagcacacgtaggtacccatttcatcttaattacatcattattctgaattatatatataatagagtagctagtatcaccaaatgaagcacaaataaactctttcaaggtacgtacacatatgaacattatgaattaattaattaattaaattaatagaggtgatgaggaaggcgaggtttgatgagcaactcaagtggagtgactttgacattgacaagtccattaatgctttcggtcatatcaattggaagatttgagggtgtcgtgatatcaaaggcatggacgaaagcagccactgctaaatgaaccatttgtagtgcaaaaaccgtaccaggacaagctcttctaccgctcccaaatgggatcaactcaaaatgctgacccttcatctccacatctttcttggtactcaaaaacctctctggcttaaactctaacggctcagcccacgcatttggatcggtttgaatcttccacagattggcgatcaaacgagtccccttactcacgtggtaaccaccaacggtgcagtcctctgtgaagcacgtggaccagccagcggtgctacggggtataaacgcagcgtttctttcactatagcttgtaagtaggtgagatgagcgatatcagtgtcgtttacaactctatccttgcccacgtggctgtcaatttcttcctgagccttcctcaacacgtggcggttgttcattagtagagatattgcccataccactgttcctgtagtggtgtcgctaccacctgcgatcaaattcttcaaaatccaacaaacaaatgtatacattaatcagtttaagttaattaatttcaaattcaataaagatctctctaattaatttatatataccatacacgtggccttgttaattgtatcggcatcatagccaccaagatctgtaccatgaagcaaggaaagcatgacatccatgaaatcagcttggtcgtttttttgatcactcttatgatcctctagccattcccttaatatatcatctatttccttggctgttttcttcatggacttttcatagccacctaaatcaaaccacttgagatatggaatgacatcaccaggaacaatagccccaaaaatattgaaaaaattctctattgccctttgtatcttattattacccgaagtgtatcgcctcccaacaaccattctaagaagaacattgagagtcaagtcccaaacccactgcttcaattccaccaaaactacatcgttttggcttttggccgcccagtgtttgtgtagctctttcaagaaagttgctatttcgaaatggcgaatatgtttaagtaggtcaagcctgcgattggaaagcaactccacagtagctatcttgcgaatctcacgccagaaagctccgtgaggtgcgaaaacaaacatggcgtagtcatagccgatgtgctcggccactagcagacttggacgcgaggatatcttcaagtcgtttgtggtgaaacactctttggctatctccgaattactcaccaccaaaccttgttgggagcccagcctgatcctgaacactggtccgtatcggtcagccatggctcccaatgttatgtgggttggtgttggtcccctcagcatgtgaagatgaccaaatataggccaacctccgcaagcttcgggcgctatgttttcacctctctccactttctaactctccaaaaataataccaaataaacactactatgccacagatgatagcatttggcgataagtgtattgaacaatccataattgcgttattgattagaattcattaattttttccagatatatagatcatatatatagggagcaagatttaagttgaggggaagatattttttttgtaagtgagagggggtctttttcttttatattgtatatcatgttaaaaatttgattatcatgttaaaaatttgatgcaaatttgttatttttttttttttattgacatgaatttatattttaatattaaatgtagtataaagtaaaaataataacaataaaaatatattcataaagtaaaatgtatatactaaagtaaacatgattttattgggattagaatcatgatctccattatataaatatatatggaagaggtttcaatagttacatttttattgtaaccatcatggttacattttttttaagccattggattactattaaatggttgtgattattttggaaattaaataaaaataaataataaataacttgtaaacctgaaagtaacctaat

SEQ ID NO: 303122 - DNA, 2516 bp, Cannabis indica
ctttagtttatttttactaaaattatctcatatatatatatatattatttttttaattttcttttttacaaatttggatttgggttgcttcaattaatttctttagtagtttatatgagtttatgtggattttagttgcaatttagattgttctattaattattatagtgattttatgtagaattaagtaaaaatataagaaaaattattttaaagtgtaaaaataaaaagattatttttttttcaaacaaaattaattaaagatttgaataaagttatactcgaggacgaaatgactatgttgagaaaacgacaaaggaagagcgggaaagaaaatattttgtgttaatatacgaatagaaaaaaaaaacagttcctttttattaatttaattcatttatttattttttatatttagcaattatggcgtcaaagaaaaaggaacatgcatgattaatagtattgtaggtccaacacagctttcacaactccttttaattaccatgatcataatattaattatatattacaattctatgtacatgtgtgtatatataacagtttcttactatttctgccgacggaattgggaaaagaaattgcttttttgatcaatacatacaataaattgacctagctaatatattattatgtgattatcgatctctatgtaaaaccacttaataatgctcccatatatatctgtcattgagtagtaaaccaacttttcaataacctaggaattatgaatatttgaattcaagatttgaaaattttctacgtatatccaacgtcgtaattttgagattcaactaggttaataatcttgacaatatgtacacgatctgatggtcaatctatgtattgtatatatataattagtactaattatttcttaacctgtaagacaaatttcaaagaaattttactaagcgtcttaatcaaggatcaagaagaaaaacgattattatttgtattaataaattaagaagagcatgatcagacagggaatgacccatctttcaataaatgtcctaaaaaccaatctaagaagaatttttaaagcgttgatataaatatatcaaacggtgtgggaccaaatatgactaaaagaatatatatatttatatacgtatatatttgttttgattaaacatgggtcaatttgtccatgtcaaccccactaacgtgaagaatatatcgtttgatttttcatcaagtccaaagccaatgattggtaatttgtcgttctttagaattttacagcctctgcactttggtggaaacgcattagaaaagcctagcctcctcttatttagtggaaaatatgcatcaaaaattttcaactccatcgatgaatcgcgtttattaagtcaatattgttcagacatatctaattgatgacgaaaattaatatatgggaactatcctaatttagaaaaatatactaagtgatctaacaaagtttagaaccttgctgcgctatatagcaaatgaattagttaataataatagctaggtactaattaggatgatatactgtcaaagctataggacggcaccaaaaaacaaagcaagagctttaatattcaatataatcattttatccatgaagcgcgtgcatgctattatttctacaggataacttataataaaactggtgttatgaggaaacacactcacacacaacaattaataaaattagtaattaaagtatactgcttcgctatatttaaaaatattgataaagttctcttgataaatccagcatgtcagtcaggcaagccctatatacatgtaccgcatattcaaatgaatatataaaaaacaactaaatgcctttaaaagaaaaactatattaaatgtaaaagataaaaaaagcattgctatatatagccagaaaccatcattatttagtttttgtaggggaagaaaaaaagataattaaaaacaataattcctatatcgttcataatcgttcacatgaaacattatgcagatcccattattatatataaagtatatattattataaattataatatatacatgataagttaaagttttacactttttattcttttttgctaaacaaattaaagttttacacttgaagggtacgtttttgtgaaaacccacctaccgagagcaattaaacacacataagtagtcctaaatctcccttcgatttttcatccacaaatttaaacttttggatttgattggtttaaaataaataaagtgagaagctagaaaacataaaagataatgggcggctcctgtggccttcatatgtttactccgtcgtcggggttgactacatataatataagatatatattttttcaagttatacataacccacattatattagattcacataacacatggaccattgcacttacatattgcattattattatctaaaagaattagactcaaaacttctaggtcagcacgtgttcacacccacactcgataactctcttctctctctctctctcttgtatatatt

SEQ ID NO: 303123 - DNA, 3669 bp, Cannabis indica
caagtgtgggtgtcaaaactcgaaatccacgaggaactcaagctcataagatttcagactctaaggagtctttgagagaagttttagttgttcaaaagtgaaaagtaaagaaatgaaaagaagaatagaggctatacatatagttctagaaattttcccctaaaaaacttaatggggagttaatgccacaaaaataggcatgcatgggaaagagaaggccaagagttgtaacatgggaaaatgtgcagtcattacataatttcccatattgatcgacgtaaaattaagaactgccataaagtcatgtaagtcgaagagtctaatacatggccatgcatacctgcatggcaaagggagctacaatactagacaaagtgtaaagtccctacccgaccagacgttcgaacatggacttgggagacaaatggtatcccaaattttattcacctgacgtggcccctcaacgtggcaaaaagaaaaaatacattgaagacaagtcagcactaacctactaggattagtgtcgtgcatcctctcaacctttgagattccatggctacatggtatacacaagcaaaataataggtacaactctgccagtaaggccctggccggacctatagctagccgaccaggagtgacagcttccaagcactgggcagccttcaacagggctgatcgaccaagtgcacaaaaatactccagtacttgtgtttttctcacaagctttccaacttgccttcaccattcgtacgactttagaacatttcaaattgcccacaaagataaggactctctgtaaacaaataacaaccctattccttagggattagttaatatttactttgtatttcaaatatacgttgtaacttccctattttctagggatatctctatctatagcttgtaagctctactactatataaagagcaagatgcacactcagaacctatgatgaaagtacgctcaaaagcactatagtaataagtcctttctcttttctcatacttgtcacctgccaaacacattgtaagactgaagatagcctagctagaaattacaaggttttagcttgtaatttacttggtattatctcaaaagtgaatataactaaaagggggagtaggtcattacctaaacaaaagggataaaaatctctataaatcttggtgtctttacatttattaccattccacacatggcagtcacaagcaagatctaatcctaatcagactcagtgtcacttggctaaatccacagttagcaaaggtgttttgtcaattcaaaggaaaagaagattcaagttcagtacttgttattactctgcgacaaaaatgaacaagggttagagtactgaacagaaggagacatttatttcgttgccattatgtaagtaatcctaaactttaaggttttatttgatcattttatgattttttatattttaggatattagattattatgtgataattaaacatacatgttagtaaattaagatcatagtaaaataagtttcaacactaaccctaaatcttggtcaaccctttctcttcgaaggagtgggtctgctgcgactttgttgtccccaagagcatcgcgtgtatgccttggcggatgatctttctttaaggtctcaaccactttggctttcctcttatcatttatcgcatttgaggttccagctctaggatgattaaactttcttgtggcctctggaacttcagcattcacatgcacttaagttttggtccttgggaagtgcatctaaagtgaggcctcctgctcccatcaagctttgcataaggaggagggtctcttgtatctgatgagtagcctcctagtctcggaccacctaccttagtcgaattagctctgaatccttagtgtagttggtatactctccttcttcatcataataaccatccttcatgtcctccttgtagtattcctagttgtcttattctgtgggatacttgttgatgggatctttcgactggttaacattacgaggagagtcgttacctactgttgacacctctccgtcccctatgaaagttgcctgagcatctgtcggtgaggaggggggatgcacaacatcaacaataggttcttcgccattgttttgtggaacttgaccagccgacaaagctctagtatttcttgtggataccatttttgtagatgatacaaatgataaaagcgttcttcagctcccaaagaaagcaccaaaatatttactgagttttttagaaactgaattaaatgaagattgagctaagtaaaatgtgtttaatgaataaataaggtgagatttttacgtgaattgggtgctaacgagccttagtccacgagtcaatattattaagcttatagctatggtgtacttactgttctttatatgatttttcagctccaaattaaaattctaaccctttacatgaaggtttttcgccatatttataggcaaggagctgggttcccgggatgaaccagacctatttacagttgttatcatgtttaaatctactaatggggtaaatacaataaaatactaacattttgggcccggtaggtgaagcccagcgaataaataactatcgtcgcttacaaagggacacattggatagtggcatttctacgggtatcgaaggcctcgtgaaagagaatgttagtacaaacatacatttgggcaaaaaggtaccttcatttttgctatgagcctctctgtgctctgatgtaggggacaagctgcctattttctcggaaatttatcagaagtgtgccacgtgggtcagtttctgcgacccttatcattgatggatgcccatcacatttcgtatccaaaaacctactgcaagtattttcccaaagttacactggatcttctaaaagaagtcattgattcattcgacttcaggtctccgagtctactggtagatgacatttctactagctctagcttcaagtctctgaattcatcctcggatgaagcgaaccatttggaggcccactaagtggccctactctcatattgggccttgaagtggcccatttattaactatcctgaagcacaaataacaccatcgaaaaactattgtgaaggtgtcaaaaaatggtctttcttgaccttggtacactacacatcgcaagaacatcgagaacgtatgaaaaactatcgaaaattaactgaagaacgagaacatgctaaaaaaccaaaaaaccaaatcttgcgattttaaagaaaaacaaaacaaaataaaagtaaaataaataacaatcacacaaatctacttgaaatgaactatatacttgtaaaattgtttaaaaaaatacttattcattatttcacgtggtggctcagtggtgatttttggagttttggttgaagagagataattaattggggggcggggttggttttaaaggggtaaaataagtataaaggaaaaacttaaagtataggttggtataatattatttaggggtatttttttattaaagggttttctttaatggatggatattgaaatttcccattcattttaaccaatgtttgaagaagaaatgaggtaatgtttgatttggtgtaataaaaatataatggtaatggtaatagtaatgtaatggaataggaatcgtaatggtaattaattacaatgtttggtt

SEQ ID NO: 303124 - DNA, 6349 bp, Cannabis indica
taagacagagtgctgctgtcccaagaatcacagtcgaatctcaagactagattcaccaaaccaaagatcaacattctccattctgaccaaaatactgtctttaattgatcaaaatgaaatatcgataacaaagtccatgtttgtttaatttacaagtacttcaaacataatcacatttgacaacaatcataaatagatgattcatagccatgatatatatatatatatatatatatatatattattaaatatactcacttgagctatcttttacgtaaagcaaattcacaagtttactgcatcgaaccaaacaaagcatatgcagtttctcaaggctccttcttcaaccaaacacaagtttgagttagctcaaacccacgcccctttcccacctgagatcctcagagaactcagaaaacgcagcacgaggatcaccattggaaattgaaaagtagtactctgcagttccatcatcaacttgcatgctcctcttcaaggaatgaataacccttttcttggcttgctcagacctcgtcctctgcaacaaagatggagtatttacactcgggccggtaccatcaagatacaccacagccacttccctcttcgcataagtatcaagctccacatagcaagtttgcccaacaagaatttggggatcacttatgggaatcaacaatctctctctagagtatatcccatgttcactcatcatattgtttagtctcttaatatccataacctaattatatcaaaacaattcagtaagatcattcgaatttgggggaaaaagattttaaatttaaatttggatactttctcctaccctttctcggaaaacaaacagggttaatagagtaatagtaggtacctgaacagaatacttaacagcgagactagctacactatcgccacgaacaatccgatgagaaattgcgaactttccaagattattatccctccaaaagattccagagacgggctctccgatcacatgtgccaatttccagggggctttgaaagctctggcgaggatttccttatcggaggcgacggagttccaaaatctgcagacgcagctggagcgagctagatcgggaatgggaagcttgtggaagatgacccggagcaaatcgtggctggttaaggctgagaagtgagagttcatgggagaaatgatatcggaggagggggaagatgggtgtagggtttgggtagtagcaatggtggagttcaggtgcgtgaggatatcatcctcttcttcgtcgcaacagcaacccattgttgggattaggagagagaatattcagagtattttcattttgtcgtcaattgcgatatttaagcgtcgaatctatttggtggcaactggtcttgttttgtaattttgtaacttttcgcggttaagttgtcggtttttacattattttgattattctttccataagaatttgggtctttcacaatcaagctatattagcggttcaattcttactttatcaatttaaatttataaagttaaatattatcatcatactattattttattttttttaatgctttagatttgtgatttaactctttaatatatacttttagcacaaattaaacttaagatgaatatttttactcatatgattctatgttaaataagattaaaattcctatatacaaccaaaatattagtactcttagatcaaattttatttctatatttagtgtttttatattgtccttttgttatatcaagaaagactgtaaatttaagtaatattttaattattatagtgttgtcttattctttgtttttttttttttctaatttctggattaattgtttgcctaaatgactaattaatactattatatagtttatttaattttgtttttattaatttaacttatttggttctttattgctactttatttgagttgtagctatattggatatatttgcagttagaagattccctaattatatttggcgtagtatgatttaggaccgctctctacttaaaaaaggtatccaagaaaagagtaggaacatgagactctataatggtatttaaagattcttggttacctcgcccatatttatttttaccttcatccagtagtactacacatctaaatttattggtcaaagatttaacatatgatatgaggggtgtgaaatttacctattatttgataattatttaatgttgcagatcagtcatgtattggttctatacctcttggtaagtttccaaaactgattcatggctttagcattttacgtcaaatggttcttattctgttaaaagtggttatgttgtggcctctacttctaatttgtctaaactatctccttctaaagatatgttttcagcttagtggtagaggttttgggggatgcatttacctaaaaagattttaaactttgttaggcgaggtttccaggagatacttcctactaatgttggtttgaagaaaatgaatattattaaccattccaactgtccagtatgtggttacaattctgataccaatagccatgctttttttatgtaatgtgtttaagaaggtgtgaaaattattaaagttcaatctcttaaacaatctttctataaaagtttcttttcaacaaataaccatttaaacatcagaagggttactatagtcagaatttgaagtatttcttgggcagcttggtatatttggggagaacaaaaccaagtagtacatggccaccaattttgttctcctgaatttatagtttcatgtattcaactccttttttatgaattcagcaatatctaacataccgctagtttaaaagagaagactaactgtacatcaacgtcaaaatagattactccaccacttggtacctttaaattaaatgtagatgcatccttggatgataaaagtaccacaattggaattggagcagttattcaaaactcacaaggactaataaaggcatgcatttcgaaatttttatttggtaatggcatccttaattaatgttttactgatttaggtcatttttttatgatactttttcatgcttccatataagggatatgaggttatgtggctattaaggacgaagggaggtttcccttctgtctaagatagactcaacatttattttattattaatattctattataatattattttattattattgttagttttatattttgattttgtagggaatttcacagttatttaaactgaaactgtagctcttatagtggcattggattggtcgcttagaattggtctccctcttcattctaatgaatctgattgcctagctatgatctctgtttttgccaagagatcatatctttgtaatgatcttagttctcttttagatgttatttctagtctacaatctaatttttttaaggcatccctaattcatgttcgtcggccagcgaataaggctgctcatgaattagttgtgcacgcacttagagtgaatggtgagctagtttcgatggaagatttatcttcttttcttttcgatgtactcagtgctgattttttttcaatgatattttgttcattgttcgaaaatatatatatatatatatatattgaacaaatttcattaaaaaaactacaagtacaaagctttcaaggtttataaagaaggtaaagaaccattctaaattaactcatcatctaattctaggccaaatttagctaaatcatgagcaattgtgttacatttcctgttaacatacaaaatcctaagcccaagactaaaagataatgagttcttaatacttgtcagtaaatcatccaacacagtactagaccatttacaagccagcaacttgttaacaataattttacaattagtttcaataatgttgatagggagcttaaccatatgagtccattgcacaacaaggagaatggctttggtttctacaatgactggacaaatattacccacaactggttcgataaccctagccttaattttattagaactatacaacacaactatacccaaactatgttttttccttctactatctaaagcagcagcaatgttgatcttcaagcaatcatttagaataggtgccagacttgttacttcccaatcgtcaaagttcgatgtcgaactctcaccaaaaaaaaaaatggcaaagaagcacagatccttggctggtcctcatagagtaattgtagaaagtctttgtctactcaatgcttaccacccccgaaagtcactaatgttcatctacataagaggtaaagtgagttatgaactaggcatggtcatgagattctctaagaaaaatatctttgatgttccaagcagtctaatttaaggattgagggaaggaaactttgtcttgatgataagaatcctagtttaaagatgctcaagaacacgggatgaacctagaatcccccagaatcactaagaaaagttttttcaagatttttttaacaaaaaacatagaaatttgcaagaatttaaagattatgctccgtacgcataaattcagaagcagattttaagtctaaatctctagaaataaagaaaagcctagtttgtaaaccaatattttgcaaaaagcaattctaaagtaaaatgaagaaattaaagataatgcataaagatttgaaacttactcactgttggagattgtcgggtagaaattcgagtcaaaatctatagatgatcacgaaatcctagaagctttgaaaaaaacttaaagatttgagaaaaatcaatttttttgctttgaagtttctgagtttcaaaacggttaaaagagaaaaatgaaatccgaaaaccctttttataggctactgaagggatattctcataattccacatttcaaactttgggtttctcccctccccaaaaggtataatcagtacgcacatgggagtacaaccatcagcacgcgacccaagacacattttttaaggtgaagcattaaattctgagatatgaagagatagctctattcacctacctcatagtccgagcacatgtcaccttatttacctagtgtgtgggtcgaacaagtccatataataacaaaaagtttccatacagacttgcggggtaaatgttatcttaaattatgcacagggtgatgtggcatccttttgggtgacacatagagaacattttaagacctggatgggtggcaccatcctcgaaagtcgtccatagtgaatcattccttagaaacagtttgtttgaagataagctggaattccggacaaggtaaagggcaccatccgactagcgtcgatcttatagcaagctcgcatacactagccaaggtaaatgcgctaaaatctttagagatactttccgtatttaattaattgaatccctattttaatgggaattccacacgttattgttgtaaaataagaaaaattcatagtttccattattaattctcatttatttggaaaatctaattgatgtatttcttccctgtaaatagtgaagccatttcattattcagggatcaaaattcgatgatttaaaaaagcttttatgctgtaaaattataagcttttaagagagatcaaaaactcatttgcttctcttctcataagttatacaagtaaaataggagtaggctattgcaactatcacgaggttgaacttctataaacctttgtgttcttattgcttaatttcatttaattattatatataattcttatcgctttaattgactcagcatcattggttaaaagcaaggtcaacatttatatatcaatgttgatgaagtatctaataggtctaacttatgtcttgggttatgaagctttagaaatacattcaaatttgtcctatgaggaacaactaattcagaatcttgaaaggaaggacaaggtcctgtgaaacaagaccataacttaggtcaagatacttagaggtatatcaaggttgaggaagctgttggaaattattttaccaggatcttagatctactcacaagtatgttgattatcaccctaaatatgaacttctaaaacgattatgaaataaacacataaaaagtattagaaaccttacattgggtgcagcggaataatatgactccttccgtttagatctctaacccttgtatcctttctgtcgcagagtattatcaagatctgagcctggatctctttctctccttctttagtgttgaagctccttcttgctgaaagtcttttttcacgatcttcctcactatgattgaggtatcacttgttgtgtgtgggcactactctaatcattaagtgtttcgaaaactcaaggaagaagagagagagaaggctcaggcttttctgaatgaaaagtgtgaaagtt

SEQ ID NO: 303125 - DNA, 1314 bp, Cannabis indica
tttggaacgccgtattagatcgtattgtattgtattgtattatattgaattgtattttatacaatatttttatgtaaaactatatatgaggtattaacttttatggacacctaaatatataatattttagtataaattaaagtttaacatagtattatataaaaatatgatatataatccaattcaatataatacaatacaatacaatacgacctaatacggcattccaaacgagcccttaatttattatattatttgcgtgtgacatatttaaatatcgtgtcacaaatttatttatttataattgtatatctcatgttttgtttatagttaattataatgggattataatatactatttaaatgtttctccttcttattaaaattaaattgtctaattatatttaattttattaatgtaatgattgttcatgtattaaattatatctctgaattttaatatttacttaaatcatactttctaaactttaatatatattaaattgcgactcttaaattttatttatctatgtcaagttttttaaaataaaattaaacaaaaattcttaaatttaataattttaatagttaaagagaacttttagcgtcctaaaatgttcaaaaagataattaaatacatgtcaaaatttaaattaattttacgattatgttaatccaaaaaattacaagagatgcaagtataggaattctcatagtgtgtatctaataatataataagctaaattattctattggtattaatatgtattgttgacatgtattttttcgtaggtatattggtgttatgagatgctctgcacctgtacacaattatatatagaaatcatgaacacgtgtacacatcgaagtgagtgcactcttggatctcattcaacttatttatttatatataaatatatataatttctatagaagaggcctaaagagtaattttggttgatttttatttgtgtggcatttaagagaatcttttaatttatttttttatggtacatgtattataattatttaaaattatttataaatttttaaaaaaatttaaataatttattgtaccgaaaataaagtttaaataattacttaccattcgtataagaaaaattatcgcatgagtaacaaaaaaatataaattttaaaatttacagttaatattaaataactacaatacatgcgataaaataattctttttcttaagtatcgaaataaatagaagaactatattatatgggtgtgtttgtcaacacttttttaatcagttttttgtttttaaaagtagaaaagtgaaaatattt

SEQ ID NO: 303126 - DNA, 1785 bp, Cannabis indica
gggatttggaaaaattgtagtttaagaaagacgatggcccgattgggtccgatgggttcgatgggtctgatggtgtctgatgggggtccgatgcttgcgagttgggaaaaaaattgggttggggttcgatgggtgggtccgatggttggggtccgatggggcccgatggagtccgataggtccgatggggggtccgatagggcccgatgggggggtctgatgcatatgcgggttgggaaaaacggagctgagttatgagagtggtattttgggttttagataaaagtgtcatatattttttagtttgaaaagtattggtttaagaataaaatattaaaattttttaagtatagaaaatcaaatttcgttgaaaggaaaagataagtagatgaatttgatctcccttcaaatatctctccaaaagtaggagattgaagataagacaaaaataaaattatataattatccatcaaataaattaaaaatatattttataattgggtaaatattattttgaaaataaaatttaggctaattaggatttttgtccactgaattttgacatgtaccaaatcatgcccctaaacttttaagatcgttaaaaatgtcccttgaactattgactttatatctaccaaatcatgcccctcgaactttgacatgtactaatattttctctaatattagcaggacgccatgacctgtaattttgttgcccataatgtggctaaataggcgtttacccacaagagatttggtgttataatatattatgtaatgaccgtgaggtctaactgttttatttattaaagtacggatttcttaaaaaaataaaataaaatcaaaatattaaaattcagacagaaaatataataaaataatcaaagtgctatggagttcagaatcacaagaactacatgttccccaaaaaaatgaaagattagtttcttctggtacccaaaaacaaggacccattctatataatacattcacgtaatgtaatccttaaataaacaataatattagtatataatatagttcactaattaattttgttccaattcaaaaaaaaaaaacaatggctaaagtaacacatatctgcaaacgaacagtagtaagcacaaagccagtcccacctggaaaataccacccactatcagttctagaccgtgtgatggagaaaaacaacctcagaatggtgttctattacccatccatgagatcataccacaatcatgatgacgtggatgacgatgaagatgaggatgaggatgaggatgacgacgatgatgatgatgggagggtggtagatatagagaggttgagagagtctttggctgaaatgttgactagttttgcagcggtgagtggaaggttgcaaagaaatgaggagaatggggagtggatgataaagtgtaatgatgcaggagtaagaatggtggaggctagagcccaagggagtgtggaaaattggttgagctgtgtggatagggatggagagcttaacctcgtttattgggaggagttgtatcataacccttatttttggtccactttctatgtccaggtacctaaatatcttataaaaaataactctataatacgctcccaaactgtgtttcaaagtctttacccacctttatttgttttggctaaagttttttagttccatttttttcatgaatatatatgttatatagatatggataaaaactattttgaatctttgtgttttgtcaaaagttactgattggaccctctcttttgttaaatgataaaatggac

SEQ ID NO: 303127 - DNA, 901 bp, Cannabis indica
acatattatcatgagttcaacaaataattttactacatacttttgcataaaaaacagacaactaaaaaatctcaatatgtcggatgcaaaatagtttattgataatttcataccatgaagagtagctgcttgggttcttaagtattcctcctctgatgtcatatgtacaagttgagtggaatttagcagtgtgtggtcaagatcaagaaccaaacacagctttttatggcgtattaagttcttcatgtctgtgcttcgtaatcgaacaatttcatcattttgaagccttaatccctgcccataaagaatcatatatttttaccacaaaactttgtagcccaccaactgacactattgcaatattcttttagcttgaaaactcttaatttcacaaactagatatcccaaggaaagaataccttgtgaatgtaaccaaatgtcacaccagactcctcctctaacctctgaccacaaagaatacacatatttccaaaagaaccaggatgtgtgcatgcatctatctttgctgaatcctctggggaaagtaacacaggtttgtgcaataaaaaaatttaaaactaataaataaattctatgtgaacagttaattatacacaaagagttattgcccatatatatacgacgcagaataaaattatcatgagtgccacaaatgataaaacacgtgcaatgaatcaaagactggcatggaaaaagaaaattacctattttttgttcttcagattcctgcaaagtcgacccacaaatttccttaatgatttctaatttctccaccttcctccgtttcaccctaaagtttagtttaaaaaataaaataagaaggcgccacacgtgtgtcgacgatcatatgcagtagataatatgtatttaggagcacaaa

SEQ ID NO: 303128 - DNA, 1511 bp, Cannabis indica
aaatttgaggaattcaaattatgagaaaagatgaaggaatccacttttaaataattctttgagagacaatcattaaacttttcgggtgcattgttccatcagttgttgatgcacaagataaaatctgagaaggacgatgcagtccacttttattttgtaaagaatagatgcagattcaatcgaacagagttttctttggtgactggccgttgaacttgttacccaaacttactaagagaaaaatggaagaaaaagaaaatttaaaccgattgattgtggagtacttcaatggtgatccatccatgagcttcagccaactacggagagtttttgagagttgcatagaagctgatgatgtgtacaagttggggatagccttatttgctatgagcgttctctctggtaaagaggagaagactattattctgccttttatgattaaaatggcttataactttgagttcttttacgagtactggtggggtaagattgcattcaacaaactgataaaaacttgcaataaatactttatagatgtgaagaatcatatgaacaagaagattgaaaaaagaacttctcagaaggaggcgaagtactcggcatgcagttatgctgtagcgttgcactattgggcatatgagtccgtattggagctaggcaatgaatttgcaatcataagttgtatcgctttcccataatggtcaactgggagaataaggagaatgtgactctcgacaatgaagaagttataagattgtttgctagaaatgtaacttttttacgctttgcatttggtcatatttatttcattaatctcaatctaataatatttttattttgtagttgacagtgtactttgtgttatgtctctgacctaatgaataagagtttttgagaaccatcaccgggggtgaagtgccattatttgtggattcggaggaattggtgttgggtgataatgtgcaacctacttaggatgctttgcgcaaccatgcccaaaattttgcctcaacgttggaagagcgggaggaggcagccaaatctttagagatgatacaccatctccaccgtctccaccatcagaggaacatcatatttccccatctgcatttattcccagcacctcagaaatttaggaactagtatactctgtcattttggcaaggttagagtgttgagaggtaacaaatttctttgaagcaaggccaaactgcttatgtattttataccttatgtagtgtcacattttggattatgtacaattatgtgtatataaaaaaaaacattgccaatacattacttttcctagtatccaaattaattagaaaaacaaatttgttatatcaaattcaatgtgaacattatcaaagatcataagcatttctccccttcaaaataagaagtcttaagttcaaattgttagagtatatatatagtgtatataatatagcatatacaatgatatgaaatgcggaaaataaactttaatcatatcaataatatatgcaatg

SEQ ID NO: 303129 - DNA, 1418 bp, Cannabis indica
atatatatttatatatatcataacatgagcatgcaccacatatccaaaatcgttacttccataggttgagcgaacagaaaaaaaaaaagtaaaaaagaaatggaggaaaaagagtgagtacgttgaacgcaagggttcaataaagagggagaaagcttggaagggttggagtaaaaagtaggggttggaaccaaagcaaggtagttgaatcaaagtgaagaagtatggtttcgtccccacggacgcctgaatggaggaaatgaagtcgtcgtcgaacgagagagggagagagagtggacggagagagcgaggaacagtgccttggtcacgaagaagggtacgaggcatggttggaacgggagaggacatttgaaatgagatctaaacgagattggagttatataatatgccccatttagactacggttatactttagcttacgattcttaatcgtcatcaatttcaagatatgtgatggtgtacaatattggtaatacataacgacatttataaaccattgacaattccaaactatagctcatgattttacactcacttaactttattagctagcgacggtattctaaaaaaaaattttgaagatcgacagaaatattatattttgtagtagtgagcgatatttttaatttattgaaaggctaagttaaaaatacttaaaattaataacctagttataaggttatatattggtagtgaactttaaaaaataagaattactttattctcatctttctccatcaaaaatgaactagaaaaattttaaattttatttttttgaaagattattcctcaaattaccacaaaaaatatatttattaaatgatgtaatatcattactatttataaattaaggtatatgtaatatgcttgtttataaaattaaattttattattgtaatcatacaccactaattccatagacatagtgaagtaactacttttttcagttaggagcgggtgtttagtgttgtctgtatgggtcaaaggagccgctcaaactgactatttttattttattttatttaagttgagaaatgagaatggacctatttttaaacaaaccatcaatatactcacatatatagaaatatagaattattaatatgggactaatactattcgcttttaatatttgtgggatatgacacattttagaatatccctaaaatacccctatttacattaccgcctcccctctctcttcttctctctttgttataaacaaaaaaaataaaaaaaaaaataaagtgggcatcgggccatacatcgggcccatcgggccaatcatctgaccatcgagccctacattgggcccatcgggccaatcatataaatgaaaaaaataaaaaaaaaaataaagtgggcatctgactatcgggccgaccatcgggcccta

SEQ ID NO: 303130 - DNA, 5310 bp, Cannabis indica
ggactaatcggcatcaacttcaaattttttgggatttttgccgcaattatccctattctaaataaatagttttgtaacatttatatatgccaaataaattattttgagttgccaaatacatgtttggaataatagtgggaccacacaaaataaaaggcgaataattgaggttcttcaaattgtatagatattgaagcaatatcaagttgcttagaaaataggttatcgattaatctagtcatgtcatctagttttttgcatattagaattacagagatgacatgcttcttcacactcttaattagtactcttaaactaaaataagtgaaatttgatattaaattatatcatagcatgcaatatattacctcacaatttagcattactaattacataattaacacttcaaaatatcattgtggaattatgtgaaacacttaataagcataactaacacattttagtgatgaacttgtagcctaagtaagttggtttatatatatatagttacatgcatattaatatataaatgtaaagccagtctttggctcaaataaataaaatattaggaatattttaccaggatctaaatttacaaacaagtatgttgaattaacatcttaaatatgaatatatgtaatacgataaaattaaacacataagagtttagaaaaccttacattggttgcagcaaaataatatgactacttccgctcaaatctctaacccttgttcctttctttcgtagagtataatcaagatctaagcttggatcgatctcttcttctccttcgggtttggttactaccgtcttccgcactatgattgagtacttaacttgctatgtgtgggcatggcactctatcactatgggtgaatttggtgaagaacaatgaagaaagctttaaaatcactatagaaggtctctcatctactagttgtctgacagagttattagaaactagatttggcaggttgaaagtgaatagttcagttggatgagctgagagcatcatgttccttttatagtatttcaactagggtttaggtttgaattatatgaattaaaaaagaataaaatattaggcaaaaattacacatagtggtcggccactaaatggccttctactagttacaattttaccactttatttcaaccacttattcttctttcaataataccatattttctaatttcaaacttataaataccaaaagtatttataattataattaattatcaaataaaattatcatttatattatttattaattagaatacaaagtccatgatgagtgaaaattcataaataagccccttgctgagtgaaaattcataaataagacatagtctaattttagaattataattgattaattaaaaccaattaactggattttcaagcagtattatctcaactagtgaggagaccatgggcctatacaaccgagcttctaataagtagatctagaatttaccaagtaaattcccttagtaatttctccttgcgccactatagattctaaattgaactctagtttattcatcacatagtgtgtggtgaaagccttgaagcaaggagaaagtgactcaaagatcatagacactttagtcttgtcgtcaatgatagccccatgtgtctttgcctcatgcattagctcaatcatgtgcaatacatgagatcgtacatggacacccttcttcatcttacaattcatgtagcaacgagtagcattatggctctgataccatcttaatttgataagtgcaaaagaagattaaaagaatgagaattctcttattgaattaatgtatgaattactatagatatgctttttacactagcagctactaacaagttataaaataactaaaactgtaaccgaaaattaaaccaactacaagtagactaagtacaacactatctttctaaatctcactaactcctaatctgttaagtcaaatttaatattaactaaaaactttttacacgtacaaaaaaattaagaagatacaacatttacaagtggtaataattaacggagcaaaagactatacgataaaaattagttaaaatttaggatagaaacattattatctaatgttaattaagttcatcaccaatacaataatgatagttctctaattacgaaaatgactagttgaatttgagatgtaacaaactaaccgcaatgaaagtgacataatgggagatcaatattagtagttgtcaaatgtgttttgtttggtttgttgcgtatatggatgtggattaggtgtgttttatataatatttttgttgcaatgatcacatacatgagagttggtattgatgcatgcacttgtcttgaacacacacacaaatatatatggggtgtctcggtgtttagaggttttgcgactattttaagagtcaaaccttgtacgcccaaaaacatgcagtccatcaaattaaacatcctttttggcacgatcaccgttgtctcactctttgactctatcaaataaaagatttggcaccaatattaagtaaggacttatttcaatttctcctttatttatttattatttattatcttacatctttgcatgccatatttttatttatcctattttaacttttgagttgtcgtgataaagtgtaacaaactaaatttattgcaaatacatagggaaaggaaagagaaaagaataactgcatatgatgagaaaagtgcatattgtatgccttattgcattcattactgattgagtgaacagtgtgtatgtctatgaactatgaagctttgtctatttcgtgtaaaattgagctgagattagtaggtaaaggactgtttgtaattaaataaaatgaaaagctcaccttgggatattatttgttaaacgacatgattttatgtatctacgacactaggtttggggaccttccgcaactatccaagacgatttcaaacaagtccgcctcagactcctcgtcgaaatccagagccctgttcggattcccagctgaattcggggtacctcgaggggtataccgattaagccactgcgagtcgattcttcccattgagaagagctctttactgtcttcgtagcctatggccgccgcaggcgaattcactactgagccaacgaaacatgggttgggtgtccgttgggcattggctggcccatatttaaacacactttgtccaaagttgactagaaccaaaacgtcaccgtttgcagctatagtcggatataggggacccccaaactcttctgatttgcaatgaattaggtggattacctcggaatcaacggtgaagtatactttcttctgtctaggatcaaacccacatccgattaccttgtctactcttccccattcagctttgtctgattcaaacgccagttttatacctgtatttttttttaaagaaaatgcccactgttacttatgttgggatatttttaatgttggtggaccaaaagactaattaatttcattgtacaagtttcaacatttcctttttccttattaatctccatatgttaatattgatttagtaaaagtctattggcttggtccacaaacttagaaaccatagactaggattgagtttttttttttttctcaatattataacacagcattcaaagctaagaaatttccacaagaaaaaagggaaagggtattaatgaattaccgtcaacgtagacagaaccgtcagagttgaagccaatgcttccagaatagcttccggggagtttcaaaggaagagaaccaccggcggtgagaccaacagacaacataacggcgtcactacctactattccgtcatctctaacaccgccaagcttcaagtcctcaatcttgttaactctgttagtactgctaacatggagtagcgattccgaagttgctttattagcgttagaattttcttgtatgagtttggtcttctcaccttctttgactttttcaatggactggatttcatcatcactgcttcgacaaagtaagatggtgatctcgaaataagcctcttgagggaaagaggagttccccaaaggaggacccggtaaaggcagagctgttctgatcacagaggcagccgccatagatggattgcttgcgttcaaataagattttgtcatcccaggatttagccttattttctgcataaaatcggccgattcctgacatatttcccaactcgtttcgggctctacttctcttttgagatcaccaaccgtgcacaaccccaatatccttgatctagtcgaaggagaagacatataacctgtgaaagcgaatcttgaccatccattttcaacggcatcagtgatcaaagatggataatcagaccaactaaacagaggtttcccagaaatccctcgtcgaaacatgtaataatttccagttcttttgctatcaaattcaaattgatgatgaaaatcctcttgttggtgtagcctgacgatcccagattgaagtctatctgttctggttgttaaatcaagactttccttgttacttttatggaaataccttcgccataatatcaagatgaaaagggttaagaaaataccaaagcaaactatgcccacaataacatgtgtcctttcaatcatctctgcctctccaacgggccttctcctctccccctctctattcaaatacaataaattctaataatcaattcttccttcctagttctgataaattaaaagagaggaagacattttcgaattgtggtgactgataagaaatagaatatgaacaagagggaagaactagaaggcaggcgtggagtggactaagactagttcaagaaaggaaggaaaggagtggtgcagacatataatgaatatgaatacgaacaaaaagtgggaatgaatgtttgagttgagaccaaaaacagctgagggatgacacctgcttctcatatatgtcataaaacgtttctttacaaagacttttaattttttgaaaaaaaatgtatatatttttatattggaagataatatatattatttatatagtgacattctagtttctacgcttgaatattttaatagtacgaacccactatcttgtcattaaaaaaacgcggtgctttgatcaaaattgttcttagtgtgcggagagagatatgcttacattacttaggacattgataatttgatataatataatagtgaaatttgagttacatgcttagatgtaaagtatcactctagttaatccactcattaaacatattaatacaaatatattattatttcatcaaaacctaaaaatactcctttcatttcaacttctt

SEQ ID NO: 303131 - DNA, 2358 bp, Cannabis indica
atatatactatttcttattgtaaattcataccattagtgtaatggttcacttgtaaactagttatagtttattatttaatcataaaatatagttatgtggtttactagtaaatatttacagaaaatttacaattgtggatggaagcactagaaatttatgatgagaggctgagtgtggactgttttcctcaaaagttggcagtgctccattgtctttgggtaatttgttctaagttgtctcggttgtaacagtcaatagtctcgtgatccgtaaaaaaaaataccgagtaagttgtgcaatcccaaatagcctgagaaaggtcaagtatgatgattctgaaactatataagtatgagactatatagttgaaaagagcttaagtgtattgattcatacaacctatatcaacaaggtacatcttgttttctggtagcccatcgcgaaaaaacttcacaattaagcgggaatgttacatcggtggcttgggggaagcaggggaattgaggctattttgttatctttcattctttgtttggtttatttattccagtttgttttattttgtcagttttttgcaccttatatccttagtagctgtagctttaatctttaggctatatttgtggggtttttccatttagcacctttcgtgtgagttttaagttttttactcttttgctctcagtatgattggccgacagttagtcgtttctaagtgagatttgtacagttttatttccacttgactttgttgatcgtcatgaaattttaccgttttctaaaaaaaaaaaagtggatgctctaatttatctcatacctatataattttagaatcatcacatgaccttctttagggtacaaatacaaataataatagtactaataagagtatgatattttaaatggtattagctattaatatctttcttctataattgtcttatttgctttgatagtaatataaaatcaaattcctttgttgtttaaaaataacttagaaagcaagtcattttgtcaaaaatcaaaatacccaaattaaagaaatacgtattaattgcataatcttatggagtgttattttaactaaagttctttatacttttcaaaaagattctactgaacaaaattattgtgattgatattctaatatgtagaatttatgttgtaaggcattgatactaatagattaggagtagatgactatgaaatgaaatgagtctcttgtattccatttttctttgttttcagatcattgatacaaaaccatagtttgttgggcctagtggtatattatgagaaaattacaaattttataggtatatatagatatttgcattttgtttaagaactgtaaatatgtgttcttttggggacatctaataaaattggaacaatacaaaaaaccacgaacatgataccaaaaaagaactgtaaatataagttatattttttagcttaacataatcctgtaaaaaccacgaacatgataccaaaaaaaactgtaaatatgggttatattttttagcttaacataatctgtaaaaactacgaacatgataccaaaacagaaaaagataaatgagttagaattaaacatgacatgatattataatttagcacgatatagatttaagtacgttaagatacgaaaaattcgaatgcacaacataaaagcatgaataaactaacataatagcataatatgttaattaagaccttttttttcttttattgacatacgttaattaagacttgtaacatagttgcgtgtaaaatattgttggtaaacatataaaagtaactaaaatcataatttagattaagtgaaggagggtttaaatgttagaaaattaataatccctagatacaaatttgaaaacggctaattaatcaaagatcagattgttcaatctgaaaacatgaaagaacaaaaaaaaaaacttgtatagatcggattgattgcttaatgaaaatgaaattaaatattatataataaaggatagtaatatattcacaatcaattttagatcataaacaatagaattaaaaaatcacaaaattaattttacaatttagtcatataaaccttaaaattttaaacttgaaattctcgtaaattactcaataattttatgcaaataatacatcaataaaaacataattttatgaggaatataactcctaagctttatgattgaaaaacgaaaaatttaacatataataattaggaaattaatatgtaattatagataattaacatatatttatcaatagttagacaaattataggtcctaaatcatatacaataaacaatctgataccacatgttaaaaaattaataatcccaagatacaaa

SEQ ID NO: 303132 - DNA, 1503 bp, Cannabis indica
actatcccaatcggtttaggttataaatttttttaggttttgttatttttatagtagtaactagttatctccatattactaaagaatatctcgatatatatagtggcaaccaattaccaccatattactacaaatataaaaactaatatatagaggcatcggttaccagtgcatcactaaaacaaatagtatttgagaaataccattttcttataatggtaaccggttacaccaaaccatgatcaaatgaaacaagctactcgtagatgaagaaagaaaatagaaaaaaaaaaaaaaaaacttgaaagaaggaaaaaacgaatgcaatttaaaaatactatgatgaatgacactagattattaaatactacaattaggtatgagagaaacatttcagagttttttttttaaaaaaaaataaataaaaactttatagtatatctaattaaataattaaaaatgatgaaaataccttcacaaaaaatatcacaaccaatttctacagttttatttaaatgatagaatggtatacttaaaaaatattatacatatattaatatataaatgtatatatatatttatatgaaataggaattactcataagaaaaaaaaaactagccatatttttcaatattttctgaaaactttcatattagtgtaatttcatctattacgaacgaacgttaaaaatggcattaatataaatgtaaaattgactaataataaatgattaacacatgaataaggatacaaattaagaagttacagtacaataagttgagtcttaatataataggtaacaatattactcagttaattagtattttaattcattaccgatcagtacatataagatcagattatatatatatatataaaagagctctacccaagcctttcacgagctcatatatacatatatatagagagagactcatagattatacacaattggccaagaagagcctctaattattaaccatttattaactataacatggttatatcatgaaaaaaaaactatatatatggttataatggttgggatgttttgcataaagtttttggtttggttgtcttttgaagtttgagtccttatgtggtaacattatttatcctataggccttaaaaatgagtaacaactaacaggtcttaatttgtgtaagccctattgggtaagtcctacgtagaagggcatcaattgacatgacaaccatcttaaaaattatatgtataagctccaacttattctttggtggtctttgcgattcctattaagccgaagaagctgcgatagaatgtatacatctttttcttttcttgacatagtgattaaaaccactaaagaaatttaagatattgacattcatcattgaatcggaatagctcgttgagtagccgaagaatttgctttgtcaaatcatgagctacagaagtaagggaaaactacaagagataaaaactctcccgaaaaatttagacaataaaactataacgtcct

SEQ ID NO: 303133 - DNA, 5196 bp, Cannabis indica
tatgtttaagtcacaagtaatttttttgttgtgactgaaagtcaaatttaatcacaaaaagtttatgttgtgactgagaggttatcactaaaagtagttgttttttttgtagtgatgggatattcccaacggttaataataagatggtcaactatgaaagttgttggaataagtaagcggagattttttgcagtacgtgaattaaataataatttttagaatttcagtggcagaataaatagggaaggacccatgtggttcattgttgtactccttctcgggtggaccacacctacaaaaggttagtgacctcaaaattaattttggaagatggaattctgatcttgtggaggagtgtttcgacgtaggggaggctactgccattttgtctatcctgtgatccttgtttaatagttaggataggcttatttggcatttctctgttaagagtggatattggagcactgtgtccaagttggggtggggccaagcttcgggctcctgtggttcttctcggtggtggaaaattttttggaagttgaatctcctgcctaagataaaaaattttgtgtggaaggcatgcctgaatttcatcccggcttatgccaacttatctcgccatggtatgaaggtttcgacaatatgtccaatttgctcttagaataacgagactactattcatgctctgtggctcttcccttctcttaagtctattcgtttggattggttgttgagtggccttgactccttgaaggacgcttcttgctattatgagttgttactggggtgtatggatatcctggaaagacaggaacttgagcagtttataactcttggctggcgtatttggaataggagaaatacctttctgcatgatcacaagctcctctctgataacatggttagtgcgtgggccatggattatttatggaaatatcaagatgctaataatgttgagccaacttctatgggttcggtatctggcaatgcaagtaatcgactggcctcaactgagactgatctggttcttggtgagttcaatctttttgtgaatgctgggatgtgtgttgagaatcaaaaaatagggctgggggctttggtttctaatcgtatggggcatgtcctattctcgagtgcggctccttacgcgggattgttggaacctcacattgccgaagccaaagctctgctctatcagctttcttgctgcatgcagatggggtatacggtgattactgccttctctgattgtcagcggatagttcttgatgtcaataacaaggtcccttgtctcaatgagtttggtattattcttaatgatattaatcatattaagaattctttcagtagcatatctatgtcgcgttgtaatcggtcaaaaaattatgttgctcattctttagcaaaacgatcattagatttagatgaggctcgggtgtggtggtcaggcttgcttgctgatttagctgtttaaattgtctatcttttgtatcccgatcttttggcttgatgcctttaatagaaattcttagtttcaaaaaaaaaaaaagaaaaataaggcttagaactcaatggacaaataattaaaagtaccaaccaataatacagttatttcctaaaggaaaataatatgaggatttatttatgagtttatgcaatatggaaggctaagcataggaagttctggcataaagaggttcccaccactaagcacgttgttatatttgtaaaaaaaaatgtatatataataacttaaatattgctttgtatagatacaggaaagattggaaaaataaaaagatgagagttggtatgaaaatctttgtacagaaaagtaagtgagaagatgagagattgttgatgtacatggttctcacttttgaaataatacaaattgttaattttaacaaaaaaattatttcaaattcaaatatataatataaatataaatataatactcacacaacaattattatagtgagatagtagtaatgatgatttactgttatctgttatatattagatactttggatactttgaatgttttaattttttttttctaatttacttctatttagttataacatctcaaatataatataattttcttggtactaaatttatttttagataaatatgtaagcttataggtacttgatggtatccaaatatgaggtagcatatatttctatacaaaatttgatatcgaaattctgtattttataattataaatttattatttaatcaatcaattaattaaatacaaaataataaagttagaataacctacaacaagaaaattcacttatgttgatgagtttttgtgtcagcaaaaggtacctaaaactcgtcagcaaccttttgccattggggaactagtcggcaatggatggtcggggaaagacattttgttaatgaagtgagtaactttggttgcaaaactgtttttcttcagcgagttcagttgccggtgtaaatctaccgactagcatccacctatcggctgaggcttttctgccatattttgtcggtgaagttaattgatagcaaaactttagcaccttttccaattcccgcaaaagttttgtcggcactactaaatttgccggcaaaacattttccttttttaaaaatatatataagttttgccgacacaactaaattcgccgacaaaatatttgtttttttttaatattagtataaatttaataaaattaaattaaaattaaaacttcataaataatgatatcatccgaatagtattataaaactagaatttcatattaaaattataaaatattcaagtaattctaaaactaaataaagagtcattagtttatagaaaatagtaatatttacaataaaatttataaagaaaaaataaaactataagtcaacagcatcatcgtcatcatcatttttctgggtgggaggggcaacatgtgtcaggaggacatatcagtggaattggagctatctcgagcatgttgaagcaaggaacgacgccaaaaaatacttgaactgctcctgaaatatattcaggtattgattctgagtctgcatcatttattgttgccactcgtaacgtgtttcttgttcttccactcttagcctcaacgtctcatattcctccatgctgacaataggaggcccaaagagacttgcttgggagctgtccttttggcctctgccctaagtcttgacaactggttcatgcctctcaagtggcgtaaccactccccaagtatctgtttcataacaggcatgtttgtaggaaactgggtgaggtctacatcatactgacgatagatattattcggcgcaggttgagtttcacgcgtcttaagaatttaggcccaaatttttttaataaaattttagaggttgatagaaattaaatatgataggattattaaagatatacaattacttgcatgcagttgttgagtgtgttcatcgagccatttattgttcttgtggtggaactttataaaagtgtccacaaaacttggaagttttcctgtctcgagattagcctatttttatacatacaaaaatagtaatgtattattcaaaacttattaaattttaggcaataatatttataagatcataacccgttcacgatgtggtcgacaatggtcttagacttccatccaccttcaatcttcatctagcttcgattttttgtatactgtgcgtctcttgcctataatttaaagcaaatttattgtcaactaaatgcgcaaaaaagcataagttaatggaaattcaattttacaatttttaatttctacctgttgtttcgggtctttccagtaggcaatgacctcttaccacacctcctgtaagaccccctgtggacgtgatctcctagccgcctcttcctcttcatatttctcaatattattctttcatgcctttttcttgttcgctctccattcgcatagcccttttgacatttaacaaaatatagtccacgaacttaggattgtcaagtgagaagtcaaatttgatttaaaaaaagataaatattaaaatcatatatattttttgtagaatagttttgtttgatctattacaataaaaattgaatgttacgctagtctgtttcagatagtctaaatgttccttctgtcaactttccttaaaattgaacttattcataggaatggtgttgtgaataaagaacttgaccatgttgttaaacttgttcccatagtcgtctatgacgccccagtccccatatgccatctaaattttaatttctgccctgaagacatcttggtcagttcttcttccacatttccccttgtaaggtcctctaactcccttattcttactattacttgtacctgcgcgagtcattctacacatacaagctatatttattaataataaaataagtactaatcaattcattaacaaaaggaccatgtattctatataattaatggtaggtttaaatattacaatacgttgaagtgtacaaggcatcataatcatcattatcatcatcattaatactagttatcatcatcactatgaaaaataaaatcatctaaatcttacggtcagtctgcacatggtccatgctgatcactttagttgggtcgacattgtacaagacatatttgacatcgtctagttgtagaagttgtatgactaacttgattttgaaagagtttatttcttgtatagtcatggttttttcatcatcctcatttgtaaaatctcagacattgtgggagttgtgagcattgacaagcttccaatcaactctattcttcaggctagaaatgtaatataccaaatttgcttagattgcaagtatgaatgttaatttttgtgccattgacgggcaatgcagaaactagcaaaaaaactatcactttctgtatggttaccgtttgtgtcccaccacttgcatttaaaagtaataacactacaatcttctatgtaagtcaactcatagacttgttcgagtacgtacaaaaaaaatttgacaaccttcaccaagcaccaaaaatacgacattttagggtgttatgattgtcatcctaatcctcaactaagaatttaaaccgttaacaataaaaatagctctaataatgaaagttatgagagttgtttgaataatgaagaagtgtcattagttgaatacatggaagagaatgagcctacaattgaagat

SEQ ID NO: 303134 - DNA, 3488 bp, Cannabis indica
ttattaattaagagactttattaagtctaattaataaatatattaaatgacaactttatttgataatttattttaattattaaataattaggtttggcatttaattggttagaattggaaaatggtatttttgagaaaataagggaaaattatcaaaattgggaaaatacccaagtggggcccactaactatggccggccacttatatgggatttttcacttaatttttctattattttaatgcacaataaatcctaacctaaacctaggtgattgcctataaatagatagtgataactcacacttaaaagagatgaaatttcttggcttcaataaaaattttcctgagccatcttccttctattttcgaaccagccctctcttcttcttcatcatattttttcataccttgagcgatagagagagtgcccacacacatcaagtggtatctcaatcatagtgtgtaaggctgtgaagaatctagaatcaagagaaggacattcgggctcagatcttagtgatactctgctacagacaggatacatgggttagagatctgagcggaaggagccattaatatttcgctgcacccaatgtaaggttttctgaaactttatatgtgtttatttacattgttttagaaattcatattaggatgttaataaaacatacatggcagtaaatctagatcctggtaaaacatattccaacacatgtagcagtcaaaaaaagtaaaaccaatgtttaaaagaggaatttccacttcatctttccacagtagcaataggccaccactaaggcctgaacgaggagattccaaaccatttggaaataaaagttattgtcgcacatgagtaattgagttaaccggtagttttgtttccatcataaataaaacttgggacgattgttgttggacaagcaatcgtaggtgtctgaatgcactcgggtttcccaaaccccgtgcattccagctgaggattttcatgatgaattgcggggttacctcgcaaccttcgcatttgagtcattgtagaagctagaatcctcgaaatcagaaactaaagtctcaatatcatcgtctcttgacaaaggagaggatgattatccttgggtattgcgacatcttttcaacatttttctcatggataaagagtcatttttccttttaaagtggtagttggtggctggttttctttagcaatagaaacattagcactagtgtaagtggtgagatgtttcatgggcatggtaagagtggtagatgtgaggctagtgtttatgggaataggattaagcactggtgggtatgtagcaaaagtatggttatggagatcaggcacgtatatgtgtgagaggtttgtgacagatttactgtgaaagtgatgtagttcgaaagcagatggtaagttagatggctggtgtgtagagttgttgatgttgatatttggctgctggttttggtgctgcaggtcggtgtggggggtcggagtaaaatcgcgttgctgatggtgagaactttttgcttgtttttgatgttgcaagttggtgtgggggtctgctgggttgacaagttgttggtgttttggttaacttgcttgtttttgatgttgaagattggtgtgaggggttgcagggttgacagattgctggtgttggggtttacatgctagtttttgatgttaccgattggtgtgagggattgctgggttgacagattgctggtgttggggttaagttgttggtttttgctattgtaggttggtgggaaaggtagtcattttgacagcgtgctgaagtaatagtgcaagattgtgtggtttgagtactgttagtaataagtgagggtggagggatgtaggcctggctagtagagacattgttggtgtgaaaattgattgtgggagtgttgtattaatgtcgggttgggtcatttgatgatgtatttatctgcacatcattggttacagatgtggaagtttgaaattgttgtgtggttgtgaaggtgtttgttggaagggataaggtacttgtgttagaaagttgttggtgcatggggagttgactgttggaggattctccatcaaagagaacttgagggtgggcctagttacgagtttgtaaggatggtaatgtggatgtgagtgtagttcgtgccaatctagtaaggagtggccaggcgtttcctttagcaaagtcagtccgatatcgattgtaattattggtagggagtttagcacctttcatccatggcccgtattgaaagtcgtcattattattgttgtccatacgttccatgaaagcaacacaacattcaaaaaggtgcccaaaatgaccaaattcaaaacagaatcgggaagtctttcatagcgaaagtcgacccaaaattcatcttttatcttgggcagccagatcatttggcctctcaacaacaccttgtttatacaaagtttaacacggacccgtaggaagggaccccaaccttcattggtggagccatcaaacacttctataaattcttcaataatatatccaagtgcttcagccaatatttttgagttacttaagaaaggtagtcgttagatttgaacccaaaaaggtgtcaatattaaatcttcctttgagacattttgcagagcgtctggcacaagaagaacaatgagatgattttgaaagtaccatggttctttgttaagtacccgtcttttatctccttcacactcgaatttaatgtgaaataatccatcatcttccttatattcagtgattaaaacttggaatcgaccttgccaatggccagacatttggtcgaagaatacttgcttgtacacgatctggtgagtaaggactttggccaagagagtaggctggtatctctcagtaggtgtggggctatattcatggacacagaaaatggatctttcctcatcaatgagggaaagagttgtatgtatgtcgttcgacaatggatccatggagacggctgaagggggtagaaatggacgatgtctgacgtgggcgaggaggagtagaagggaaagagagggaaggaatttgaaaaatatagatatatagatagatagatatttgtatattttttatataattaaaaattaaaaaaaaattaaagagatatgagaaaaataattttagagtaaatttaaagtcacatgtagggatgcacattttccttatggggatgggccccgcggggacccgcccctagttgggcgggaatttcccgtctaaattgagaatggagcggggaaaagggatcaaattttgtccccaaatattaaacggggtggggacgggggatgacactccccgccccgacgacaacctgtttaatttattaattattttttattaatattttatatatgcgtttgtattttgtttagtatattaatatcatttttacaatttttgaagttgtttttttgtataataattactatattgaatagtaaataatatataatatt

SEQ ID NO: 303135 - DNA, 647 bp, Cannabis indica
aagtgtaaaaataaaaaaaaactcattaatttatttagttcaattttcttttcttgagcttcaaaatcctaatatatataaatatatatatatatatatataatttattaatatttatttaattatagggtgaagcacccgatatttggaaatagcgttgcaaaatttctaggaaatgcaattcttggagaagttcttgattgtgctacagaaaaagaaaaagtctactttagaaactatgaggaatggagttttcaaatgaaaacatacttgttgagccaagatttatgggatgatgtgatcgtaagaagaaaaggtccaaaagctttatctaataataataatagttattattataagatgattaagaagaaggatgcagctgctcttcacgctattcaaatgtcatgtaatacaaaagctttatctttgattatgggtaaaactagagcaaaagctgcttggtctgctctcaaaagtttgtacgaggaagaaattattagaagagaccaagaaaagtcagaagaggaccaaagtaatacttcagaaggagaagaaaatgatgagacggaacaagaaacagagcaaggtacacatcgcttcattaattattattattattattttggatcctgtattttataaaa

SEQ ID NO: 303136 - DNA, 1288 bp, Cannabis indica
tctttaattcactagatacatctattggaaaaagagtgtcacatttcaattaccaagagagggataagaagtaagaacaacattacaccacacaatcattttcactataggagaccaacaattccataaggaaggggtacaaacaaattgctacctatatttatattggagaaattcactaggaatgtttagtactactacattatattatatttttattgatataatttaattatcaaatttatatatgatacatcataactattataaaacattactaattatttacaagacactacttaattgtagcactaaaaactattataaaactccttaccagtaagcctataattataactaggacatcatatttacactcgaaaaattcactcacccgataaatttactagacttgaaacccaaaaaaaaattggtttaaaaattatagactgagttcaggttatacccagtaattacccaccaggttaggttcaagtttcattaatttaacactaaaaaaaaaactaggttatacttgaatccacccgaaattcaaatatatataatactttttatacattttctaaacatattaaacataaaaaaaaacttatttttaaataatgatatattatttttattttcttcttcgtctttttttttatgaaaaagaatataaaaaaattatatttaaataaaaccaatccaatccgaaattcgatcaaaacccacttaaattcggtccaactcgtacccaaaacccgaaacccaatcacacaaacaggcgagtttagtatactaattctatacacctaaatcgaatatccgttgaaacccacctcatgttcacccctaattataacttgtaagtagtaactttgctttagattcttgaaataaaacaaataatatgcaaaggtaccaagcaagtacatcaataaatattaagaaaaataaaaagcaaatcttaaaataataataataaaaaaaggggaaaataaaaggaaaaaaagtcaaaatctagggtgttaaaagtaatttaaaataacatgtggggtgtgcttagtggcatgattgtaattaaagttgaagttgaaggtcaaaaaataaagcagcaaaatttcgattatatgtgtgcactgagacccatagctctgtttttctctgctaagacaatggagcttcttcataaacctcttccgaccaacaatggcgaaaaaaagtcaaacgcaacaaaccccaaacaaaccttccaaaaccctaacaatggcgaaaacaacgataccca

SEQ ID NO: 303137 - DNA, 2531 bp, Cannabis indica
ctagacttcacagtcataacaaatagatttacatagataaaaaaaaaatctgtaaacaaccatactgttggtgggtaaatgcccactttgcctcattataaattacaaaattacaagatttactaatactagaaaaaatataacatacaaaaaaaggagagacgttagttttcaaacacccaataagattccttctcattaaacgcattgataactaccttaaaattgctttccataataataaacttgcaactcttgcccttggctacatctaaagcgaagcagcaggcaatcgtttccccacacaaagcaccataaaactccaactgtgccatttgaatctaaatcactatgccaagatagtttctcgctaccactaaagtactacaagatgacgtgtataattagttagcagttctctataatctttattaaattaaaataagtgaaatttaatattaaattataccaataataatattaccgagaacactttttaatatttatcttaaataaatgcttgtatgaggttcaaacgtgtgttcacaaagatttatctattcatgaattattccttcaattgaggaataatcaagttgggccaaatataatttaacaattgacaacgttaataatgctagacctaactaactactcttactctatatatagtctataatatataacattaattaataaagattaaattaaaactctcttcttcccaaaaaagaaaagagattaaattaaaacttattccgtaattggctccttcactttggttcaacttgtttgcccatttatacataccttattattactatataaatatatataaaagttaaaaacaaacgtaaatctaagatttatgttttcaattttttcctacatcacttattaattatttagctttgttatatatttagggaaaattttataattaactcttttaaaagaatttttttggaaagaattttttaatctaatttttcttattgttatgtacgttgtagttatttaagttatcttacaaaattttaaaaaattcaaaaatagagtttaaacattctgttgaacatgtgactcttttatttaatacgcgagtgaaataaatagtttgaacactattttttatatggtaagttattctaaattttacaaaatgttttaaaataaaaaaagtagactaatattttttttttcttaatactaaaataaataaaaaatagatcgatataactatttttatagtacattaaagattcgccctaaatatcaattatatatttagttttttattttcgaatgtaatatctcaacataagttataacatgtaataaataagtggactataacttatattattgatttgatgatcatgaacaccagcagtagttaatcaataattcaagctgtgtatatatagatttaaaattttaaatagagatattattaattatatatgcctatatatactactattagtagtattatatgtattttttattttttttttcaattttgataactaagacacacgaattgttatgttaggtcaatatttgtataatactcatatagtcatatgtatatagtatgttcaatcaattaaaatatatatttttgaataatactcatataatatgctcaatcaattaaaaaaaaagttatcaggtcaactaacacaaatcaataacacgttggtggatgtatactcaaacattgtaaatggtaaagatcacatgattaattattttaagatcacatgattaattattttagttttttaattattattattttttttaaaaaaaaaaatcacatgtagtgatctaactaactgttatgaccgagtgtgggtgtagctggttaggatactttgcataaggtccttaatttggttaccttttcgagttcgagtcattatgataacacaatccagagccttaaaagtggcgctccttgggagtaaatgagtgtttgtgtgcctttaggtaagtcatagtatctctgtgtgggagagcctcaactgacaaccatctcaagaattgtgtataaactcccgcctcaatatttactcttcagtggtctccgaaatcgctataaaattgaaagagttgagaatagaatgtgcatcacttgatctcttttttcacaataaaaaaattacttggaattgctcaatttgatttttttttttaatgtttattaaaatttacatacgttgatcaaatctaattcacaatttgataaagaaatgatgtatataccattatactaaaacatattacaaattaacctaatttagaatgagttgattgacaaagttagtatgtatttaggaaaaagttagagaggatagcatagtcaaattagatgacactttgagttactataaaatattgagaatcacattatatattattttttaatttttatttttatttttacggtgtagattattctggtaattgatatgtagatttagattgcgatttaaattattccattagttgctatgtgggttgct

SEQ ID NO: 303138 - DNA, 834 bp, Cannabis indica
ttttttttttttttaaaattcctatcttctgataaaaaagttcataaataatgcataaaatattgaccattcacatataaatacttcagactagtatttatttggtattggatccactgctaattaggatattctttttggcaaatttatgcaggaagtagtgtcagaaaactcccaaagagtaggacccaactacaaccatcaaccatcacgccatgaataaaaatgggtacaaaacctattataattaatataatggggtatttttcagctataacataatatttcaaaaaatttacacataacaaatttttattacaaaaatacgacttctttatgaaatccgtctttccctcttcaatagatcatacgcacctacggttcaatcctaattataacaactataatgaatgtgcaaataaaaaagaattattaggttatataaatcaaaacaaaattggtaggaaacaaaaaacccaacttatgaaattatttgaaacttctaaaaatattgataataattgggcattctacccataaacttgtttaaaacttctaccgtcatcatagattttttgcctcatttattatgagtacaatatgataatgtaaaaaatcataaaacaacttgttgctccaaaatttgcccaaaatacgtggaccagtcaagaggggacacgtggatcggataacttggaaagatttgctaagtctttttatgccaccaggaagcgctagtagcatgggtcccggaggagacatccggagtacaagttactcctggaagctagtatagcgtgagggccctccgggatgtgtcaggtctctcccgag

SEQ ID NO: 303139 - DNA, 2787 bp, Cannabis indica
tgtaaaattatatgtggtattgacttgtatgagtatataaatatataatattttagtgtaaattaaagtttaatttattatatgaaaaaatgatatataattcaatttaatataatacaatacaatacgatttaatataacgtaccaaatgagcttaaaatttttttttttttgtcaattttatagaatttaccaaaaatttctatagcaactaaccgagtaatctaaatagcaacccacataaaaatcattagagaaacttaaaccataaatttaaaaaaaaaaatggttaaaaatagtataggaggtaattctttatttttattttttttatatttttatgaaaatctacatatcaatttacatagtaactaacagaacaatttaaatctttataacaattactaaagcaaagcaaactgtaaaaatgaaaagaaaagttagaaaattgtatatgggtgatttttttttttattactttgtttgctatgaaaaaatatgtactacactctccaaaaggacactttttttaataataaagttttatacatatttgaagaatgatggaaaattatttataagctagttatgttggattaaaatgttgttgtattgttatttgaagtttgaacaaagtgattgttttagtaattgtgagtcatgggtactataaagtgttaaaagagtgtaattattcttgaaaagttgaaaattttgtatatttttttgttggtggtcattattatgtcaagttgtcatttatttgatcttaaagtttttagttgttttaataataatatttgagtattgttattgagtatcagtggtgtttagcatcttatataagtggtatcttatgattggttagtaatattttttaaaagctatttttttaagttatataagattcgatacttaattataccaatagcaatatgattcgaagatggtacttgtgattagtttaggatttgaaaacagttttataagtttaaaaattaaaatgatgggagtccttagtccacataaaaattcttgattagttgagttgttttcaaaaacaaaatttgaatattattttgagttttaagtctaaaaaattaaaactattatttttatattttctattgtttcaaactatgaaatttaaaaactcttcaaaaattttcttacttttttattttgaaattttcaattaatcacatgtttaattttttaaaactcaaaaacgttaaaccaaactacaaccaatcatatttttaaaaataatttttcactttacaaaatttaaaatttttgtttctaaaatgtatttttagaaaatacaatttttttttctataatattaataagtactctacttttttttttgtctttttgtgttgagttgtcattgatttttgtagtgtgtacttttttttgtcattttgtgttgtgtacttgatttactttactttcttgttggataaatctgtttggcttgaaaatatatagtatatatttttttttatcattttgtgttgtgtgtgtgtttgtataaagcctattaagctcaagaacttgaatagtttgcagctaattgggataagagggtaaaatataggagaaactagtttgaattctatgacaaaattaactatagacaatgtgtgtgaaaaaaatctttttgtcattttatgggagttgttaaagtttagacaaattatcatttggatggttattttgtttttgaagtagttgaagttatgggtattgtaacattttgattcaatgcttttttttttttttagtatggaaacattatgattaagttagatcactagaatgttgtgtttaaaattaaggacatgtccaatgtgatcaaaagaaaagattgcccaaatgactccacttgatacacttttaaatttttaaacaattaaaatattgtcttttttttcaatgagcattggtgaacaaattagactacattttatgcatattctttgttgagtaagaaagttacaacatttttattattattgaaaaatactagtacaaacttagaacactttgaatacaatgactctaagacactcttacacttttatactctttttctcacacttaaattctattgctcaaacttacactttagcacacactacacttctatttataggctacaaaagaaacatctcaagttttctagaattttctaatatttctaagttccttacaagtttctatcattctctaaataattcttgaattatattttcttaatttaagtagttttaagttttatctaaaattttctagagtgtttttagtttctctaacaatttttttagaacattttaacatattctagatttgatacacctgacccacatttttttggcaacaatattagaccacccacactctagatggcctaataggttttaagttgctagttttgtttattgtgataagtctttcaatgatgttgccatacccataccttggtcaaacttattttgaagtgttatttgatggtaagagaatcatttttgtatttggaacttgttgatagcagatgctatagttgaataaatcttcactctcactttggtagagtacctattacagtagaacatctatttaagaatactctattcaagaataacttctaatttgttataaaaaaaatgaagtcccaatttgggccagttataaataagaataacctctatattgtatttagttatacattttttaagtcccgtattaataaaatatacctctatataagaataattacat

SEQ ID NO: 303140 - DNA, 1578 bp, Cannabis indica
aatttacattattattgtgaacttgtatgacctaatatatatacacgaataattttatagtaaggtgtacttttgcccttaacagtgagagtgtttctgttttatgaagaaattataaataaaaaatgtatctatgaaggtgtacattatatttatagtaagcattatactaatttttaataaaatataaaattaaaaatagttgataacacacatgcttaaattttaaattcaacatcataaattatttagaatgcctactatatataactacactcttaattttcagtatttaaataaattttaaccaatatcttaatattacaatctacaatataattatagtaaatatcctaacattgaaagaagaattcacaataaataattacacgaattaaaaaataacaaaaaaaaaaaagacaaaacaaaacatgtttgaatcatattttagtaccataaaattatttaaaattttcttaaaaagaataaattatctgttataataaaacacagaaaaattccaagtgccaaaaatgaaaacacaacttgtaataaaacatttccccatataatactaatataagtataaaaacatcctcattatgatgaatcaatcaaacaaattttcttgtattatatatatgcctatcatgtatgaagattttacaccgaacctctctttccccttctcccactcctctcccagaatacaaaattgccctttaatcgttgttaatgttacactttggaaaagagaaaaatcaaaagacccccgcccgcaatagctaagatcactcatcaatatgtgcgcggcaacatgtacatcacaagtaaaagatcattaggactctctgatgtttcgactaaataaaaatcaagggtaaaagagtttggcaaaaagaagctcattccaagtatcttgaagacccggtaagcaccagtgtgtacaatcggcatagctgacgggattggctatttgctcaggagtcaatggactccattgcttcttgtatattgatgtgtgtgcgtctttccggtataatgagagttgtgtgatgttgagaaatgtaacgggaaacttcgatttacggaatacgtctccgatcacctccattatgctttttctgctatcagaaccccagtaatttggatcttctatcattcttgtttcgttgtagcaattacgacctggaacaccgccccaatctccgctcctacaggccaataacatcagaatttagttcataataaagcttaggaactggaatttttatgttgtagtactagttttaggacccggaaacagttccaattctgtcacgaattatgacattgcatagtttaagataatattaaaatgataagatctgattaaaataagattaaacaccttcccgtacctaaacatgatcaacaaatatctttctgaaaagtagtagtgctagttagcagttacttctcagggagcatgtaagggtaggatttaaaatttgggaattatcccatataatattttttaacttattttttcaaatttatggtttgggttgctccggtagtttctatgtaggttgttat

SEQ ID NO: 303141 - DNA, 2129 bp, Cannabis indica
agtgtagtagtagtaaactcctcgtaataggatctgaaaggttgaattaaacacaacctcactgcatgtggctgccttgacagatgttcgtctacaacctcactgcttcaaatttggttttgctagtgcagatgatcgtagttgggctcttgataacggtccttggtgcatttgggggtactccctcattctctaggcttggactcctagtatttctggccctgttaactttgagcattttagggtgtgggtgcaaatacataacctccctcatgaatatttctgtgtgtcaaatggtaacctcttgggtggtcttgcgataaggtagtggtggtggatttggacaaagttaaaccgactttctggaaccattttctcaaagtgcaggttgatatagaatttgttaaacctctggttttggggtgttactttgatttagggttaggtgtcaaatggtggctccagtttaaatttgaaaagattggaatattttgctataattgtgggtgcttgggtcaccagagaagaggttattatttgccttcgccggtcacggtggcgaattgtgacagaatcatgtttcccctttatggctcatggctatctacggcctcttcttaccaagacgtgttttctagtgctaattcgattcctcgtctgggctcctcagtggctttgctggctgcgtccaagactgttcctcctccggtgagtttaaacgtagttggtggtaagtcgatgctccctgtttccaagtcaggtcgaggatcgagacgagcgaagatggtgacagctcgtgtgtctagaggtctgggctctcatagcgtgtcgtttggaaaccaagactattgcttgtaaactgtgagttggccattacccctgtgggtaatggagttgatgttggttctacggagcatgaaaagcccctgctatttttcctatgtcagaagctatccatgttgatcgttccttggaaaatcaattttttaagaagagaattgtgaggtaggccttgacttgcatagaatagatggtgttattgggccagtcaatgcttctactgggccagccattatttcaaatgaagagagtagacccgtgtgtttgggtcaagtggagaaggctgttaatggtgttgtattgtatctagagcaggttactataggcccaaaggatggtgggcctttagttgattgtggcaagtttgatgtggggtcggttatgacttgtggtgcgaagggtccgtctttactttttgttggtgaacagaggcccatattccctgcctagaagagaaggccttgtctaatttttttaaagcctaagaaaattttttaaaagatctaaagcaatttgggaggatggatttgttcaagatcaaggccttgggaggtgacattggtgttaaaactacttatgagacaaatgctcgaaccaatcctttcaagaaaagaaaaatgtatgaagactcttcttctctttgctctagaactcataaaattttccggaagcaaccgagtgctgttcacaatttaccgtgggacacaaaggagcaagaagagaatcaagcttccaaggttgcctttgaagaaccctctgaagatctcccagaatccctaagtcactctgatggtgtcttgaagaaccctctaactggcacttttgtcaatgaagaatttggctctagtttgtctctccactctcatacccctctggaggagaatgtcatatctcctccacgggagccattacaggcattgcttataactgtagagggttagggcaaacctctacaattcgcgaattgaagtccctggttacatcgcgctccctggattttgttttcttgtctgagcttaaagtggatgctacttctctggtacgtaccctaatctcccttcacttttattttaacatttttgtgtcgggtattggtacggatggaggtatcattctagcctggaagaatggttttacttttgagagtatatcatgttcttgtaatcatatatttggcattgtctattcgtatcccccgacccacccttagctcctctcttatgtgttgttaggctatttttagcctatattttagatctattttatgtgcgtttttcactgtgttggga

SEQ ID NO: 303142 - DNA, 907 bp, Cannabis indica
ccgccctactagtaattttactccagtagtttttgtaaggtttttattttatagatgaattatgtggtgttacagaggtacctaataaaattaaaacaactagtttaaagagacaaaacctctggggaaagataaaaaaaacgtagaaattcttgactttgaactacgagtaataattctaaagtgtagtttattattaattataataatattgcatacaaagaaagtttgagactttggtaataagatataacttattttggacagaaggtacgtaaaagagaaccaaagcaataacgatgtagtttataaatatcttgtttgaaacaaatgtttatttttcttcaagaaaaaaaaagtttatttatttatttatttatttgtatgtttttgaagactcttttcttttatccccttttcacataaaagaaaagaaaaaagtggaatcaattatatttgccatatagaaagatgatgcaaagctttcaattaactttaggttctttaaaaccttaccctataaaacattggtaagtgttacctttgctaatgtttataatgtacactttgcttgtggtgtcccctcttccgatatctgagtcacccatccgtgggataacttagggtacccacacaacctcacccccttcatttacacgtacagtttacacattaattggttattttataattaaattatagtttgatttttaaaattttttttatttcttaaaatttacaaactttaattataagatcaaatattttaatattgtatatattttaaattaaatggtagtattatccttttaattttgaaatattatattaaaactatgttatatgataaattaataattaataaatttgaaattaatctagatattttatagatatcctaaccata

SEQ ID NO: 303143 - DNA, 1135 bp, Cannabis indica
atgtaattattcttatatagaggtatactttgttaatacgagacttaaaaaatgtataactaattacaatttagaggttattcttatttataactggcccaaatcgggacttgatttttttataacaaattagaggttattcttgaatagagtattcttaaatagaggttctactgtacgtacattctaacagcaaagtttaatcttctctttactaataattacattaattctatgtttgacaatatatttcatgcactgagcgtacacacgagttcactggttatattatactctacatttccaataacaatcatttctattccaccaaatggtataatattaacctgtgtacataatatttatatattacactcttttaaataatattatatctttgatcaaggacttatatatattattattattggtttgtgagacaggttggactaactggagtattagctacaaagggagttccacacacccatgtagatcaaataaaagaagacctttatggtgcactactagcagaaaacacaattgccacacaccatgaccatttcttaaattattacctagatcttgacgtggatggtcaagaaaactccttagaccgatttagtgaccaaaagagtgagcgatcacagctcaccaaggaaaagttattggactatcactaaaaaaactgccaaaactgaattggaagcaagattgaatgtgggtttaaggccatcagagtttgcagtggtaaatcctaacataaaaaccaaagtgggaaatgaaatcggttatcgtttaatgcctggctcagctacaattcctcttttaacaagtgacgattacccgcaaattcgagctccttttacaaattacaacatttgggttacacgtccttacaacaaatctgagaaatgggctggcgggaaatttgttagccaaagccgaggagaagataatttggccatttggagcctcaggtacacatatttatatactaggtgaatgtacgtgccgagccacgtattgctaatttcatttaagattttagtctttttaagattttaaatatattttatttttaaagattacaaatttttttcttgaaaaaattaaatatttatatttgaaatat

SEQ ID NO: 303144 - DNA, 3864 bp, Cannabis indica
cggaacatgtcgtaaaatcaagtccggccaaattcaggtacattactatgtttcgagaaatttaatacattatttttatatgatggtatacattataattatagtaaaatatgtaattttgattttttttaaaatttttaataccaaaaattaaattcgaacacccattgaaaagaaataagaaaaaatgcaaagaaaatagattattttatattgataacctacttagaaattctctaataaaatcatattgaaaaatacttttgtttttgacaatgtccaataccaaactttgatgtggaaagttttggcactatataatttctttttctcctccactccacacctttatttatttcacttattcattcaaataaatttatatatctttaattatatttttttactataaagtatatgaaaaatcatatttagaccatattaattgaaatataaaccacacacatatggtttggtagtgaatttcttatataggtctaataattcatctatatagatctagaaaaagctagtacaagtttacaattattgagtaactcataattatttctaaaccacacatatgtttggagtaggtattgccagcagagatagaaagcatagaaaacgacatcgttttgttgaagaacgaaaagtcatatcacttcgagacaattgtgttttgtactgggttcaaaagatcaacacacttgtggcttaaggtacgtaactaataataatattattttggccactttatatatttatttactaaaaataaaaagagactgaattataattaattaattatttatttttaatttttttggtagggatatgattgtctgctgaatgatgatgggttttcgaaaataagttacccaaataattggaaaggaaagaatggtttgtattgttgtggattatctaggaaaggtttgtttggagctaaacaagatgctctaaacattgcaaaccacatcaagtccttgttgtgtgacaatacacaaaatgatgatgatgatgattctaattcggaaaagaagccctaattaattaattatagttgttgtttaattattattatttagtgttaagactatatactttttttttccttttgttaattaatttggtggaagtttgtagaaattaaataatttagattcttatgcataaaatggatgtatagttttgctttttctatgaaacacattattatatatatacatttatttcatttaatttaactaatagcgatacaacattactagataaataccacttcaaatatgcttagcaataccatggctttggtatcaatatgtttcactaaagtaggtataccgtataccaaacatgttgtacctgacctctgatacgtacttgttaagcctattggccattgaagaaccagagaaacaaaagagaaggaaagagaagaaaggaaaggaaagaagaaggagaagaaaagagtctcagtatgttattgcaacagaaagtatttattcaatgagccaaaacaaggaaaagagagaagagctaactaatagctaacactcttgacagctaacaattataacagaattagttacaactaacccaactaattatctgttctaacacccccccttcaaactcagaattgaatggtcttcaattttgagtttggttctaaagtcgatgaatttctggctggatattgctttagttagcccacctgcaagttgatcatagacagcgacatgtttgatctgaatggtcttgtttaacaccttttcacgaacaaaatacagatcaagctcaatgtgttttttcctagcacgtaacacaagattttgagtgagcatattggtgcttaagttgtcacaccagaccgtaggaggctgagataagtgaatatgtaactcggagaacagatagtgtagccatgttagttcagctattacatttgcaacacttcggtactcagcctccgtgctagaacgggaaattgtctgttgcttcttactcttccaggcaactagatttggtccaaaaaagatggcaaaccccgaagtggacttcctgtcatctggatccgatgcccaatcggcatcacagtaagatgtcagctcataggacagaggtttggtgagatgaagctcgaagtcagttgtaccacttatatacctaagaattctctttacagcttgccagtgagtttgcaaaggattttgcataaactgacacactttatttacactgaaggacaactcgggtcgagtgattgtaaggtactgaagggcaccaacagtagacctgtaaagttgaacatctctggcgtaggatccccctggtgagctgacaatctaaggccactggtcattggtgttggaagtgatttagcacctgccatttgagccttgggaagaaggtctttagcatatttagcttggcacaagtgaataccattggaggtatatctcacttcaattccaagaaagtaactcaatgtgcccagatttttgagggagaactgattacccaaagcagtaatgagagaatcaacaacaagagggtcacttcctgtcacaagaatatcatcaacatacactaggacaagtgtagaagatgtgtttgtgtgatgaataaagagtgagtgatcagatttagaagattcaaatccaagtgacagaaggaagttccttagtttgtcaaaccatgcccgaggggcctgcttcaaactatataaagctttattcaacttgcatatagtagatgctcttgtcctggaacttcaaatcctgggggttgcgtcatatagacctcttcttgcaactcaccattaagaaaagtattgttcacatcaagttgttttatgtcccaccctttggataatgctaaggataaaataactcgaatagtgactggtttgacaattggactaaaggtttcagtaaagtcgaaaccagattgttgatgaaaccctttagccaccaatcttgctttgaacttgtttagggagccatccatgttttctttaactttgtagacccatttacaaccaataggttgtctaccaggaggtaatttcaccaaaatccacgttttgtttctagcaagtgctagtatttcatcacccatggcattgttccaatgctcttgtgcaagagcttctttaatacttgctggttctttggtgatcacaaaggttttaggtttaaaaacacgtgacttggatctagtttgcattcgatgtaggctgtatttgcctggggcattgtgacagctagcaaccaaaggtaatgcagcaggagatgaaatgaggggtctggtttaagcattaggaacaccagagagagatgaatctaggtccctgtatggagtaggatcactgtcttggtgagattgactttgtgtagcagcagagggagtaacacttgatgcaacagtagcatcaatgactccagtaacaactggttcaggaatagcatctggtgcaacaggaatatccaaatgctgccttaagtcatctgctgcagtccctgaacattcacctacaacatgtatagagggttggctgggaagccaagtgtcaatagcaacaataggaacaggtatagtattatctagtaaaacatcctggtcaattctttgttcagattcatttctaggacccatgatctcagttaccttaaggtgcccctctagcatttatcttttttttgatgaaatagcaacttcattgaaatattagcattcagagtacaagagggcttttaaatcagcccaagcattatgctcaaaaatgctacaaccaggaaaaaatcgtgagtgccttgctacaacatgagcaactcgatttgctgatcgtctaataaa

SEQ ID NO: 303145 - DNA, 1575 bp, Cannabis indica
aagaaaaagaaaataatctgttatcaaaatttttctctgaaattttgaatacttttatttctaaccgagaagctcaagtcaagaccattaaacatacgcgctccactatgcgcgtggtaatactcgctactgttttttatacaccaacggtttcgatcgggtttgttgtttacaatcatcgatttgcgaatgagaaagtgaaccttttcttttagtccacttcttgaatttcgaaaaagaaagtcctaatagctcactgagaatttggaaaaaatttaaaaaaaggaaagaatttgggaagcttttatttgcaaactgggcctctaagttataaaatttatgaaaatgacccttctacatcgtgatatttcaaattgagttgctaatgcatatttgttaattataatcctaatcaactcaatgcttaaacttcaaatattagagatgtgaatgagtggtgaaagcaactttaagccaagaagaataaaaatataaggcggtaaaaattatcattgaattcgaagtattttctttgtttgggtttgaaaatttttaggtaattattttaaaatttagcaaaacaaaagaaaaatgcgttgtcttaattcaaataatatgatgtgtgtcatgtgccgtaataaattgaataatttttaatatcaaacttcaatatatttaaagtggttatttaactgtaattcttagtttaacggtactttttatttttgttaacattatcactaacgctgttaacttattattattatcatacaaaactaatattgggatagaaataatatatggcaattcaaccctaaaaggaaaagatttttttttcttctcttaacgattttcaatccttgaatgaaatcaaagatcattctttccattcgtgatccccatttcttgtaattcttctttcttctctacaattcttcggtgaagagatcggcaaaccatatctgggtgttgagatacggtacgacagggaaagaggagaggataacgatccaagattgggtcaatgtggtggcttacgttagggttaaatgacgccattgattctgtaattattcttcctcttcctccgctaacaattaagttcaattttcattttgcaatcatcatttaacccaacgattgtggatgcaggaaaatctctgtcgattcggcttgcaacgattgtagctagctttcttcttaaactgttttctccactttattttcttcttcttttaggtgccatctttcgtacataaattgttcttgcaactacgaagtattaggacaggttgttaggagtctattaattcagtttgttgttaggtttggttagctgccaactgtctctagttggttaagtcggttaggtgtttgttactcttgattgttatgtatatatatcaaacctgtaactaatgcttaatcaataataaagaggcttctttctctcctctttctttctttctcttttcttctctttctctcttttttgcgctcaatttcaatggctaagaggtcaagcacctctcacgtgctatcagagccatggccgccattaatggcgaacatggc

SEQ ID NO: 303146 - DNA, 3442 bp, Cannabis indica
gaggcggtgacgtggcgatctaagatcaatctaaatacatcaatcttttctctgctttattctctcattttattgaatattttattagaacataaatttataaattaatattttactattatttaataaattttttaaaaaaatatctagcataaattaattattttcaaaaaatactatatataaactacactcacggtagaattattcaaataacaacaataataataataatctatatatattttataaataattataaatcaaaccaaactatttatctagcatacggtatagataataaatctaactatctatatatatctctctaacctctgttgggaaaaataaaggttgagttactaaaactttgcttctctctctcaacctttacacactaatgtgttatcggtgacttccgatcttttgcttctacataactgttctatagtaatttttcattggctctcgtagcgaagtatggatgcaagtgcaagtgcaagtgagggaaacccgcctataaaggatcccagtatacagggtgaggaagggcaggggacaaacattgtgacgctgcaggaggttacagagtttggagaacctgggattaatgcaggagaaatggacgaaatgaggtagcatttcatcaactccatgacacttgatcttgaggctgatgtggagctaagtgctgaaataacgaaaaaagggtatctagctagaacctttggtagaagaaatatagaaagggttcgtgttaaggaaatattgtcaaaaatttagaagttagaaggaacctggcgcatgaagacaatgaagccagatttgtggggcatcttttttgacagtgaagcagataagaaataaattcttaaaaaatgaccatggtgttggtcaatggtgtttaacttaacatcagggagtggcctgatgatggatgttgggaaaaggtgaacatgaacaaagctaggtattgggtggaggctcatggtttgcctacaccatacctcacatgggaaaatacaaatgtaattgcaagaaaggttggggaatatattgattttgacagagcttctaggacagtcattgctcgaagaggattcttaaagttccaagtagatatcctcctcaatcaaagacttgttgcaggttttcatttgaacatctcccgtgatcgagaagaatgggtacaatttaagtaccacaaactcccggctatttgattcacgtgtggtcatttggctcactcttatgacaaatgtgatcgttctcaggagtatgcctaccctcccgtcggtaaggcggtacctctatatggggcttggattaaagtgggtgtgccgataaggaattgtttcgaccctgcaattccgagattgaaagtggacgagaacctccgtcgtgctgaggacagttctccagtggaagctagggaaaagggtaaatcggtaataacggaggctgaaagtgatggtacaaagtcactgagataaggtccaacctacacggggccgttggaatggcattttcaccaaaacgggtagttatttagggagcaaagaaggcgtgccttgatgttcagaggaagttggccagatcgggaaatttgagtcaacaaagacaaaggccttcaccaaggtcaagaagacatcctatgactaatattgacaatagaagaagagatgaggggatagtagctagtttgatggctgacattggacccacacgtgaccaaatggtggatataccacatgaggagatttacaagtctagggtcccacatcaacatcctaagcccgcctttgtcacttggcccactgataaaaaccttgaggaagtcattgaccaagtaatggacccggcccaaagtaaacttaggcttgctcaagttgtggtctcacatgatagtattgatttctctacttctggtacttccttttctggtacaaaaaagaggagagctagtgtgactgttgtacatgtgattactcttggagaagatgtcgaaacattgggggagaaaacgccatcaaccccagttgccatgctgccacccgtggagatcaataccttttcccaagcagcagtagccgtgatgggactagcaacaagcgaagaaattatactcagagacgagggggaaaactcgggcggatctcgtaaaggagcaaagcagggaattaaaggctgtgagaagcaaaatagcgtggacaagatggaagataagaacacaggtacgagttttactgatatggaaagcaatttggttgacattactatacatgagactctcaatttggtattgggtgaggaggcagcccttagaaagccccctccgtcgccatgaggatcctttcgtcgaattgtcggggtattcgtagaaccccgacgacccaagctcttgtgacttcggctaggagatataaaccggagtgtatctttttaatggaaactaagtgtagtgaagaggggatttttgaaattgcaagattattgggataccaattttcttcaactattcctgccgaaggtataggggaggattttctctgttgtggaatggtagtatcgatatgaaagtgttagaagctagtggtggggtttttgaagtcttgataaaggagccaatgacacggttgaaatggtatatgtttgatgtttatggaaggccttatgacaatgaaaaaaaaatgcttttgggataggttggaggaaaagatcaataggtgtgcaacgccttggatggcaattggtgatctaaatttgatagcttatccttgggagaaaagtggtgggaggagagtaacgacccatgacacaacaattcttcagaatttcttgcaaaatacggggggggggggttgatcttggctaccatggatacaagttcacctggcagaataatcaataacctggtggtctgacaagagagaggcctgatagagctatggttttgggggactggatcactattttccccgcggccaaagtgtcgcattcaccaattaccatctcagatcatggttatatcctcatggattctaatgcggggaggcagaggggagtcaaaccttttagattctttgaagcttgggctagggagcaatcctgtgaggaaaccataaagcaagcatggtgtgtgagaggtaggatgagtggccgactttgtggaaggctgagtgatactagacaagcgcttcagaattggaaaaaaggggctttcggggactgtgatattctgatcaaggaagcgaaggaaagactcggatggatccaaactcaacccgtgttagactctctcttgcaagaggaatgtaaagaccgcttagtttaatttggaaattagtagttaatcatgattaattatgaaattatttatagccatttaaataatttattatactgttatttattgaattcagaaatgcattgctatgtcatt

SEQ ID NO: 303147 - DNA, 3655 bp, Cannabis indica
attgaaatgaagttttatttagggcataaaacccaacaagaaattccaaggatcttggtagcattatcaagatctttcatttcaaactttgtcttgagcagatctttaaccatatcaaccctggatatttcttggcttaaaataagcatgtcatctacatatagaagtagatagatgacatcttttattgagcttcccttatagtacagataggtgtcatgatagcttctgttaaactcatgctttatcatgaaagcatcaaactttctattccattgtctgggagcttgtttgagtccatataaggacttaaccagtttgtagacgttttccttcttacctttaatttcaaaccccttaggctgctccatatagatctcttcttctaggtcgccatgtaagaaagttgtagtaacatccatttgatcaatttccatgttaaactgatttgctattgatagcataatccttatagtcttgtacttggctactagctactgataccactgtaggattttcgaccaatttaacgtacaccaacaaaacacttattatcagtatccaaggtcaatttcgaccttttcttagtctaaatgaaattagacaaaacggcaacactttgaaccacacgacaccaaaccctgtgtcgttttaaccctcggctaaagactcttcaagaaaagtctcgaagccttacacgatcaaacacaacacacactcaacacgaaaaatcgaaaccctagcaacgcgagttcttctcaagaacttgctcgatcctaagtaaaaaccctaggatcttcacccacacacacagattacttacaaaatcagttgtaactaacttttgattcttggtcttgtagaggcaaagccacctaggattgtgtcttttgtttttctgttaattgttgttgatatatgctgatgtggatgttgtaagtaaaggactgatgataaatggaatttactcaacaaaaacgaaaatgattaaaaaattcttctaaattctaaaacagatacaaaatatactgaaacggtcatttcaggagtaattacctaataatttttactagttagtttaaaaataacttttacatatttatcaatatctattacaaaaaatcaaatattatatatttgtcactaataattttattagtttataatgtgaattttttttcttctaaaaaattagaccaaatgtaatttttccttaaaaaatatcgtcataaattcaatggcagacccaggaataaatttgtgtggggtgtaataattttgatttttttattttaataatatagtatgcaaaaaacttgttaagaaaattgtaatatggtatcttgaacatataaatttaaaataagctttaaaaccaagctaattatttaataatatttatcagtttcatttatatatacactataattagtaacaattaatattttttttttaaagaggctctatatatgtgggtccttaattaattaaattaacttatggtgttataataatacaattgatgatatgcaacgtcaaccttgatcgtgaaatttttatattagttttatggatgtggacatgttttcaaaattttgattaaatttcatgaatgcatgtatgtattacttatattctaatttttcatttgaaaacaattaattaaaaataaataagacttcaataacaaataacctaagaaaatacaactatataacccaacaaattagatgaaaaaaatgaattttccagtacatacgtagttgggtataggtagttgagataacacattaattattaatattttattttatttattaattatttttttaagtcaaagatatataatagtaataatgtaaagaaaaaaaaaacaaatatagattatagaacctgcaaaattatatgagggtgggtggaattaatatatataccaacagagaaaaattattaattagaagagtaaaaaagaagaattaaagagaaacacaataaaaaactaaaagatatagataatgattaataaaaacatttaattttattagaaaaaaaaatggttttcatgatttcaaaatttaacttaacagtcactacatataaaaaactttattattatttttattattaatattagtacatagtaacttagaaatatctttaaagagaaaatgcttttaacaatataaatttaacatttggttaagtattgtatgacttgtcatgtgatgtgaaataatgttaaatgattaagaggtattttaatcatattataattaagaagtttgaaaatgccactataaaaatgtacatatatatttgaaaaataatatagttggtattagaaatttgatgatttggtagtacttcatattcagttcaatattcaaatataattatcttatggtaattaaattatgatataattgtatctttaagctcatccatcaaactaagctatctttaattaggcattattagctatttggtttatatgaacatattaattagcttacttattttcaacgaagtttaaaacaaacatggcgcaatcctacccattatccccaattaattagtgatttattattttatatgtaatgtataaaattctactatgatactaaaagtagtcaaaattggtgacaaatttataatacctttttgcatgttgtaaatttacaatataattaattacatgctatgtagtgtagtggtctttattggcatgcatatttttttatttgggtaagggttgaaattcacaataatttttcttggaagggattattgatgacagaattaagataaattgaggtataaaatctttataagtgatatgtggtccccaaaattattaaaaagaccaaaggagtgaggaaataatctcttttgttcataaaaaaaattacaatataattaataaacttgtcctaaatttgcattttataccatcctttggaaactatgatgcaagcacatgcaaaaatttgtaaaaatgatatttttttttggtttatatatgggattttttatttttatattttaaagtatttttttttgtatttttaattcacataacaactaattgagtaacctaaattgcaactaaaattcacatagcaacccacataaaaaccaccaaaacaactcaaactgtaaattaaaaataaataaaaaataatatataaaataattctctttatttatttatttattacagaactttcttttctttttatatatacttctatttttttttatttacattttaatatttatatatttcataaaacaaatacagtatactaaagtaaacatttttttttagtgtagcgtaataatttttacaatcaatcatatattagcttaaagtaaacattaatcttatatatatatgctcttggtcaatattacattgtttttgaaaaaaaaaaaagcaccaaaaattgtatattttttaaatcaaaagatttaagtgcaaacataataaatatttgaaggaccactagtactaatagtaagaaacaataataaaatgaaaaatctcttcaacatttgcagctcatttataaatattaattgataatcctcaaacaatatattgttaaataaattaacaattaacctaagatctatttgtatataacatagaaca

SEQ ID NO: 303148 - DNA, 1454 bp, Cannabis indica
aaatttaatttcgccttaggccccatatactttaggaccggccctggtgctagcatttcctgtgtgttaatattgctattggtccaattaagtaaggttccatataatttaatataatagtttttagggagtatcgctagccaatcacaacgcggcatatcgagaaggtactaagcaccactggtacctaatagcaatactcttttaattaaagacagtgtaatatacacttaattttaaatcagtgtttatatgtaagggtaaattgagtatttaataaaatatttgaactttaatttttgatcttataaattatttagaataattttttaaatatttacgaataatattaaataatacatgactataaaaaaatattaaagaacttttatatatattaaaatagataagaagctaatcaaaatactaaccttcgggtttatatgtactgtatatttttatgtatataatatagggtggaattacaatacactctcttaaaagggtattcagtaaattttttatctatttcgaaaatattttttagtcaatattcttttatgattgcgtacgttatagctatttagaattacttgtaaatattaaaaaaaaattaaatagtttacaatgccaattttttttttacatattttattgcatgtgtaactattttttcttacccgcatagtaagtagctatttaaacctaattttctagtactgtaaactattcagaattttgtaaaaatttacaaataatcttaaataactacaacgtatagaatcatgaaaaaaaattagaataacaattttttctcaataccaaaataaataaaagatctatcaaaacaaccacttacatctactaccaaaattttcaataatatatatagatggaatgttagggtttgatgaaagagatatatatggatgcagtactagtgaaaaatgaaaagtaaacattgtgcccactttgaaatcatgaggagatagctattatagcacatgtagatacatatagtgctatattatatttttcaactccatatatagtgacttatcaaaaaaaaaaagtccatatatagtgacttatcaaaaaaaaaagtccatatatagtgcattcattaatcatcactatattgaataccattcaaacattggaaatgaaattattatacttgaacttaagtgtgtgtacgtttcaactttttattatatacacaagtccatgcatgattgataaaaattctatcactacacacttcatgcgtaaataaatttcgtgttagccccactcatatttttttactttttaaaatacgggtcgaattataaaaaaatataggttatatagtgccataaaataatataggcaggaccgtcttaaggtgagaagaggcatggggcaaaattcaaaaaataggcctttttttatataaaaattaaagataaata

SEQ ID NO: 303149 - DNA, 3461 bp, Cannabis indica
tctaactctatcagtatagtgaacaaaattaaaaatgatgtgaagtataggctcttattgatcaaagataggaaaggtactagagtggagaagaatttactacaaagattgatttgtaactagtaggctttgtggttgtgcttctcttggagaagtttatttgtttgtattggcgacttgattaatgaagtttcttcttcttgatcaaaaaaaataagttcaaaggaaaaaaaaatctaaatattagacataaatatttttttttagaatatgttatttagatgtctttagagcacttacttacaaaatagagataaaataaatccagcaaaaacacattataatagcaaaaattaaaataaaaactaaaacgtttaaccaaattgaaaaagaaagaaatagaaaataaaataaatataacttagataaatccattacattgttttttcattttaactttttgtaatttattacaatataattaatatttcattgagtattataatgatgattacatgtcaaaactaatataatcctctttacaattacaatccattataaaagtaaaataatactttaataaaaaaaaatatagtaaaaaaatcaaaggtctagattatcctttcttttaaatattttataataggttttagaggttgggggacttccggggaacaggctgtgggcggattgaaagaagagaaggaacctgacttctcgcgataaaataaaaataataaaattattttaattcgtacatattttattctattgtatttttatattaaattaaatacaataattcagattacaatgttcattctaattacaaactaaatatagtaataaattgctattattattcttatccattacattaccattaccatttcattacactaaataaaacaccacctaaaagttatttcactctcaatctattacacaacaaacaaaaaaggaaagaacatttgcataaaataagtttaccaaagctcaaaaccaaaccaaccaacatgtgtgggtagataagtgaacgaaggaacaatatttaacatggagaataatttgagagaaggatttgaatcagtgcaaaaatgatattctttacaaaatgctattgaatcttacacttgactttttttttttggtttttgaaagaaaaacagttaatctagtgggatgctatcatgaccccaacttaatcaggtggtttatatgtaacaatttcattaacggtccaaagaaatgaaggccgttgtaatacgattgaactattatgattttagaaatgtgatacttgtaaacctctttaatttctttttcaattattttcaagaatatcattgtaaatttagactaatatttcactccacgaattggtgagagcaagtagacacaaaagttaccctcccatatccattttcagattacactctcgttatccaggcagagaagacaaagaaagaaacaaaatgaataacaaaactaagtcaatggctctcctctcaagtctcctcgtctaccgaactcctaacagaattcccactcactcatttcagaccacaccaccaccaccaccgccgccctctaacccttcccgctactctacactccatataggtacactactcacctattctcttggaagcttctccgagtaagacgtctcactatacaacatgctaacctccaccagcagcaacttctgatgaggccgtttcggtcaaagggacttggcctgtttcatcagaagccagatctcctgctgcatcaccattgtgtgactgctctaaacattgatcaggaaaaacttcagactgcaaggatggagcaatgttatttacatgtagccatgtcagctcccacaaactgtccccacctaaagcacttctctgcacaagcactccgcttgtcttcataacaatcaaggtgtccttaagcagctcgggtactagttcctgaagcttctcacttttcttacctctaactttcacctttatatatttctccattcggctgagaacacccaaccataatttgcagaaggttgtcaattgagatagatcaggaagcaaccgaagaaacaccttcggcaagagcttcattgcaagtataagtgttccttccatgtttcgatagtctttttgagagtgaccttgggcaatttcaagcaagtcatcaagcatggtgaagaccaccatatcaaaacactgtagccagagagtgtgaggaagatgtaccccgtccactccaattaagcacttttgcaacgacaacaaagcatggtttctaacctcttctctctgatccaaacaaacttttcttaatccctgtatgagacgcagccacatctccccaatatcctgagacatcctcacagcatcctcctctgccattgattccttagcttcagaggcccatctagttaagcaatcaacagagcctgccattaaatccagagcacgaacagaacgctctgcctgtccaacacgagactcagcaaactgccttgatgcatctacacagagaacataattagctggtaacaagtgggctccatcagacataatgaataataatgcatcaaacccagcctcggaggcttctggatgcctagcagtgatagaaagtagagatgtaatggtgcgccaccctaattgtgatctgatatgagaagcatttgcttttactaggcgactaacttcttgtgtaatttgctcgcagtaagcatctgcaacccgagcatcgagtttcaacacaagttgcaatgatcgcaaaagttcatcagcaaggttctccttgtaaggaagaagacgctgacaaattcgaaggaggccaaaaacagccttctccaccagagcacatggcatgacagttgactgaacaatattggatatgtgatcatagacaccctgccaaagaaggacgatcctgtccctgttattcagggtgattgctattaacaactccagacagaaaactgcagtatcctcatcctcaggagagctgttccctttcggaggtctcccagcagcccagattagtgctcgtgcaagctgcaatagagatcagcttgcagaaacttactctcagtaaatatgctgtcaatgtggcacttttgaatagtctgcagagtgcgctgatgagctgcaagctgctgctcagtaggttgcgaccttggctcctctgtatcaagggacaagagttgactaaatcgtcccatcaatccagatgatcttctaggagtacccatgggaggcatatgagcagaagatagggaattcgtgagaggtttgccatgtccagtgtcagcagtgagctctgactcatcagctgcatcactggccacacgagctgggagaagaccaagtttgtgcaaccttaagatgcaatccaagatatttctccaacctgtgcgaatgtaatcaccataactgttggcaatggtgaaaactgtc

SEQ ID NO: 303150 - DNA, 714 bp, Cannabis indica
taggctaattataacctaacagcggtcattatggtaagtgttaaacccccaagattggcttcttttaatccaaaaatagtctccagcaaggagatcccacgtctcccttatttgtaattgggatggaatatctctctcgtatcatgaaaaaaatttctcagtttcatttgaggtgccatggtttgaaactcacttttgctttactgatgatctccttttgttttacaaatgtgattacattgctgccacattactgcttcggagtttcaagctcttttccaatacttctagccttcaagccaatgtgagaaatttagatgtctatggggctggtatggaccctttaacatttgatagacctttgaatatttttgggtttcagtgaagttctcttcctttaaagtatcttgggcttaaaatttgtttaaaaagaatctctttagttgactgtgattgtctgttgacaaaatgacaagaaaaatttgttcttggagtagtaagaacctctcctatactgggaggacagtcctcatcaactcaattcttctttccactacaaaatattgccacttttcgtgacaactttttagtcgcaatatagtttttttgtgactaaatgtgacttttaatcacaacaaaatattacttgtgactaaaacatagtatttagttacaaggtttcactaatttagttttagtcacaacaagtattgt

SEQ ID NO: 303151 - DNA, 1772 bp, Cannabis indica
gatattaaaagaatgatgttagcatttctcttaaattatatatccttagagaaggtgtgttttatttgatgttctccaaaacaatatcttgctttaattaatagtctgaccacggatagcaaagaccaactcaaaattcgagaaaattaatgacccaaacattaaccaatagagagtccaaaagttcgtataatatggtgatatgctatgatgacgatgatttaatttgacgttaacatttgtagtttccaggaagctcgcaagagaacacacaattctttggccccaagtctttatattatcttctccacaaagttaatcaacggtcaagcctatagacttgtcttaacattgaccaacaagaatatatttaagtcactacaaatactgtgaagagatccgtcctttcttttctctttccatcaaaaatagatctctcaaaaagaaaactattaaattaaaaccaaaacacactaaatcactgatcttgcccactcaatttttttcatacaagcatacaaaatgagtcaagaaaccttgccagctacttctaatgatgaatggattcaatattattaccaccaaacccttttggatggtgaagagcctataagccacaataataatcatgatgtccttagtggtgttatgtcgtccgagagcttagggagccccggaagctcatcaccaacggctagtcaagatccccaagttagtactccatcgaaacctgtccggcgacgatcgagggcttcgaagaaaactccgactacccttctcaacgccaatgccaacaacttccgagccttggttcaacaattcacaggctgtcctactccaatttcctttgccaaccaaaaaggccctcttaacttgaacttcggcctcaagaatgccactcccatcattgaaaggccttttcaaaactacaattatcaaaaccaatctcatcatcatcagccaagtgtgccacaaaatttgattcaccttcagccacatgtacaacaatcttgctttgaagacaattattacaaccaattgaatcaagtagaccaactatcttactcttcttttaacagcactagtagtactgtcacgagtaatggtttctatccttcatcctcatccttgaacgctactactaatatggagatatccaatggctttgtcttggaggatgagctatcttatgatgactttaatcagattttcaattgatgatcggtaaagtagagtaattatcatttaatcattcatatgatttactatcctgtgaccaaaaaaaaaaagaaaaaaaaaatataggaagatcaattaggattcaactgctcaaattctatatatttatggtcacagttgtcatgcgttaatcaaatttcttgagttccgtgtgtatcatgtgatgtgcccattgcaagtttatttatttgttaatatttcattacaatattattattaattactcattattgccactttttgttttcatgtaacatgttaattagcttgtaggtaattaatttctcattaacaaataatagatgattgtctatcattaattaatcatttgtcacttttagcattttttaaaataataatgtgagatacaaaaacaatgtatactttgactggttctatagatcatttgtacatatacataacttgttatgagttagtccgagtaaaagttaactaacaatgtagtgaaaaaagtaattagataaatattattttggtattattaaaatctatcccaaaaaaaaaaaaaaatt

SEQ ID NO: 303152 - DNA, 2051 bp, Cannabis indica
attgtgatttaggttgttccgttacttgttttataatttatttaaaattacttatttttagttgtttttaagttattttcttacttttttgttgagcaaaattatttttgtattaatcttaaaactttaaaagtgtatttttactaaataaaatataatttttaacatttttatcaaatttacgatttgggttttttaagtggttgcagcgctagttgcaattgggtcgggtttttgtacgattttttgttgcaatatagatttactatgtaaaaatcccgtaaaaaatagaaaaaaaaaaaaaaaaattagttttaaaagtgtaaaaaataaaaaaaaaaatccaaaaaaaatttatcttgtaaaattgtaaataagtaaaaaaaaaaaaagtgttttaaaaaaattgtccatattttaatttgttgtattaaatttatatgtgaactatagaatttggatattttaaataagatgtactctactactcatgtgtttgtcttttgttttctcttttgaacacaatttatacattcattgtagaattataatgttgattattactgtcttgtcttgtgtcattatatttgctcatcacttatactttccattagttctcgaaataatattttgttagtaaaaaacctccgtgcgtcgacaatatgaatgataaattagaccatatcgtatttaattaattatatatattaacaagtatctataaattaataattcaaatataaatatagtgaaggatgagaagaaagcgatgcctttacgcgtacatctagatcttaatttgtatatatattgtatctgtatatataaatatatatatatatatatgttaagctaattaatagtgataaataatattagtgaaaatctaattctgccgaccattgcacgacgtgtgttcataattatagcttctcattataaatatatatataacctgtctagaaacactcttgaaaatcagaattaattatttgtcatgatatgaatattgatcatgagtaataataacattattatttatggaatattactaataataatatatttggccggctctactataacaaattgtaaaccaatgtgccttctttaaccaacttggccattcgatataggaggagcccaaggcaacaaccatataattcgttccttaaaacaagaaaaaagaaacaaagaaaacactccatcgatctcactcccaattttagttttatataatttatagtgtaagtagtgaagctatattagttgggatcgatgcgatcataatataagaaattttagctcgcaaggttcagtcttttagacctttaacattgcttaacactaaattgaaaaaaaaaaaaaaaattagattactttgcatgcatgggctatgcccctataatttattatataatataaatgaaattaagttttatacaatgtgtgcaaaaatatttattatttttttaaacaagtttttttatgggaaaaattataaaaaaatatactaattaaggaatatggaaaaactatattaaggtaattaccatttccccatgggtaatccatcactattttttaactctttttatgtcccacataaaatattttttttcgtaaaaaactcacaacatttttgcaaatttatgccttaaaaatcatagaaaagataattctcatatacactttgcttccatataaaaataagtatatttagtttttaaaataagtactattatgaaaggtgccttatgaattggccgaataatatttaaatttttttaggaacttgatcacttgcaaatttaagaagaaaaatattcatatttggccttcctaacatattctttaaataaattaatagttaatattagatgaatatactgtgacaaaacacactgaatacaaaccactgagactagctcagtaatgaggaaataatgagagaaaaagaaaaagcatgagctcaaacataaaaactcttttaacacaaaaaaaaaaaaaaaaaaaaacaaaaaaaaaaaaaaaaacaaaactaaataaga

SEQ ID NO: 303153 - DNA, 1203 bp, Cannabis indica
aaggaaacaacatgaagcacaaaccattccaggagatgtacttaaaagatcaaataatacatataatagaatttcaagtgacagtttgtctactagaacatacacagaaattaaaaatttaacattataagagaaacaaaaaagaaaactaatgattttccaggcactagaaattattttttaataggaatgtaaaccatagatgatttgcatgataatttgtgtagataaattaactttagatgtatgtgagaaaaccttcatgaatcatgataatgatggctatgaccccaacaacaatttggaaaagtaattctacaagccttcttctggcctcaagaattcatacggtaacggaacaatgaatcctcaggatccacattgacctccttctccaacgatccaagcagaaaacataagaaactatatttcttaaacccactaagcttatgaagctaccatgagaatcctactcctaattctgtaattcatctgccatagcagtagtcgaggcaaagaatcttatgaacccccctctctattttctaccatattattaatgtttaatctccagctttgatgtcatcttgtctacttctattcctgcaaattccaatgttcatgaaggcttgctggataagtggccttgatcgaggctttcttcgatggttggctttagtttcacaagggatggcaaccttagtgtggtggccactggcgactatgaacaataataaaagtaatcaaaccaaaacttttttaattcttcgcatatctgttaaaatgagatcaaaactacaatcacattgcaggcacacacatctccatccaaatagagagaaatttagtaaatctaatgccagaatccttcccaaataaaaacacatgcagagcatgcataaagactcaaaacatcttgtccattcatttcactttgaacagacaaaaaattataaacataaatgttgccaaaaaaaatcccaatattttaacaaatgggaaatttttcctagaattagaggacaagaatattctgtttaagcaatgtgacacaactttatgacctacttctcctaccatatactaactaacagcaagagattcataaaatttaaaatgctaaagccaaaacttcggttcacctcacagttgattatggagctctccttgtaaggacagccaagagatagctgagagcagagt

SEQ ID NO: 303154 - DNA, 4360 bp, Cannabis indica
ggttggattggttagaggtaataaaatagaatgaaattgaaataaaataatttttattttattcttttgtttggttatattttaaaatattgaaatatcattttaatataatactctttctgccattttagtagaatgactatcctatttttaaatggaaagaaatactattctaataatgtaacatgagaaaaaatttctaatttttttttttaaattattttttattgcattttaaattttatatattctattctatttctattcttattcttattctcatttctatttctatttctatgttttcagtcctctaactaaacgccaagtacttaagtttgagatttttttaattttaactcctcaaacccaccaaatgaaacttttacacaaacaccctattatagtaagcattttacttattatttttgaattattcataataatctacaatatcgaaaaatagattacacatttacagtaagagtgaaagtgacaccccatttaagaaactccttatgtatatataaatataattttttgtccttgaactataatttttatttaattgtattcgaatttctgacaatactttaactattacaactattaaattacgctctctccattgttttaggagaggaatttgatagtcgtaatagtttagggggcacaacacgtcaaatcaacaaaaatttagggccacaactttgaaaagataatactttagtgggtgtgtaaaataattatgtgtcaatttctcagcacatcataaaacatttgtggtaatagtttaaaaaatattaaaacaatataaaaaattagatagatgtaatcagatagtagtaataatttaatggaccaaaaacctatttattgtatgattctatatgttaacacagattttcgttaaccaaaataaaataatatttacgtattaaattctctacagaaatatatatataagtaataaatgatcagataacaccagatatttttttacgtggttttgtaattaaaatttacatgctctacgagtccttattatttgggatatttattgagtacagaatacaatcttagaatttgaataataatattttctctctcaattttgtcgtccatttttccatgaaatctgtctctatttataggaatatagattggcaattactctttttgagtttgattcaaaatatatcggttcatgaaacgtggataatccccacgttttatttaatcacgtgtagattaatatctaataactactcaactgctttttactcttatcctttaggcggttattaccgagttcgaaggttgtatctcgctcgattcgagttatcctccttgcccttcttaataagaaaaaatgctaagtgttgggaagtagtttgtctcgtcatattcttttattggcattaacaatgcgaggtgatcttcttgctatgtgcaatgtgatgcagctatgttgttccatttattctactccagtggatgaatatctcattcttgtgtgtatattccaaggcatacatatatcccgttaatcgtattttaatagttattattcttgtctcgcttttaactatatagtcaacgagttttgaatatttatctatcaaacatctacataataataacaagttatttaatatgcaattattgatataaaataattatatccttagagttgattcattttccttctgttagacacgtgtcaacttttagtgtacagtcgaatttcaagtataacactatataatgtatattgtaacaaactcaattcacactagcacgaaattttaatttttcataaagtgaaagatgtatttattagggctatggatggatgataaaaaaaaagagaattatcttatatgttatttttattttttttttaaaaaattattatttaggttgttttgctagttgttctagtaatttctatgtgagtgctatatgaattttagttacgatttaaattattacgtgggttgctatttgaatttttgtaaaaatacaaaaaaaaatacttttgagtggaaaaattaaaaaactcgtaaaatgcattacaaactaccatgccacaactttgacacttgtcctttaggatgagaatatcaaattcaactttggtaaattaaatttttttataagaattttttttatttattattatataaaaatgattgattttacaaaaatctaacaatatataaattctaaatacatatatagataaattactataaattcttagaaccttccatgtaaaatgtacatttcagtcatttcctaaaaaaacaatacattttatgtacttgttcaaaaaaaaaaaaatatatgtacattaaggaggtgtccccactagaaactctcctaaagaaagtataggaaagagtggtggaaaagatcttttgcttctttaattgagaaagataacacaactaaatgtttttggtagaacaagggtccaacctgaaacctctcaaccaatcaaaaaccatgaaatgcctatcctacatttccatgtcatcacactatccaaatgaatgagaaatgagtggttctgcacctccaaacttggaagaacaaccatccctacttccactgcaacacaaaaaattatcagatcatcctaaaaaaaaaaagaaaaattattaatccctttacaaacaaaaataaggaaaaccacataaataaaatttaaaatctttatcatatcatttcaaatactcaattttctcatcctggtgtgtgccttagaatctctcacaggaacaatcaattgatatagtactgccatggcttcaagttcaacctccgctctaactatctcttcctcatccacctttgtcgacaccaaggctccccgccaatccgccggggcatccccgcaatgtgtgtcactccccactcttccaccgcccccagtgcagactcagaagcgcccatggaagagcactgcttactgtgagaaaacaccctttattctgttttgttatgatcactaacactaacattttcaatctaagtttgttcttttgttgcttactaggccgtaagcttgctagaaatgtcattgccatggccactggagaagcccctgctgaagttgcaactgctgagacaccagagatcatccagaccgttcaagaagctgtatgtattctctataccttgtttggttataagaaaatctatttggtagtttaacaaccacattcttttttttttactctggctgcacagtgggacaaagttgaagacaagtatgcagtttcttcacttgctgtagctggtgttgttgcactttggggctccactgggatgatttcggtgaccattttccccctattattaaactttcactttcttgaacatatttagaattgaaaattgtgaagttgaaataagtgaaaatatgatttttgagacatgagcataattttccaacaggcaattgataggcttccattaattcctggggttcttgagttggtaggaattggctactctggggtaagtttgagtgtttatttatataatactaatttctgacgagtttataagcatttcttattccacattagtgacattcattggatcatttgtctaatcttatttgcagtggtttgcatacaagaacctggttttcaaaccagacaggtcagtatttctaattcagattcatgttattggtattcagattgttcctttttttttaacactattttgattgaaaatttcagggaagccttgttacagaaagtaaaagacacatacaaggagattattgggagcagctagaagaacctcaaccaaattgttgctgagatgagttgaaattccggcttttgaagaaatatatctcagcattgtccgtaaatatgtgaccattctctggtttttctttttttctctataagcttctgactagtggcaaattggcaatgtacttctcttggagatacatgtaactattatctttcctttccctttaaagcattaaagcaccatgtagttctgatataacatgtttttatatacttggaagggaaaaacaaatagtctaaattttagtaataagtcaataaattgaaggtggaagtacaacaagaaagttttttttattttgttctctggagtttactaagtttgatagtacatttactagagagatggaacataaaattagagtacatgaaacagcagtgaatacattgtcatagtttgtaagaaactaaatactttatctacttatagaattccatgatcataaagttgcaaacaaaacattcaaatcttatgccactgaatcctgcaccggttgccaaggctaagaactcttttt

SEQ ID NO: 303155 - DNA, 4495 bp, Cannabis indica
ttttttttttgaaggaagcaaaacctctgttattaaaggcatgccagtctttgctgagagcaactgatcttttggaggtcatgaacaatttgagaaatggttcagattcatcttctttgaaaaacagagacttatcgccatcatcaccatcaacttcagctgtagagtcatttattgaactcggacgggtctggcaagctcctttatacgaaattactctaaaacttcatccttatgaaactggaggtgggcttttactttattattccagaatttctcactgttccgagctttttctcaaaacacctatggaaaagtagagatatttgaatcacttttcgtactgaaattctgggtgtttatccaatatagttaattttatgcctctgttgggattgcacagtgtttgatcgtttccctttaatcttaataacttgtttattgtttcaggttactctaccactcaattctctgaacgagttatccctgtatttaataacttaatttccaatgacaccagtgaagatgtggaagctgagtttatgaacactcaatatattttacctccagatagttgtttctacatggtatgttagttttgccattttaaaattaacgaagaacactttcgattattcataatttgtcgatgatttttacttgttatttttaaattccccaaaacttactaaggtggccactattataagacatgtcatgaaatctagttctcagtcttcagtgaagttgccacttttacgtgttaacccacttttgtaggcttaaatgctgaaatatatttcaagagtgtcttaccttttctcttttaaatttttgcattctatcgtgtggaagtctgatctgaggcagattcacaacctaattcctggtaattcctgcaaatgacattatattcgttcttggagtctaaatgtgcagttaacattatcttctatacctcttatttgcattaccattcattaaaatgcaaatgtttttaagctgttcattccggaacttttcttgttcaagttattgcttactgtggaaaacccttttagttctacttctactcatagaattgtactgaatattactattaatttttcctgcacctttatgatgtagctgagaaggactgttgcttcaatcttattgtgattgatccaccatgggaaaatggaagtgcttaccagaaattgaggtatttcccagcaaagtttatacttctgtgaaaataaaatggacagatacatacttgtttatatgagtggtcaatctctgcatcttcatttttctgaaatccattttgttttttatgtttccgaagcctgatttagcaaattatataagatttggttctacttaacattataggtacccaactttgccgaataagtatttcctctcccttcctatcaagcaacttagccacacagaaggagcgcttgtagcgctatgggtgaccaatagggagaaattacgtggctttgttgaggaagaactatttccagcgtggggggtcaaatatatttctaccttttactggttgaaagtaatctctctttttttgttaacaattaatatagttgaattttttctggaatgtagtgcttaggtcctattttgctttctacttgaatattgcaggttaaagcagatggttcgttgataagtgatttggatctttttcatcataggccatatgaatgcattcttttgggacgatgtcatggggaggtgagcttataattttaatattgttgctggcatggtttagagggggatgaaaaacttcttaagttgctgagattttgcacattattgtttgcagtccctggattccagtgccacaaaaatagattccatacaagataatcaaattatcattagcatcccgggtgattactcgaggaagccccccgttggaggtattacagttggcacatagtctggggtttttattctttaccatgttctgttgtttaattgttgatacataatacttattaaagtctatcctctactttacctcgcattgttgtttgtgttacagttggttaaatataaagtaagcgattgcacaaagtagtggaaaacacttgatgacttaatataatggagatgtaaaatttgatttttcgttgtaggcatttaaatttgtatttttgggcttaaagtgaatgaagtatctaagggtgctaaatttttttgggaacatttggaggtgttgagtacacttttggagaggctgacagggcctggaggtgaaatttgacgttttgttgtaggaatttaaaaattgtattttggggtctaaagtgatactatgatgtctataaggatcccgagaaagtttgggaacatttgtagatattttaggtcacttttgaagaagatgatcagacctggagacgatgtattgcgcacacatgtgcgcaaaggaggcgagcaggtgacacattgctcgtacagcttgtattttccttctattctgtcactttagttggtctaatcgcattggttgagcctaataacaatatctagcttatttgaagggttttcgggaattgatcacgcctaatgcaggcgacgcattgtttgttgtctgtacagcttgcgttttccttatattctgtcattttacttggcctgattgggttggttgagcctaataacaatatctaacctatttgaatggtttttgggatttggtcactcctaattttctctctctagctctccaagaatcttaattttttttcaaaaaaatactgaaattgcttgatatgttttctaggcttgttgaatccctctcgcaacttgtcagtggtttggacaaatgtttttaacttgtgcaagcttttgtgttgatttgttcttagttctccataaattttgtgattgtgttctttgattttgtatttgtccattgttaagagaaaccactacccccaacagtttgtgagaagtgtggcttagtatattccttcttcctttgggttgaaaagtatagctttatcctgttaaggaatggctatgcagtcctaacttgtgaataactacattgttgcttgaaacacaaaaacatgttaacatttgtttatcccatttatttatttattattattattattttccttctatcccagttgattgattcatctttaaatttttaggcctgctacaggagtatgttgctgggaatagaccggttcgatgtctggaactatttgccagagaaatggtatctggatgggtttcttggggaaatgaaccccttcatttccaagaatcgcgatacttcaatgagaaaaagaaagggtattagcgaatagtgaatccagatgaatgacagtttcttctggcttctctttactggacccgtacattttggcattcctctacctctaatgagtgtacctgtcatgggagttttggaagaccattccattgtattgtttctcacaaatgaaacggctatgtaatgagtgcccctgactacaaacggcataatcagacttgtatgctgtctctaaattatgttctctgcctcaatttattataatccatgtcttattactaactatcgcaattcatgtagtagctcaagaattttgccctcataaaagtagaattgtccacttttcatttcaagtgtaagccgtccggtctaaacttatattaagttaaatctgaataggagaaaaattgaattccttttcccacataaaatttaggttccaaatggaagaaaatgagaaaggattttagaatcaattgaaaggtatttttaacaaactaatggatttacatgggaaaacttgtactttactccaccaaagaaaggatatgtatgatttcagccttcgcgtctatctaaatgttgaagtatggatctctctttctttcttttggctcaaacaatggtaaagtagatctttatcaaaaaacaaaaacaagggtaaagtagatgattatagagagtcaaagagtgcggtcttatctcaatggttagagagtcaaacggatggggctccacaaattagtctacattaaatgggaccataattttttagcgttggtttttttttttttgataaatttaattaaacataaaatattaatccaattattaaaacccttatcttgggttaagacttggtagcaattttttagggtcgcctatattttataaaattattaaattaaaacatatttaattgtaccaatagcaatgtgacattttgtagtaggggtgttcaacaaaatttacaaactgcccaatctgaataaaccgcccaaatcaaactgaataaacccataaaaaatacaatccgaaataatacaatgaaaaaccaaatcgcccaatgaatatattgggtggtttataaattattctaaaccgccccattaattcgaataaaccgaattaaaccgatttatatatatattttaataaaagtgtatataatatattacataaattatattt

SEQ ID NO: 303156 - DNA, 1058 bp, Cannabis indica
gtaaaataaattccaacagcacaatctctagttatgaaaggcactcggtggattgtgggggacgacaacaatgttcccattctcggtgagccatggcttcccgatcctgtgtatccaatgtttgtatctacttacccgagtctccaccacgccaaagtgtgcaaccttatgaccgctaatggttcaggttgggatgtcgatatcctaacagatggttggagcagcgtgatcatgatatagtgttgcagactccagtgcaagctcaaccagacagagatactttgatttggtacaaggaaatgtcagggttgtatccggtcaagagcgcctacaaacttcttcaagaatcaaatggtggaactagcttcgatgatccagcagtgcattgattttggaagaaattgtggcaactaaaaatacctccaaaaatgaagaatctactatggagagtcggtaagaattgcatcccaactttgtctcaactccatctgaagcatgtcgaggttggtattctttgcccggtctgttccttagaggagcaaaccatcccacatgtacttatcacttgttcaactactcaattatgttggaatcaggtgagcattggtagaaatgtacaacagggttctacttttgttgactggtgcatcagtcatcaagctactggtggcctcgtgcttggctatttggaattcaaggaatgacagggtatggcaaaacaaagtggatataattgtttcatcggctaaaaactatcttaatcaatggcaactcgctcaaggcttaggcaacgagctcttgtttacaagttttataccgagggacggagcagagcaatgggtagcaccaaatgaaaatagtattaagatcaacattcatgcggctgtgtttaacgagacccagtgctatggtgtcgggtttgtggttagagatgcttctggtttgctactggagggatgtacaaggttgttcttgtttgattttgtgccttaaataaaatctatttcaatataatcagatttactatttaataaagatcagaaataacattttatgtt

SEQ ID NO: 303157 - DNA, 1436 bp, Cannabis indica
gtggtgatcatggcacgccaacaatcatgttagagagcgtcacaacatttgtgaagttggcacacattttttggtgttccaggatcgaataatgacctcaatgtgttaaatgaatctccattgttcattgacatcttgtaaggacacgatctcagagtcgatttcacggtaaatgttaaacaataaaataaggtactattggaagatggaatttatccagaatgtagtacatttgttaaaactattgcactacgtcaaaggaagaaaaaagattatttgcctaatgccaagaagcggtgtgcaaagatgttgagcaagcattcagaatacttcaatcttgttttgccattgcacgaggattgagtcggttttggacaaaatatttatgaaagacattatgtatgattgcatcatattacacaatatgattgttcaggaccaaagaaccgcatatgtaggttattttgattttagttataatgaaggcccatttgaaaccctgagagttgaagtaacacttggacctatttcctctttcctgaagatgcttcaaagaaatgctgaaatttgtgacagaaacacacatcgcaatctgtaagccgactcagcggagcacatatgggccaaaatttaaaaagtattagattagtttttttatacttatgatatattaattaattatcacaatgtaatttgttgcagtactgcatctctatttggtttatttttaatgttatataaaatctatattgtattaatttatggtataggatatatattataagaatatatataattgtaaaatttaattctttaaaagatggtagatgggattagacaatttttggagttgccaatcattagagtaattttagtagtaaaatgtgtcaaattttatgtgaatgagaaataaaataaaaaaatagtattttatgataatatgtgtagcaattatggaaactataaatgttacttcataggagatgctataaatattactacaacttttatgtaaaacacacatatgaaagaataaaattcagtcaaatatacaattataggtgcaatggaattttgattaggtctgagagtggttgatattattataattcatttgtaacaacccttatgattagtaatcttattttctagccctacaatcctactctgaaaataacatgtttacacttatatcatatttaattgtaacgcacacgtattcccttaattggaagagacaaaataattagattatagtaatgtttatttttatttataataaatccttaatttcctactactttctctcaatattatcatgcagcccacaccataagtgatagaaaaaagaaaattgttaaaatgtctctctcttttctaccaaaccctaattgtttttgttaaataggaatatatgcatcaattttatatatata

SEQ ID NO: 303158 - DNA, 2119 bp, Cannabis indica
ttaagtagagaaccctcaatgatgcataacaaaaggaaaagatccatgacacacactcgaagtcactcacatcttatcccgacttctttgcatgtgctgaagcatacggtttaaaattagcttgcctgcatcaattaaataaatgaaaggaattagaaatattattttaaaaaccaaaaacaattagcgccagaacacagggagaaatcacttactaatatttgacccaagcttcctttgccttatttgtttttatctcagcttcatcttttttgtctaaagcatgagccctctttcgtttaggtcccattacaaaatcctattacacaagaaaaaatatcaaaattaaaaaacattacaaatcgtatacaatttgaagataaagtttttgaataattgattgcaatagctaaaatttcagtatattaatgacatccctatacttaattttgtttcttgtttcccataacaagtatggatctctttctatattatataaatacatgtactatagtctcattttatagaaagaaaaagaaaaaaaaaaacctaaagaacatgatattatggttggtttggataaacaaaacctagctaacaaattttaagctttaaaatgtcagtgtggtatagctcaatcaaaaaatgtgtccaatttacagataaacttaagcatatgaaagccaagaataagaaaaattccaccaaggaagaacactaaaatgataagcctggtacagttgattaaataaagaagaaatatgggttttctaaagctggtgtaagtaactataaattgaacatttaatgcttaatcttctcatatctgaaggatctaaaattaatttggcaaatcaaacatacagtgggtaggattcaaaatgagtgtaaatttcaattaattagtgtattaccttgtgaagcttcatataaatatagagaatttttgggtggcctataatcagcctgttgtagaggggtgttgggaagtatttgtacatgatataactgatgtttttggttgaacttgatcgatcttgaagctatgtattttcatcatcattacttgttcggatatctttggattgtacttgtaaatgatagtttaaaaattgtgattacaacacataagtggactaggtcaaatagttcaatcttggttttatattaagcaatattgagaagaaactaggatactcctaaggatcaagggaccacgagcaacttcactataaaaacattacaaacagtatacagttgaaaaacaagcagacatattaaagttgtacatatgctaatgattgtaatcactctcaagaactcgatcaagcaaatattacaacaatcaatcataaccaaattgactaaaccagaaagtatgaaaaaaatgtggagaaaaagaactaaatttgaatcaaaacataatagaaagataaaagaggaaaataacagtaatggagacctttttattgatgagtgagatcactacaagagattagatggaatcaatggaaggatcacctttgaattacacagaaaagcttacattgggggtatggagatcagagacactcaaaaccgttttacatccctccaatacacatgaaagctcacattgggggtatcttagttttccatagtacaaccaagtacatttactctaataaaacacaaaccttcacttgaagagcacaaaaatgagttttctttttgagagagaagaatacaagtagacaaatgacacaaaaatggttttctttttatgaacagaggaaacttcaaaaaggacaaacgccactccttaaatttttcaagactttaacttttagcttcccaaccgattttagcccgaaatccaaatgaagaaaatggaaaatggccacttaaatgaaaatatagaagatggaagtgaggaagattgtcatatcagtcacttaatttttaaagtttaataatatttaatagaaaagcaactgattacccatttgttttttctaaatacccctatattaacctcaatcctcagatcaattaacgtttcaatctaactaacggttacagtacatccactaattgtataccctaaaatgtaataacgggacaaaatcttatccctata

SEQ ID NO: 303159 - DNA, 5804 bp, Cannabis indica
atcaataaaataccacaaatagtctaatattaaagcaattaattacactatataatcataattttctttttctcttcataagtaatagagacaaaaatgctaaaaaaaaatgacgactgttaatggtcattatatttgtatatattggattaactatattataattaattaatatttaatatatattgaatttttatgaggaaggcactgaatgatacgggtcaatttggaataaaaagaaaaaggaaagaaagaaagaaaaggtggggctcaaatgaagaaacgacccttgaataaaatatcatggatgtgattgtatatgcttcttaaaagtatatttaatcattatatattaaacattattaattaatcagcgcacggggtccttttttcttttcttatataaatattgaaacattatataaaatatataattttttatgagtggattttaatgatacttaaaattagattaatgatgtttctgagtccgggtatgttcttattagagaatttccaatagtaaaaaaaaatgaaaggatgcttgtttagatggatatataaaatagtaaaatattgagatgttatagtaccattagagaaaaaaaaaattatattctagaaatatgtatgaatgatatacagtagaaaaataaaattaaaaaattattgttgttaaaaatttaaataataatgcgtgctatcataattatagtatttttaaaaagtgttatactattggagtaattttagaagtaagagtgccaaaaataatgtggaagagagataaaaaatgaaatattatatatttggatgatatgtgaatatttagtatccttaaaagatgctactattgttgatgctcttaagagatgttattagtttaatttattaggtttagttagcttttattttatttatctttattatgatatgatgtgctattatttatttatttatttatttcaagttcaatccattctttaggttgagcactcaaccatcgtgactacatcaataataatttctttagtctcaaagaatttgttatttcaaactattaacatcgatttaatggtgatgcatcgaagaacaactaacacaaaccaacaacaaaataaaatcatatcacagaagcaagattagttgccataacctaaataaaagacactagaaatatgtcacaattacaaagactaaacagtagcaagaacctaatcgcaggagcaaaacacaatcacagtagcaaaactacactccccgaccaaaccatacctaatcctagggagagctgtttggagagaaaagacaacctctgccaactaaagatttagaaataaaaaatcctagtagacaatataaaatatttagagaaaaccactctaaaagtatatttattcctttttttaaaaaaaactttcgttgatattttatatgtgtgactatttgaacattgttggatttgtaagtttttaagaatgaaaatcttaccataattatatgcgctcattcatttaaataattatacacacatataaaatattttatattgtctgctaaagttttttcgttactaggattaggtttttactactgctattagtcttgtatctatgatatggttttgagtgtctagggtgattgcgagtcttcttccatgacataatttttttttatttcgttgttggttcgtattctttgttcttcgatagtttttcatcaatcgcgctgttagtggttagaaataacaagttctctataattgaggaggttgtttatggtgtagttatatatgtaccttgcacaatagttgagtgctcatgctaagaggttgaatgaacctactgcaacagtttttattgttgtgtcttctgcacatgaagggaagtaaatataggtgttattaagcttaattgtgatgatacaatatttttttatttgattttatttttttcttttgtcaaacaagcaagaaatcaagcgcttgatgtattggctcatttttcttattctaatcggttgtgtttccaacaaagaagatattgcaattaaactgtaggcttttatttcagctaattgctatgattaaaattacacaatttcttcaaatatatatgtactcataaaatatattttataatagataattatttaaaatttaattaaaaaaagaattaaaagtacactacattaaacttttaaaattatttcttcaaattaaagtttctttaaaatttattatgctctacattattattatattatttattgttctaaataatatttattattctattttaggttttaacttttgtggatatttatatacttgaaattaataaaacatattaaaataataaagaaagtgagattttgatagtatattaatttaaaaaaagttaatgtattttaagtaaggtaagagtttgaggtatagaataaagaaagtaaaattttggtgattggttttcaaaagattattctagatcgatacacgtttactatacatagcaatgtgcactaaatattagtcattcatatatttaagtgggatcatatcatttttaattgtgtgattaaaattaattaaatattattgtgtataagaagtagtgtgtgtaatttgagtctaatattcattttgataaatagagtagttagcccaacaaagtctataactaagtcacgaacgttcttgacaaagtaaaactaaccattatacaatatgcactcagtactctaggcatattgacgttggttgcattaattcgtactttctaaaagcctagtatgttgataccctgatattctaatttgatagctactgaaacatgcatgctgaatatgtgatatatgcatctattatactaaaattatctcaattccacaatcaagtgtgctggccaatctgagtggcaactgttgcttgatgattagaggccctaagtcataattacgtaaaattggtaagtaactcactaaatcacttttggatacttaaagtcaaaagtagatttttctctatcgataaatagcgtggcaatactttaaatatcaataaaatgtaaaaaccgaggcacccaaaaaccaccccaactggtagactgaatcccttaacggttcaccatttcttgagattctgcctgaacaaacagttaattgtctctacagaatcagttatctgtttacatgcagaaaatactaaaacctcaattctcacttcgattttaccctaacttaagcataacttccaaaacacctaatagcaacacaataaacataactcaaccagaagttacatcattaagtctctgaagaaaattttgccatagttgagcaagctttgagtttcaaaactctaacttgctcaatcctaactacaaccagccaaacatagctctatggcaatttttaacgcatcagaacgtaccccaaacctagcataagaaatagtcctattatcttgtatcaaaacgcaccccagaccttatcaagatgcttcacaataaactaaaaaaaattcttgatctgatggtagagctaacacaggagctgtgatcaatcattgctttagctcttcaaacttgcttcacaatggtctgttcatataaatcattaattcttattgattaagtctgttaagggcattgaaatcttggaaaccccttctacaaatcggcgatagtacccagctaaacccaaaaaacctctgactttagtaactttcattggccttgaccaatcccttacgaattcaatctttctcggatcaatcatgatcccatctttactaacaatgttccctaggaaggacacttaggatagccaaaattcatacttcttaaatttggcataaagtttatgctctcatagtcattaatgtaaaatcattcgtcgatactgctcatgctgtgcttctaattgagagtacacaaggatatcctcgataaatactataacacatatattgaggaaatccttgaatgccctattcattagatccataaaagttgtcagagcattggttagtccaaaagacacaaccaaaaattcataatggtcatacctagtacgaaagatagtctttgggatgtcttcctcttagattctcaactgatgatagcttgctaagatcaatcttagagaagattatctttccctaaagctcatcgaataaatcatcaatcctagatagagagttcttaattgtcaacttgttcaattcatggtagtcaatatacatgaaaagtgatccatctttcttcttaacgaacaacactagagctcctcagggtgacacactgggtcggtaaaaccctaagtgagcttaggctagatgaagattgtacatatcgaggtaattagacttggagtgttcaaatatttgggatatttaggctttattttgatagtcattgaccgacaacttttgtagtataagtattttgtaaacttttgtaacttttgaaacaggatcctgaaatgtgtattataattaggtatttaagcttaagtttattaatgaaaattttaattattcacatttttagtaaacaccttaattagcaaaagagggcacagtaatttaaaatcacgataacgtgcctaatttagtaggacattacaatttggtatcagagctgccaggttatctttcgaagatcgtcatgatatgtacaatcatcatgagagataaggtcggctcatggtttagtaagcttttaaatgctttagtagtttgatttattactatgaaaaagaaaaacttgttaggaagcatattagtagctcgatagttgaataagtgcatgttttaaattcctaagtaagcgataattaaattttaaccttgatcactgtctaaccaggctaacttatgatttaataggctagtccaatagaatggatgccaggcaaaacacgagaagccaaggaaatttagtttgatccagtggttgtcagggagaagaatcccctaatctatgtggttggggtaaaggctaaagaggtatagcttgtggtcggggtaatgttaatccactgcaggctgtctaggattagaaacagaggtttatagaaatgcaagccataattaatgaacaagatgaaggaatttaacgcttaaggcaacaaggtgttcctgcgatgcctgcttctaaagtattgataactcttgctcctattgtgctagtggagctgattactgttggtaattgtatggaactgctatatgaaaggtttaataatcaagtacctctgattattttgggaggcccgtatgttatgaaagttgagcaatgactaatagtccttaacaatatattgaatttcattggtgttactggcaatgatagggtgtcatgttccacctttcaaatctaaggggatgccctggtttggtgggagatgttgtccctcacctgagattaccagaattacctgggaagagttccaggattttttcaatgctaagtactacaataaggtagtttgtagtacaaaaaggaaagaattcacccagttgactcaagaggagaatatgtaaattatagagtacacgacccaatttgatagattggcccggttagcctcaagaatagtgccaaccaattttcgtaaggaggaaaagtatctgattgggttgaatcccaaaattaagcatgttttgatgattatcacggatgacactacttatgctactatggtagagaaagcactaggagcttagggcgcagtagaatgtattcaggagtcttgagggacacaaatagttggtggggccactgctcctcctacctctggtt

SEQ ID NO: 303160 - DNA, 3815 bp, Cannabis indica
tagtcacaaattttgttgtaactaaaagtaagattttttgtagtgatattaaatgataaataacattatgtttagataaaacagtgtattgtatttattattacgaccaaaaaatttagtacaatgtaagttgtattataatacataacaaatggtcagtattaacttgtactataatatttataaaagattcggggtcaactccaatcttcggcccaaatctagggacccggacccgggacctgactggacctagatcctagaacccagacctggcccaaaattgaaccccagacccagacccctagacccaaacttgatatgaatacaaacgcggacctagactagacctgggaccacggacctagacccggacccaacccgagacccggacccctggacccgaacttgattcggacctagatgcgaacctagaccaaacttgggacctgggatcacggaccacggacccaacccgggacccaggactcagaccccgaaccttgaactctgaacctaagacctggactccaaacctaagactcagaacctggacctcaaaccaagactggactcagacccggagttagcgttggggtcgagtttatgaaaaatatattataactttacacaacttatcaatacaaattaatatcaaaatactattatattaaataatattaatacaatacaattcacgacgtattaatcatcactatacatataacatatatgggtttcaatatatatatcaacctcctcatatattaatatatatgtatatatatgtcacattataattcatatagaagaaaatgatgaactttttagattttctacttttattgttgaatttattttgtctttgtatttaatttgatttaagggtcttagattaaaaagaaattacaaaaaaaaaaaaatgaagggtgatgattttatcgttattaacatatatgtcaattggattgagttttatttaggagtgatcatgtcgttgtatcatattcgtattcatgttatgcaacttgacatatttagtgtttgatcaattctaactcgacctgtcgtattctcatatcgacctattatattcgcgtgtcgactatatttatgttacaatacatgtttacaatatttattttacattttgtcagtaattttctttctaatttatacatttaattttcaataaaaattaataatactttaactatataagttaataatttcaataatatattagatataaataggtcaattgtgtcaatttagtgtcacatgccttataccctaacccgactcaaataataatcgtgtcattaagattcaactcaattttaacccgtatctattttttatgaccctaaccaacaataattcgtatcaagttcgtatcgtatcttgtcaaattgtcacctatactaaaatagtataaaatatattgtccatagaacctatatcacatttatatgatatggaaagcaaatgtaatttacaatggtctttacgtacatatataccactcatgctaacatgcatcaaattttcaatatattctattttttgaatttgaagtgttaagattgctatacgttcgttaattgtgaagtacgttacctcacttgattcatcccataaattctttgccactactaaaattgaaaaaaaaaagtattcatgagcttttgctatcagtaatattaggttttattctgaatatccacattatattctaaagggaccatgtggccttgtgaaagaagaaaaaaccagtgctataaagatattcctcatctccttagtcctttccatttcaccatgaactaattaatactaaatattcatcatcattcatttttgttggaaagggatcatacgcttctttctttacactctatgatagtcatcgtattagatgcttggtttcactttcacattataaatatataggcttcgaatagggtcccgctcgcgtacttttgatgaacggttctgctgatggatcttgttttattgcttgtataactggttgtaataggtaagagaaattggtaaactaaaaaaataacataaaattacttcttgtttttcggttaaagtagataattttataattgtacaaatccatgtctcaaaaacaaaaccaatgagtatctataaaagaaaggtaacaatatcaccaacaccaccaaaataatacctaattaataaatgctactaaaagtaaaataatcaccatatttaatccaacaatctaacataagtaatattgaagacctacacaaatactcaataaaaaaaatcagggatacatcgatttgcattaacaaaaaactaataaaggaaacattaaatagtctagatattagggttacaaaaaattattaaaaatataatatgtgaattaataggttgcacacgaagcgtgtttgagtactctccgtgtgatacaggaaaaacatgaaacaaagacactgcaagtgtagaagtggagtacggaatgaagaaactcccgaaagaaggttcacaggcagctgcaaaagttagtgtagaactagaagactatgcgcagacggaagctgttgcggagccaaaagaacaagataacaaagaccaaatagaggtattggaagggttcagacagatagttctgaaaggttatcagtaggcacgtgatagaacccgaagagagattcgtcctccagcaaggttcacgaaagcagacttgattacatttgcactggcggtagttcaacagactgaaattgaagaggctgaaagctatgaagaggcaattttaggtacaaacaagtctaaatggcttcaagccatggctggggaaatggattcactctggaagaacaagacttaggtagttgtaccgaagccggagaagtgagaacaagaatattgtagagtgcaaatggattctcaaggtgaaagagggaatcaatgagaatgaaccagtgaggttcaaagctaggttagtggctaaaggctttactcaggtggaaggtatagactacactgaaatctttttacttgtggtaaagtacaagacaataagactgatgatgtctttagctgctcaaatggagtttgaagttgaacaacttgatgttaagactgcttttttcaatagattcttggatgaagagatttacatgaagcaaccacctgggtttcaggtggaagggaaaggcgttgaactagtatgcaagcttaatagatctttatatggtttgaaacattccccgaggcaatggaataatctactaatgatcatctttgtaatatgaataactctttcatggtaaacgacacgttaatgaaagatgttattacatatcagtccaatcatgtaaaatcaaattatacacaacacttttactacatgtctatctacatatgtgaccctaatcaaaatcacacacactaaacgttgttgactcaaaaatttggactgtacttccaagctacacccgctcgctagtttggcgagaataaaaaaagtagttaagtaattaaaagagacacatctaatttataatagttcacccctatattgcgatagtaatgggactacgtctatttcaagtttttatttctcacaagatgataattaaagcaataggctaagtatcaaaaactccaaactctagagagagaagatctaacctagttttttgaatgtgaaaaatgagttaagggagctctccttttataggtgaaggaggcccacaaaaataggagaaaaataaaaataagatgtttttggccgttgatgaagatctaacagtgaaaaattagct

SEQ ID NO: 303161 - DNA, 2674 bp, Cannabis indica
aatacttcagagagtgtaatgtaaattagtaattttttttgtaggtgcatgccatcaagctgctaactaaccaccctcttatccatgtattacaaaaataaggaagactattaaaatgctatagagttcagtcagtttgatattcattacaagcccataattttcattgaggggtaggctttaataaattttattgtagagtgtactcgaatgaatgatgatctagatgagccagtttcccaacaacaattttagaaagtctagttgatggagtatcaaataaaaagggtgttgaagtgggaataatcttaatttttctgcaagacaccaattccaaaacacccttgattcaaattctagcctccaacaataaagcataacacaaagtgatggttgccagcctacacctagcaaatgaagtaggggatgatcacaatatcaaagtgtacaataactctcagctggtggtaaaccaaatattttgatagtatggtgagaaaatggccacttacatgtctagttctagggagttattgcaaggctttaaaagatacaacatctgccaagtccgtagggatcagaataccttcacatacatgttggaaaagctagctatagacccaaaaatcgagcaatacaaagtagtgcccatttcccacttgaaagtctcaagtattgaaacactaggggtaaaagttattgatcactcctactcctggataggccccatttaccaattcctcaattatggagagctttcatctaacagggttatggcccaaaaaattcagtaccaagctcccaaatacgttatttcagatgaacggctatatcgcatgggattatcaattccatacttgagattcatagtgcagtcatttatgaaattcatgaagttttctgcggagaccacacatcaagactcatcttgtctaagaaaatcatccgacaaaggtatttctggccaaccataaaaaatgattgcattgaatacatcaaaacatttgaacaagaccagcgttatgccaaagttttgcgagcgtcgttgacttagatcaccctcgtgaacaatttttggccttttgttgtttggggaatcgacctagttggctctttcccaattggaaaggttggagtcaagtatgcaattattgtcgttgactacttcaccaattgggtagaagcagagcccatgaacatggtcacctcaaagaaatctttggactttgtcatcaagaacatagtatatcgttacggacttccgcacaagattgtgtcagacattgggaaacaatttgatagtgatcacttttactgacttttgtgttgacctcaaaaattgtcaaccgacagcggggtcgtgcagatttgatgcttgccacatgtgtggagatataagaatgaaaagcaatagacaataagattgttatagaggtacgacccccttgtactagcaggtaatgacctattctccttttggttgtattataccgagggaattactatccatatcgttataggggggatctgctatagtacccttaagagtacaatgtatgaatcaatacttggcaaaactcaagtgttggacagttggggattattttaccaggatttagatttactaacatatatattgattaacacctcaaatgtgaattctttaaaacaatggaattaaacatatataaaggtaagaaaccttacattgattgtagcagaataatacgtctccttccactcagatctctaactcttgttcctttctgtcgcaaaatattatcaaaatctgagcccgatactccttcaggtgttggattcttcaaagtcttacacactatgattgagtacttgatttgcaatgggtgggcatgcactctttcactataaggctcgaaattatgaagaaaaataggggagattcaaattctatagaaggagattctcaagttttatagttgtctaacagagaatgaaaactaggtaaacttaagttggatagaatgagaaccatcttattccttttataagatttctcctagggttagatttaaattatgacattaaaaaatgataaaaaaattggctaaaattacacttaagcggccgaccataagatgggccccactaaatattagttgccattttattcaacaatttatcttttctttcacaaatgccatattttataatttcaatccttttaatgtcaaaactatttatttaataattaaaattaattatcaaataaaatttccatttaacttatttattaattaaacttataaagtctcttaaataacaaataaaccctaaaatctcttttcttcacaattaagtctttccttagtgaaagttcataaataagatatagtctaatttcagaattataattgattaattaaaactaattaattgagtcttacaagcagtattgtctcaactagtgtggggaccatgggcccatataactaagtttccaataagtagatctaaaatttaccgagtaaattttctaacttattaattccttattgcaccactatagatttggaattacactcttaattatatagagcgctctatatgtttcacgatatagataagctatgacttatccatcattctaatcccaataatcaaagatcctatatagatgatttacatcaagtag

SEQ ID NO: 303162 - DNA, 2362 bp, Cannabis indica
cgatctcgatcagtcgacagacgaggtgacataccttacatgggatgacatactccggacaggatgacataaacatatccaaaatagatgatcacttacattcaagatagagaacatatacaaaactaatgacttaaaaatcctaattaagaaagttacacattatggataggagagatacacaatacggacacctaacataaaataaaggacacttgtcaaaatatgtaaagacaccttatagaaagtaatagacatatgtcaaagtaaaatcttgttaagttgacacttaaaggtaaaagaatgagataaataaaggaggtagtataaaagaagagggtcttcttttggcgggagggggaaagaaaggaaatggagagataaagaatgaacaggagtagagggtttaccaaaaaaaaaaattcttttttttagtcaaaacaaggaaaaacttctctttttttttttttttgcaaataaacaaaactctttataaataacaatttgtgtaagaaaaaaaaaaagaagaatcatgatattattgtcaaataaaaatacatccatttaaaagtaattttttaaattttttttctcataattaagtataaaactaaattaaacattcatgtttatatatttaactatgtctactaaaaaatatataattattccaacaattaaaaaatttaataaaataaattccttaattttagttataatgtattaaataaaatataaaaaattaaattaaaatatcaataaatatcaatatttataaaaaggtggtattgaatcaatgaattgaataaaaatatcatggatgtagtgcttgacattaattcattgcagacctttgatgatgatgaagctgctataagagtgtcgcaagggagaagaggttctgaatcatatccaattctgtctccaaaatcctcattatgagacatcaggaagatgttaaaattgtcccaagtgcaggttgaagatttggacctgaagtatcggggataaagatcactattcaagattataggctaacttgggacctctatcatggtcgactttgtcacgagagaacctgataggcttaacttccctgaaatactaattgaagttattctgaaccaggagtttctaaatactttgaagtttaaagataagcatggaatgaatactcaagtaggagttaagtatgaatggaagcctattacctactctcattgctttggtatgggacatttgacaactgagtaagaagagcttgaaaagggttatcaaggaggacaaaagaaaggtatacgtagttagtatagtccaatccaacaaagtgaatgttgatagatttcaaatagtgactaaaagaaagaagactaaagaggttgaaaaattagttgatacacatactgagaactcattccaagctttaaatgtggaatcagatgtgcaagttgaaaatggaaatacaagtctagggacaaccaggactgaaagggataacacaagaaggggggagatccctctcttgtttttggataaattttcatgttggaatgtctaaggagccaataactaacaaaaacagggtctaaattaagcaatttattaaatgtcaaggtgttgggttttgttggtctctttgagacaagggtcaaggcccagaagcttggggcattgtacttgaatgtatttgtagaatggttcttctcatctcatatagcatggcacttaaaaggaagactcattatagcatggaaccctttgacattcacaagtttggttactttaatctatgctttcaatgatcgagatgaaatgaaggaattatggaatgacttacaagaattagcatccttagaaaattggttaataatagggaatttcaatgatattttagcaaaagaagagagaattggccacaaaattaaattccatgctaatagagatttccttgattctgtagaatactgtcatcttgaagatgtcaaggctagtggaaacttttatacatggagcaacaaatagcatgggaaagataggatttgtcaaaaatttataggattatggctaattaatctcggattgataaattctctaatgcaaaagttgctttccttagtgagggtctctttgatcatactcttggggtgctaattctgtatcctaaaatttctagtgggaggaagcctatcaagtattttaggatgtggaagtcccatcccgagtatgaaaaaaagaatacaagaggtatggtcacaggaggtaactggcactaaaatgtaccaagtgtgtgacagtcagtagtcccgtgattcgtaagggaaaacaccgggtaagctgtgcaatcccacaccgcctggggaag

SEQ ID NO: 303163 - DNA, 3295 bp, Cannabis indica
tatataacatgttaaaaattaaaacaaacatgtatttttatagtattaaatataatttaatgtaaaaaatgtaacaataaaatgaataatttaaattattaaggtaacaaatacaaattttattggtagagattcaaaaaataaacttttaatattaaaaaataaaaatgctcttcttgagattttattttgaaccatatgttattaataaatattatatttgattataattataaatatatattattagtaactaaaatatataatttttttcattttttttcattatatatattaattacaactatttatattctcaaaaaaaaaaaaaattacaactatttatgtggcccaaccatgatgggatatgtacatcaataattttgtttaataaagagaattatcataatgatatttatatacaaaataccctacccaaatataaatgataagacctccctccacatttggaacactatatatgttaatacctagtcaaagctttgcatctatcaatttcattcacaccctttttcttactctctttttcattaatatgtagaagtatagttccaattatattattattattatcataaaataggtgtagttatgttatactttgtcaaaaatttccaaaagaaattaaagatatataacattaaaaatgatattacaataaataaaagtgatctctccaaaaataattcatatgtaaaaaaaaaagtggaacattcaagaaggaagaataagtcctaaaaggtaagacgaaaataaagtcgtacaaattttacaaggtgatgactaaataacagtttcatacaccgacaaaaaaggatcataaaaaaccccaaagaaaggcacaaccaacatcaccctttagaaaattctcaatatatattctttttaggtgttatttaatttactaaatattaattttgttatcgagtgctataatattaaaagatggtacattgattaatttttttaattatatatatgttttatttaaaaaaattatttttacactttgaattttttaatttaaaaaagtacatcttcaataaaaaataacaaactatcttttagttgttttatagtttatttatcgttgatttataatcgttgtaatgttaatttcttattgtttttagttatttttcttactttttgctaaaaaatttgtattttttgtaagtttaaaacttcacaaacatttttttataaataaaaactttagatggtaaatttggaaataaagcatatatatatataaataaattctttaaaaattccccaaagatttttattttcttttattacatttctccaataaatttataacaatgctttattattgttacaatagtaaaaacaaaattaagagaaaaacatgatacacttttgtattttttaaaggtcttttataatttcattaataaattttattgtgatattattagtattacttaatcaagaaattccaccaaatttcaaataatgtgagattttgttacgattatattcaattaaaaaataaatcttaactgaaaaatcttaaggacaaattttattcttaatttgtatacaaaatatatatatatatactatatatttacaactaatatgatttgaggtatttgtaattcttcaattatttgaacttctaattttatttttattacaaactatgctaatacaagaatatttataatacgtatatgtatagtttaattacaattattagttattacttttcaaaaacataaaataaaaatgaaatcatatagctagctcatgatgattaattaaacatttttaagagataattaattttattttagagagattaattaaacattaaataagtgatcttgctacaaatccttgtataagatttccggtcgacaaaatagaatattgtaagattttttgtacgtacatattaattattattatttttttttaaaattagggcagatattttttttttcttttgcagaatattaattattttttttttagaaaagatattaattaaattatagtgacgaaagattacacaatgtacaccatattctcttttatatatataaggttgagacttgtattgcatatataataagtcgaattttttctacctcaaaactggtttatttttttttaatatgcatatataatagccatagctaaatatatataaataaataaataaaaataaatatatattttacagcttaaaatggacggcataatatccctttcacatcaacaatcattgttatatatatttataggtgtatccaaataatttaatttttaaagctaagaagattaattaattaagtgcaatttatatttctagtggactatataataattatatatatcataatcataacactattaaccattcttcaccaaattacacgttcaccgacttatatacaataataatcgaccaacctatacatatcaaccaatcaatatataaatatattatatatataaataatactacaaaatgttttttaaatatataatgatcatatattcttaaagtgatgacaatacaatttagtataattactataattattttgagatatgattaatattttataaaaagtatttgatataatatattaattgttgtatatatatattttctaaattaaattatgtttatggaattttccgaaattattattccttatatatatatataaggatgagataattaagaagggcaatttaaggtttgtgggagagacatgaaatgcgtggatgaaggagagtgagaagtaccatttcaaacatatgtttatatttaggaattgacttttcaatcatactcattcactcatatatattaaatataccacataattaataattactttaaatagatttatatacatatatgcaaaaatccatctatagtcattaacatctaagttgttttgccactaaataaataaataaagaaaagctatgtatattttagggttgaacatttgggctccataccctcgaaaaccgaaccacttgcctttacttgtcgccaaaaaagtcgaagcaaagaaaatttgcccaaatcaagtctgatccgatccaacccctgtataatcaaattcgatttcgggtgttaattttattatttatcaacccttattatttatcaataaaataaataaaaattggtttatttaattaaaggtattctttacatgttattaatattattaaatctcgagagatggaggaagacggtgagagaggaaggcgatggtgc

SEQ ID NO: 303164 - DNA, 2375 bp, Cannabis indica
tcctcttgtcacccaaacacaatattgctttttttataattattgttcttctattattgttggtattattttatcatttttcaaaaaaagcaaagtaaagaggaacatcaatttaactcctacattagtatattataatatcaccttattattattgtcttttgtaacattttgttaggccccttccgttccgtgggctgtcatgtcacctcatcttaacttccacattagtataatattatccacttttaaactaagctttcacaattttatttttgaacaccttcctaaaaaatttcatactaatagaatagatagaatacttatattcaaaaaagaaaatgtgacctaatcttttgatgtgggccggacttgagttgataccctaacaatatcctcccctcacacaaaagaccacatactcatggccttccctctagtaaaattaccttgtgttgctgccaagtgccaccaataatgaaactcgccacctgacatcaattttgttaagaagacttttgcacatatgtcttaaataccaatcttcatcttgtaacatatgggatcttcatcttgctgtgatggaatcttcattaaaataatttgcaacgtccaagtatgtaatattcaagggctctttgaaaagaccatcatcttgatagacaaaatttgcttttaatttctctttcccttttactgatgcttgataaagatcaacaaggtgtttccccatacgataggtacatgactagtgtcctttcaatatgccgcatttgaaacataagtttttacaatttttacgactattattttgatgacattttctcttgttctaagtagtttttcttttcattggagtataaattttattattctaaccattacgatgtcaaacattgtttcgagtatcgtgaccacaatagccacgatcacatctattactttgattataatcatgaccacaaccataattatgattgttagaaattgtagcattcgctttaaggagtggggcagactcagttgggcgagattcatagtttttcatcaaaagtttattattttgttcagctactagaagacatgaaattaattatgatatttttaaaatttttgttgtctatattgttgttgcatgagcacacttgaggcatgcaaattaggatataatttttctaatttcgtagtaactttttctccatgcaataataatttagaagtgatattaaatattacagatcagttataattagttacatgtaaatttaaaatctttcaacctcaggtacaactaatcattcttagcctttaacaatataatatttttctaatggtaatatctttctttcaaatttttctaaagcacgagagaatcttttactgttaaatatttaaattttaacccctcatgaaaataatgacgaatgaaaattataatcgtggccttattttatttcatttcaattttcgatctttaatggtgtcttcaaggcctataatatctaagtaaatttcaggatcaagaatttatgataaataattttttcggaaatatcaaatgtcataaagtcaagttttacaaaaaatttcatgaagaaaattataatagaaatattagaaaaatataagtgtataacaaaattacagtacaacaactaagcattaatataagacaaacacaaataactaatgatcataataaattaattatgaagaaaataaaaaaaaattacacaaacatattcatatttttatttatattcatattggtacttgaatataagaataaataaatctagaaacaaaatataaattatatatgcagaaggggttacataagaatattaagtgtatcagtgcatatatataatataacagtacaaaaaatcttacttaattttagtactaaaagtaaaaaaattaataactaattataaattattattattaggttgtgactaaaaggtctgtggctaatgatattagtcaacaaaaattacaattcgttgtgactaaatgtatttttaatcacaatatacttgttgtgactaaaactaaattattgacaacttataactagatactacattttagttacaaataatattttgttgtgactaaaagtcatatttaatcacaaaaaattatttgtaattatttataaatcatcataacatacatatatagtatattcatgatatagatatacattattatatgtgtacgtatacatatatattatataaatatattaattcataacaaaataagtgatataaaagtatctaatttgaatgtattttcaatcagatgagtatctttatatattaaaagtgcttatctaacggcatttcttggtttaacattcttggttt

SEQ ID NO: 303165 - DNA, 960 bp, Cannabis indica
agtcttgagtttagcttttataggcatttggtagggtagagttcatttgtggggtgtgaagaaattggtaagagttgtaacccaagtggggagagaacctggctctcaaactctagagtataatttctctattttcctagttctactctactgttcttgttgttctcatttatttgatatggcagaaatcaaaatctaatctttccaatcttacacaagtagaaaaataaagtatgtattcaaatgagtgagtgagctaaatttcacttaatcaaaaatcaaaatgaactctttatagtctacacaagtggaaaattaaaatatattcaagtatgagtgatacttatatttcacatacccaactaaagaattaccccaaaaacagaaacaaatacctaaaaatcaataggccctaataatcttcaacatggcaattaatcaaattcataaaccaagaagataaatttctattctcctgcaactattttgtttacaaaattcagacaaaattattcgaattgaaaacgaaagtgaagaaaataaattagtcttcaccaaataaaaggcggagtcttgaagcgaaaataccagtgggttcgagggaggcttcatggagaagggcttgcttaatgttgttgatgcgattagttagggtttcttcttcttgtttgagagctgaagtgtcttcgagaagatcatgcatccgatacttttgaccgagagatctaacactcaagagtaaaattccagtcatggcgaagaactgaataaatttgtctttgcgcttcaatgcatttgccacaagccctaattttttagggttttggaggggtgaagctgaggaagatgaagacgccatgactgatgggtctgagtgttagaaatatacaagagattaatggaagaataaaataagatgaatagaagacagaaaatcacaactctaagcaaaatattaca

SEQ ID NO: 303166 - DNA, 4097 bp, Cannabis indica
aaaatactgtattttttttaaaaaaaatactatgtatattttatactgtgtactgtgttaaattttcattgctgttccactatattttttagttattctactgttgtttttaattgttccgttttgttgttttacagttgttttataaaaagacaatatttttataaaaaatttcgtgtgacagtaaaattataaatatttgccaaaaatatagtatttttgtaaaaaccccataattttacagaaaatgacattaagaaaaaagaactaaatcattccatttatatcagattaaatttccaaagaaggttttattaataaaagaattccaatgaaaggagaacatgttgactggcatgaaatgtttcatacaacatacaaaatttcctttttcatactcaaagtatatgatctacaaaattgtgtctacaaaactatgttagttctaagctttacaatcaatttaactgagaagtgagatcaatgaagatgtcttctctgcatggaattgtgagtcctcccattggatgatcatatccaaactcttcttcagccatgtttagcaactcttcaaatgcaggctcattaaggtacgaaagaggtactacatatctctttttctcgtcctctccaacatagattgcaatgtagccttttggaatcgagctagacttcaaagttgcttctttaagccccgaaagtgatcttcgaagagtcttcttgacattgagaataccgggcaatttaaacgccatgttatcagcaatcttcaatttctatctcaatttagttctttttttttctcacaaagctagtagttgtagagaagggagaggagagttgatgatttaggtgtgtggtaatgtggttgtatatatagatgaatggatttcttctaaattatctataggctttactaacaagtggtgtagattaagttagttgtaagggacataggcatttcaagttcacatgactctgtcttctgagccatagttactattcttatcaagagaacaaactacaaagtcaggaggagcccacttgacacaagagaaacaccaaaaagaaaaaccattttaagaatagtttaatccacaatttttttttcttcctattagtggttgttgaggtatgaatattaaattccacttgtatgtaaaattcttctgagttttttttttttttttttcatttttatttgtttgactctttagatatgggacattactaaacatcccatatgctaaattttggaatcttgtttatccacattcaatcactaaccaaatagatgttgattgtaagtcaaatattaaaaatacaatgtgaaatattatcctttgaagaccaaaccaaaatgcctccaagcatttcacctcttacaatggcttacttggttgattttttccctttctcctttctttttctacattcataaagatcagtagctcaatattggatattaaagattggaaaagacaaaacaaagtatatgtacttaagtagtctcaatcaaggagtacattattgattatagaagttaaagtaataaataaggactcaaatgttaaaaaataataggtaaataccattttagaccttgtattttacaaaagttatcaattagattctctgttttgttaaatgataaaatggaccctatatattccaaaatagtaaaaataggacactgagctcaattttcaacaattttattttttaatataaccaactttaagacaatttttaatatgaacagatacagaaaatgtaaccagctttgtcataacatctctagatcagattattattaaattttattttgacaaaaaattaattcagggtcctctttgtataattttgaaaaataaagttccattttgccatttaacaaaatagatggttcaattggtaatttttacaaaacacagagtccaaaatggtatttactcaaaaataattctttaattgaaattgaacaaagtttttgtttgattttcactactcattaggacaaaagcatatgtgaaacttaatatctccctcccatgataatatttttttcttttcttttttagagttgtttttctttaactgctgagagattttgtgataacaattcagatcattcatgcctaatagattttaattctgggatataattaacaaacatattgttcaagattaacaagcaaaatgaactaaagaacaagtcaaaggacataataatcaaatttcactttctattcaaaaatttctcagtaaccaaacaattctctctttcctaggaaggagaaatggtatatgtacaaaactgttttagctagctagtacaacaaactacattcatttcaattgagaagttatatcaatgaaaacatcttctctgcaaggaattgtgagtcctcccattgggtgatcatatccaaattcttcttctgccatactcaacaattcttgaaatgcaatcttgttcaaatacgaaagaggtactacataacgcttcttctgctcctctccaacatacactgcaaagtagccttttggaatggttgtagactttgaagctgcttctttaatacccgaaagtgatcttcgaaaagccttcttaccatgaacaaaaccaggcaatccaaaagccatgttaacaagcttctttttgttgttggtttagagaaagactagagaatatgagaaaagttgatgatttagtactatggtaatatgcctatatttatagagaagaaaatatttcttgcaaaagtttttaactcaaaactagtggttgtgaagtctaattgattttgctttgtaatttgcatgaagtacaagcatttgaaagttcacatgagtctgtcttctaactcattaatggaagttttgttaactggcacatatatatgtgatttgtctaaaccttactaagtaaaataccaacaaggggagcccacttggaacaaaatagttgcatcaaaaaacagaaaaattgtatgaaatatgtcactcttttatatattggtacttaaaaaagacaatatcatgtgattgcttaagcagcctcactagaccccattccattaaaggccttcttactctacaccattcatcttcattcaagtgtaaactatatttatacaatttcataagttctaaaatatcagagatttttctcactagctttccaaattctccaaatgaaaaatctttgttcttttgcccaaatgtgatttattttttttttcttttgccaagagtattgaatggtaggctatactattcaagggtcatttgcaaatacaaaccatattagcaaatatctcaaatggggtaatgttttgttgtgtggtatctgtttgttgttgatacctgaaccaacctttagaatttaagtttggatctatattctaatttccagatacaacgattactaatgagtaatgagtgtaattatcgtaaatataccttggtactcattattttgacacaaaacagctacattttccaagaaaaaaaaagattagttttttattttattttatttatttttggtgaaatactgacgctttttggacaatgataatatagtgaacaaaatatattcttgacttataaattgagtaaaacatattaggttttaatcgatattttatatagagaaaaactattttatttttaactttttgtgctatttaagaattgagaaatttatgacagctcaaaattgaagtctagccagcgggctggcccatgttcaattttgggcccggattaaatggggccttcaactcagcaatcccaattcaagcccagttcaccagcatctttcggaagttaaaaagcccattagggccaagtacgtagaagtcatgtcttcaattcgagcttcctttatttgtagggcccaatagctctttcttctttgtagttcaaaagctgaaggaagtactacagagtgatcatattcagcattcagcattgcccattccaaactgagctgcagttacatgggcctaccctacgtctgccatatcccattctttagaggggtaagttgaaaaatgcctcttttattcatcaattaatcaaatttacct

SEQ ID NO: 303167 - DNA, 3001 bp, Cannabis indica
tttttcgtgaaaaagcaaccatagattagggttttatgagggagaggggagaagttgaatgtgagaatctttgtttttacaaaaattccttcattttttttacataagtttcaatattgtatctcttaaaaaaagaatagcatgcatcgtgagagagagaataaaattagaaaataattgtatcattgagcaagcataattaaaaatcattttagtgtataaaagcaaaaatgaaagttactttgttctatggggtttagggttttagcattaccctcaaaagttggtatttatgagtgattagtaattaatttttattataattattaaatcaaagttcaaaggatttttgactcttgaactttaacatgtaccaaatcatgtctattgaacttttaaggtcgttaaaaatttcccttgaactattgaggaatttagaggaatttttaatggccaacaatctcaatagtttagaggaatttttaatggccaaaaaaatttagtacatgttaaaatttaagggacgaaaatccaaattaacctaaattaaaataagaaaactagatgtatagagtttgtcactgaattactagctactgtaatattggcaagcctgactttttcttttggaatcttataatattgaaaatatgtatgcatgtgtcagtttacagcctagctaggggttgatcatagagctatttggtcaccaagtgtgttgaagttattcaacaacctcttatatatactaaaacatttaacactcaatttcatcttaaattaatcccaagtgccacaactaatacaaataatatttagtacttaattaattgtagtcaaagttagataacacttattttaataaaatagagcatcttaattattatatacggttgctagctccaattccctggattttggtataaatttcctaatcatagttgcatatataattaatcacatcaatcaacttttcatataaagagagaagaaagaaaaaacacaaaattaataaaccattctaaatgggaaaaagattaacatcattattaattgtggtagtgttcttcttctcatgttttggcttacatattattattccagcaggtaatatagtatttcatttcatttcattatatatgtatatatataatctcttacatggtttcttattatatgtatacagaaggtgtaggaaaattctcaaagaggtttacatttatggtgtttaaagatgggagttacattattaaaggtggaaaatcttgtacagaaatgaggcttaaaaagaggtcaactccattaccaccagctcctactaggaactccaaaaagattcatgccaatactcatctatcttataataatattccacttccaccacccacattgtctccattaaaaggccttaaagcttttcttgatgaatctatacctcacaagtaattattcatcatatttgtagatatatatgatatgaatacttatatattgtatacattacaattgttattattatttgctaaatgattagtggttggtttcatttgcaataataaaatttgcatgattaaatttaatatgatgcaatagttttcttgtaattcttttattaattcattatgagaaatttaattatacattggatacaaaggcagttcaaagtctgtagtccatctctcaaaagagttgttcaggtacaccactacctattttcccattctacaaaaatatttaattactgtaaatttttttcttcataaatatacatgttataatttttttaaactatttataattttttaaaaaattcttaataattgattttatctttttttttgaagcaataattgactttatgaaaaataaggttcttgatacgaaaaaaaatatttaaattttatttttaatactgtaaattattcaaaaaataataatttataagtcattctaaataattaaatcataaaaaaaatagattaggatttaagacaatccatttgaaggtgcatcagaaaaaaattctttacttttagtagaaattattacacaaagtatgaaaaaatttaaaaactttactttttttatatagcatattttttttattacatttaggttatagacttttacaaatctttacatttttatggtttaaaatatgtcacatttttgtattttcatattttttttggtcaaattaagtttctaccattttccttttctgtcagtacatgagatgatattgaaatcgtcgagtcctttatctccttcatcctcatcttcttccttccgccccccgtggaatgagatcagaaccaaaccttctccactgggaaaagcttaaaaaggaagctcaagcaagatttccaagaagaactagattagcagtcctccgatcacaaaattgcttccattgcactacacgatgctcaccaacacggatcttcctcaacccataccgtttttggagatttcacctactgaaaagagggtttggtggctagttttaatccttctcaggattttgattgccttcttccctcgcccaagcttaatgggtacaaaggagttaaggaaagagctgaccatggctccagagatggtatttcgcctacggctagccctgaaactcagcattaaatgtaatttcatcataaacctatgtgatctttaaacttgttttcgtctcaattttggcaatgtgatttaatttattaatttcagactatattacttttttattcttctcacagatgcttaaaccatccccagtctctacctctatcccattaataaaccctattttgtatcagtaaacaaccaacaatggcgaaagtataggtaggatcacgtacgacgggctcgtcaattagtagtggtggaatggcgcagaggtctctgaaagatatgggcaatgagcatttcaaagctgtgttagaattaggagataaaataaatggggttccatctcaaaactaattggcaatgggaggagtagccc

SEQ ID NO: 303168 - DNA, 2352 bp, Cannabis indica
aaagtttggaaaaaaaaaacaaaaaaaataacataacccaagtataggatcatagtctcataccactcgagcctcccaacaaattaaaaaagtaaacaaagatgaaattaagaatcgagaagaaaatatctttacacatataatccacaatgatcattagttaactatcgtcatgattagatcttcataatttaaacatatagtatataattttgattatggatgataatcaaaataattttgattatcaatcatatatatactatatatatgttaagaataaaaaggaaattatatatatttatatcggggtcggatatggtgcggatagtattattcccgctcccgccccatccccgctttgggtattcaaattgtccctcaccaccgccccattactaccaaaacggggaatcccaactccattagggacgggtccccgcgattacccatccccgcagtataaatttccatctctaattatatttctttaaaacaacaatattttaggtaacaactcaagactcaagtttatatttggaattcagtagattttattttttttttgagaaaatttattagttgatttatattttattttttttgagaaaaatttattggttgattggtttatgttatgtacaaaaaaataattgtgtagttactcaaaattacatttaaaatttatttatatcaaatagtgtaaaaagttgtgcattattttctataattttaaagtaatataccattctaatagattgtcacatatcatcattttcctttaaatgaaaaacaactttatattataagaattcaagtaagggggttatctgttagtataatattttgattagttatttactaatataataatatttttaatttattgtgtatgatgtttcattttttattttcttaaaatggaagaagggtgggtgtttatgattttttttttctagttttgattaaacaaagagttgttgccatcataaacaatattatctatgattttctccaaacaataaatgagaaattaataagaattttatataaatacaaagaaatatctcattcaagatattatatcattgggaagttatccaatacttccaagggctatagatgtacctttgtgtataatctatataaaatatcaaaaaaatttaatttaaaagttattgtattttttcttatatattaaaaagatttgtttgatactccttctttagtaatgcataaaaaaatatataaatatgtattgtaatagttaaaaattaggttttattgtggtaaagtttgaagttggggttgggtgacttgggtctaaggctgtggtctagggctgggtccgaacgtaggtccaaagacagggttaggtttgaggttaagggtttggggccagtgttgaggttgcggtcgaagctagggtcgagttagtgtcccaatttgatgtccaggtcgaggttgaggccaaggtcaggtccagagtttggggtctaggggccaaatattgggtttcgggtcaaggccaaagtctgaagggtaaagatcaagagtcgagggcaagggccagagtctgaagggtaatgatcaagagtcgaggtcaagggctagagttcgaagggtaaagatcaagagtcgaggtcaaggggtggggttaaggttagtattatatatgatataataaaatgtatattttctttaaaaaaaaatttaaaaaatatcaatacaatgtagtattatacaattgtgcaacaaacatgtctgtctaaagctaattaggagttttggctaaaaaatcaaattggaatttttttataagaaatatgatattttgtatatagtgataaaaatataaaatatagtattttaaaaatataataaaccttttttcttaataaaatatccaatgtagcatctttaaaaataagttaagaatacaaaaataaaaatatagtatttttgaaaatacatcttgagcctttttattaaaggattttttggacttaggtgagggccatgggctcatgctgtcccattgttgagccgacctgacaccgaacatagtataatttagataaatgttacaaaacggttcttaacaccctctaatgttttatatcactattagtatactaaagtattaagttctatataatttaatgtattaattttttataaaatattgctaactataagacgtcacttttataatttaggtggcgtttggttactaagtgaaaatggaatgggaatgggaataggaataggaataaaaatggaaaggaatggaatttttattcttttgtttggtaaagcctatggaatcaacaacggaataagaattatcat

SEQ ID NO: 303169 - DNA, 1880 bp, Cannabis indica
tattttagactctgatattagaccttgatcgaactcaaacctgaccctggcactggcaccgaatctgacccttgacccggactcgaacctatatagactcgacttaaataaaataaaaaaaaataaatatgaaaatgaactttatagaacatttttttgttttctgtttttaaaattaaaaataaaagtggttatagaacgtatttttattttcaaaaacaaatttttaaaaacaaaaattaattttacttttttctttgtgattaaaaaaaagaaaacaaaagtattaccaaacgacacattaatataaccattttaaccgtcatttcaagggggaaaataattttgtgtataaatgctgtaaaacaaaatggttagcattgactttttttttttctttaaataatatatggatttattatttaaatagagagttaatctagtttattaaaatcaagagagctataagctattcttttctttcataattttggccattatataatatatataatttataagttatctaagatgtaacaaatagattaggtattccatcagaaaaaaataaataaaaaatagattaggtatctaagaaaataagaaccaagtaaaaccttaattaactcattaaattatagtagaatggaataatattgataacatattgattctccttgttcttgtattaatgtcattactaagtttgttttacttctattatgacattgaggataaattacattctcccactaagaaatgttttgttaaatttaaatcctgccaatgaatgattataagtacaaaaggtaataatattgttaatatattttttctgacattagcaagtgtgggaagaatcaatacatacatccacagaaagaaaataaagcaaatggtagaagaaaaaaaataatgaaaaataaattactcaaactatagctttagtctgtacaaaaagatgcattcaatcacacttggaagattggaaatggatcatcttccctttaatatattccttgggaatcacttgtcactgtcagagaaagcctcatgtaaaatttgcattacaacttttttagtttatattattattatttttgaaaatttctctttcttctaagttttcagtgctgaggaaaaatcttctatacttgcaacctctttgttttacttggtagttactaaccatatggccttacttgtcataacacatcaatcactttcttataccaaattacagtaaaacaagtagtttgtatattttttcttgaattgaaaacaaaacaacaaaagagggaaaaaaaaaacaaaagaaaacgagaaactctgtcatgagaatctcttaaagtatgtgaaatgtacatttttcagtcatcaatcactttctgttatggaagttttattttacccttgaattcaaaacaaaagggggagaagaagaagaagaattaagcatgagaaaaattaataaagatggtaagaatctctaaaagcagtcatcaaatgtaaatgtttagttttgaattttactatgctaaacatttgggacaaactatctagtacaagtactagttagaaaaaatatggggcacagtagttcaaaacttgttcatttgaaaattttcaatgtatgtatccacatttttatatatatttgaaaatagaaaatcaatatatattataacattaattgttaaaaaatcatcaaattaaaagtaattccatcagaagtaatatatactcctacatgaggattttgtttctatttttctcttgaagaagctgagggcccagccgctagtgtaactctgttcttctttaacttttcttttttgatctttatgaaatttattcttctctttttttttttaaaaaaa

SEQ ID NO: 303170 - DNA, 1471 bp, Cannabis indica
tcattcctttctttttaaaatggaatagccattccactaaaatagtggaaagaacattccattagaatgtcattccaatactttaaaatgcaatcaaacaaatgaatggaataaaaattgtttctgttccattccattccatttcattacctccaaccaaactctacctaatttctatttgttaatcatccgaaaagagaaaagttgtaagtttaaagcaataacaaacaccaacgcaagcttccaagagtaacactccaaatccaaattggaaactcaactttctacacatgtcattcttatcattattttctcaactaaattgtatatataaaaaatgatatgtcatcttgtatgttgaattaaaaagaaaaatatccaatttagaaaattatccaaccattacaccaacaataaaaatatgagacacacttgtgctgttgtgcatttaatataaggagaatgatgtttaagattgaagataacaaacccaaaatcaaggcagcaaagggggttgtaaatagcttataaaacaaccttgcactcaaaataataccaaaaatattattttaggtattgtattttgtaaatattattaattgaattttttattttattaaataataatttagattttatatttttttaaatagtacaaaatgaatcttaaatttaattaagtattatgacaagaataattatatttttttatatatgttagtattaaatattagttgtattaaataaaaataatgaaaaataagtttagaattaattttgtactattttaaaaaatatttataaagtctaatctataacttttacctaatataaaattcaaaataatattaattaagaacattaacctagcacacaaataattatagacctttgtttccttttcttaaacatatatatgaagaaaattaaatgggtaataaacaagtaatgtatctctcaatctcgtttgtgtttctcatttatgtctctatttttgcccagatgggttcgggatagggaaatccccattaggtatgaggatccattaagtagctattataataaaaatataataataagaagaaaataatgtaatgtaatttaaattaaaataaaaaaataagatattaattttaaaataaagaaacattcaacttattaaaaaacatttattataagattaatagtcaaactttgtaagtataattaataactttaatacgtaataattaaaagaaaactatatagaaaatttgaaaattatatatgtgactagaatttagagtgtgatgtatcactacaatcctacccagaactcgattcaagtatataaaaaagagtaatccccatcccatttggaactcatactgtgggtcaaattttcatcactagtctatgtttggtaggaaggaaggagagttagatggatatatataagcaagggagaggagagtaatgatccttttatatt

SEQ ID NO: 303171 - DNA, 4171 bp, Cannabis indica
cagcattcccagcggttttcaattttattatttggaatcagtatgaaaatatatttgcttgctgttatttttctctttaaatctgatattttatttttctcctaatggttctagagaagggtctattcgtgggcttggcatccgtatgagtcattcggctaaagggtcagattcctgggttgatgatccaatcacaaggcacataattggtctctatataaacaaagaagaggatggggataacaatcttctatggcctttaatcttgcatacaaagggccaatactctgtccttgtgttacctttagttgaacccaggcatctgaaggcatatgcggtgttatgcaagagatctgattgtggaattgctgtcggagtggataacagtctatcttccttgttgcttgatcttccatccatcacagggtatggtaagttaacagctttgtttgacaaatatagcattatgaatgaagagagtctaaccttgagtactggtaaaatataattttactgggtgaaatagtttgcatagccgaagatgttaagtaatttccttttccacattttgtagggcgttcatggtggcgcatgctattggtgatacaatcactggcgaggtagtagaacctgaggtgattgtaaacacatctccatctgtcgggggactgttggactcgctaactggaagtataggaatatctggaatctcctcaagggcaaaacctgtagctgctacagtttcatcgtcaaacccatctattactgctgtaactggagcagtagcctcagatactcctaggattggtacaagacctttagacaaagatgctcttcgaactttcataacaagctcaatgccctttggttggtaccttttattacggtagttctcaatacatgttttttattgtgtttactgatgtagctttcagggattatcttgcttaaactgtttgtggttagtgtctcacacccttcacacatgtaggtaccccattggatttgagtcattccaatattttctcaatgaaggttaatggattttctacgttagatttgcctccttcagacctaaaacaaccagcatggaagccatatctttacaaaggaaagcagagagtattattcacaattcatgaggttgtacatgctgccatgtatgatcgagatgaaattccagatagtatatccatttctggtcaaataaattgccgagcagagttagaaggcttgcctgatctgtcattccccttgacagggatgaacacaaatcacattgaagttttatcctttcatccttgtgcccagattccagaacagggtatggataagcatgctgtcatgttttctccaccattgggtaattttgtcataatgcgttatcaatcaaagtgtggcattggacctcctgtccagggattttaccaattgtcaatggtttctgaagacaaaggtgcatttttattcaagttgaggttgatggaaggttataagtctcctcttacaatggagttctgtaatgtgacaatgcctttccctaggaggagaattatatcctttgatggcactccttctattggaatagtttcaaacaccgagcattcagtggaatggaaaattataacaactgggcggggcctcagtgggagaagtatagaggcaaccttccctggaacagtgcaatttgccccattgcaaattcaaaggtggcctatgtctagctcagcctctggactaatggctgatgaagatagtgatgctgagacagatggttccaataatatggtaaacattgatgaatgcttgatggaaaaaatgaacaaggatcttccttcagttgatttggaagagccattttcttggcaggcgtataactgtgccaaggtattaaaacattatgtaggggatcttgtatcaatatcatttgcatcataaggcataaggcgtaacataagtcattgtctgttgatgtctttggaattaactacaaggtgtttcatatattatcccattaccttctaatataagaaaccgtttattttattaatatggtaacacacgcacacatgtgcccatctaggattggaacccctccaacacttccacacatcccttgaattcttaccagttaagacaattggcatataaatatactgtaccaaatgttgcaattaacttatctatgattagtttgtgctagttagcattaggaatgtgaccaatgcttatcaagcactgccttaatcttttattgattagctaatttatgtgctcatgttattctctgtatctcttataagatatttttgtatattgttaagatggatatggagaaaggtattgatagaacaccaaactggcagaccatgtggacattgttaatgattttgtacttttttttgcttctggaatgaggagttagtcaacttagttgaattaatcacaatgtttgcttaactttgaactgtagatatcattcaaaattgtcggcgcaccattgtctggaatatcaattgatacgaaatctgtaagttaacccacaagtttcctctcctttaagcttcctctttattgaagctgtgactgaatgttccgagtgaagcttgtctctctgccagattaagaccgtataatagtttgttgattttggctctacataacagtttgtgccatatgcaggtaagtatttatccagctgttaaagcacctgtggagctatcaactcaggtaggtcttcttttcttttatatttattttttaaaccttaatttgccagactcctgcacattgtagagcaatgatgcaaacaagtgcgttaatgcttaattttgcacctattgtttttggaatatattccatttgtattatgctaaaaaattgctattttgttttcatatatatatatatatatatatataaaaatgttttgcaaatgatcttttcttctcataatgacagtattgtaattgtgatgtatagatagaagtttagtattagtaacgtaaaactaaaacataaattaaagtttagtatatgtttttccctaaactaggctccctgtttaactcacaatatttgaggaggaaaaattctagcaatttcaatgtagaactcaaacctcagacttgttctgtttgagagagagagagagagcttaattcaagttttcttgtccatttcttcccttcatcacagagaaaattttctattgccaccctaacacatgcaaataaacttgtcaagttcctctatcaagttttataggagagtatatttagagttactctctcacattcatcactgtactctcaaccaacaggttacttctggagattacattttgtggaatacattaggtccgtgcccctcagcagctgtggcaaaggtgtaaaaggatggatatgaatataaggagagagatttgcagaataggtatgtttgcttaattaaaagtaactacctgatactattgttcataatgataaatctaaattacagtttgagttgaaaattttgtttattcatttttaaaggtttaccaaattgttccaacttccaggttccctgcattcaaatacttgatggagatataagtcgacaaatccaggagatggtgcaagtttgttggttgccgttgtagcgactagtgagttcttcagcttctttttgttttgtagcattcattttcttttgtggacgccatgagctaatcctatatttaaattattatttatttttgcttgaaaaaatgattcaagacatcgattttccctcccatttgtgtaagagcggctgtaaactgtacactaaataaagagtttcccttttcttctgccacttgggtgggatgggaacaatgatttgatttaaaaatatccttctcaaaattacaaatggaaatttgatattaaattcagcaagtatcccactgtgtattggttgatgtgatatcatctcctattgtcctcctcttcagtgagtctcttaccttaaactaaagtcatattactactacgtttgccattttgcacatatagttttgcttgaacactctcaagttgtcccattgtttgctttagattatttcagcacaagtttagtgatggcaaaattattaaatgatgaggcgtgttggagataatgaaatggaatggaaaggaaacaattt

SEQ ID NO: 303172 - DNA, 1033 bp, Cannabis indica
ttccaaatgaaactgaatatggaagagagctttcattcatttgctttaaggatccaacgtggcattattttcttggctcgttaggcgtcctgtcatatgacgaggcgtgcgtgacaacccaaacattttgatgattatttatttctgcatgagcttcgagggaaatatcattatgtgattttaccttggttctaaacaatgaattaaatgttggccggaaggttttcttaaccattggatctgttttgtgtttttgaaggatctgtctcaaccgtggatcttgaatacacacgtatcatgttttgctagtataaatacttccaaataccacattttccaacctttatccaaatatcgaatatccttgtttcaaaaccataatcttcgagagtgaaaccccataactaaaattgtacacaaatcgaaccatattggaatgtgatattgacttttgcattcatcttcttcatcgaattagggctcaagaattttcagatgcaccacccccattgctgagatgcttcatcgactcaaaggttttttagtttagagaatttctgtacaaccatcttttgacgttagtgtgtatctcctaagctatactttctctcgaatctagaatctttgcctatgtcatcaccaggtaagctttctccttttcaatttcttaaaatgtgttgcatgtcgagatataaggatttacatgtaatttatttgctaattgaaaactatagctttagacttgtggctaggattctatttttgataaaaaaaaatataggttgtcctgaatcacttcttgaatctgggataatgacgtcataatatttaaaaataatatagagcataacatataatttttttcaaccattagttaataaatcaaattattctatagatgagattgataataattttaaatttattggagcttcataatataagtttatggtccccgagtcacctctatacacattgtacagggaaggtcttataaattcttaaggaaaaaatagtaatttgtaaaattatt

SEQ ID NO: 303173 - DNA, 1813 bp, Cannabis indica
ttcatccatgttagagtttttttacaaaaattagacaaaagtctttaaattaacaatcttaatagttcggggaatttttaacggacaaaaaagttcagcacgatttagtacatgttaaagttcaggaaaaatttactaattagcctttgaattatcatgattgagtttttatatttaaggagattttctatagtcaagaaactatgtacaactttacctttaagtgtatatgttgcttcttcgtttatataaagaaaattgccaaaaatctatccaggtacaataattctatcaatatagtcataaatattttatgtgcaatttttactagtaatattaaaaggttgaagcagggctagcccttacaaaaataataagctcaagaccattttaataaaattagaaaaatgagccctctttatatatagatattaataaattattttattgcataataaataaattatgtatacttgatttatttattttatttataggacaatctagaaacaaaggaaaactattatttattttatttatagaacaatttagaaaaatgtagacgaatgaaataaataattaatatatgaatgatatgatttagcatatactggccagccaacataactactactacaacattattaattatatataggatcatcccaaatatggaaatatatatagatttcatagataatattaaaaaagtaagcactaatttctaagctaccatatcaaaataatgttattaatatattcaatgtaacaatttaagaaagataagaataattgatttataaattacatgtcaatccatacctagaaacttctagtttcctcaagatatgtataataaattagatggttcttttcacacgcatgttttcatggatacctcttatttatttacctgttttttaatattgaagaaaccctttatttttttgactaacacattgttattttaaatgttccaccctacaaataagtcagagaaaaatcgatctaattctatttgcaataatttttaaaataaattttaaccacattgtaaagaaaaataaatctaaactgagacacttttttaaattaagtaccttaagaataagaatcacattcgttgcattgaatcactattgatccagcctaaaaataatccacaagtgtatcataaaatcccatgccaactgagtcctaataatgtttaaagaaaagaacagacataacatctgggctcacggctttttaagaagagcgttgtcaaatttacataacacatttttgttatctatttttaaaatttaaaaattgaagtgattatagaacatattttttatttttcaaagataaaatttttaaaaataaaaattctactgtcatttttctgataaaaaaattaaaaacaaaaatattacccaataccatcttaattaattaaacttaaaactcataatctatataaattatgattaatgattattttcgaaaagaaatatttaattattactttttcaaagaaacttttaattattgagtgcggattaattatatacattttaaaatcaatatttgataagtcaatttgtcatgctttccatgtgatatttttaatattattttatgtaaagaaaagtatatgtcaccatattattaagacctgaaaaatttagtgcatgtttgacatcataactaaaaaactgttttttgtttttaaaaatagaaaattgttttttgaaaacaatttggcttgtttggccttgttttttgaaaacagttttcagaaaacaaagttacaaaaacaagaattttg

SEQ ID NO: 303174 - DNA, 3138 bp, Cannabis indica
gacaaatgtattgatcagaaaacagggatcgatgttcatcaaattaatggtccataccttgacatatcatatcaaaatatacagtttgaagttctttattgccatatagctacacattgtattttttatttatttagttatttatttatttttgattttttttttttcactcaaactgtatcataagtaagatatgaaatttaaatttcataattataatatagacttcactttcacctcattaataaggctacaagcttttaggcttcatttcataagtatgcttaatactataaaatatcttaaggatgacagtggaaatattattaataaacaagatgatattgttgctttaattacttcttatttttctattttttttttctttttagggcaatgagattgaatttgttgcttcaattttttttctttgggtcctggtctcgaggagtctgatgttagtctccttactcaggcttccactgacgatgaggttagaagggttgtttcttaattatctgaggataaagttatgggtttcagatagttgaatgcttatttttatcaaaagaactagtctatgttgggaattgattttactaatgctattctggattgtctgaataaaggagttaatttctctaacgtcaactctactttgattgttcttataagaagcagcatgctaatactcttaaagattttaaagctataaattttggtactactttttataagattattttaaaaaatttagctaatagacttaagatagttctttctaaggtcatttcttgttttcaaagtatttttattttaaaaagagttatttatgataatattcttattgctaatgagcttgtcaatgctattagcaacagaagggttggtaattagaggctggactgctttaaaattggacaaggcttttgatagagttgaatgagattttctacaaaatattatgtttcatttcaacttccattttagttttgtttctttaattatgaatgcctctctactactacaatttctttctctgttaatagtcaggtcaaaggccatgttaggtctactgggggtcttaagaagggtgaccatagatacccttatttattctttctctgctatgagaggctttctgctattcttagggactttcaacataggagtcttcttaagggtattgctatctctaagaatgctcctcctataacccacctttttttttattgaagatagcatcctcttttattctgcggatcaaaatttttgcgatgctcattttgctatatcttctattctgttttctcctaatacacataataatatcataaacctattttttagaacctttgacctcgagaataagccttttataacaaagtaccttgggttgcctcaatgtctttttaaatctaagtacatggcttttgcttttcttaaggataaagttttgtccattatccattaaaggtaccataaatggttcttgaaggctggtaaggaaactctgataaaggttgtttttcaggctattccttcttatgccatagcttatttctgaatacctaccaagatttgtaaagaaaatgaagctcttttgtcaagattttggtggaggtcttcaaagccactggtttgttgtcaaaagaatcttcagataatatatgttgctggaactcttcactatgatcttcatctcaccaagcctcaaaattttgaaataaggcctattgtgatgatgactagaccactgatattgatgatagaagatccacctcaggttttgccatcttctttggaccaaatctcattgcttgaaagtctcaaaaacaacacacaacatccagattcagcacaaaagctaaatacagaagtctagctaatgttgttgttgaacttgcctggcttcaatcattgttctctaagctttacatacaactgcctcatcctccaacagtttggtgtgacaatcttagtattgttttgctcactgcaaatccagttcttcatgttcgcgccaaacacattgagctggatttatattttataagagagaagattcaaaatcaccaaattcttgtcaaatatgttccagcaactgatcaactagcagatggcttcaccaaggcaatattgaatcaaagcttctgtctttttcgaaccaaactcaccaatgtcgatgcctccaatgttgagtttgtgagggagtgttaagagttgacagttgtacttttctattttgttagttaactaattaactgtttcagtaagttagttagttagcattctgttacaactaatcatgtttagttgatgtagctcatgtataaattgtataactgttttcataataacacttgaggtctttcatgaaatctttcctcactctctcttttctttgtcttcagttttattttactatactttgttctttgttcatactcgaacaacaatgtcaaggagattcaactctcctaacagagaagcattttatgggatagggacttattgaaaagaggacttgtatggaaagtggagaatgaaagtaaaagtgatgaaatatatctcttatagtaatgtagtccttaaatcatattctattcaattttatcatgaaaaaagtgacgcaataaatgatagttgataaatagatgcaaattaaaatcatttcatcttttttacttcaataattaaagaactaaaactaaaatataaattattataaataaagaaaaagtcttttaatttattattcgttaacataaaaagtagataacaattaatttgcattcatttatcgattaccatctattactaaactcatttcaccataaaattaaataaaacgtgagaagaattacgttattgtaaaagttatattttgaaatgtgtagcatccccacttcaagcctctattgagtccttacacccacagaataatgactcttatacacgagtacgccactttggctacttcctggattgacaactgaccctacagtccaacacgagtgtttctagcgtgctttgtcctcactcgcacgcttcctgagaaaacttttcaagaggtcacccatcctgaaattaccccaggtcaagcacgcttaactgtggagttctttcgtgatgggc

SEQ ID NO: 303175 - DNA, 3496 bp, Cannabis indica
aaaaaaaaaaaactttatattacacctagtagctaccaagccataacaatgatagggttatggtaattagataagagtagtactaattacaacctcttatctaattttgcgcccgaaatcacatactaaactatttttttttattttttttcatatcggtattcgtcatagctataatattatccctttaaatttttaaatagtctgaatagtttatggtactgaaaacagagtttttaatattccaatttactgtgcgtgttcaaaagactttaaacctattttcgatactgaaaactatttgaaattttttaaaaatttacagtgatgatgttgtaattataataaataacgctatgaaaaaaaaaattaaaaaagaaaaaacattctagattatatttttgggcacagaaattaactaagagattataataagatgttgatgataatattcgtgaacctgttgctattttagtgtgattaaatctataaaataaataaaaaaaatacattgtaaaatgacagatttgcccttatctttgtggttcggtaacaagtatgcatgtggggtggaaaagaaaaaggaaaggataagaaataataaataggagggaccaccacctataccataccatcactacacacacacacgttttagtttctgcttccccttctttctataattggatagttacaattttatttttattattattattttttaatatttcaaattgggacattaaaatttcagctttttgtcaaatgaccacttgagcattttttttttgaatttgaaagcatgtcttaataatacttgcaaaagatgaccacttgagcacggactattagcatttaccactcaatacaataaataaataaataataaattataatagcacacttgcttttgcctgacagaaaatgtgaactttgtttttttggcctattttttttttttttttatctagtctatttttactatcttcactttatacttttccaacttacttaacctaacctccaattactcttatttctttttttttagtttttatacagtatactgattttattttactatgggccaaattttatttaaaatactgtataaactttatacaatatattatgttaagtttttactggtgttctacagttgttttttatttattcttattctactgctatttttaattatttcgattttttgttttataaaaagatatttagtaaaattataaacttttgccaaaatttagtattttttgtaaaatgaaactcccaccatttaagactgcattacatgacataaatgaccattttatgtcatgtgtgagacataataataatgccataccaaagtttcaaaaataataataataataataatgccataccaaaattgtgtgcgtaagattattattatgtaatcataatttgtgattatagaaaaaagaaacatgcagtgtaaaatgttagagaatatgcatataaagagatatggagataataaaaatacaattatataattctaaagcaatatcaattatcaacttatcaactcacctatatatataaccatatatttgccaacatatgaaattatatgtacctaactgttaatttttttttctttaaggcctaactatttgatttttatcatattaatatttgattttatgtactcataaatgagaacacaaatttggaaacatgtctcactaataactagtgagtctcaatttttatgcgaatgcaactttaaaatagtctacaacaacactcatttccaacacatttgctttgtggttgcatatgggcctaacggttagcccaaatcatttttacttttatacaaaacactgaataaagactggtaattggacattaagcaaaaaaagaaaagaaaatggactgataattgggtttcttgtacttggatctcatggaatattgcagatccgttacacaaatttttagttttaaatatttttacgatttttaaaattttatttacataaaatatattttttgatatacttatatattgtactcttgttattttactgttgattttttgttatttatatattattttttttttatgtagttttgatgttgtttttaaattactttcatatggttttcttgtattttatagaatgcggtaaaaatgaaaaactttggatgtaaaagtataaatagtttaccaaaaatagtagtttatgtatttttctatattttttttgctgaatattatatttatattttttgttttttttcttctttatattatttttaatcaatttaattttatttttaaatacgaacgtttttttttttaaagaaaatacgaactaaattagaaatcaactgcgtgctaaaaatgaggttagtgacaattttttagttacaaaataattttgttatgattaattatttttaattacaatataaagttacttgtcatgaacaaaatagtatttagacataatatatcaataattaaaagttgtgattttttttgctatttctcatacttgacatcgttgctaaacatgagccgattgaatattgataaatggtcacctgggttcatcatccactatatgaaaccatctctaagatcttgaaacctttggggagtggtgcctccagaacgtgcagagcacatggctccacattgtcttctttggattcgaattttacacccctacctcattagagccatttctttctatagggctatcaactcaaccattatttcctcattagagccgtaggtcgtaggttgttacgtcatacgtgtggttaccatttttgcaaatgataaaaaatggtgcaaaacttcttttagttctctataaaaacactaaaatattgactgacatttttgacaaattataaaaatatagagaaaataagacaaattaaaaaacaaaaaaatagattacaacacacgcattttacatggctgaggtcctaaaatagctctaatccatgaatcactgtattagacttgagcttggttacaaacattaatgttcctctaagaattttggtggcattattgcttaaaaattaaaaaatttgatcctttacaatagagaaggtggtcctatttataggcagttgcgtgattggattggcccaatatattctaattaatattaacctctcttatggaggatttataacaaattaaataaaaaaatttccccataagtaagccaatacaaaaaagacaaaagttgacatgtcctatttgatgtgcaccattgatcagtgtaggtgaaatcgccactagacacatgacaaatggttttattagggcatctctaatggagatccaactaagtgatgcaaatataaaatatagcttattttgttaaaagtctactccaatagtgtgctaaattatgatgcaaaaatctcacatattcaaaagtgatctaaatttgcatcacaatatagcatgatgtaaaatttatat

SEQ ID NO: 303176 - DNA, 2981 bp, Cannabis indica
ctccctttttttgcaacttgtaacctatagaacactatacctttaatatccagtacaattttcaaagctgtactcgagaaattgttaaaaatgcaattgttcctgttgctccataaattgtaaatcaatgctgccataacactggtatagattctctgcttcttatcattcttgttttgcactagccatctttgccaaccttgaaaatcagttggccattttctcattccaagccaaacacacagctgagttaacacctgctgcaaagacagtaagcaaagaacaaatggttgtttgtctcagcttcagcaccacaaagcggacataaaatattgtcaagggtgattttgaattgagcaagtttgtcccttgttaacagttggttattggccgcttcccagaaaaggaatctgtgctttggcatattgtagttgctccaaacattgttgctaatatcaaattcagattgcagcaactttcggttatacagcagcttagtgttgaatcgacccatagcagcccctgcaattgctatatcattttgagtaaacttgtccctcaaatgacaaagtttcctccaataccaactagtatcattttttaggtcataggtccaaatgaaattgttcttgaggtttatattcagagccggccctaggcatagacgggctaggcccgtgcctagagcccacacttttcgggggcccaaaataaaaaaataaaataatttattaggcttttatttaaggaaaatttaagtgtattataagcaacaaatatttatagcttagttggttgaggtggatggaataatgtctaaagttatgggttcaaatcccatgacactcttcttgtattttttttttaaatattttttagggccccaaaatgtaattcgtcttgggtccatatattttcagggccggccctgtatatattattaacccatttaacccaaagtaagtcacttttggatgaaatggcccaaatatatttggcaaggacagcttgatttcatttgaccccatctttgaatcctaatcccccattatacttaggaagacaaactttttcccatgatgccacatgaagcttacttctatttccattccaaccccaaagaaaacctctacatagcttctccatctcccttgtgatactatgcggcaagatgaaaatactcatctagttgtgaagccctaacaaaactgaatgaatgagttgagccctgccagcaaacgaaagatgtctagttacccaagtatggagtctctgtttgattttcttaattatcacaccacaatctttcgctttccattttgttggtcttagaggcacccccgggtacatgagaggaaacataccttctaaaagagtcatttctcgcaacatagcctatttttcctcttctttcacccctccaaaatagagttgagatttgttaacattgattgctagccctgaagaggaactaaactcatctaaaatactcttcaacacctgtatggagcttaagttcccgttacaaaacaacatcagatcatccgcaaaacatagacttattatcttgagactcttacacatagggtgatacttaaaattcgattgattggcagccatatgcagacgcctagtcaaatactccatattcagaacaaataacagaggggagaggggagagggggtcaccttgccttaggcctttcttgcctttgaaacttccttgcactcttccattcatcaagattgagtaggtagttagctctcagacaagacattatccacaatataaatctggctggaattttgtaagcattcaagagagcttctaaaaactcccagttcaccgtgtcgtacactttacttatatccaccttaagagtacatcttggagatatattctttctattgtagttcttcaaaatgtcttgaagaatcataacattatgcgctattgatctcccttgaacacacgctccttgattctggttgataatcaaaggaagcacttgagaaagtcttatacataacagcttggagacacatttatacactgttgtacagcaagctataagcttgtattccactgccttagttgttttttcaatcttaggaatgagagtgagcattgtagcatgaagctcttgaggcatagaacctgtgatgaagaaactctccactacttgagtgaaatcagctcccaactctggccacattttcttaaaaaaaaccggccccataacaatttgggccaggagatttagcgttcgggatactaaaaaaaagctttctttatttccttctttgtgaacatgagtgacttttttgtttttaaaaattttaaaattttgattctcaattaaaaaatttaaaagtgaaaataattttataaaaattgttttattaaaatttttcactttttgaattgaaaaaacataaaattgattaaaaagagtattactaaaccctactttaatttatttaattttttggggagttatagttgcaccccctagtatcaatactccaatttcattatgagtgcaatttaaaaataaataatgatttaaaattcgaaaatatatatttaattagaattaacaaattaaataaagtttaatattaatcaaaattttgcaagcagaaaattacacagtgaaaatcaaatagtgatcatattattttattagccatgtgtgagagaacttagcaaatgtcaaatgatcactttataatactaccaacaattcggaactgtttaggtggatggggttgctttgggatgacgcaactagtgacgctataaactattaacctcccttttgcctatttgtttggtgagagtgctccctttcaataattttagtacttcttaaccaatatatcaaacctaaaactttacacgtgttcggatgaaaattatttattcatttttctttttaacaaaaaaaaaaaaaaaaaaaaaaaagaagaagaagaag

SEQ ID NO: 303177 - DNA, 6252 bp, Cannabis indica
aaactgttccctattttagtgtgtgcgtagaagttccaacttcacgttccgtgtactctccaacttgtatgcacctttatgttatcttgtaacatgttttggaccttctcagtttggttcgaacatgcttgttccatgatctttgctatcaaggaatattctttagagagtaattctcttgcaaagtatttctttcctcgatctccttgttgacaggcctaataactctttataggtagccatgctactctgagttggcttggtctcttcttctttcccttttgtcaagggatcctgctagcaagatgttgtatagctcttggtcactgtagaccaaaagtatgagaccagtttgttggtggatcaagctggccagggtaagaccaggtggccaaccacgttagagcatcgcttggacatttggaggaggctattgccagccaagtgattaattttatggctggccaacttgtggagatagtggccagctagattgatgattctgtggttggcctacctactaaagtcacgattgcgcaattttctaaaggccatgttgatgccactgtttggtctcttctgccctcagttagccttggcacctggcttaattgtcgtagaggtggtgttgggataccacgtatgtgtgttatgttgtgcaggattggacaccctacaaccatctcctaatccctactttctagcagggtttttgtttagaggtatgttgctgtaggtgtatccatgttgattgtctagcatgtatgttccttttgaaatagaaggacttagttctttgaagaactgagtaggtaccaagtttgccttggcaggcacaactggctagttgagcgagtgcatcggctgttgtgccatctttgggggcttgccttctagtatagcctttgagctgtcttaacagctctggtaggccatcatcttcctgtattgagttgtatattaacctaggacataacctacgactagttgagagtcctcgtgcatgtccaggttgtcagcccatgcttcgtgtgctagcccgaggccagcatttggagcttcatgttcagccttatcgttagaagctttgtaactgaccttttttccttgtccctcagttacccccaggtgtcgtgggggccatgcctacattaggcaagtgttcaatgcatctcttgggttctttcccttgcttcttctttggctcatacttttctcctaaactctaagagatttggggagatatgcttctatcattagccatgaagttggtgagagcttggcctggtggccatgcttggttttgaggtgcttttatgtttgccgagtctcaatggttcacttgagttattggcctgatgctctaagtttctgttgaacctaccacaactattgatcgatgttcacttttattgggtgtatttggaagtatggccttagctttctagaagccaagagcaagatgtgggttagcttctccattaatgggaaccgacttttagtatcgatcagtctcttattggtgtagtatacagggtgctgcataccctcttactctcttgtaacgacagcactcacaacatgttctatgaccgctaggtgcacgcctagctcttctttgtctagggatttgggcaacacatgtggccgatccaatctatttgttcagctcctggaatgaagtttcacattcctttgtctacttgaatattttgcctttgagaatgttgaagaagggtacacatttatttgtagacatggacacaaatttgcttagtgcggcagtgtgtcctatttggctttgtacttccttgattgttgtggggcaatttcatgttcaaaagggcttggatcttgtttgtgtttgagctttttcttgttgtagctgcggaggattttaaattttctgtctaggacctccatatgcccccagcccttttggacttaacaagcatgccatctacgcacacttacatgttgaagccatatgattactgaacatcatgaagcttgtatgctcctgatctgatggatgcatcttctatttcttggctttagataaagccaatttgtagtagtgacaggcagattattgatctcctcttgacatcatacctcatgccttattaggaatttagggcagaggtggtagatggatgttacaccttcaagttgtataaggctagttagcctatcatggcgttgaaagctgagggaacgtcgattacgacaaactgcaccatcagagttctcgtggttggattttctccaatagtaatgggtaatctgatacacttgataagtgcgatgctttgatcaaagaggtcatacattacttgattgcaaggtgctaagtcagtcagttggagcatgattttttcatgtgttgattttgaaaagaatgttgagggaggcttcattatagagtgtgtatcttgctgtagctatatttctaatttgtgcggtaacgattaggtggttgttatgcgagaaactgtcttgggtaggatctcctttttgagagagagatcgtgggctctccaagctttggttgcttagagcctcgttctttgcctactaggaagtcgcttttgggctcgtgacggagttttcgagcataggctctctgcctttgttggtctcgcctgcaatatggggtccgacaatgacggcccctaagtgtctagcaatcagaggtttgggtagaattggtggtacttgcctatacgcttggccaaagatggaggccaacattcagagatggaggctaacccttggagatggaggccaaacctcaaagatggaagcagaacttctgagatggaggtcaaccttcagaggtggaggctagcattcggaggtggaggccaagcttcggacgcagagaccacccttcagagatggaggctagcctttagactgcatgttactgagttttcctactggtatgtctgggcatgctgtgctttgggagttttgatagaagagtgaagcatacacacatttcctccttcttccttagacttcatggcataaaaaaatcgttgaatttccctctttttccattatgtttattagagccttcattgttccacttacctccaccattcttattgtttgagaattgatagagttagtctgtgttggtcggcatctggacagtgtttagagtgcaatgagatcctgtgtttgttcgtcattatcctgccctcttatctgggcttgccaaacaacttcttccaactttatgaagccatcagcttgctcaaagaaatcctccgtgttgttcattaagatcctcttgatatctttcctgaagtcactcaacggtaggatgcctccgagtatggctgtatatccaccttcttctattaggcctataaccttggtggccttagccatgaactattgaatgtagtccttaaggggttcatcttgtctgtgctttattttgacaagatcctcaagtcgggcatgtatttgtcttgaagcagagaactaaatatagaactcttgggagagctcttcccaagaattaaatcttcctgggccagcttgaaataccattattaggctatttttgctagagttgctggtaagattcggcattagacatctccaaatacttgtaggagatctgtttggatctcaaattacttcaggtgtactagagggtcttcttttcttgtgtacatcttccaagccgacatcttgaattttggcaagggcaaggcattgtgatgtatgctgagaatggtgatccccttgccctgtccaacttgaattctgaaggttttggacaagctaagcccttgagaatgtctcatatttgatgcaactatgcttgcacagaaggatatattgctgtaggggcctggttgattggcctttgattgagctgcggcctaggattggccagagcctagccggtcataccttaggagaggatatactcgaggccggccatccgtgagtttggtgcttgtacatggccagtcagccataagttgggtagggcctggtcgcccacatttctctgactggctagtggagcttgtgcattgacatatggtagatcacactaattgttgcagtttagtggatccaacagactgaagtgattaatttcactcctcaaatttttgtttctcgatccttgtcagttgaaaattgatctttgggtgactcgctccccttggggagggagttctcttctttggccagcaatagggactcttgaaggagtctggccaaccaggggacttctagaggagttaggccggccatagagacttttagagaagtctagacggccatggggactcttgctgggggttagccgataatatgatggatagagggggccattgtttagcctgggatccctggccagctcatgatgtcgttggttgctaggatctagtagttttcattgtttaacctttgaggaaaggtctatcctccctcaggaaagggaagatctatcctagttcctgaggaattcggctagtcaacatgtggataaaccgtccctgatctatcaacaagtcttccttgaagtggatctctaatgagatcctaacctcttctatcggttctcttgttgaaatgccttatcaaattactgggtactttgttgtggcaatctaactctgcttggtgagatcgaaggatgtactcttggtcatccatccatctcaggaatatgcatctctgctgagcgagtacatcataatcagcagtgcatggttctttaaaaaatttgtgtctctgctgagtaaatacctctctaagtctggctaacttgagatcttctcccaagtccatgtggggctcaaaacctggtcttgtttatcctgcataatacttggggcgaaacccggttgttgttcttagggggtgccctaaggattcttccttcagttggaggcacttgtggatggtccttccttggagacagggtcgactacagttccattgggatgcttgtatccttgccaactatagtggccagatatgtggggcctgctatgggggcaagattgaccacatctactgtgttcatggaaattctagttgaggttggaccatgaacatcgggatttgcagtttgcgggtcttgagggagacacgaagatgcagatggtgcgactggtgttgttctcgtgtaaaccatgacatttgatcagttatgatatccacactctcaatgaaagcaccaaactgtttacctcaaaaagtgatcaacttatagcggggtcatatggatctgatgcttgccacatgttacacaaacagaatgaaaaaagtataaaacacacaaatttgttatagaggttcgacccccatgtgatcccatgtgatagcgggtaatgacctactctcttttttgttgtattgatacctagagataatattattcagatcaccataggtgggatttgatatagctctctataaggatacacaacattaatcagtaggcaaaactctaatgagagagtgatatagtcttagacgcgtgtgagagagatgaagagaagaaagatccctttggggagtgtagcagagagagagaaagagagactaggcttcttgactgagagtgatttgaaggcttagtgacgcaggttttctaggttagagttaaggcctttatgtaggaagcctaaaaccctaatttacaatgaaacccctagatatttacatattaaattggttaaatgcaaaagactaaactgcccctcaaaactagatatgctccactagtttgttcggccgttaagggcccaattcacaggtagcttgttggccacatttttgggctgtacatagagttttgccgagttaatcctagccgcccacagacctacaggggaggtctagccacccaacgcctggaaaatgaggtcttgccggccaaggcctacaagatgaggttgggccagccaaggctgcaggacctggcatgtcaccatagctcaaccaagaggaggccaacctttggatgtggaggccagccttttgcaagttgaggatagctttgtacaccgtttccttgtagaggccaggttcccttggtcgaacagaagctcccttggtctaattgtcacttcttggccgaacaccttgtgtacagatcctagccagcctataggctcaccctgaccaacatgtaggctgcttttggccggccaaggatgttggtatagctgtgtaacaccctaactaacataggcgtattacgtgatt

SEQ ID NO: 303178 - DNA, 3184 bp, Cannabis indica
aaatgaacaaaataataatcctatacaagtatacatagatttagaatatatacacagtaggttgaataatattgttactgttaatgaaacaagtactatatattaaaatttaccccaaaagaaaataatatattaaaacagaatgtagtactaataaactaaataaatacatatatttatatttaaggaaatatatacgttacatcataagatgagaaaatacaaagttataagtctttcccaaaattaaaacataataataataatattatattttttaaataatttgaactagaaataggagaaacctgctgatttcttcttcttattatcattattattattattactattatcaccaactattccttcattcccagctaacatcaagtacttgtctctcctagtaagactagtacattcaaaacccaaagtattagccaattgtttttgtatgtaattagctacttcccagctggattttccacctgcaccacaagacatttcttttggaattttcccgagaaaatgaacaatatatccaggcctaggattcatgaagaagaaaagtgggtccaaacatttgagcccactagctgtagtcccataaaacatagtggcttttgcgttaacagctacagggacaatttcgtcacttaactcagcaaataaagagctaaacctcaacaaataaggctctctacaagttgttccttcaggacaaacaaccaaatcaccttcactaagcaatttcttcatggtcaaaccatcttgctctctatctctagtcaacctaaccgttcgaatggttgagatgaattctgacattttgcttagactgtaggtcacagctgtcactggtttggccaatgaaatgcttatgaaaacagggtctactagagttctgtggttgcacacgtacaggattcctttctttttgttttgaggatcgttactttcccaattggtgtcacctttgaccgttaagtcaacgccagctaaaatccccaatggggttccaatttggaatggaagaaacccaactgagattctgaaaatggctaaaatgacccccaaaggtaaccataagaacatgactagagttgcagctggtgtgggcaagaaggctaatcttccatcatggaaaatgaggggttttgggtaattttcccttctcatagttactttattgtcaccatttttaatattctcagcatctttcacgttcactatgtaaccctcctacaaaaattaataaaaatacatttattagtatataagcatagtcacatcatgataattaatttagagtgataaataaatggttgcaattattttctacacctatatttttacacgtgtaatggtcacacgctccatatttttggatttattaactttacctttttcttcttgtgacgagtaaaaaagatttaaccctatttgcatgtaatgatattaatacagagccagctagctatcaaaagtacatgcagccatttattaatgcgctaattttcgaggattaattagtattaaaccaaagtaattaatttaaccataaatagagttttgacaagaaagtactgttatagttgtaaacttgtaaggttaggtaaaaccataaaaaaaaaaaaattaattacaactctcaacaagaagcaataaccaataagaacaattacaatgaaataaaaaaaattacattcttaggtttaaatttatatatatatatttaggatattctataaaaatataagaaataaaaataataagaaaagaacatcaaaacaacaataaaataacataaaaataatatataaataacaaaaaatcaacaataaaaaactgtattttatgtaaacaaaatctaaaaacttaaaaaaatgttgaaaatttcgtacctactgtattttgtaattcttttattatttttatactttttaaaattatctctaagcaatatatctcttggattgttttcaatttcttaataatagatttttctattatcatattacacctagtattttccaggtcttaaccctaggtgtcggtaattattagataaaaactatatttggtatgattaaatccatccaaaaaaactaaaaaattattatgttatttcctaatacaaatgcaaaataagtacattgttatgatgaatatgcaacaaaaagagaaattaaaaacaatattaataattatttttaattaattaccttgcatagagataaaatgagttggtcatgaaagcttggagtaccaagtccaatatcaggctttttatcaccaaaatgttccttcaaagctctatgcttaacaagcaaaccattttgagaaacaaaaccactaaatcttttcccattaatttctaactcagttccaaaaacatcatcaacactcaaatactccttaacaaaaccctcaaccataactctaggaagactagtgagcagagtcttagtaccagccgaagccaaaacctcgtacgcctcaacattaagattctccaaataaaacttgggcaaaacagctctgctaacgttgtccatgtccttagtcttgagcccacaaaaggatatgaaaatcatggctttgagcttcatttcatagtccaaaagccacaaaaaagaacaagacaatagaagaagaaaagcccttaaaatcccaccaccttcgaaggccactaacatgaagtaagggaagaaagagtgagtcctcaggagaactccgtggaaatcagtgacaatatgagcatgttgtgatcctctagagtcaagaccacactttgttatggtggggaagagttgttgttgttgttgttgtgatgaacggagtactattgcgtagaaatttcttctcatctttcttaaagctctgtaacatgaattggctaagagttggtatatgatccaatctattaacttgagaatcaccataggaaagaacatagtttgctatagtagtattgtatagtataattagctaattagtgttaatattatgtatatatatatatatatgtgatgaagagagaaaaagtaaattgatgtaatttgaaagatgtgttaaaatgagagagagagagagagagagagagagagagagagagagagagagagagagagagagagagagagagagagtagagtagtagagtagtagtagtagtagtagt

SEQ ID NO: 303179 - DNA, 4403 bp, Cannabis indica
tatatgtgtgtgtgtgtatgtctacaataaactttaatttattatttggattctgagataagcccaaaatgaaatgaaaaataatacttgaggaaataaaaaaattggaactctggtaacaatgtcttgcttctacgggatttaacttaagggtgacactgacagagtctactctcttctactttgatgatatttgtattatccgatactatcgatcatttgtgtttaattttgttctgttgttcatacactttctcttataacaactttaagaattcttctatgaaggtttactaaatccttattgcaaagattagtaaaagagaattgattcgtggcttcctaaaattctctgaaacttgtatgtgtgtagacacatgactaaatcagaaaaagtgaaaattgtccaatgaaatgtgtattcacttgcatatattgcatttttagtagctaccatatttcagaaattgagtgagcataagctaataaatgtatctgtgtttgttctattctgtatagtttttgaactgtgtaacatttttgggttcatatggccatgacctttcaatatgttaatattatcaaaaatagatttgtacggctggaagatagaaagagggcacttgtgagccggctacttcagtatgctcttgtacatcaagtgttaggaattccttatgatgaaatcgtgatcaagcgcactcccgaaggaaaaccatacctggtatgcagttatgccaactgaatttgtttagctcacaataaaatggcgtccttatttgcacttattgtgattaagtgaagtgtaatgttatttatatagcttcttccattccaaaacttcaaatgtagctcactctcaagaacttctcctaagtttcacacttaagtcttctaaggagaagagttgatcatagatagtttcttttgcctgcctataaaacaagtgcctaggcctatcttgaaaatcatagttttgagacataacttaccactgagtttggttttaggaaaatgggaaggttggtgaggaattccccaatttcaactttaatgcatcacatcatggtgactatgtggctatagcttctgaacctttatgccttgtggggttggacattgtgtctcttgtcattccctggagagagacagttgaagattttattcgaagcttctcctcctatttttcgagtttggaatgggataatatagtttctgctggcactagtaatgatgttttggctgagtttttcaggtaaattttttaacttcacctattgataaatcattttatgaacaaaaaggttgcatattaactcaaagacttttaaactagctgataacacctttttcttctttacaatctttagaaggtgtctggtatggacttttattagtcacattcctttgttgatatgtagcattattctatttgtctaaacttaactggtggcctcttaattatggaagatttacagacaaagagattagtcaagttcaactaatgaatgatggtggttatagatattggagtctgaaagaagcgtatgtcaaagcattaggaagtggagtatcatacgacttggaaaatgtggagtttcatcactgtaactggaaaaatatttctgtcaaaatttatgggaatgctatgccagagtggagattttggctttctgagctgggaaaaggtcatctggtaaataaactctacaactactcttgctttcttttttatgtatactcctctgtttaccaggtcacaagtgacaaccactccaagtttagattttagaatattgttatggtctttgattgaaagaatttataggggtagggagcttaatatacagttcaaataatttattgttgtatcttataactaaataaattttcattgaaacacacacaggtagcggtagcaagaggccacccaagattagccactgagagttacaagaaaacactaaaatacgcagagtttgatgaagaggaataccgtaaaggtctgcatcttccaaacatagattttgtctatagaactgttgaagaagtcattcaaattttatgtaaagaagttaagagcatacccagaattcataatgacaataaattagaggaaacgggtgatgtacagtcacccgcataattcattgtataaaaatgaatacttgcagtaatctactcagttggaacacaagttttgcctttagtaatagttgatcatgattcatgagggtcaacattttcttattgcatgtttaagaaatctccattaaaggggtttttataagtcttactttgaaaacaattgctagcatgatgctgaagaaagcagcaaataagaaaatgcacactttcatcttggaaaatgttgcatgtgagaaagaaaaacttgtggataactaagccatcaacgcaaaagaattaaaaatcagacaattcccaacttctcaataaatcaggaaaaggtaaaacaaaatgcaccaaagttattgaacttcttgacgcaattcaactaaagagccaaaagaagtttaaaaccttttcccaggtttttttttgttgttgttgttgtttagtaccactgtagcacatgaccagaaaagagggcatagaaagaaccatgagaagcaaatgtagtagtctacttatataacagttaaaacataagtccgaaaaaataacttaattctcaaccaaatgcactctaactcagtttcctagggaaaattctgtcatttctcaccagccaaatgaccctcaacatagtcaaaacatcatagttccaaaacttccttttcttatcaaagccattgacaaaactcttggaccatcaaatcataacaaatcttttggggagcagcattaaaagtcaggagttccagccaaaagaatttgaatcctcacattctcgaaccaagcggccaattccttaaaatctaaaatctaaccaatgcaaggtggccaatctgaatgaaactgaaaccaggttgcgcaagcattgtcacctaccgaggaataactgaatttccatatactctgaaaatggtccttaagccaacccagaaaaccaattaatcgaatgagaccatactttcaaaggtctccatagccacttgagactagtttcttaaaaccatatttacaaagctaaacctccttccaagccagaagatgatcagaattttctccataacacccatttcgcaaaaaatctcattagtcactcctacaagcaacaaagtaaagataaataatacgattgctaggtttaaacaactaattgaattagataaaaagtgtggatgtgcctgtaacgatgaaatgaatgattaaattaagttaaccttgttccctttcatatatgctctctttcatccattacgtctcatgaccacttaaccacccaactccaaaaagtaactgagaggccataagtacttcaaaggccaaagtcatcacaacccaacgaagctgccactccattaatgaagttctcatcaacaatcctacctagcagtcattaacccgttaattcatagtccagaaactaagccaaacaattttaataaattcaactgaataatactatactgccaagaaaaatagtgcattgtcagcaaaactgtggatgtgagaccatgatctagtcttagccaattcaaagcctcgatcaacttacaaagtcggtctctttcaatccatctactcaagacatccaccactaatgcagataaaaacagagaaagaggattgaccttgtcatagtcgcctagaggctagagcacatgagcttccttcttggtctcccatcacagaaagccaaatagaaaagtgaaaacaagtatcagctcaccccctccttcatcaacccccaaaacccttcatttccaaatgattataagctttttcaaaatcaatttcaaagaccaaaacattcctcaagatatttatattcttccacaagctcataaagaaaccagcagccacacctaaaatctgtcagccagtgataaacaccccctgattttctgaaatcttatcatctaaaactacctgtagtcttatgaacaataattttgtatactatagcacaaggaaaatatatcaataatctacaaaaaccgactttatagaaataagacatatatataggtctcatttgtcaccctgttaatgaaattattgtaagaaaatttgcacaacaccttatttaatcatttccaacatttactgtagagaagtgaagttgaaaaagtctcatatttcaattatcatctacccacattatatctaggataagtccagcttaaaatcattgtttcgtgttgccacatgcagaacaaacgccataaacaaaacaagattgtaattagtaagggccaggcatcaaagaacaagac

SEQ ID NO: 303180 - DNA, 1442 bp, Cannabis indica
ttgtttacaatagagttgtaatatcttgattttcttccattgtaataaaatctctaacaaaaacatgaggactcaattactaacaaatacattgaaaactaatctttggtattagaatcttattaatacggtgtgatcgatctatcttaaatatataatatttgattaaattagaagatatgaacaaaaatattaagcattaattcaggcatgcatgcatgtatactgatatatgttcacgagaaaattaagcaaagttggtgtgaatggataacgtacgtagttattgctaaaaaagaaaaaagtttggataaggatcataatatatattttacagctataaatatagccgaaaggcagaattggaataggaactttccaagcacttaattgggttataattattaatataataattttcattcacatacgtttactcgttttgtaataactaattaatatgtttcgttcatatcgaccgacttttattttgcaaaacttattatttacacgagagtattactaacatttactacttacatttccaacaaaacgaaagaaaagaaaaatgtacaatattatcaatggatggatgatataaaatataagttgactttgtataaaatatggtatatgtatatttttataataaacttgacttaggtataattagtgcatgtagtgaacacttttgaaaactaataacttaacgtagtattaggctggtgttgcgcatagctgcaattttgcttccaaattgaagacaataataaattaatgaaagaaatagctagctaagctaagctaaccgattaatacacacaatacctacttagtattattaattatcaattatttatatttatttgcatgtttgatgtttcctttcctcttaaactggctacctttatcgtcgaaagaagcaatatactatttatgtaacaaaagagaagctaggctgcaccaccatataaaaaatttacttttagtcacaataaaatttgtaactaattataaatcattatttttataacttaaaggtctgtggataaaagtattaatcacaaaattacaatttattatgactaaatgttattttagtacttgctgtgattaaaattaaattagtgacaacttatgtttaaataatatgtttcgtcacaagtaacattttattttgactaaaagtcacatttagtcacaaaaaaaatatattgtgactaaaaaaatttcgcaaaaaatagcagttttttgtagtgtacatcaaaaatttgatttagtgacatttgattttttaacattaattgtaaaaaaatgtcacaatactagtattttaatgtcacaatagcagtgaaaccaacctagttatgttggattaaaaattctttgtgggcacatatgtataatgtatatgctattataaagtgtgatacaaaattaag

SEQ ID NO: 303181 - DNA, 3433 bp, Cannabis indica
ggaagcatcttagagttattacttattgtccgccggagaaagagttagatttgaaagaagccttgatgtggattgcaccttctttggaaacattatctattaatgaaaaggtcatattttagttgctttacaagattgtaactcttgattatgagctcgtcgatcttgttctatttattaatgctgtagatttggcaattcttacaaatatatgaactttacatcacaacaccttccttttgttttatgaacttttctaatttgctgaattgaaacttcaaacttctatggctacactattttcattttttaaacaaataaaaaatttatatgattgagttattctattgaatatataatttaaatatgtaggtggagcgggggtattgttgtgtgaaaagagagtgtaactggaaaaattgctattctttcctatacattacaaattttccttaaattaaattgcactttttaacttgtaatattttgtataagaatacagttaaaataagggaacatttggcataatctgtaatttcttgctcatttttctgcattttgatattgctgagaggaatttctttgtaggattgaacttatttcttagctgctctgcataaaggtcttcgaataaaatgaagatctctgtgatctataacaccactcaataatgtgaataaagtttattaattgatcaatattaagtaaactaattaatcactgcttttagtaaaaaatagtctaagactacaatcaggaataatttaaataatattaagagggaataagaaaattctaggcaatcaaagccataattgcatattatgtatgattctgaaattgactcatattcttatctggttttctaatttgttgaatgagatttgttgtgaggtgttctagccatttgttctcattgatgacagaaggcagcataccattcaaaacagatagaagtttctgttgtattgagctggtattgtattcattctggtttcgagttgtaagctttctgagaagtcaaatttggattgtgaacttgagtatggtgcctttcgtatcctcttcatctttgttctattatgattatgcaaagccattttaaatcttgtccatttttctttggtttgttgattgagtttttatggccatttgcttgtcctgttattactgtttcttgttcagagattgttcttgtttgtgattgttatctgggaatttcggtataagcactggataatacacgatcccaactccagcagccaaacccagacaccccactgccacaaaagaatgatcttggcattggggaagagctgaggtgggaaggaaatccggccatggacgatgttaggttgtggaatgatgttgtgatgaggttggtggtgttggtctcattctcatattcatattatttttggatagaataagaggcttgagaatacagtgagcaatttatgggaaagctttgattatatcatgtccggaatgagattatggcacatatggtccatacaaaatagcataaagcatggtgggttcagtcctacttctttcatagtagaagtaaggctggtcttctagataaatggttaggttttgcagttgagaatagggttaaggaaatgtatgtatccataggccaaagggatgaagaagaaggtgttgatcttcatcactacttctatcgcttacctaaagtattattagacaacgtaagatatttgactattttcgagttgtatggagtaaagttggatacttctcattcatttagttttccatctttgaaaactttgtcactgaaatatgttttgaattcaaaggatgcagagcaggatggggtagttaaatttttattgggttgcccgtctattgaaaaattgcggttacattattatcgttttcttgagatggatgcttaatatcagttacaaagtttaagcctcaagttcatggaaattatatctaattactttgatcatgatgtacaaattcaagttaaaaccataaatcttgaatctttggtagtggaaggtatttccttggacgatatagatttctcttcttgcaagaaaattagaaatttatcattaactaaagtttgctttaagaacagtcacctgtcatcatttgatgctctcatgtcaaatattcctctaattgagaatttggctttgaacaattgtgattcattaaagtgggagcaccttaaaatctcgagccaacacttgaaaagttttcagtttaggaatcgttattaatcaaatgatgggggtgagatgacggttgttacaattgaatctactccaaaattagtgtacttttgctatgaaggtaatctcaatttcagcataatatcaatggagtcatcatctagtttgtttaatggaaaaattataaaccgtgagagtgtaggagactatggcacaattcggtttatagatgtgatgaattttctagtgaatctcaattgcccttggaatattgtgaccatgttagcacacataaggtatgttcatttcttgtattatatatttatattttcatgttcataaatcattttgtgtgaaggctctcatttgcccaaaaaaattaaagaacatatgtcgttgttctgtgcttaattggaagcatcttagagtcattactagttatccgccggaaaaaaagtcagatttgaaagaagccttgatgtggattgcaccttctttagaaacattatgtactaataaaaaggtcatattttagttgctttacaatattgtaacggttgattatgaactagttgatcttgttctatttattaatgctgtagatttacttttactacatattgttgtgattctcacaaatctatgaacttttacttgctgatggagaatcttaacttttcaaacttgatgaggaatctaagaattgttgttgaaatattctatggctgtatgttattctattaaatatatataattaaactatgtggagttggggtggtgggcaataagggttgattttgtattcttttttgatccattatccaaaatcaaaagagaaacaatgacaagtcaattgttgtgtgaaaatcatcataagcttcatttttttttcttttatgaaaagagagagtctaacttgacaaattactattctttcttatacattacaaaatttccctaaattaatttgcatttatgaacttgtaatagtttgtataatcacaacaacttgacacttttccaaagaagatattgttctcattgattaagaaatattgttttgagttgtaaaccacccatcatttaaactaatagaagttattggtttgaacattaatttatgtgaattttagaactatattctaagggtgttcaataaaatttacaaaccgcccaacctgaataaactgtccaaaccaaaccgaataaaccgacaa

SEQ ID NO: 303182 - DNA, 1864 bp, Cannabis indica
ccgtttaatggcggttttaaccgacggttttttcggtttttggttttgtcggtttcggttctaacggtgttcggtaggtcggtttaaacggttttttcggttttctggattttatgattacccctatttcttggtcccatggagagcttgaagtctcttttccatggttggaaatttttgtcagaaaggaccagagtaataagagataaactgggatgatcagccgtggtgatgtagtatagagatcaaacatcttcataggctggtctgttgactggatttggatgatgaagaacagaaagaggaggaagatttgttcgagaagggttgtcagcagaatggtttgatggtggaggagcaatgggagcttcgactctggaaggataatcagaagtggtagcagaactggtggcccgtgtgcgcaccatgattgtggagggaagatcttgaattatgaagctggaagttgactactggaagcttcaaattattttatctgatattatattaggaacagagcattttgagaagaagagttttattgaaatgtatcttacgaattgtacagagagaaaatgtacatatatataggcaaaagtgagtagcaactaagtaaccaaaataacagaaaaaccagaaaaataactaacttatccctaactggaataaagaaaaataactcataggtaggacctccataggttgtacacaataggacagttcagattcaggtgctccatcaatatattttctactccatacaacgggcgaaagagatctccaatattaaatgttaatcaaataactattttaataaggagtaaaatttataaaattcaccaccaaaaattatgtattttgtgaattttaaaattttagagcttataccaaagggaaggggagattgaccttcggtactatttttagagcttgaacaaaataggccgactttgttgtaaacttttcatgattctccttagtctaaaatgacttatcagtatccccgccactacgtttaacccgattaacaatattttgaacaatctcactatcatacaacaagtttagcttgtataggtcctaccccccattaggaaggatgagatccatcataaagaggaagccctctcgctgtgaaccagacaacataggtaggaggttatttccagaagggaccccaagatcctcccaaatgtttatcgtggtcccagcacccagcttcaagcacacgctttctttcattatgttaatttagttatataagttttaattgttagatctctatttaatttaaatatttatgtatatgtatatgtatatatttttagtcaatttaaaaaaaagaaaactaataacctatgtcaactatgtcaacttactatatttttagtacagtttgttacagaatatttattccttgtgtacttttctaataattttttttttgaatcaggtgttggattggatgagtattggcactcataatttttatttatgtggttttataaactagattaggttttgtaggcattccaaaacctgattagatatctacaactctgctttaagtgctagtttctgttgatcccaaaaagtgatcaaccggcagcagggttgaatagatctgatgattgccacgtgcttgcacaaataagaatgaaaaacaataaataacaaatttgttatagaggttgggcccccttttgatagcaggtaattacctactccctttttagttgtattaataccgagggttattactatccaaatcactataggtaaaatttgctatagcacccttaggaaaacaaggtatgaatcaataatggcaaagctcaagtgttgagatgatgctagggtagaa

SEQ ID NO: 303183 - DNA, 1582 bp, Cannabis indica
tgaaacagagttttatttagggcataaaacccaacagttaatatcttcaaaacgtttcaaatttaggccacctctatcaataaggaaggaaatggagtcccaagacgccaaagccaaatagcgattacaatcaacactctccatccaccaaaatttttagagaagcctatccaacttttcacaaaggccttttggaaggagaaaggtagacatagtataaagatgagaactaaaagccattgatctaatgagagtggtccttcctgcctaagagaggagtttgtagtgccatccctcaatgtgagcacgaagattatccctaacaaattggaagtcttttttcttactgccagagaagaaaattgggttccctctaaacttatcatgcaaattcaaagccttaaaacctaaggcattagaaatgtccactctcgtgtgagcctctgtattctttgaaaagacaataacaaatttccccacaatgataacctacgcaaacaacttgcaaaagtcctctaggcagttcttaatagaaacaacttctctcaaatcagctctacagaaaataaaagtatcatatgcatacatcaggtgagaaataaaaggacataaagagttgatcttgaaaccatgcaaccactcttcttcttcctatttcaataacatcctagaaagaacttcactgcaattaataaacaaatacggtgatagcgaatcaccctgatgtaatcctctcttaggatggaattgtctgaaagggcccccattaacgagaacagagtaagaaactgaggagacacactttagaattagggaaatgaatcttccaagaaaactaaaagatctcaatatttgctcaaggaacttccactcaatcctaacattagccttacaaatgtcaagtttaaggccaacatagctacacgggccacccctttaattaaaagaatccataatctcatgggcaaggatactattttttgcaatctatctccccgaaataaaagtagactcaaatggggcaataatatcacctaaaataggggaaaatgatttgccaagaattttgaaatgactttatacgtaacattacataagcttataggcctaaactcaccaaaagcaggtgccccttgtttcttaggaatgagcaccataaaactttgattcaaggtcttaacaaactcacctgtttcaaaaaactgaataacagtgttaactacatcattgcccactatatccaagtgatcctttccaggcatgccatcaggcctcagagctttaagagctggaaaagaccaaaccacatcccaaatctcggagggagaatgaattttcgaaagagcctcattcatctcatttgtaaccacatgttggataaaaaacccaaatttggagaagtagggaaagatgtggagtacaccctagatttggtggccttcaattcaatccaccccattgtcaaaaataaccccaaaaaaatttctcttcctcttaataatagtagtagcatgaaagaatttggagttgcgatccccgtgcttatacctgttggaatttctccttccacttagatctctaa

SEQ ID NO: 303184 - DNA, 977 bp, Cannabis indica
ttttaattgttacatggcatctttggttaatatgaaactataccaaacatggaggaaagatgccaagggcgggggatagcgcggaccggtttgggcgctgcaatcagagatgatcacaggcaattggtttatgctactgccactttgctttaggtacaacttcaaccattgatggttgaaatgtatattagagcagattttcaaatgggaattcaaagggggctgtagagattctgtgtggaaactgactataggaaagtaatgtaattgattcaacacactagggagtctcctggtgggtgggatgaacttcgtatttcatgaggccaatactgtggtgtacaatttagttaattatgctatcttttaaagttagttccatttaaattgggattattctctcttgtcttactcaaaagttattgtgaataaatgaaaattagaatttttaagagtcccacatcgataacataattaaataggacttataactattttataaaatctctgaaactaaaactaatttgaaattaatcttatttgaaattagaaagtgagtttaaataaatttcttttaagtcatgtttctactaagcaaataataatgataccattcattttaactattacttattagttcataatatatatatataggagaaatctactgtaccacttcttatttcttcgtcatagataggtagctgatagaaaaagaatgaagcagtgagaagtacttgcgcgtgggcgagtgagacaggacaaatctgtttccatgggacccacactggcagaggagcttggagctcgccaggtggcagttaaagaattgtgggctggtattttttgggttatatttggagaattgctaaagggtactattggtgcctaacaccctcattagtgtcatattgttattggtgtaattaaatagcgggtcccatataacttaagaaaataagttttaaggaatatcg

SEQ ID NO: 303185 - DNA, 2781 bp, Cannabis indica
ttaaataaatttcaatcacacaatataaatcccacaaatcgacgtgatcatttacaatattaacagaattttatataaaattagataataaatatttcttgacaatataattagataataaatcttttttatttcttaagaaaaaatctaaaatgaaaatcttaaaatatataagttagaatttttttatataaattatattattgaaacctagttaacattaaataataaaaaaaaaactaaactttattaattaaacaatatgaaagcctgaacattatcctacacttcaacacacaccataaaaaaaaaaaacggaacaaaaatcaaaagatttgctcatcacttcaacagtgtataaattagttagttggtatttattagtaattgtcgttcattatatttgtttgtcattttttaagtcatttttgcagcactattataatatttgagtactaatatacaagagatgtaatattgttaaattataatttttttaattgtgatcgtgttattaattagtttaaggattctatatattttaatttaataattaagatgaaaaacttataattaattataaggcaatcaatgtagtgtaggatacactaactttatggatttttttttgaattttttatttttacactttaaaacaattttatatttttacagaattctatatgtatctgcaacttaaattgcaataaaaaatcgtatagaaactcttattgcaattagcgcggtttacaaacccaaaccgtgaaaattgaaaaaaaaaaaattaaaaaaaaataaatatatgggtataattctggtttttttttttttgtagtagctttatagaaatttttttcactccctctatcttatttcagagacgtaattaactggaatgttaatggaataactacaattaaaatagatatgtataaaaaatgctatttaatttcacaattgcatgactattaatcagtatgaaaaagtaacatcatcataatatcaaaaaagtaaaaaacaagcaacttcatattatttggttcgataccataaagaatacatcaaaagaaatttaaaagaaaagtcaacaaaatatagaaatctgtttgcaaagaaatccaacaagattgaaaaagaacaaaataaagaactaaagtactctaatgcttgatcatgaatgaacactataggaagagtggagagtgtatacatatgtggatcaattacttactattataaggttgaaaattaattaggtccagagaactgtctccaaagatccatgtaagtaagaaataggagtcgatttttgtatgccttatttgaataaggaatcttattagttgaacaaaaatgcatgagctgaacacacgtacaccaccccaagagttgagacaacatcaagaagagccaattgatatcgtaaaaatcatcaatatcattatcatccagtactattggcctcaccgaatctttatgcccacacaccttgcaaccaagagtagcgtatggccgagggactacagcaccatcacgatggcctgatctattttctttcatattcctagtcatctctcggatcaagcccatcccaatattatgaaactcatcttgcaaatccaactcctttacgaattcacgcctacagatgttgcattccactctcccctttatcaccattatcttattagtcatcaggtaattgaagctgtaaactttgcatggttgtgccctagcccaaggatacaaaggatgagaatcttgaggagtagtactgatcaaatgatctttatggtaacaaggaaagccgagtgtgagagtggtcaagccgaggttcatgtcttcttcttggatataattcgaggttttgtttggaattatatggagagttagagtaggagagttgatgagatcgagtgtattattctcttcttgttgttgttcttgactcatgattgtagggtagtagtatggttgaggataatgatgggaattatgggatgaggggagtgcgagtttaagagtggtgaactcaatctcttcttggattgagagaggtttgtaatgtggttgtggaggaggaggtgtatatggagaagagagtgttggagaattaattagatctagtagtataagatcttgattattctcgccattgctgttgttcacgttgacttgcttggccatggctatggaaaactattatagtttagagagagacagagagaacgaaaaagatcttaataagagatcgatggagagagatgaatagagataataataagagatgaattatatatatatataatatatcgagaaggagaggaataaagaggtgtatatatacagtatactaatacaattcttgtatcgagtaataaagagacagaagatttatattccaattcttagatatcaaaattctgaagaaccgcttacatattatttggacaagcttatttggctaaaacgttattaattgctttttcatttcacacattatcaattctatctctatatattgaaaatgatgctttctttggagggaaatttatatggtatactaatttttgccatttttttttataaaaatactgccatacggtatttttggtttttaaatatgtttttttataaagtttcatactgtagtatactgtgttaagttttcactagtgttctactagtgttttatagttgttctattgttgttttgagttgttttgttctgtgttctactggtgtttcataaaaacacagtatttttgaaaacatttccgt

SEQ ID NO: 303186 - DNA, 775 bp, Cannabis indica
acagaaaagaacaagggttagagatctgagcggaaggagtcataatattccgctgcaatcaatgtaaaattttctaaactcttatgtatagatcctggtgaaatattcccaacaaaagtaccatgcattttggttatcttggaattcttattagtgccaaaaaattaaagttaaaaaattgtgatagtatcattgaaaacatggttgcttggataagaggttggagtactaaatttttatcttttgtagctcagttgattctcactaactctgttttaatttttatacacactcattggactcaaactatgattctttcaaggttttcaaggtgtattcttaacaagatcaatgagatttgtcgagctattctgtggaaagactttgttcatttagatggcctgcgaagttttgcttgcaaagttgtctgtaagaacaagaaaaagggtggccttggtattagagatgtgaaacttggaacttagcacctcttagaaaatacttttgagctatttgaaaatgacaaagagtacttgtgagtattaatatttgctcattttatctcagaaccatgctccttataggaattatgaaacccttattttgtttggaaggaggttgtaaaggctaaaaatttgcttaaatctatcttattgcagtaggactttttagttgagaaatataaccttcatcacatctataacaaactcacatgtctaaaccaacaattaaggaggcatttagtcgggaaaaatgaaaatatgggaataggaat

SEQ ID NO: 303187 - DNA, 1978 bp, Cannabis indica
ttcatgattcaaggaggggactttgacaaagggaatgtgagtgatctctaaattttgttggctcatatttcatcttatactttctccactgcagtattgaatgacttcttgtgagaatcttcaatggatgcatcatgcatgtgtgtatataattagctgattgcgtatgaacacatgtatatgtctatatgaatgataatgtatgtatgtgtacttttcgaatcatgcacccttaattccaaatgttgtgtattgaggtgtattaatttttgaagctggcctatttcagggaactggaggtaaaagtatttatggccgcacttttaaagatgagaactttaagtgtaagtttcatcccgcctcttaattgttcatgcctgtgttgcagcatgttgataatgatttcctgaataattacctgtctgtcatattatcttgctaaaataggaagggatatagaatgattagtgtcaatccagctgctatcaattgttgattttgctaaatttaccatcagttcattttcgtatgtattatgtatcacacattactctgctgccgataaaattagggttttggaaatgatagagaatgattagtggcgtattgtgtttgctattgccacacagtaacagggccagtcatgaagttgagagggcaatagcccttgattttaaaaaaaaatagtcaggctaatctttttttttaatatagtctatttgaaaaaagaaaatggatggaagtctggtctccaaaaacttcaaaaatgctattagtgctcccacaaatatttactgagatatccattgatttggatatgtatggctgacataaaacccttccattttttttcctttttgcagtgactcatgttggtccaggagttgttagcatggcaaatgcaggccccaataccaatggaagtcagttcttcatatgcacagtgaaggtattataaaatttaacaagaaataagatactaacaagtggacaactctgtacaatatgacaccctacgttaaatcgcaaaattttcatagaagaaagacattaacattcacaggaactagattgttttttgcttaatgttcaattgtttatatgtggcggatggcagacaccatggctggatcagaggcatgtggtatttgggcaagttgtggaaggaatggacatagttagactaattgagtcacaagagaccgaccgcggagatcgtcctagaaagaaggtcactgtgagtgactgtggtgagcttccaatcgcttgattttcatcgtcccatcagttctagtcaaatgtctgctccccttgggagcttagaactagttttaatatatacccttttggggggtctttttgtttgagttatgctattgagaagaagcctaaatttttcactttgatcgggtattgctttcattgtcatcattggactctacactatagtctatataccttattgcttttgatttttaatgggtcatagtgtttgaaagtcacatgaaccaggccttcaggctccagctatacttattgggccaacttttgcttcagttaaactcatttgggctctctagtttgcctatccaatggataactatacttcgatacttctattagggcacaattgggaaatttacacaaactgtccatttttctccttaagcaacatttatacggtgctttttatttagtttattttattttattagggaaattttagaacattactattgggaatcgtgaaacttagtaccatctaaacatgttgccttacgagattagcgatacctcttaaaagttattataccaaattatatgagattcgatatataattaaactaaaagaaatgctaaaaggcatcagtggtatctagcatccttttatgtgtcattatcgttattggtccaattaagtattaggtccgatatagtttaatgtaataatttttagggagtatcgctagccaatcgc

SEQ ID NO: 303188 - DNA, 2594 bp, Cannabis indica
aatcacgtaatacgcctatgttagttagggtgttacaatactttactattcctacaactgtaaaatagacacactaacaaagcaagcacaatacatacaaatgcttgccgtagttattaggggcattggttctgttgtttttgtttttgtttcttttacatttacatttatgttaacaaagcaagcacaatacatacaaatgcttgccgtagttgttaggtgtttaatatgtttaaatatatttttgtatatgatttagtttactttttattattttcttattatttttgtcatctttgatggttattggtggtatccattctttaatttgaaatttgattgtaatttcatacttgtttctgtctattgataatgtttcatagatttcccgtgcaagaatattatacgaacattttgttgggattagtatacctgccacttcataatcgttgtatgttgttctgtctacccatgttgcattgtagaaaataatgattgtcatgggatccattgtttcctgtgtgttatcatatacatattagtttattacattttttttattaaacttttaagtatttgtgaaaaataatatagatattatttgcacactaatcaattttattttttttcgaaaaaattttgatgaattgcattagaataaataggaagaaatcgcactgtgtatatgaaaatatatgatcatgttatttacaatgatcttttttatccatgtaatattacaacaatgttttagattactttttggtttgatgattatttttggctacacggagaacagagcactgttgagaaatttttctgcagctaacgaattttctctattattttctattttggccagcaacaactctgcaatctttatattattgaggatcgttttcttttgttgagaaacaacattgcttctgatttttgattgaaattctgaagatcgttactgaagcttttttctttgtcaatggtttttttgttctttttgagaatctattcagatttgtttctgtttttcacttacagtaacatagaatcaaaattgtatacagattcggaatcggtttttgctttcgatttgttgatttttggagttcaagttgtattcaaaggttttttatcgttaatggtgtgttttttttttttttgtaaaaattgattcaaattgattcgcaaactcagcaaatcgtgaatttatatgttttgtatgtgcgtttgtgtttcacgcattgttttaagaaatctattccataatttgtggattaattggcgcgtatgtttgtttctggtttttttttttttacgtttatcaagtttttttcatttcaggtatatttttgttaattgaatatattattagtataatattaaaaatttccctgaaaaatatggtttgtgataaaagaaagaaccaactatcaataaaaatctactgcttaatttctagctactataccctattactgtaatacatattctcacccattatcaaatcaaacaataacgcatcatcacgattaatctaaatcctcgccctatattataaaatatatttcttatctcttggaaattagattataatataataatatgcacaaattcttgttgttgattaagtttattacctatatatatagatagaatttaaaaacttgaatgcaaaaatacatattgataaagagaaatattatatatagtcccaaaagcaagttcaatggttcttatgtttgtactgatgcaaataaatgcattatgcaacattccataataacttaagattattattattattattatatagtctgaaaggtaggtttagtggtacattttgtacaatatatatactactaagaagaagtaggacacttcgatccattaaccatattattatataactaattatgtttagttaattaatcattatatattataattaatgatgtactgagaccgtaggcatgacatggcatcgacccatttccttcgaataagggtctttgatataaatatttttaatgtagggcttcatgttcttatatatatgtatagttagtggacgtccgattcaatcacttagcctaaaactttaatgatctactttgaactgtttaatgaggaactttggcccttcgtgcacttctttgtatgatctttcaactttcttcttactttctcttctttatgaacacaatatttaacttttcattgcattatgaactccaaatgtcgggcgtaaaggtccactataaatataaaaaatgaatatttttctgcttaaaatatatatttgtgtgtacttattatagatatatcggttattgggctgcttatgtagccaagtttgttacgaaaaaaggagaggagaaaaatgaaggaaaataagtgcacacaattgaacgtgatcacatgacttttaaagtgtgtaaatgaaacattgactaaagttgaaaacaaaatattcttccaaataaatatgtttagtccatacagtactaaatatatctttatatattaaaagtgcctatctaacggcatttcttggtttaacagaatatacttaaaaataaaagaatattctgtta

SEQ ID NO: 303189 - DNA, 869 bp, Cannabis indica
caatgaattactctgtcttaacaaaattgaatcaaaccccatctcagaatgaatcgaaggtctccaacccagacgagatatcaaagacgaagaagaagaagaaagagttcaaacccattatctgtgatgtaaatcctccaaagaaaaaattggtgaagacaatggcgtttgaatatatagcctacaagctcatttcttccatccatggcgaaaaaaacccagaacctgaaaaattcaagatcaattagccgacaagttcactaatttctttcatggcgaacaaaacccagaagcagaatcattagtagcttaaaaattcagatcaattttcaacaactacataggtatgattaggaagtttccaaataaacccaacattcccctgttatagagttgtgctctgttctagtgtcatctctttctttatatatttcaatacaatacccataaattaatttagagtgtgatgatgtcttaagttctcgttcatgggtttccaattcatggtattattattattatttgatgtggtttaacttgatgaatagtagctctggttaatcccctcttcttccactcatgagtatatttcaattagtccacatgtaaaaaaaataaacaacagtgaagtgaattggtattggaccattaagcttaaaataagtatttaaaaaaaatcttttttaaagttgtttagaagtgataagattggttgattgattggtttggtgatgttcaaagatggaaaagattgtgacatttctctttcctttgttcattttggtaaagataaataaacccatcatatgttattttctcaatcactaaccaaataggattctttattagaatatttctaattaaggaaa

SEQ ID NO: 303190 - DNA, 3933 bp, Cannabis indica
taggaaagataaaggaaaatacaagtttaagaataattataattaagaaatcaatctccacccttatctctttgctctttctctcagctaccttagaaccaaaggaagcactgacctttttccacctgtcaaaccaattcaagcttagtttcagctaggaattcaagtgttaattgaagaagaaatcccaaggtaagccctagctcctctattttcttgaattttaagttaatgtttggttttggtgggtaatttttatcaattagctctgttagggttagagaggtttggttttgtttttgtggtgctatttatgactgtttgtgatggttttgggaggcttatggttgttgttgtgttgtttagctaaatttgagtttatgaactcaaacttagatcaacaatggtagatttgtatttagaggcttactgatgtgtttagtgctaaagttatgttcatattggtgttattaggtattctggaaggtttggtgaagtttgagttggatttgagttagaaaacttgagtttttggtttctgtagtgaaacggtccactatttctgtagaaaaggtgaactgttttcccaagcagaatcccaggaaatggtaaaccatttggggatccagttaatcgattggggtgtttttcgggtgcctaggtttttgtgtttcctcgatattttagggtattaccatgctgtttatcaatagggaaacttctagttctaagttcaagtctttaaaagtgtgtagagtaacacttattgatttttgcgtaaatttaacatgtggcctctgttcaacaagcaatatttccactcaggttgactagtacacctgaattcaaagcgaggtaagattagtataaagatatacatatgtgcatgtggtatacatgttagattatatgaattattactaccaacactagtatggtggaggtactgagtctatgtgatatagtacaagggggtacgacatagtgttaccaacactagtacatgtgaggtattgagtgtatgtggtataacaactaattgtacttataagtatgaactaaccctaccgactctagcatgctagaggtgttgagtggatatggtatagaggttagtagtaattcagggggtacaaacttgttatcctagtttctacacatggtgacgtggcatccatctaagtgacatgcgtagaagatttcataacctgggcggatagcacacgctccatgatagactgtctagagtgatttgttacttataaaaaaccaactcgaagaggaagctgggaatatttggacatagtatgctgtatcatcagactagcagtcagtttgcatacaccgattagagtacatgaaaatggatcattattagagatacgccctataaatcttcaagtattcaagtcacaattatatccttgattttgggggatatatttacaccgacgggagagaaaaggaaaactacttaatttcccattttatttccctttatttaggaaagtaattaagcttttttatttattcttatttgttttgggaaaccaaactaatgtaattatttcttataaatagtggagccatttcactaaatcattcagtccatagagcacttaagctgataaaaccattgtaagagcttcgaagaagatcaagaatttcttgatctcttctcacaagccaatacaacaaaaagagaaataggctattaccaccatcaacggtcaaacctctataacaaactagtactcttattgcttaattatcattgtttattatttataaatcactttaattgactcattgtcattgtctaaaagtgaagtcaacattttagtgctttcatcgagagcaaaagaacacaattatggttttgaatcttttcaggacatgcaaagatggctgtgtctacaaggaggggtaattaaaacgatacaactcatccaatggtcaaaaatcctaatgtgcaaactcctagaaattgaagagatccagtcaagatggatcccgaccctactattcctcggcctctgacaggtcctcaatcaacaggattaggagtgacaacctctctgctcgggttcactctaggcatgcaaaaaactataaccactagtacttaggtcgagcaaactacccctagtactaaaaatctatcagttggaaatcctcaaaggacaattgtgatgacatcaaactgtagaatctacaagctgctctaaagtagatgaaagagcaacgaacactcttcaccgtgatcagaaagatacccgagcagcaataaattttactttcgaggggcaaagatgccaaatccaaaagtggatggatcaacaaatggagatcatgagagctcagcaagagggtatcattctaggcaggataccgtgttgattgggcgggcctataaaataattagtcaacaattagtggcggacactctgattatataagatcggagctgaaggaaaaatatctacatcctcactgaacctcagtacatgccagaagaacatccagctagaaacactcaacaaacccaaggaaataagccatccaatccaaggtcacaaagtcaaactgtgggccacagggtaaacgagcaagttttgccaactcgttacttgggagggaatgattaggataacaccaaccaactacttagtcctaacctcaaggaaattatgactgtatttgtaagcttattcaatctgaatatacaccttccagcccttatgccaatttttatgaaatctggatgcctctggccggctgcttaaattggaaattgaaatgggacaatacaaaattacctatcaggcccatacagcaataaaaggtcaggccttagcagattttgtggctgaatgcatggacaaggagatagaaaattcaaaaaataatactgagctagaaaggaacaaggaaaagaattcccaccacaaaaggatattgaaggcaaactagtgttggagatatttcccttttaacgaagctttatcttgtaagaaaaatcagtgatggagatattttccttttgaagggtggagagctgcaactttatttgtaggacacatgctttagattgactggagtaggtttgttgcagagtgatccaaaccgcgtgagaggactcatgctgagctagtgagctaagaataacttcaatcatggtaaatcaaaccaactgaagaggagctggtccttcggctgccagatagtgaactcagggtttggagctttggtgacaagaagtgatgttggaggaatacctgtaagaagaatgtcatccaaaccatggccaatgaaaatcaaaaggatccgtgatttccatgtaagcaattttagtcgatcgagtttgaccataagagaagaatatagagtgttttggaagggagttccaagcaaaaatggtagaagtaggggcataaggagtggtggtggggggcgagatcattggtggggtggtggcagtggtgttggaatcgattttttttagggatccatgaagagaatcatcaatgtcaatctaataccatgaatgaacttacctatgctaaaccatctatgagaacaaaatagagagaaagttctcaaggttttgcaaaagttaattactctattatagagttgcattatttatattaagaagcaatacaagaatagttaagaaaagaataggaaacactaaaaaggatagcactaatagatacatgctatttgctttggtacaaattgcaacagaaaattaactgaaataaaaggctacctatttacaccaaaagtagccctgatgacgtggtcatcaatatttgacacgtggcaagacaaataacattctagagttcagtagtcccgaatcatagcaagtcaacttgggaggggtccctagccctgcacccaagttgacttcgagaactccaaaat

SEQ ID NO: 303191 - DNA, 5672 bp, Cannabis indica
agacactaataagatttttggttatagtggaaactttaaggacattgtttaaatgtaaagatgaattagaagaagagagtgaatagttaccaatatgactgatagcgagtcttttttccatttccaacagcaagagtatcagaacctgaatatggaatttcagattcaagatgttccatgcgttgtgctatatgattggttgcacctgtgtcagtataccagtcataatcttccacaaactctggtagtgttgaactggagtaaacctattgatcatcttggtcatcaatttcagcaagaaatgccttagagtcattaatcttgggtgtgacaaaggctttatcgaacctgtaatgatagacaacagtcgtgtgtctagatttgttacaaacttgatagagtaattatggaattgatggattgcctctaccataaggacgaccctgagcacgatttttggaaggatagccacgaccttgatttgcatatgtgcgatagccatttcctatgttggatcttgtattatggatactaagatttgttgagatattggaattagagtctccaacagagtaatgtctttcaagcctactttcatgggttagtaataaagattgtccacctctccctttaaagaattttgtctctcgagatctaatggctctcgattctgacgctttgagggataagaagaattaatgttgaggtgatggcatattacattcgggtaaaccctgaccatatctgaatagctctaagtgaactaatcttggtttgcctataaaaatgtgattaattgctattttagtccttccccaaaccttttctaatgttgacacacttggttggatcgtttggttctaaattcatctattctaagtcttcaatttgcttgagttggttattctcatcatggatcctaggatccaagtcctccatctcgttttcgtcactttcttccatcaaaattaccatcgaatcatggtttatgcttcggttcttcaactcgacgttatagcattgtctagcctatagctagagacctttcaccatccctactgtagaacgagttggtaactttaaggaaaaatgtttgattgagcttatttcccccattcctattaatccagggcgacccatgagtatgttatataccgaagggatgtcaacaacgaccaactcttgcatctggcttatcgatagtggtgaccctcccatagtgagtgggagctcaattatgcctaaatttgcaacactatcgcccgttaatctacacaggttaaccatgcatggtttcaatcttgctcttgtagacccatcttctttaatgtttctttgtagagaatattaacagaactctcgttattaacgaggactctttttactctcttatttgggagccaaactgtgatcactaggggatccgtatatggaaactgaacatgtgaatcatcttgattagtaaagataatgggcacttcttcaagcttggctcactttaagggccttggagcaaaggaaaattcttgattcttcactttatttatatctttttttgagcattatctcttttttcctttgaggtgtggccctctagaaataaccaaaatgtcctcaccctcaactagaggaggttgtattccttggttgttgttttggttattgggtatattctattgattttctcgatttcttacatactatctcagatatccacgagaaacgagcccttcaatttcatcttttaattacgtcattccttagtggtatgtctgatatctcgatggaaacgataatacttgttgggatctctcttattccaagcatatctcattggtttcagtcttcaaaacatgatcagttttcatttacgagatagatgttttcacgagttttgtttaattctgtatacaccaagtatatcgaaatatatttctcgtgcttattattctttttcttgtccttcgacgaatctctcgacttgtctttcctttttctattcgacccattgtggtttgaatttcttattttagttgttacagtactcacttttgcagtaacttgtgctggcattgtcttccgatcaagatttaagcaatttcatctcactttgtgcctcttccttacgcgtgaagatttgtgttctttcattaaattcattgatgcttctaacggggcgaccttgcaaatcatcccatagttctcctcctgcagttgataagtcagttgttattctaacctgaagagatgtcaactaaatgttattatttagatttcttactttttttttctactgtactaaagcgactcaagtaagtttttaaggattcccctagctgttgtttgatattagttagtgaggatgcctctggcctcctatccctcatagcttaaaattgtttcttgaaatccttggatagttattcccaggaggtcatggaatagttggtgaatttatcaaacaaactgctcactgctcctattagagaagttggaaacaaaatgcaatgcaagttctttgaaacatttcttgcttgcattatcgtgttaaaattgtttaagtgtgccactagattagttgtcttgtcatactgtgcgacgtgcaggttcttgaatccatgagggatttgggaattcaatatatcatgatagaaaaactctgtttctttgtctaaatcatatcataataactttccatacttcctgtcatggtatagcttgaacttgtcctctaattgtattaccattaactgattcaaatccatgggttattgctcgacttgttattggcaacctgcattctggtttaattgatcacaaagatctagaacattttgattcaagtgttcacataggtcatgttgtctacggttcagatgctcagatagatcagggttacactgcctctcgtttctctagtcataattgcttactgaccttgttaccgaataacactcagattgataactttgagagttactgatgctctcttgatcttctaaataatagcagtgtgaacccttcccatctcgtgcttacctctcacgtgcatgggttctagttgatctgctctgcccatgggtccttgatattgacccactaggatctataatcgagcacatttcttaaggttcttctcacacttgcctctctcttcatacaattttttttatacgcatcccctacttaaataggtgtatgtgctatctctgttgttgtggtttggccattgcaggtatctcagtggtcgacctgatcaaggtcgattacctacccctctcacatcgtgttaagatcatccttgattctcaggttgtgttttccatgtattcgcattcatgcaagatgattctggattctcaggttgtacattcccacaattttcatatccatgggaagttcctggatcattgggtcgagtttcataattttacgtgcttctttgatttcgggggatctcttcatccactggatgtccctcgtgttctcaagttgatccccctgagtgtttgaaggaattctagggttattcccctacgggtatccccatgtctcctggtcttagagcctctaggtcttgcccaatgtcgtctagtagacgtgtcaggttggtttagaggggcatcatcttgcacagccattgcagccgctgccttgcgctctaattctgcatttcttcaatttgatttagccagtcactgtcaaagttgcctattttctagttccactaatggaacatatcttgtgggattgtaggcatccccgattcatctctctgggatttcatcctcagtttgttcaaattttcccccatttctttgagaatggggagtttcagtggtatttgtcctgtgagaagtctggtactctttcccaagatgatgagttgtttctcctggcttattctcttcatttgaaggggtatcatttgtcatgaatggacgatttgaatttgttttgaaggagggtgttcttctaaatttttattagaaggctcttaataaaaataccaaactgttattacaaatttttgctaactattaaataagcttttttttttttaataaatgaactcaagcaataattgataatatagtaataataaatgacaagaggatttttatatggttttgaagataagtattcatagtccacgagtacatcttatttaggaattgatgaattgtatacagaatacaattaattgtttacaaaatgtatggtaagcataattatttctttctccaattggccgaaccttgtttcttgggttttgtccctacttataggagtctaggatgacagttattcccttgggattttatcacttgtaaccgttcatcaaatgttgacaatctccgcatttcatatttgcacacatgagataattacaaataacttcccataactacacctttaattttatctacatgcagttattctgactatgtttcatcctccttgtggtataacaagtcttttagacgctttatattaaaccattatctaagtatgtgctgtagtattcatcgtgttcctttattaatgttgagttagacagacacaagatatttgtcacaacatgacaattgcgaggtgaatctattgaaggtattgtatttagtcttttaacatactcacgtgtatgtgggtcaatgagctgcaagttctttagataattcattatacacccttttcaaaaaaatttgttatgtattttgtgaattctgagatggactttctttgttcatctcactggtctcatcaatttgccttgccattatctttaagagggtgagttcgaatatttttaccaactttatttcctgaggcgagttatgtgaaagcattgattattgcataattctggctggttcatattccagttgtattacatgtgtcaatgccatattgctgctcgaaatatagatataacacatcgtttaaactttttaaaatattttacatcattacataacctacatcttcaaagagcatcccttttagcattttgaaagaaacattggcttcttctctgactcaaaagcagttaccagcagatcaacaccaaaagaatcaatattataggagagaaagatttagagtcataaaaaattaggatcaatttaccttgagaaagccacatggatgtttgaagcggtcatttcttgtgatgctggcgtcattttctcgttgctaaggctagaccaatgaaaactcttcaaaagttcaaaataggttagcacaattggaaaagacatttgagagcaaagacactataaaaaaactctcatttgcaagaataaaaccctaaaaaagaattattttgagacatgacctattgtggctgaaatctcatatgtggtcataaaaatcttattgttacaaatattgaaattgcgataaaataatagttgtacatatatagatatttatgttagattaaaatcctattgtgggcatatatgtataatgtatatgctattataaagtgtgatacaaaattaagtgaccaattatgttatgggtatcaaaagggtattaaattgtcatggaaataatgtgtagataccataagttaatttataatttgttgaggggccaaattataaatacccaaaactcattctaagatgagtctataaataggtagtggtccccagaaacactag

SEQ ID NO: 303192 - DNA, 2236 bp, Cannabis indica
taaaatggaatatccattccaccaaaatggtggaaagagcattccattagaatgtcattccaatactttaaaatgagcaactaaagaaaggaatggaataaaaattatttcatttccattccattccatttcattacctccaaccaaacgcgacctaaatattattaataattaagtatatatatatatatatataaaaaagactaaatatgtatatattaatacttacgtatatctacttgggacatttttaatcatgagagttgtaaatgaagatgaagaagcaggttgtgtagatgtagatccaataataataatattattatgaagcattgttttgggtctccatacttttccactattttttcttggtccaacagcaacaacaactgcatcatcattgttgtttcttggccttggccttggccttgatcgcctacggtggtgatcatgatcggacggtggtggagaagggttggtattaatactctcccttggtacgaaggaagctgcattgggatttagtttggatactttcatattctgaattcttttgtagtttttatgtaaaagagtaagaagaagaagaagagtttgaggagagaatataaatgaagtgagtgggaatacgaagaagggtttaattgcaatttgcatgccttctctccttaatttatccaaaacaaaactcatcaagtagtactattcccatccttcacttcacttcacttcatgtttttttttttttgtctagtttattaattgtgatatccattgagatggacccacttatatttcttcattctctaattaatagcattgggtaatgggtcctcctctttctcctcttgtctaaatcatgtaatgattatattatatatatagacatagaatacctttttccaagaaaagaaactcttcttcccttttcacatatatgaaaactaaccttatttgggaatagggattgggaatagttttactttttgctagttaatctccatggttttgggccatttctctctctctctcatatatgaaatggtcccacatcacctctactagctacatagttaaaaaaaaaaaaatatagcttcaataatagtgtaaaagatatgtcaagtttgacacataaagttggactaattaaattaaacacaaaatataacatgacttattaattaataattttattaattaaaataaactttttaacattatatatatttattcatttaaataatgaatttaatgattatattaatttttagggttcatttttgtgtttaatacctgtatgacatgacattttataattgattactgtttctttaaaattattattaaattaaaatatataagtgagatttaatattaaattatactaataacatattatatctcgaaagaatactaaacactataaatgctctttaacattataacttgtatataggaacacaattataaaatttgaatcaaatataaccttgagcgaaatttactataaaatttacaccatgaaaatggtattcatcaatgtgtcattaatttttatctgataagcaatctctaatgagacatggtttttttttttttgaaaataatgagacatggttatttcaaatttcttttaacaaaaatcatcactttgaaaaattgactcttcaaagaattaggtatagaagagcaaaataataataataataaatctgtaaatgcttctttaatttaaacacatatttttatagtatttttttataaatatattttataataattaataattaatttaaattaatgtatatacattcttatcagttttctctcaatgctaaaaacataaaaattaaaaattattatctttttccttcatcaataaactccgaaaataaataaataaaaaataaagttgagtatattcttttattgtatttttttgaaatatgttgtttaatactttaatgtttatttaatttatatttgttttttaacattaatttaaactataattatgttaattttaaaagacgtatactatacatttattttttctaaattaattatttgaacaccaaaaattaacaataataaaaaaaataaagatcgatttaaacaggttaatccgactaaattaaaaaaattattagatgggttatacttttttttattttttattggatgaattacaattaaaaatttacaattccatatttatattggattgataaaaata

SEQ ID NO: 303193 - DNA, 1025 bp, Cannabis indica
tcattccttttactcgtacgtacctctacaaataaaaaaaaaaatatatatatatattatgcataaccaacagtcttttgtgtattagattttttgttgttttttttcttctttaatatatactaaatgaaaaaacccatagtttatgtgtgatgggtcacataaaatctgctccttaaaaaagatgtgaaatttattaatttaatgcatacaaatttgcgtgtggacttgtttgtcctgagtacaagtaacaacaaagattctcctcttaattaagggttttgacaaattaattaattacttaaaagcttcaactaaactttcaatttttaatccattaatattgaacaagattaataaattgtcccatcatttacttatgttcagccaatttagccaaaatgctacccaaaaaaatagaacatgatatgcgtttggatttatacagggccaaaaattggctgcaaatgacaagtagtcaaaatatgtagtttaaatgattattcttgtcttgtatcacagtattgaatcttttggcaggtttttcgttttctgtggaactggacggtggacttgaataatatgtaatcttattttaggtttaatttattaattataattataagaatatttttttaaaaaagcataattatatggatatattagtattactgtttgtgattcaaaacttttagctaaaaagtgtcaattacatctaaaatctaaaataaaagtatttgtaaaattatttatttctaaataagaaagaaaaactgatcgtataactcatgtatcataaattgacaactcataaagtattaaatagtggatatgtaactattgggattttattagatcgataaatgaacataactcgaaatttgcaatctttactatcacgaaagttgagattttgatgcagctatgtcttattttagattaaatttgacttgaaatatactacaaagatatatttagcctattatttcacaaaaacataaaaataacaaaaaaaaattattaaa

SEQ ID NO: 303194 - DNA, 2693 bp, Cannabis indica
tggtatacctataaaaaagaaatacctaaatgtgagtattaaaataggtaagggtaaattcttaaataatttaataataatagttattggtgcaaatatttcttatttttactagtgctataaaaatgtggtgtgccataaatatgggctaaaccaaaccgcgctataaaagcatataaattatatggtatggtgcaatcaaaaatatagattgtattgtgttgtatttagatttatgacgtgtttaaatttgtgtcatggtttactcgagttctattttcttatacagattcaaattcatactctacttgtttacattttatttttacaactgataagattattaataaagctatgtatttttttagaacttttttatataattttttacataaaattatagaaaaaaaattagaaccattaaaaaaaaaaattgaatataaatatttaaattattattactgttatcaaatataaaatttttaacatgttacgcttttagaatagattattggtatttatgtgtcatacttttcggacttgtcatattatatcgtgctaagcttatattttacgtgttgtgttatgctgaagcctatattatccgtattgtgttgtacaaatttataataccgtcttgtgtcgtgtcaaatactatattttttcgtacatgttcttgctcgtgtgatatcaaaaaacctgactcatatttacaacactttttcttatttatattttagttaaaatagttaaaaagcatgttttaaaaaaatatcaaaaattattataaaaaaatattaaaaatgttattttataccaaagttatatttgattaaatttataattgaatttcaatatatgtttagtacaaatttaatatttactttttatgaaagtatatgtaaaaagattattaaattattatattaaaaagttaaagattgtataacaataacatataatattttttttcgtggaaagattgtaaaatatattaattagtgagcaagagtaaattaagaaaaagcattttttattgtggcacaaatttacaacattaccattggagtattatattataaaaatatgctttaaaaaaatagtaatacactactaagtattaagagcatcaccaaagacaagacaaatcttttatttggtgatgaattcttatctaagaaatttggagtgggaactataatccacattatatatgccgtgtgcactgtagcacggattgaatttaaatttaagacttcatttttgtcaatactagcagactataacaaaacaacataaaattgtttaattcttattttttttcttaaaaaaaaaaaaagaaaatattttttaaactcttcgttcatccaagttcatcagtgttactgatcactttcgttcctttatttcttcttttaattactctgtcacatagtgatgtcatcctgcatacataaaagcaattagggggacttttctttctcttttattattgtccttgtcttctaaatcataatttagagtgttcattcattattacatttacatccacaacaattagttttattttgtctttaatttcttcttcttcttcttcttatgtaaaattcaccacaaatatgtatatatgtatcaactcaaccccacacattccctaaagcaaagtgtaatcagtcaatgtttccaccttgttcatgtgcttctaaacacttttattcttttgtcttttccatctggatggtgaaagttaagattattaatagggacagatgttggacttgtggaagtataatattaattaaatacaaagaaaaagagtgttgttgggtgccataggtttattttatacttattagtactcctctttattaattaattattcaaaaccaataaagtggtatatattacatttatttatataatgatactactaggatactcacacacacgcatcacttgagtagtacgtagtgattattatgtcaatttttctaaaagatagcaacattttcaacaagtgtaaccatgtattaataatggcgtgaagaaaatattatccccacctcgtttaaattattcaatatatatgtatatagttattcaatttttgttactgaatattatcttttgcttattaatgcaattcatgaccctctttgagactttaataagaaaacatgtatatttcatatatgaatgtgtttgaattcaatttgagaattgttttttagcaaggaaatgcccattcaatgtgatttggtgatagattcatactcactacaatttatattcttatatacataaatcattatatttttctttccgtcatttagatatattatatttttatatatatatatagggcaagactatggtaggacctaactttttttaaccattgattttaaatcgtgtggttattaagatataaggtgtatactcttacaataggactgcttgtatacaattaaaactttatacatattataataatatttaattatatatttattttaaaaataaaataatattaataattaaaaaaattattaattttaatttgaattattattttttttaagttaactctcatgtaaatcttgacagtttccgcaccaatattattgttattctaatttttcttctcactcgatatattaaactagtgtgtttttctttttttttcttttatt

SEQ ID NO: 303195 - DNA, 1134 bp, Cannabis indica
aaaacgcatttatagctcaagacatacatcaaaagatatgatttggcatagtactggacggtcaacggaagaaggtactatgcaccacccagtcgatgggagagcatggaaagatttcgatgcaagatatcctaattttgccaaagagcctagaaatgttcgcttaggtttggctgctgatggttttaacccatttggcaacatgagtctgtcttatagcatgtggccagtcataatgacaacgtataatatgcctctgtggttatgtatgaaagaatcttctttcatgttggcgttgttaattcctggccctaaatcacctgggaaagacatggacatcttcttgaggcctttaatcgatgaattaaagatgttatgggttgaaggagttcaaactcgagatgctacaacaggtaatatattcacaatgcgtgcagcactattatggaccatcaatgatttttctgctcgtagtagtttatccggttggagtggtcaaggatataaggcttgccccacttgtaatgaagatactccttcgtgtcgtgtaattgggaagacagcatatgttggtcatagaagattcttatcttctaaccatcgttggaggaagagtaatttgtttgatggtaaacatgaaaaaaaaaccctcctcctagacgatttagtgttgcaactatacaaaggcaactatcccatttatcgattaagttgccaggaaaacatacaagctttggaggtgttaaaagaaagcgtgatccgagagagctgaactggactaaaagaagtattttctttgagcttgagtattggtcttcacttgaactaaagcataatttggatgtcatgcacgtggagaaaaatgtctgtgatagtttgcttggtactcttttgatgaatgataaatcaaaagacactgtcaatgcaagagtagacttgaaagaatggggaattcggaaagaattgtggcttagagagaaagataacaagattaccaaacctcatccaaggtactctttcacatcagatgatagaatacggttttgtcagttcataaaaggagtcaaactaccagatggatttggttcaaactttaagaaaaaagtgactcctaatgatgcaaacattattggg

SEQ ID NO: 303196 - DNA, 1391 bp, Cannabis indica
tggtttgataattttaaaattaatatttatagttaaatttgtttagtaatcattcatgggtaatacccattaaaaagtgttcctatttattatatatatgcagtgttaaaagagtattatgataacatttactcaacatttttcacatgtaaagcaactaagcaaaagaaacattttatagtaatcaagatctaagagcactcacatattcctattagtgtatgcataatagctaaacttgtactgcaaaaaaagttaccttcaattacaatatttttagtcacaataaaaatttttgtaattaaaatggcattcgaatggaaagaataaaaatataagaatgtgaatgggaatgggaataggaatagaatgaaataaaattttaaatgcataaaaaaattattaaattttttcttatcatgcattagaatagtctttccttttatttcaaaatgaaatagttattctaccaaaatggtggaaatgccatttcattacaatgttattccaataccttaatatataaccaaataaaataatagaatgaagattgtttcttttctatccaattccatttcattaactccaaacaaatgccacctaaatgtaacttttagtcacaacataaagttacttgtgattcaacatagtatttaaatacaaattgttactagtttatttttagtcacaacaaacattgtgattaaaaatacaattagtcacaaaaaattgtgattttagtgaatattatatttagccacggaccttttagtcagaccaattaagaataataatttataattagtcataacttatttaattttaatcacaagttttattgcgactaatagtaagattttttgtattgccaaattatttagctaaagacttatataaactcttctatgagatgctttataatttagttataataaatttccacaaactctaataaaatatattttacatgtagctatggacactcaggagtgagcaaaatagtttttattaatttcataactactttatttgttttactattttttttaattatatattatggaatacttcttaataggtattacccattaatgggtaataaataaatttaactataaatattaattttaaaaatattaaactattagatttttgtccgatagcgataataaaagagaaatttgaatttctatgcttaatttagctatttaattaaagaaaatattaaaaaatacatttttttacactatatcaaaaatatgtttatattaaaaaatatttaagtcaaattaaacttttttttatcactttttcacacaaaacttttttttattattgttttttttcaacttgatggaccaatttcagcccatataatgtaaaaaatgaga

SEQ ID NO: 303197 - DNA, 2447 bp, Cannabis indica
ttaaaaagttcaaatagcctagttaaaaataactttattctgtattaacatatatttttagtaaaaaaatttcaatctatttataatttttctcaacattcccttgccacttaggttaaaaaaattaaaaaatagcattaatatttcttatcgtttttataagaaaattgttaaaagatattactggtacttagtatcatcttcagtgttacatcgctatgatcagtatacaattaagtatcgggttccatataacttaagaaaataacttttaacaataatcaatcgtgtaggcaccacctatagaagttgttgtgcaccactaatatccaatatcaatatttttttttataatataatgtgcatgcatacgaacacatataggagactatagggcattttttttttttttccttttattaaaggacttattttaacatagttggatttcagtataactttctatgatataataattaaccagtgaagttctctatgaaagtgggccaaatacaaataagggtaatctatatgaaagtgaaagcttgattatactaactataattagtaatttaaagttgttaagatctctgattgtttatctttgtttagcacaagcaaactaaagtacacctaactagcatgatagtagcagcccctctctaacctgtcccacttttattagagcttaattttattagctagaattcacaaagacacaatctctcatataactaaataatgtgatattacaccctttcatttaatttattcatagtatcaataattttgcaataattaaactttatttctctcccaacatatgtaatatataaaccccctatctctcatatcttaattaaataaacattcaagaaaaactcatataattatttcataataaaacttctttctagagaagaagtgagctacaccactcaaatacctacaaataaataattaaaaaaaaataaccatggcgaaaaatcaaattttgttcacctattcttgcgcaatagttttcctcttcctcttccatgattgcgaaaatactttaacattagctcaatcgtcatcacctgcccaatcaccatcgacaacacctaataagaatcatcatccttcatctgattcctcagcgcaatctccggatcagccattagtggaagccccaccaacagcgaaatccaggagaaaaggacaacccaccaacataacagaaatcctagagaaagccggcggtttcagcatcttcattcgcctactaacaagcactgacgtcatcagtcccgtcgaaaatgatctcaactcttccaataccgtcaccattttggctccaaccaatgcaggattctcagctcttaagactggaacactcaacactctcactccccaacaaaaaacacaattggttcagttccacatcatcccaactttcatatccctccagaatttccaaaccctaacaaaccctgttcacactcaagccactaacactcgcgactacccattaaacattactagtactgacggatcttctgtcaacatatctactggagttgtcaacacaaccatatctggaaccatttattccgataaccaacttgctatttatcgagttgatagtgtcttgcttcctatcaaactttttgctcctaaaaaggtggtgagctcactggcaccatctccagcacccgcaatggccttaaaacctaaaaagaaatcgacggaatcagctccatcgtctggatcgccctcatcctcctcaaaaccatctttaacatctacatcacccacatcatcatcatcatcatccaatgatgatgaatcagtcgccacatcaacagatacatctggtgctaaacgaccagttgttgttgttgccacagtctccgttggtcttcttgctttgttcttatgatacatatcatcttccgatcgatcgagacagttatacgctccaaccatattaattaactaaaaatattgtttttgaataataattaataatatgcatgcatgcatggtctacgtacgtacatgtactaattaatatttaatcgaattttgtgttttccttttcatcattatataaatatatatatatatatatatttatatatatatatatcagtatgggatgagagatacataattgtatccatatatatcacattataatttatatgtgtttatttacacaaacattatttcttcaaaaatcatgtgcaatatatactctacatatgaaaagtattacttaaattattagccaaagttaaaattatcttattatttttttttgagataaaaattatcttatctttatgtgtatttataagttgttaacaaaaaaaaaatcaactaaaaataacagtattttgtagtgttatcaagttccacataatttaatataataactttcagagagtatcgttaaccaatcg

SEQ ID NO: 303198 - DNA, 1971 bp, Cannabis indica
aaatataaagggcaacagagattatagaggttcggttcaatatatgtaataacctatatattctcatttttgttgtatttcagtacttaagatatcaaatggaactttagccattgatttttccaagtattctatcacgattacaataatatttctacagagtactttttctcgaaaaacttaatttaaatctttttttaggtaaaattatatcattacttttcattgcctagcccagcagttaatttcctttacagcttaatcatactcctgactcctccatacagaggcagcgctctctatttatttaggaccatgataggtaatggttcttttacgagacaggattataaatttttgaattgtactcttcaagacagtgtgaatggaatatcatcacacctcctctatttttttaaagtatccaacccactatgattttagcccatatactagttaacaaaaactttcagcccaattgctcaagcttgttagggcaaccatgaattcttcgttctccacacgatacaagcaccaattgatgggtaacggattctaatctccaaagtacatttttcgaggcagtacgaatctcataattaattgaactatattctattttctaaatctcatcatattcaataataactacacaattatatatttagtctttcacattatttataaactactacaatagtgtacacaatcgaccaggcacttgttgtgatattaattgtggatcgacatcaacccctcttctcacttttaccgtccataccaaatcccgttccacgggtcatgtggattagtacaatgttatttgtgcaaattttgggataagattcacctaaatacatactatataggtaagtgcaagatatgctaaaaacgacaaacacttccacaaaacaaacactcattacatcttgttacatttctctctcattttatgttttttttttcttttatttaattaagttagacttctggtcgttattaaaatggttgtcgtttatattagtccattgccgttttactgttcatcctcattttgcatggtaataacgtacgtcgttttttacattagcatggttttaatttgaaggtttacgatgattttttgtttttagtaattgtattgaatatctggaattgttttaaaattatgtggtagaacaatgataaataataggatcttacctaacaataaataaatttataatgtactacaatttaaattaattaaaatccctattgtcaacttcattgaatatatctttcttttcgatttgattgattgattgtcgataataaagttataatattaattggaagaggaaaaaatatatatttcttttaatatttattacatagctagtggaattaataaggaaatatgcaataaattttagttgagcaaaatttaatattgctgtatatatcaccaattaatttacacaagtactactattgttacaaccaaatgaatgtgataacgcaccaaatgatgataattataattattagtgtagtagagttaattaattaatactattttttattaaatcaaaaagtgtatatgataatgatatttattattatttaatattaattacagtactgacatattatgatttaacgactatttattgattataacatcatattataattttttaaaatatatacacttagggccagtttggcacagctgtgctgtggggaaaagcagctgtagctgtgctgtgggaaaaagcagctgtagcagaactgtggaaaaaagctgagctgagtgtttggtaaattataatttttaaagtgctgtgagttgttaagattctattacaataatgataatattttaatctagttcattataattacaaatatatataaaaaaatatgttatataaattttttatttttttatatatttttaattatttttttctatagtataaatttata

SEQ ID NO: 303199 - DNA, 1660 bp, Cannabis indica
taacacacctctactttcagttcttacacaaagagggtctatatccaactcttcatacaaaatttcatgcatcttctgtaaagtagtgtcaacctcaaatatttacatcttactttttggattattgaatatccagttgaaaccttcaactgcccaagccccatcatacagtacaaccacaaacacagttggatctacaaataaaaatgaggaaaaaattaattctgatcaaacatatgtcaagaaatatcgcgaaaagcatcacaatatattgtggaacatttcaacaactatatcgtgacacattgctacttgtcgataaaggtcattttggacttccccaaacacaacgtctaaatatatcgataaatatcgcaaacaacatcgatataaatggaaaaaattgtcaaaagagcacaaaactacaagtatgtcacgacatacatcgctacatatcgttaaacttcattcctaaccttcaacacactatcttatcgttatatgttgttaatatcatcgctaaagatcgctaaacttgcaaaaaaaaccaaaaaatgcaaaaaagttgtagttcgtatttcagtgacaaaaatggtacataaaaataaggatcgtgaagatctatttatatcaacataaatacaactaaattcaacaataattattaaagaaattacatactcattattttttgaaggaattttttttctaaaacttttggtttgaaagttgtccaaccaactccaccgttatgtaaggtggtcgaacggcagtagctccgacgactgatggtccaattggtagagtgtgggtgtggtgtgactttcctagagagagagatggaaagtttgggtgagtgttggttttttattttaagggtaaaattagatgaaaaattcaattgttgcatatttcgcatgatgcaaaataggatagcatagtttaagtcccttaacctactttaagcatgcattgtcaaatttccctatgtaattatactttttacaatatatgtgaacctcaattggtgaacaataacatataattttctatataaggaaaattcattcttaacaaataaaatggaaaataaactaataatatgagaaacttcaatcataaaagttaagaagtctcacagcctagccctactaataaagactataactatcttttcaagtgtgagtgaacattcaaattacaaaataacctcaattgttagatgaaaacctaaattaatcaatagtatttgtgctatttgattgctaacaataagttgggttgaacatgatgatgaaaaatatgagtaattattgtccgaaaaatcgaactagggcacatggatttctcgggcacatacaaggtgtcgtggggccccgcctaacagagaatcattacccaaataatagatgaactactgaagaaataaggatgcgtcccatccgaaaagccctgtatatttcgaaggggcctacttctcaaacattaaagtatagaggtatggctccatgaagggaatgttcaaaggtgttgggttttgtgccttaaataaaactcatttcaatataattaaatttactaattaataaaatatcagaaatcgcttctatgttgcatagttcacttgatttatttcatgattatatttaatgtatgaatt

SEQ ID NO: 303200 - DNA, 3621 bp, Cannabis indica
ttaaaacacaatcccaactgtgaaaatttaccctagtaattggaaaggcatttgcataattaaatgaaaataaacaagagttaccataagataacaggattggataggtaaggaataactgccgtgtggagactggccagaacctgaacaccaagaaggcagtttcatacaaaaacaaaaatatcaaacagctttagaaactattcttctgcttcaaaccaaaaacaccacgtacagaatagtcgtgtttttgtaaatataaagccccattcctttataaaagaacaaagctgtagccttaaattaaaggttaaccatccaaaccaaccacaaaatatatcctattactactataagaaaaacatttatgaacataactttaaataaatcgccggcagaattttacaaatttcagttacaaagatgataaacttatgtttaaggagacaacattggggaaattctagtataatcttacttctttgtatacatcaagtggaagtggcaacctaagaaatgaaagccatgctttagtaaattttggcttcatcttcttggcactattggatgctgtcaatatctgcacatatttaagaaaacaacatagctagtactgaagtttgatctcagtaaaacgagaaacagaatgaacatgcaaggaaaaggtccacgtatcaacaatttgacaggaactttcagcaatgacacattaaacaatccagcttatattttaccttggaattattctggtcgctcttcttctttttatcttccccttttagcttcccagagacattttcaggttcacctgtttagacaaataatcaaaatatagtgtgcatcagaaagagagagaagcgaaagggaaagaggttcaataaatctccatcaatggattttctcagaacaataatagagggctggaaatgaatattactgattttcatcaatctttaattaagcttcatcacaccgaaagcaaaggatgtaggaagaaagtattataatgtaaagcatccagaaataattactatcttacaatattcacttaaaaagatatgaaacaatcaaagagaagaaatccactgtttcagatgccactgacacactttatgtgcttttgtagccagcgccatgataaaagatttattattgtaacaaaactcagttgaacaatcgatctggacttaatttccatagacagataagacagtagaaaagaaaaacaccttgcaatgattgcttaatcatcatcttttctacatatcaatcactctttacattgagcctactaaaagaataaaaagactcattccaaacacaagaaaagcaagaaataattaactatttacaagaagcaatcacctgatccactccacatctcatagtcagctttgtcagctgagccttctagtgcgggtatgcgagataaaatgtaatgtacattgtgaattaggttctctgtactgcaagtagatcaaagcactatatacatcacatgatgaagagaagccccagaaacaaaccaaagtatatatatacatatcgagatctaaacatattttaggctcaactattttaagagctagtcactaacaaaaaaaaatcacatggtaagtgacaaacctttctttagattgactctcattgtcgccatctgtacacagcagggaaactatatgtcattaagaagattgtatgaatccataaacacaaaacacaagaatgcctatggtacctgacacgcttttctcctccaaagttctacaaatcttttccacgataatgtatgtaaagtacctatagcaaataaattaattgtaggaactatgtctatttcaaagataaaaatttaaagagagcatgaatctaaaaataacatttaaaactgatgaacatacaggcaagacaaacaagtggttgaagttggatgagaatgtgattaagtgtgcatacctgatatcaatgtacttgaaatatttcgaaacaagcaagtccaacaagaaagtgacaggggtggcagagtgaacctgattattaaagaaaataacaacaaattatactaatttagacacacatttaacccaaaacacaggaaaatagtgtaagtacttacaatgctatgtacaagcttgtggtatatagcagaattaaaccttccaccatttcccagcttcacaaactccattaatgtatccaataccaattcctatatataaaaatcatccaaataaatcgacaaacattcataaaattacaatcaaataaacttaaaacaaaaagaaaccttgatagtttcttcggattggggcgaaaccaagacgtcgatgagagatttaacgaattcatcgaatttagctttgagccacgttctgtaaataaactctgggtcgtcctgtgaaacggcgcgagaggaaggctttttggaagatgaagggaggtcggggagaacagaagtgaagaaagcttggagtgagaggagagcttcgagtacatactgaggaggcgaagaggaagagacgaaggagaggagtgtggggaggttgttgatgtgagctctggaggtgaggaggtcgtggcctagggttttgaggtgtgaaagggaagtggtgttcttctttcgctttttggagacaacggaagccattgttgatttctcagctctggtcaagctcggcgggaatggtttagagaatatagttaggttttttgatacaatactgaaaagtttttattagtatacacatcatgtcgtttaattctaaacgacgtgtcgtttttattcttttttctccaattttttttttcttaataaatatgatttttattttttcctcaacttttgtctctttttactttttttaccttttttttttggggtaatcaattatcaaacttatttttttaagaaaaaaatatcgaaattattaccgatttgtcaacatttaaagtgaaagggtataatttttttttcttaagagaggtaaaaataaacaaaaatgcttttagtgagatatgaattcttaacatctataacatttgtccataatattacattacattaatgatatttataaatattattttttattacaaatatatgtcttagtaaattattggatattttaatgtgttatgctttcaaactaatttatttgtgcttacgtgtcgtgctttcagatttatcgtgtcgtgttatgtctaagactatatttttttcgtgttatgtcgtgtcgtgcctaagtatatattttttcgtattgagtcgtgctcatgagtcatgcctctcggactcatgccaatttcgtgccgtgtcaaaaagtttgacccatattaaatgcactaattacaccaagtttgaaaaaataaataaaatacaattgttgcattgattcctataatttttttttttttttgtaggaaaaatggtaactttattaataagaagattcaaccattacaatagaaagaaaatcagcgggaacattatcctcgctaaacatacgatctgaatacaaacaagagctacgagcaagacaatgtgcagctttgtttacagaacgtttagcaaaattaattgtgactaacggcaaatcggccataagagaacgacaagccgcc

SEQ ID NO: 303201 - DNA, 1729 bp, Cannabis indica
atgcacttcttcgctaaaataaaatgtgagacttaaaaaaatgaatttcaactatataaataatggttgtctataataacaaaagaataaggagctctcatatagaagttttctacatttttgctaaatatttttaatagtattttactcgcaccctataaacttttattcatgtcagactcccattagtaaaattatatggaagttcttgaattcaacaatctcaataatctgaaaataatttttaacggccctaaaaagttcaaattacgaaaaatcttaattaaagggtactaggagggtttagcagttagcaccacctaaaggtatcatattgttatgactatgagcattgctattaggcattatggtgtctaatataaccataatgtgacagctttataaatagtaaataatttttttataataattattaaagtagtagaacctgatattaaagtacaccattaataatataatatattatagtaatattatgtattataagtatcctttaacattttttcctgtattcagtcttatttattttatttaatatttactgcaaaaaaaaacactttttttttatgtgatagtatagggcattagaatatatatggcatattatattaataattacacgacttaataattaatattttcattggtttttatgtttttaactattattgagattaatattaattcattgaagatgatgattgtaaataacttaatataaacttatattagtcaattgaatagtgatgcctcttaatgaaaatcacctattattctttgttttaatatctcttggtttcatattaacctaaaatcaataaatttacttgtaccaaacaaaaaaacctatagtcataaccatatcaatatcaatattagaattaaagctttgtcttcttatactactaattaattttgataagtacaaacaaagaaggaaagcatcttaataatttttttaacaacattttcacatatatatatctatagtaattactaattgttaattacctctaataattagtaattattttattttagtagccaaaaggttatgtctctttcaacttttctattcacaaaattgataagttgtcaatttgaatcatatatgtccactcaaaaccgagttgactcagacattttggtcttattttatatatattattattattcttctatatatataattcaattaacttagattaaattaattgataaaaaatgtgccaaaatataggaaaacttagtcttctttcctcttgttaaaaattagcccacacgctttataagactctatttcttaaattactgcatgcaccttcttggctctttcaaaaaacatcatcaccaatgaacaacttgttataaaaaaacttgacacttttaacacatcatttttttactcttaattttcacactttcaattgtaatactttggcatatgccaacttttttttgtttgttattattattatttttgtttatatttttaagtaaacaagagtttcgaattaagaaactaaatcgagagttcacttatcgatcgagttgttgatcacgtttgagcgaggtggtgacaaagtcgtctctaagttgaaatgggctttagaaataaaaaattaataatcgggcccttattataagaattaatgatgttttaaaaaattattaagaaatatgtatttttaaaaaatatttttttatt

SEQ ID NO: 303202 - DNA, 4815 bp, Cannabis indica
aaaaaaaaaaaaagagagaagaataaagggactgaatattcggcaatgaaaagggtaataactatgaagttcttagttacaccagagattcatccaggtctcccacttcttgatgtagtctatttcaagctagtagtttgaacaaaaacaccaatcaaatatcttttacctcctcatcaacaagtttgtcaccatcatcactgaaatcgtcatcgctgccagcctcaggttggtcatcaacctcttcatcactgccatcactgccataaactgaattctcctccttgagctgaatatcaaaataacaatcaatatccagaatgggataaattacccttctaccactaatacaacttaaatttacaaaaatgaacattttccccaacactagttctttcaatcagatcagtacacaaaatcatcagagtgtataaactacggaattaaactctagggttctagtatacctccttggaaggtccatcagacatccttggtgagctgcagcaagaagaataatacctactaccagtttcagttccatcaacccttgactcgtcaatgcttccagcatgactggtgccaccatcactgggccaagcagtaatcccgtatagcccaaactgaagattaactggttctcccttgccagtctgatctacattgcccaacaaaggtttcccattaccatcaactgcttcaataggccaagtcctagccactgtaccatcaatattaacaagagtcataagatgcctcgatgaaccttgcctttgaatcagttgaaacattcctttagaactcaaggagtttgctgcacattggtttctatattcctcatctaccatagaaactgtatttgtcatggggtcatagagttgttcaccagcttcacgccttcgaagacaactaaatactgttgcatggatagctgctacgctcttatcaacattggtattgtttattttgggtacaagatgcttgtcagcccgcttgcacaggtattcctgaattgttctaatgttacgtatgtactttacatatttgtttttggctgggtccaaagtcatatacttagcacgaactgcaaaccgttccaagtgcttatcttcatttgtgatgtaaatcatgaatggaacgattgagggatgtttcttcatcagtcccatctggggatcaagaaaaattcattatgaaaaaaaaaaaaaaaaaccggcatcctttcaaaaagagaaaaagtggaaatgtttgataatgtgtaacttaggtatttatttaccacaaaattaaggctcaagtggacaccctcaacaaccacagattctttcctctcttcccaagctgtaatcaagcgatcaagactgtcaattaccatctcactttgagctttgaagccttcaacagccatctgctttggactgagcaaatcagtagtaccagagccaacctccaatttatgagcctcagacatcccagcagtagagccattagctgcttcgtctttagaaagtgaatgtgtcgtaccagctaactttttggctttcctcttagcctttgcttctgcaacagccacaggatccaagaactcccctgcatgataggttgaagaccatagtagaggattttgcttctcatctacaaagcttctcatcatatgccgaatggagtcggtagatatcactgttgtaattcctaacctgctaccctgcaagacaagaaaagtgttgacaatgtaattaatggagtgcgtagtaaaatagcaaggaactaggaaattcaaacttccgaactttcaccaattggaaaacatacaatgccccactagttaatgcaagcatcataactaacaactagggtctacgaaaaccgataacactgtaaaaaaggtaagtaaaagtgaaataccagcaaggcagataaagtagatttgccgcagccactagtgccacataacaagacagttatagattccttcctttctcgaattctgcaggagaaaaatatcacaaaggactgtaaatactgcaaagcagagtatagcagggaaagggggaatacaaattgtagaactgctttcaaagttaacaatgacaattatttttaaataaataaaaacacaatctaaaaagaagcaaactaacgactcccataaatattaacagatagtctgatttccaaaaacatattctaatcaagagtaataagggtggacatgctaatcataaaagtaggaagaagctctcatagttcacgaagcataatacaaaaataaaaattactattgttttgtaaaacaattggccctgaaaatctaaccacctgagaacataaatgtcaaaacatagttattcaatatatggccatttcttgagattaaaaaagtccctaaacaaaatccaactcaactatgtgacaaaagacttaggcatatactataagtacatagtactgctaaggtttagaaacccattctataactgattttctcttgctttgaaacagacattgtgtttcatctcaaaaacaccttacatgtgaagaaacttttaactgttcaagggagtaagcaacagaacctcggaaaattaatcacagcagcttaactattatctggaagcatgagacacccaaaatactgggaatccttctaaaataattgcttatagtgaaatctgcttttaaaggtctaagcatagaagttataaattaagggactttttaagaaatcattgataataataataataggtgaaaggatatggggccttctgacctgcatgccaatactaggtctgccctctggttaggaccaacatacttatactcagccaaggcattgcaaacaacatttagaaaggtttctctcataacaacaatagttgtgcgtcttttgtacaattcgaatggtacactcctacttttatcatctttcccagaaactaattgcttgacaacctctgttttctccaagaaactgtctctatgaaaagcatttcccttctcgtcctggtcaattgaagcattggaacctgccttatcttgcccttctagaagtcttaacaactcaaaaactctttggctaatctgccagggaaaccatctcaagtgtaagtaaatactctttacggattttcagaaaaataaatgaaccagctacgctgaggaagcatgagaagtcaccaaccaccagaagataataacaataacaagagaaaaatatctaaaatatttgaatgtgttcatcagtcaaaaatttgaagtttcaaagttaaaaagatttgaaatataaaatcaataagacaaacaaaataggtacacaacgttgcgagggagagagccaattaacaacgcttgttcatgcaaagtgaatgaaatctatggatccaagttgcaatcacatggggaaccctgctctcaaggtggtaatgtaaaggaccgtaccccacctcaataacaggtagggtcggtccagattaagagcttacattgtaacagtatcagaatcaagaatattgtaaactaaatgatataaaaaaggtgaggaattgagagttgaaatggtccgaatgaagaaaatagatgtaggaaaaggactgttgaagacaagaaagacggaaggtaagtggttcgtgtacaacaaaattcaaaaatttccccaataaaacgaagtttaacaggtcaagtttgaaggtgacaggaaaacgcaccgtgtgtaaacatatatatatatatatatacatatatgtgtgtaagactacttccgtgccgtgagaaggacattttactctgtgattagagaataaaacattggatagcaaaacaaacgcaccgaccgcaaagtaaataggataaacctatgttgactctgaaaaagaattacttagcaacataatcattaagactttgaatagtgaaattcagaacattcccagaaaacgatccatgcaaatccagatctgaaaaccacaaaagccttgaaaagcaaaaacaaaacaaacaaatcaagaaacgcagaatttggtagcaaacttatgccgtataaacctaagttttccaatccaaaacaacaaaacaacacaaggtcagatgatcaatacttgaaaaccgaaaacgaaataaggcgatcaaggaatttaccttaaatgcatgccgagctttgcaacccatgagttgaagagtactttgcagaacgggacgcgtataacgaaacgactctttccctttctccctcttttcttcttcgtccaccacaactatgtacagtactttcgtcacctccgccatctctacacacctaaaaacaaaaacaaaatcccatgaatattcaaacagaacaagaatggcaaaattatgagcaatttctcggaaaggtcaaaatttccgagaaaggtaaggaaaagcaagagggaatttcaaaacaaaatgataaattggagaaataaagtagttaagaacaatgtgggttagaaacacaaaagcttgaactccattaaaggtttagcaaatcgaacctttgaaaaaaaaaacaacaacagcgggttgcagagggagagagagcaacctggaagaagaggaggtggtttaagtttcagattgagatggagcaggctagggttggggaggcgttatgattgttggtcgccatgcttgaagaaggaaacgatgtcaggtacagccattctttctctctgtcacctgggttccacgcatcgcacagggcgaccctccacgagtccttttcatacacaatgtgtctctctctaaatcaaataactaaaacaaaaaactctctctctctctctctatctatcttat

SEQ ID NO: 303203 - DNA, 1835 bp, Cannabis indica
ggtattattgaaaatgcaaatggatattcatcttattgcttttttgtgtttgtttaagggaaaatatgtccgtgctatttatttgtggcataagtccttaaattttacaaatgtgatcatttaattgtgttattatgattgaaattattcttggaatttttaattaatgagatttcattttgttggcataattaaccgctaatttcatatttggagttatttgatgtgttttaacacatttcgatggaacataatagaagctgaaaagttcgatttaacaaattagagtgtatttgtggattttgatgactttaaaggcaaagggttagattattgttgcttgcgtgtcgtaacgagttgcagatagtagggacactcgtatttggagaaaccttggatctctcacatgaataatttcctctctaagcctaatggatctcttgatatggaccacagtatagttacatagcttttttccaatgatagtggttaggatatccacaagttgaattgcttttttgattgggagactatttctgagattttgaaaggaggtgctctctctggcacgggtaaagataagtgggtgtggactcttgaaaatgatggtcgtttctcttgcaaatattcttatcttactcaggctttagaaagatcttctcttcgtgaggttgctcccttgctctggaatagtaaagtgttggagcgacactagattctttggtgatgtattctttccagcgccctccctgtcaagtctgtgataaggaaaagattttttattgaggatgttagttgtcctttgtgcgggagggaggaggaagctttagaacactttccatgtctgccgatcgtcaccttggggtatttattcggtctgtgacactggcgttcgtatgtgggattaggtcaaattcatttgggactttatatacaaggggattgttgctgaggaggttttcttgtatgcgtctcttgtggttgataccatctggtgcactctcaatgacaaggtacataataagtatacagttgatgtgaagaaatgtattgactttattcgaatttcttttgcagatttacatgttactattttcccttcccctatcccatgcctaaaggagagctggtctcctcctcctcaagattgattcaagctgaattgcgatgtaaaagtgagtcttgatagcatgtgtgcaacagttgttgccaggaaccatcttggtagggtattttgggttcaaacgactagagtggatttttcttatgcactttgcgggaaagcggcggcttactgtttggctatttcagctgcaaaaggatattgatgccaagtttgttattagagagatcgacttgagagtagttatcaatgctctcaatgagaatgagtctcattgggtattggaatctatgtttctttttgtaatagttactctcctttgtttactagttgtatcttctctaatattagtaggacatgtaatttactgctcatactaagtgggcgtttatccacaagaaatttggtgttatttcgttatcaaccatctcagtaaacatattatgtaatgaccgtgaggtctaactagttttagttataaaagtacgtttttcttcaaaaaaaaaaaaaaaacgtgtcgtaccgaattgtatttaaatttatatttttcgtgttgtataatgccaatttgtaacaccgggccatgtcatgcctaagcctatactttttatgttgtataatgtcaatttgtagtaccatgccatgtcatgttatattatattgttataatataagatagattaaaatattaaaatgagacatattatatatt

SEQ ID NO: 303204 - DNA, 4821 bp, Cannabis indica
aatagtgtaaaaaaaaatcaacttaaaagtgtaaatttttactgaaaataacagttatgtaatttttccttatttatatctaaacaacaaatatgtgctggcacaatgtgttatactttgtgaatgtgtggagatttcaataatcttatttaaatactaaagggcaatgttgtttctttttctatatcataaaaaatgatgccaatcaatcaaaaaggctatctttcatcattgtttttatttaaaattgtaataagtaaaagcattccaattccaatttccatatgtgttgttgtgtgcaattgcatttggtgtgaaagtgaaagtaatgagtgttttatttttatattatgacaagtgtcattgcatgcattacaagataacggtcaattataagaatgaaatagaaaagagggtaagttttgagtcaatcatggaagcaaagcaatatgatctgatctcattagattattatgtatgtgtaatgtaagcaaatgagatggcaatatgaattggaatggattggtcaatggtgatgaagtggagaacagccttatttggctggactaattaagctaaaggttgttgtgttgtgttttgctgtgtatgaaatgaatgaaattaattagaatgaaagataccaaaactaaaactaaaacggtcatttgtttgtttggggtcatcatcactttttgtgttgtgtgttgtgtgttgtgttttggggccagccagttgtcatttcatgtctttgtgtattatattttgattctatattgccgccaaacacggctatgattactcttaccacttcttcttcttcttcttcttcttctcttcttattacaactctacaacacaaaacagccgttacctcgtttcttttgtcattcaatcataccaacctcgttgtttatgctatgtataagaaagaagtgggtcccattcatggttggtattccaatccaagctgttgttttttttacagtctgttttctcatttcaaagctcattactttaccccactttccccaatatcctaaccccactccccactctcttcggaatcagaccccatttcccaacctcactcttctcttctttaaaatctcctaacccttctcaccattccccaaactccttcttcttctgctattacatctctttttctctcataaaaatacaatctttattattatagccatggctgatgaacaagttcagaaagctgtccctgaagaagaagtagtagttgttaatgttactactaatagtaatgatggtgatgagaaagtagtgaatgagaaaatggcttctcctcctactactcctaccagtactactctccaaactgagatgtccaaatccattgaagacaatgaaaaagccaacattaacaacaatgactcggcttctttcaaggaagagaccactaaagtggctgatcttcctgaccctcaaaggaaagcccttgaagaatttaagcaattactcaaagaagctcttcaaagccatcaattttcaactgcttcttcaccaccttcaccaaaacaagaggctattattaagcctgttccaccacaagagcctgagaaaactgagcctgaaacaactgaggaggtggagaaagaagcagcaacaacagcaacaaccacacaagagtcttctgaaccagttctaactgaggctgtagaagagaaggttgctactactgtggctgctgtggctgctgatgatgatggtgctaagacagtggaagccattcaagaaaccattgtagcagttgcttcttctgaacacaaagagccagaagagtcatccaaggctgagccagaggaatccaaagatgtaaaggaagagtctttagcagcaacacagcctcctcctgctactacaccagctctggctcctgaagaagtgtccatctggggtgtacccttgttaatggatgagaggagtgatgtcattcttctaaagtttcttagagcaagagactttaaggtgaaggatgcttttttgatgctgaagaacactgttgagtggaggaaacagtttgggattgaggagttggtggatgaagatttgggcagtgatttagataaggttgtgttcatgcatggtgttgataaggaaggtcaccctgtgtgctacaatgtctatggggagttccaaagcaaggagctttaccagaacacattctctgatgaagaaaaaagacagatgtttttaaggaagagaattcagttccttgaaaggagtattagaaaatttgacttcactccaggaggtgtttctacctttgttcagattaatgatttgaagaactcacctggaccaggaaagtgggaactaagacaagctaccaaacaagccctccaattgcttcaagacaactaccctgaatttgtagccaaacaggtaccttagctttcctttttgagcttttatacataaagatgcaatctttcttttacccaattccccatttgttcttattgtgcatttggttttgtttaggtgttcatcaatgtgccatggtggtacttagcagtgaatagaatgataagcccatttttgactcaaagaactaaaagcaagtttgtgtttgctggtccttccaaatctgctgataccctcttgaggtatatagctccagaacaaatcccaatcaagtatggtggactaagcaaagatggtgaatttggtactaatgatgctgtaactgaggttattgtaaaacctgcagccaaacacactgtggaattcccagtcactgaggtgagttcctatctattaccatgttagcattctctaattggtttttgattgaattatgaacaataacaaatatatatatatataattatgaaaatggcagtcatgtgttctgagttgggaagttagagtggctggatgggatgtgaaatatggagctgagtttgttccaagtgcagaagaaagctacacagtgataattcagaagagcagaaaggttggaggaaatgaagaaccagtgttatgcaatagcttcaaagttggtgaagctggtaaagttgttctcaccattgacaattcaacttccaagaagaagaaactcctctaccgtttaaagaccaagtcttgttctgattgaattccataaccactactctcactgtcgctgtcactgtcaccatcttcatatatatatttataatgttctatatcaactattattttattttactttccaagtatttattttttggtcttcccatgttaaaattggtgatttgatgatgttttattctctttgatcttgtatttaaagtattttttttctttctttcttcaattacacttttattggttattggtatgtacataaatgatgagagaaagtttgtgttttatttcatttctttgtttgagaatttgtatttgtaccacatttctcattataactaagtatttcattaatttgactttatggtacttagattgaatcctcatactaaatataaatgatgataataaaatgtaaaaagaatcaaaatctagctccttaataaatagggttatttgcaacaaaccccttttattatttttatcttttttttagttaagggtgtaacaaaaaacaaaagataaggagttaataatattagtaaataaaagaattgtactgtcttctgctcagtctgtatagggcctaattatgctagagacttttactttattgccaacctaattatgttgccttttgctttggattccatttaactattcttttcatgtatttttcttttctttcttttctttttctttattgaggctttttaggcatgaagaagaacagggtgatcatgtacagatgtttagtaatcttccaaaacaattgaacttggtatggtaatcatttgaccactactaccaccatcaccatacctttatctcagtctcagctataaataatattaagggcccaagtttgtgattcaatttataaacagtataattagctaagtacatatatgattttgttacttcaaacttaaatatgagtaaagcataaatgaaaatgagatatttatgtgtgttgtatggatctacaatacatcatgataagaatgcagcatgtgagttgtgacatgttcatacactttgacagtatatgtctatgtaaattgttactaagacagacatgtatatatacacattatatagataaaaaatggtccatatgtgagacaagaccaaagggtacttttttgttttcttctgtaaatgttcttctattcccacattttcatgaaaaaagaatacaatgaaagtgatatgtggatagtacatagaatactgtgatgaagcatttgggctaaaaagtttgattgcccatggatctggtttgggccttggacttcctgaagcatgaaatatatataggcccaactatctctctctaattctgtgaccgagtaatcatgagtccaaacaacttgaacagtagaacaacatgggtaggcctagggcctaggctggaattgtttccttgtagtggttaaaattggtgtgtgtttgtttagtcaaatccaaatctaaattaaaattgattctgacatttgactctgagaagtcagaatgttattcatacaagaaatggtaaaagacactatactattttcggtgtctgttattagtataatttagtattaaattttatataacttaatgttttttttaaaatataatattattaaccacgttaaatactagtagtgtttaataataatgctttatttataaaaaataggctaattaacaatttttctctcgaactttgac

SEQ ID NO: 303205 - DNA, 1581 bp, Cannabis indica
atttttttaatcacaaaatgaaagtaaaatttttgtttttaaaaattttgcttttgaaaaataaaaatgcgttctgtaaccacttttgtttttcaattttaaaaacagaaaacacaagtgtgttctgtaaagttcattttcattttttgattttatttacgtcgggtctaggttcggggtcggatttgggttcaagtcagaggccaggttcagcgccaggaccgtggggggatttgggtccgggtcatgatcgaagtccaagatattgattaagaaaaaagtatttaaaaaaaatatttaaagtgttctttttttttttgtttttaaaatttttgattctcaattaaaaaattaaaaagtaaaaatagttttatagaacatattttgaaaaatattttactttttcaattttaaaaacagaaaactgaattaaaaaaaaaattagccaaacgcacctatacatgccaaaaactataaaagataacataacattattgatgaaattttatgtcaacgtattttaatttaataaatatattaaaaactcataaccaatcacaaaaggtcatgttgcacaccttactaactatgctgaatttaataagtatttttttaatacacacgcagcctcctctaccaaatccagtcaaacccgactagtacttgtcatccaagtaatattatatttaaatatttgtatatatatcatactaatttattatgggcacagattaatattacatacaaaattagtactatataatatagtagtatccttacagagactatagctacaaaaaatatcaaaatgagccagaaaaaaccaagagtattggctatacctttcccagcccaaggtcatgtaaaaccccttctcttcttttgccacaagctggcccaaaatgggtttagagtaactttcgtttacaatgaatttgaccataagcaaatcttgagtgccatgaaagatgttgaccatgagaggaataaggcagagaataatattgaatttgtgtcagtcccagatgggctgagccctgaggatagagctgatggtgttggcaatgtgtgtcaagcagtgttagacactttaccagcagagcttgaaaagctcatacgaagcagagatgaaaacgacaaaattaggtgtgtcgttgttgatttttatttgggatgtgctatgaaagttgcaactaagatgggtattccaggagcaattttttgtccttcttcggctgttgttctctcccacacattgaatatgccaaacctcatacgtgatgggatcgttgatcaatatggttagtactactttttcttacttataaaactaataataattataataaaaaatctaatattagctagcctctatttttatatacatatagggctcgtttaaaatgctgtattaggtcgtattgtattgtattgtattatattgaattggattatacattatatttttatataatactatgtcaaattttaagttatattaaaatattatatatttaggtgtctataaaagttaataccacatatagttttatataaaaatattgcataaaatacaattca

SEQ ID NO: 303206 - DNA, 2109 bp, Cannabis indica
gatgatgatgatgatgattgtattggtgatccaagattgtttaatcttgatgttgttgtgagactctagttttactagagaagaactttgtaatcccattattgagctttggtgatagtggatgatttgagcggactacggtcacgtggtttttcccgcgttgggtttccatgtaaaaatatcggtgtctcacttttatgctagatttgtgtattttatcttatttgtggtgctttggttgatatttgatattgcatattgtagtgtttgataagtatcctatttttgacatacaaagagggttaatattgtggttaattgcaataggttttcccaacacatcaaactagattttttttaatcaagaaaatgctttttattcatcaaaatgaactacaaactaagggaaaactctcacaaacacagctattacaatctttttacaaaacattaagtacatttctatctatgctatctaactttcgatcctgtacaagattaagtctacttttgagactttttttaatactattatctatacttctttaactcaaacatttattcttatatacatgaattctgatttagccatatgtcgtatatagcacctgctaaaacatcatagaaaaattctcaaaggagtcttctcaatctctttatcttgaaccaaattcgaagatcctcaaaagagctaggccaaagttgatttctaagccaacacttaatctattggaactctcctagagtaacggcagtcaaaaaataaatgattatgtgactcgaagtctcactcacatacggggcaaactcttatattaattggtatgtgtttcctcattagattgtctctttaaggaggttgttatagagtgcttggcacataatgactctgctttggagccgaaagcttacactaaatgactaccaaaaacttaaattgatcaccacttttgttatagacctgcccaattttaaattttgttattcacctctacaataccctccttgttgaagacaacttaagtcttgagagcttctttcaatatcaacttccatcaaattttagctcaagagactaaatgtgtttgtctttcagataaaggctatttacctattaaaccagaaaattactaaattaattttagtccaatcgactcaaaaatagaatcgcaccttatattggcctatagtcattacaattcacagatagtatagtttttcacacatataatgttgtcacaatattattgtgtcattggtaagactacactacatcatgagtatttacattcattatgcataaaagatttgtcttatttgttatgctacgtatagctcgtacaatgctgtaatgggttagtgttttaccaattattagtagtagtattaagtatgtactccgattttatatctggtttaatttgtagatttttttctctggggctcaaaatttgaaatatcgtggctgaaaataataataagggtctacacaatttactaaagacgaacccttacaaataaaattgttataatatacaagacttttgctgataattaaattaaagaaagaccattaaatatgttgtacgtctttggtccccatagatgagataactaattcctcaacctcaagtgaaaaattaggttttgccttctcatatatctgttcattagtttcatgcacagtagaagcatatgtaccccccaagtcaaattgatatttaattataattttctatatggcttccacaatgtccacatattgctcatagcaaagtactagctagctaggtaggcacttcaaaactcaaattagaataccaatgttgttttttctttagcatacattattttgaaatgtaatcattcatcaccaagcacggctgcccttatccatgatctgacaacaaaatacatgtaaaaagaataagaaaagcaataaaggaaagcatgtaataaaaccattcaaaaccccttctcttttagggcttctccaatgtactgtaaaattttaaaaatagtgaagttttcacacaatattactccaaacaaacactaaacattaccttatatgtgtgggagtttatagtgtctcactattattaggcc

SEQ ID NO: 303207 - DNA, 950 bp, Cannabis indica
atcccaatgagaggaactccagggtaccttgctccagagctgcaaaaatcaatagtcactgtcaaagcagatgtatacagctttggaattgttgttcttgaaattgttagcagaaggagaaatgtggatagttcgcgatcagagtcaagttttcatttgcttgaaatgttgcaaaagaaggctgaagaggataatcttattgaagttgtggaaaacttagatgatgacatgctaaataatagagaagaagtgataaaaatgataaggattggagcctggtgtttgcagaacgatcacacgaaaaggccttcaatgtctacagtagtaaagctcttagaaggacttatggaagttgaccctgatatcagctacaagttttctcacgccatggcatttgcctctgatgcaaatgatcacattactgtggcaccacaagcatcttttctttctgctccaagatgaaatgcctaattgaagagggtaaacaattatgttttacacttgtttatcttaactgtatcatctaaaattcattgtttcgagtgtaattcgtttcatattaattcctgataggaaatattcttctgaagatagagctgttattaaattttcatgatatatagcattttccttaaatttttcttgcttatttcaacaaccacgtacattccaaaagtgaaatacgaaaaagcaccagtggtgcttattgtagtgcaattacatattaggttccacatgttttaattataaccatttgcaagacaccaccaaatagcaatatagagatagaaacactactattcaaaactaaactagaaatttgtgaattcagcaactaaactacaccattgaatatcatcatatggtgggaagactgaccgagatggtatctatatttatcttgctttaaaaaaaaaaaggccaaaagttttgctctctttaactacatc

SEQ ID NO: 303208 - DNA, 2116 bp, Cannabis indica
gaagataaaataaattgtcaatctcaaaatttgagaattgaaatgaaagtgacatttaataatataaaataaataaataaatttgatttaattaaattaatttattcattattaatattaatattttgttctttttatgtataggttacttacagtatccctttcgcattggcctccatattttccagcacttctggtgctggccaaggtatatttatatacttaattttcttatatatttatacatataatacatattgaattttattatcctatatatattaattaatttataattaatatttattttattttattttattttgtttcagggctttcattaggagtactgaatcttgcaattgttgtaccacaggtaattaactagaacattaatttattaatgagtaatgtttttaaaaaaactcaaatatgtacttcactttcataaaatatttctcaaatactaacaattttttttttcacacaatataattccatacataattaattagtgatttaattactaataatattaatttctattattattattgttaatacagatgttagtgtcggttttaagcgggccatgggatgccctattcggaggaagtaacttgccagcattcgtagtgggcggagttgcggccgcagccagtggaatactagccctaaccatgttaccttcacccgccgcacaacttgatcttcccggtgccaaaaatgaccggaatgccctttcaatttccgcttcattccattgatgatcattagactttaacaataataaaagttcaaaaacaaaaaaaaaaaaaaacctaagctagctaataacctaccagccttagctagagctttcttgcttattataaattgatatatatttttttaacctagcttttataaatataaaaattgggtcataaaaacatatatcataatcataaacgtttttcttgaaatttagagtagagtactctctagtgttgaattaatgaaatgtcacaaattccaattcccaattcctaattatcctaatccatattagtagtgagtgtgtgtgtgaagtagtaactatagttgttgttgttggtgttgagttgggcaaatatatataatatatattgtgtctgtttttataaagaagacatagtatattaatgtatacctaacacctgcaaaaacatgtcagttctttctttctttctctttctttgttttttgtagccatgcgcaagcatatgttacaattcttctttttatatataaaccagaagaagtacttacttgttctaatattaagtcttctctatttctttctttctttccttatttttgttttttcttatttatgttggttggagatatgctttatatatatagacaataatcatttaatgcattaatatgtacaatatatatagaattgctaaaatgtattattggtgtctagtaacattgtcggtgtcatatttttattagtgtaattaaatatcggattctatataacttgagaaaataatttttaaaaaatattactaattaatcataggatgtcacttataaaagatattggacaccactgataattaatagcaatggtcatgtagccagcactgctttgatatatggagaaagagtatttctacatattgataagtgcacactagctttttatactaaaatattacaccctaaacaatttcgtgttagatggattttactaagttaaaaaaataaggtaatattacttacaaagttttaattttatgataaagttttaatatataaataaataatatgtttagtataatttataaaaaaaaagaagaagaagaagaagatatgttacataaatgtgtgtagtattttttttttgtaaaaaaatgtgtcatttccattacattttgttatagcaataatattagctctaatgtaatgctatactatagtgggatttgagagtctaggatatatatagtgtgatgattcaacaccattcaagaacaacataaacaaagatcaaataaagctaaaaggaacaaaacattaaaccataaaccagagaacaaaataacagaaacagcagcagtaaaacaatgaaaaacacaaa

SEQ ID NO: 303209 - DNA, 1690 bp, Cannabis indica
taaaaaaatgcaatttatattttttatgtaataatttataaattttctttactttatttttttgttattttgctctgcttaaagtttatcatatttcccaacacttaattaatagcttttatctattatccttcatttctcccgttaattaataatttttatctattattgaatcattccttgcggttaattattataggattttttattttattttttttttcaaactgtttggtatgtctattattattgttgaatttattttatggactatatcttcatgtaatttgaaaaatttgtccgatttgattattaatagaaatttatattttctctaaaaaaaaaaaataaataagtaacattttatcctttaagctttagatgatgatatttttcttctgtaatagcgacaaattgaatatgaaggctcaaagaatcgaaatagattcgacgactacgtgtgactctctctctgcatactttagcaaaaagtatgagtttcctctaataattgaaattaattatatatataaagagatatgtaattatgtatatatatggaatatatacaccacatttaattcattccaatttgattgctgaccaaatgaaactcattaaaaggtgtttgaacaactaagattcctcacttaattggcacagacattgacatgaaagtttcttaccaagggttatgcatgcatcttacccttttagggttggtttggtaccctgactttggactcagaacctatcttcggtctcgggccacaaatcttggctcggacttggattacatccccaactctatttcatatacatttctatgatcctttttaaatattataatataagttaattttgataatttatcttatatttaataatacaattggtattgtattaaattttatgatcctaataatttatacaatttaaattttatccaaacatagtatattacttattatataatacaaaacgaaatttatctatactgtcttccaagcgatttgttaatgtataagtaattaattatgactctatatattaatcaactccctagatatatgatacgatacactatatatagaggttcaatttaatctgtcttattattacttatttatgatcttaagatgtatttgcctgaaattagaatattaatttggtgtaattttgtataattatatgaattatccaattttttaatgaattatatataatagtaatattttagtgaaaaaataaatatcaatcattttgaaaaagatcttatatttgtgaaagagtgtttgtggagtattaattttctgaattttaatttgcctaaagctctacagtaaactaaaatataatttcagtcaataaattataatgttataataaaacaattacttatataattatggtttgtacaaaaaaaaaaaaaaaaacttaaaattatggaaaaaaaaaaatcaagttttgctgccattatctttaattataattataattaaactttacaaaattatcctacatttaaattttaaaataattttttctttatttttcgattcagtccaaaaatgagaatagaatcttttaatttcttttccctacaaacgtgctacgctttgttatatttttagggtaaatattgttttgaatcttgtatttttacaaaaatttattaattagatttttt

SEQ ID NO: 303210 - DNA, 1586 bp, Cannabis indica
caatatattcattgggcggtttggattttgattgtattatttcgagttatattttttatcggtttattcagtttggtttgggcgatttattcgagttggatggtttgtaaattttgttaaacactcctaagtggaataataaactatttatattataatagatataaatatctcaatttttacatttcaaataatatatatatctagtcctttatatatattttaagataataattaattatattaaaatcctttaaattgtctttacaatttagcactatatattatataaataatttaattttatttaacaaaaaatatatatttatatataactattaataattgatatgaagcaattcaaagtgtatgaggcactgaaaattactatgaaaaatccatttttttatccttcctttctcttctctggtttattttttatttttattttattgtgatatatataaatataggaaaattcttagatgagagtattatttttgctctcacatgtaagattatttttttagacttgttgaataaggtggttgtatattagaattagttggcccattactttcggcccatttgcttcatgggcttcctcttctcttgccctatatatacttcctgttgtattaacataattgactttttggcatttctgccgttttacatagcagtaaaataaagagggttttcacctctatcatggtatcagacgataacaacaattcctagcccactgttcatcatcttccatggctccgagaacaagaaactcttccattgctgtcgcctccatcagcgaaccgtcgcctcctccgactgccatctccggtcaagacatctcctccattgacgccaccacctccaatgtcgtagctccgccccagtctcctctaattttttcatctctgtcaaaaacgatcagtgctcatcctcccatgtttaatccttccacttctggtgtgtttggcttcggttacactgctgatctccccatttgtggaattattggacaaacctctacagccccgatcgtttccaactcttcttcgatgtcgtcttttatggcttctcaaacacacaatccgtttccgccatcttttgctccgatcttgacctcgaccgtcccacaaccgacttcttctggcaccaccacgactccagccaccaccttcgttccccctcccgtctagaactcctctccatttcttggtggtaactttcattttcttggacatcaaggccaagtgccttattctgatcattctttgtctactgctaatcacagcttacctcgtgccgttcttgatcaaccttcccatgatgaacttactctgtatcatctaggaattggagatcacccaaataacctcatcgcttcatttctcttgactcgtcaagaaaatttccagtcatggaagcgtgcaacctctattaacatcgctgccaaaaacaaaactcttttcattgaaggcaccatacctcgttcgcctccaaatgatccttctcgctctgcgtgggacatttgcaacaacaaggttatgtcatggattcttcagtctgtatctcgcgagatc

SEQ ID NO: 303211 - DNA, 1948 bp, Cannabis indica
caggaggatgaagattatgaattcctttaaagatttaatcaaaattcagcaacgtgaatcagccattatgcaacaaagtggatttatttccgttataggttgagacacacattactgagatatagcctgaattgagcatccttacagttgctctacttaaagaaagcgattttggtaggagtaggaggcattacactgtattggtcctatataagtgagttggccatatcctctgattgtttttgtataagcctgataatttaccattaacccaaactatggctcatacgcccttaacttcttgcactgcaagctataatgtttatctttcaattgcttcttcatatgcccttatccattgctttcatttcttttcacatggaaacttatcctcataaattgattgcaggttccttatgttggtctcaactttgctgtttacgagtctctcaaggattggctaattacatctaagccctttgggctcattgataaatctgacactgagttgagtgtgacaacaaggttggcatgtggagctgctgctggaactgtcgggcagactgttgcttacccacttgatgttattcgccggagaatgcagatggtgggttggaataatgctgcatctgttgttgctggtgatggaaggagcaagggctcacttgaatacaaagggatggttgatgcctttaggaaaaccgtccgacatgagggctttggggcattgtacaagggattggtcccaaattctgtcaaggtcagtaatcagtgtgtgtgtgtgtgtgcatgttcgaattctgtaatttttggtttttaagttatgataactaatatatttgatttgattttcatttatcaggtagtcccgtcgattgcaattgcatttgtttcgtatgagatggtgaaggaaatattaggagtggagatcagaatatctgactagagaagaatgaagtgggaggatattcgtgtgttatttttgtaggaaaggggatagagagatggtaaaactaggggtaatttctttctttctttttcttttgtcttgccaagttagtagctggtattgagtttgttgtttataaattgctgtccctttgttttctgtctttgtttccttgtgaacacatatatatgagtaggtttcaactcctcatttaatatgtatgccaataaatgtttatgacactttcataaaatgcatttttgcatgcatttccctctacaagagttaaatagaggtgaattctccatttgtactgactttatataaatttaagtctctttccaaatgcttcacttccaactactctccacttctttcttaatatattctttggtattttaccttgtaaaaatatctctgtaaatttatttaccttttttttttaactgatattcagtttatgtccatgctagctattttgatttatatgtagaaagaaataaaaaaaaccctagtatattactgtagtaccatggttgtcaccctaaatctgattttaatttccttattcagctttttcattgttagtatagttctgtattttgaaatatgaaactatgattagtatgattgcaatgttatgcagtattcaccaaaaggtttcgagtctcttaaataacagtttcctactaaaactaacctgtgtattattttaaaaatatcagattgttagtttcttcaataaataaataaataaataagaaatcatatcattagttagaaaatctaactaattaattgatttaaatttcattctatgataacagtcttaataatactaaatattatagggaatttcgattttatatacttaaaaaaattaaaaaaaatttattaattaaacctaaaactctaaaatcctaaaaaaactaaagacaatttttttctaaaacttccaaaaataacccccctcacaatcacccattctctctctctctc

SEQ ID NO: 303212 - DNA, 1743 bp, Cannabis indica
aaaaccaacgcaaatagcgtaaaaatatttttaacaacattagccatcgattttaaactgaaaatactccttaggtgcattggcgggaaatcgacataaatgattttgagtttgtgttgatggaatatgctttgattttgtcaaccgacacaaaagaacaatattttttatgtatcagcaaattgcatattacctttttttttaaaaggaacctcaattcgattaaatcaccaaaagaaactgggattcacagggggaaatccctccccttcacagttcaaagatccgctcttggagtgtctagcactcttagcaagttcatcaacgaaagtaataacatttcttctaatgaaaacaaccttgcacttagaacaagagtctaagagttgaagcagtaaataaaagacgctagtgagctgccagtcaggacatttcttggtggcaatggcttccacaaggaccttagaatcagaggcaattgggaagtcatcccatctaccgttcatcgcccactgagcacctcgagacacagcttccatctcagccgcaagcgcactgccacataaaccagcagcagtgttgaaattccaattcaccgagtcacggcacatgaagacagccgcaagcaaccatcagagtaggatccatccacgaccactaagttctttgacaaaatcttgagagattcgacaggcaccggggaggtattggaactctgaactgtctttagaatagccgtaataagctattaaaaacgattagtaatagccctccttgcctgatcgatgctccagacagcctccccatggtgtacaatcatgtttctaatattccaaatggtctcgaaaatgatggcatagcaacccagcatttggtcccttaattcggcattaactccttcacacggcttgcacaacaactccgatatacttccaaccgagactaagttcaacctcacaggaaaagggatactgaaccaaagtgctaaagctaaagggacattcaacaaataaaagaaatggattctcagggccagtcacaaaataagcacttacatgttgcagagttaaataagtttgctgtgggaagaacatttgcacagactctccaaagcatcatgcttaggcgaggatgaatactagacttccaaatccaaccccacaacctgttagtttcattgaatcggccaacttgagcagcccgatacgcacccttgacagagaattggcccgaatttgagttcttccaaacaataaaatcctctactccgttcttcgctatttggattcctccaatcttagttccaagatcattactaaagagaaaacacaaaaatccatgattccagcttctagtgttacggtacattaagtccgccacactgcgtaaataaggtgcccttcctctgattgtttccataagcgctcggaattcagcatattccaaccacgagatccaaggttgccaccaaacatcaatactttcaccggttacaataactgagcaagccccttcagttacacaagattgagcattcaaaattcccctccaaacaaaactatcagaattcttttcggacacactccaaaaactctctctggggtagtacttagctttcatagcattgcaccagggccggttatcattggtagcaagtttccaagcaagtttagataagagggaatcattgatattttcaaatcgtcggaactcctaaccccccccctctcgcttcggttgacc

SEQ ID NO: 303213 - DNA, 1445 bp, Cannabis indica
tttattttatttatttttacaccatatttattgtagcaccatacttttcatttgccaattcatatattatgtatagaaaaagaaaaacataagaaagcctgctacaataaatcacataatcgatctttatcgtaatagacaatttattgtaatagaaggtgctatattatcttgctagggcaaaacttatcgtcttatataaaagtgttaaattatttggattttctcctttttgataaaaaaaaaaaagtaaaagatatgatgagtgcttttaattacaatttcctaatcaatttttacactccaaatttttttcaatttttttttatggcagtatttattatacttacattatcatctttaaaaaataatagtttacagtacgaaaatagagttttctgatattctagtttaacacgtctgttcaaaaaactttaaatctatttttggcactataaactatttgaaatttttcaaaaatttacaagaataatgtgagtataaagaacaccgctatgaaaaaatatttcgatatttattttcgaacacaaaaatatatttatagagagattgtaataagaagtttacatagcactcctcaaagatatatttatagagagagagctttttataggtatatattttgttgttgtgaccctttgaatagagtattgtggtggaccttattataagccttattttcatttttatagcaactttaatatatggaattggggagtgggaccttaaaaccctagctgctactgctttttataagcttaccaaacctaaaaggaaaaaaaaacatatggaacctgacatgacaaatataatctcttatccttactacttattcttttaagacataattttatttattttttaattcttctcttgaaatatattgaaagattcttataacaatttgaatgtagctagctagctagctagggtcatcttaattatttaattattaaaattaattgaaaattaaagtatcatgatatgatgatgatgaactttattaattaattaataatataaatatatatatatatggctgaggttaatttgtgttccatggcacattctaagccaaaactttattaatgattttgctccacttttatataaacataaacatataataagggattttatattatattatatatatcacatgtgtatttatattagatattattaattattatatattgcgtttgggggccaatgcatgtgtgaactctctatatattgttacctaacgatcatatatagtatatatacatgcacatatatattagggttgtacatcggttggtttagtcggtttatactacatattttctaacccaacgtaaagatcggtttgtaaaattctgcatacaacctaccaaattaaaaaaaaaaaaaaaactcttaacccgaccgacggtttgggc

SEQ ID NO: 303214 - DNA, 1554 bp, Cannabis indica
ctgttttagtagtattagaaactaactcatgataaatctccatttgagtctatctcctcgctcctctatttcataaagttgagcctcatcactatgaccttccttccttgctataacttcttctttagtaacaatagctttactgctccctctgccatttgcctttctaccgtcattaggtttcaagtttgattgcttcttctccattgtttgcttacgactaacaacattattattcttcctacaatctgccatgatatgcccatatccattgtaaaacttacatttaactgggagccactcataatcaactccttgttcaatgagctgaccatgttcattcaaaaaatggatagtttgaggtggttcatcagttatatccatctccacaagaacgcgagcatatttaaccattggacggtctctagtaaccttatccgccatgatcgacttaccaatggtgctaacaataacactgcgatatttacttccccaatattgaagcccaagatcatattagacgaatccacaacggaacttatttcacaagacgcaaagctgttaaatcagtggaccaaggtctaacaaggactgtttttttttaatcaaattgcagaactccctcttcaagaactaagttctgattagcatcatctttaaattttacaattgtgtactcaccattcatacgaacaatttgcacaatccctaattttccccatttccatttaagaaacccctcaaacacagtaaaagggggctcatcccttaagaccaagcaaatcacagtagaattctaattatttacttgaatcttaatctcctctacatcaacatgggaaatttgcttgccctctttcccaataggctcaatataagtcaatatattcttaatataaaatttatttgtaatttttttttatcaaattatgtaaattcaaattccacaaatcctccattgatgagtgagcttgggtttaaggagtaatccccagtctcatcgagacgataatttgaaccttgatacaacgagccacgaacctcgtgaggtgtggcttcgagccgcgaggcttgaaattgagccacgtaaaaaaaattcacatgtgcatgggactgcatggtagccatgcacgtagaagttgaagaaggggaacaagacccggttcgggtttgagttagtttaatcgagcaccgagggacctgattggtctcgtggcttgaggaggatgtcgactagaccactaggtcctgaagtcgacgacgtgaagggagaaagcggatagagaggtcctagagctgtatggccccattgacgatggtaacgaatcttaaagactcgactggcccatcaagttttttggcttcctttgccggtcggtcttggtggcttttcaatcgcccaccaactgtacctcccctcaccaccacaagctcgctggagctccaccatcacctacgaccaattttggctagcccgcctatctatacatatatactgcatatatattatattatttttattaattaatcttattattaatttagaaaacaaga

SEQ ID NO: 303215 - DNA, 3371 bp, Cannabis indica
tgaatattatgttcatatatatatatagaacttaagtagagggactagttataattaacgttagactcctatttggaataggaaatgtagagataatattataggattcttttggatttagtagttaccttttttagattttattatttttgacccattactaaatttacgttttaattaaaagatttttgctccttacccgtcaaaaaaaaatggaaaaaagatgagaaattatctaatacaccataatttgtaactttttttctatttttacgttattattttatacttcctacttttataaaacttattttgcataaatataaattaataaacttataattttcatttatacgtttacttatttctaaaacaaattatttccccttttcagcttcttcctccacgcaagagagagcttcacaaggccaccttctgcatccaaacctctcgaattcggcgcatcaaccaccagatgcaaccctcccattcccttactcgaactctctatcgaccctttcttctgttgctcactcatcaaagttatcgtagaagtataaacattatcaacctccttctctaactgatcggagagaaggaattctatttgagtatagtcaagtgacatatgggtcgttgggttgttgaactcgggtccattaccacattcacaggtacgagtttattatttgtacctttcatctatttcatttctcttctcttttcatatttttttttatttatctctgcatatatttgttcctatggttctctacggttgtaattttatttttattctctaattagtgattaagtaattaaatcaatttgtgctttgttctttgaatgctgagagttgagatgagaccattagtatgaaaaatagtcatagtcaagtgattgtctctattttgtagagttctatattgattctaggtctctctaacagggctacgatttagttattattttttttttttttgtaataatcaagtattcccctcaaactccattctttttcctagctcatggattcacattttaagtttgttttgcttttgttcattactttagggatatacattatgaagtgctcccaaaaattcattggctttcataatccgagctctgtctcataatcatttatgattttggttaattgatttaaattttctaataggtggtgaatggtgtcttgggtttcattgggtttggtagtaaaatcataatatgtgattttggaataggttatttagtttttttttctgtttatgatgttatctcatagagaagattatgaggaaatttgaaaaggatggttagtacatgtaaatttcttaatagtttatgttatactttaaatttttccctttatatattacatgatctggttgtagttatatccaataggtataacagttttttttgtgcttacagtctagtagatgtgaaagtcttaaagttattattgtaactactccagggacttattatatagtgtgagatatttgatgttttgaatttcttatttgtgtgtcttgaactttcatttgatttgtttgttgacttgtactaaaatatatatgcacaaacatcatcttatatgggtacaaactttcgtttgatttcttggtcattggatttgcttatttacgcagtagaagaagatataccattagcagcaataatttctattgatgtttactcattagctacttactcacttatactatcttgggagctattttaggtgtctaactttcactttggtgagtgtttggtttcaaaaaatttagctggtcaatgcctaaaattgagttgtttccatttttaatgttatttgtttctattttttatgttagatgaggttaaatgctagttgttttcatttcacaacaaactatagtgtctattccgagattatgttatttccatttcgcaacaagctatgaaagatattgctacaaattttgttttagaacatatccctttctactaatgatctcgtcttgttgtggctttcaatgtggaagtggctgtgatgggggctagcccattttctacttggagataccttgtccatcatggtgttgtgactgaagtggtaagaccttttgttttatttttgtcttccatggtgaaggatgggatctagctttacatttcttatgtacttgcgcttatgaaattatgtatattattagaaaaatattccttttttatttttgtcaatgttccatcgagcactaatgatttttattttttttatgactgttgactctggattttatatctgcaagtgtgacccgtatttcgatgatactgattattctcatcctggttgcgagcttggatttctaactccgaaatgtgctagaaagtgagttgacaagaaccaattcaagaagaattcaaagcattataataataatgcatacataatcaagtccgacccccacagtattatggatgaagtttatatgaatggtccaattgaactttcattcaccatttatgaggtaacatctggtttcatactttttagttagcaatttaaatgtagaaagaaaatgacttaatttccaaatgtacatgctctgcttcttaagcttctctaaaactattcttaagattttgctcacttcaaatgaagagtttacaaacacataacaggataagaaataggaggtcatgctgttaagctaactggatgggaaactagtgataatgggaacgactattgagtaatttatacgctatacctctaactttcaacttttaatgttgtgaggtattatgctgattttgttctttcttttgatgcagcttcttgcaaatcagatggggtgggtgatctaagtcccttttaaaacttcctctatttttagtaaatgtatctattgaaatatgtgacaattttgattttttctttctggatggcaggatggttacttcatgatcaggagaggaacaaatgagtgtggtatcgaagatgatatggttgctggtctgctttcaaagtgaaatattatcaaagaggttgcaagtgctgatgccttttcggatgcttcgtattgattttaaaacttttcatttacactcaatgttcaagcagaaaataaaaggactccaaatttctactagtatcatcatattatactctattagtttagaattcaattattttatttatggataagttggaatttatcttttgtatcatataatgaacacagaagaacatattattggttgaatacctccatatatatatatatacactagatgagagttacgtggcgagccacgtaaatattacttttatataagttctagtgctttttgtttaagaattcagtaattaagcaacg

SEQ ID NO: 303216 - DNA, 2021 bp, Cannabis indica
ttttcaatgtatatttacgatagtttttattataaaaatgaatgatatattaaattatagcgtcttgggactatggatagcaattttagagttgctaagtgatggagtactttttaataataaattgctaaaaatgatatgaatgagaaaaaaaataaaattttatattttaaagtaatgtaaaattttgtggcaatttttagagttgggtggagatgctctgtctcaatgacaaagatcacacacgggtaggtcccggcggctttatttcaattaaaaggatcacaggtcacagtggtcccgggtccactatttcacgtaggagaagcatcgatcataagactaaaaacgaggataatgctacttattatataccacataggcttaataaaccttcattttcttagttttgtttgaaacaccagaacttgtaaacattgcctctttgtgtaggtgtttctgtattagggaataaaaataatgataatttattgttggcaaacaatacgactttgaaaaatggttaatgctagaaattcaatttagatgaattgtagcattgctcacttaatctcagcagactaattaccttaattttactcagaaaatactacacataaatcataaaaaacacaattaattattatggtcaattactccaccaaatatcataatcaaacttccattaaatattcatcatcataagcacgatgatgaggtccatgactacttaactagagtagcagtagctgatcatgaagcttaggggctaaagttagtgatcaacctctcaaggcaaggaccttagaccaagctggcctggcagtgatatcagtcacccaagcattaacatggggccgagactcgaacagcttcttcaaagtggtccccaacaagcactgcaaattaggaagatggtaaagatcagccaaaccaatacattcaccgcccaagtacttggatttcgtgagccgattctcatacacatccaaaaccttctccaatttggcctcgttctccttcaccacagcttggtcagtattcatcccaaacataggcttgtagaataactcccacgacaatttcgcagctgctggctcaaatttatgagcttccacctccatccataccgacgaaatcgccttctccttcgagtttgaagacactaattgcgttcccttttcagagtattcttccgctatgtaattcgaaattgccctagattctgcgccaaataaaaattaaaaaattaaatgaagagatcgatttgatgaaaatagaaggagcgtttaggaaggaggaaacaaaaatggttcaccgaatagctgtaaatctccatccacgagagctggaacttgaccgaatggctgaaatatttggtgagatgagattagagattgatttaagtaaaaagcggaagagagaatattaattactaacattgagggaaatgaaaggtgattgtttgtgagatccggcagacatgtcgacggggacgaaatcgaagtggaggtgtttctcgtaaaggcaaaccagaggcctttgtgtgttggttgatattgggcttccatggagtttgatgatcgccattaacactaccagacttgatgttgaagtgaagaaatatttggaggaagaactgaagaagaagaagtaagattttcctttttgggaggatccaatccaacactacacacgaaaagtacaccaaatattaattatatattgttaaaatttatattatttgtatgttgtaatataaatgtaggatatttagtagggctccaaaaaattttatgggtgggatgtctcggaagcaatcagaatacgccacgtcatttaataaaagtgtgtttggtttgactgaaatttattgaatcattttcacattattttgctaatattattttaaaacttatttttaatattttataattacattttacagaagaaggaatcaccagagaaaaaatgggtgttattagagcatgtttggtattgtttttgttttcaaaaaatta

SEQ ID NO: 303217 - DNA, 2061 bp, Cannabis indica
ctggaattttcctaaaaaaaaaaagaaaaaagagctggaaaaaataaaatcccccctttccttcatcacaatactccaaaatttcagttctgaacccatttcgatttggctccctctctctctccaagcttccgtcggcggcgccacatccctccgactccgaccacccctcgtcgtcttttatcccccatccctctgaccaaccctatctcgctcctccgttcgtctctctctcggacggccattggcgacctcgtctctctctgtttcctctataattaattaattacagagtgaaattcgagatccgctaagctcctatttgaaagtaatcgggtcgaaatagtatcaccacatcggtaatcggcaccaccacccaactccggcgtcttccaggtttttgttctttgtttctgtgtatttttgtctttagtgagtgcgcttctctcttgtgctcaacttggttttttgaaattgggtaaatctatacatgggtatattgtcaaaaggcttggatttgatcaagtttcaggcactgctgtaattgacatgtactcaaagtgtggatctgtttcatatgctcgttatttatttgataagacaaagactaatgacttgatattttggaatgcaatgattacaagctatggaattcatggacagggaagagaagctttactgctcttcctcgagatgacagaaaactcaaccaccctatatcacctttttcaattgagcttccaataattttaaacattttattaatatattatactgtattttgtctaataatactaagaacaaccaattctttgtttatagatttcaccatagttgttaatgtgtgtgtttaattatttgtgcgattgttttcaccatactatgaaggaccttcttcgtctcagcggcgtgagcccgcaaacgaggactggcctgggcatttcgttgaagctctcgtcacccaagttgccattgaggcttctcattccactggttgccgtgctgctgctcttgctctcgccactctcttccaggtaacattttattactagtttttctctcacagtactctctcattttttatagtataatatctcattaatgtttgaattatttatgattaatttgtttaatatacatgctgaacttggattttggatgttttacatttactttggttactaaagtaatagagtaaatttaatgtgtatgtatatttgcctatatagtagtctgaggatcatagaaggggactgttattttgaaaacaactgttgttctgtgagtcttgatgcatcatattctttatcaaattttggaaatgtcactttctcaggatgtaggtttcttctattctaggagaagaaaatatattttagcttcggaacccttttcatttccatagatcttatgaaaagggttctttggccttttaattttccttttgtgtttaattatgtatatttgccaaagctgcttgaattcagcgtaacaaaatagtattaggtgttgtgttttatatgatcttaaaggcattggaaaattttagttttttaaactctattttgtgcgctggtatttgtcactttgtagctacaagatcaaaaacgtgcagtcagggcctctagtgggtaaacaagttctcttcgattattgtgagtattttcattgatttgtgtcttttgctgcaacaacaaattttcttttggtgtgtgttttgagtgaaatgttgtaatatatacagtgtattgtgtacactcaatgacaagatcttataattaaacaacgtaaatatgtttccctgtttattggtcttgtgataatattgatttttctgtattttcttatgtttccagttattcttttatctatgcgggtttggtatcttattgtgtattacttttgagtagaatgttgttaatgcaagtgatgatttatcagggctctattgttagtaggttctaacaccactacaaaaatagattccactaccgacaacacttctacctaggacccttttgtgctttttccaatgacaatatatcttctctctctctctct

SEQ ID NO: 303218 - DNA, 1893 bp, Cannabis indica
ttaagatctatagacctaagaccaaccagtgatattgacttagaaagatataacggtaagtttatgataacttatacaagttcaatatcggaccaatttaatgtatactccatacatccgatacttgcatactttgccaatgccctggaaaggacataacacttatctaatgtgtaagtatacgttatcgctgattatcatgtcaatctaaatccagtgtactgataaatcatgtgacttaaacttttgaacatataatcatgattatattccattgggttgacaacactataatcacgaataaatatatgttctggacttaatagaatttatacattaagcatgtaatcataaaataaattatgtgaaccatgcaacatagaatgatttatgatcttttattaatagtaaatcttattatattaaaatatatattatttagggcataaaacccttaattcctatctgccaaaaattatgcttcaagcgtcgcgacactacaaggtaaaatagaatgatttatgatcttttgttatgtatcatttaaattttgtaatcgttctacgaattttattacacataatcttgctaaaatagatctctctagtgactatgttagagtttggtgatcagatttacctacctaaaaatagtactcataaagtcttaaacactcggaccggacctagacttggacctgacctcggactgggacctgactcgagacctggaccggacttggacctaggaccaaacccagactagggactgaacagggacccagactgaggacctagactcgggaccgaagacctagacccgagactgacactacaagaaatatcacttttaccagcatagttcgctattgcgctggtaaaagtaacttttaccagcgctggttacttttaccagcgcatttcgcaaactgcattggcaaaaatgtcaaaattttaccagcgcacatttgtagtgactaaaatctaatttttaccagcacatttacgcactgggaaaaatcatttttgtcagcgcttttcattttgtgctggcaaaagttctaataccaacgttcatttgccaacacatcagaagtaactttcattttaccatcgcaatacaagcttttcccagcacaaaaatatgctggcaaaagtgacatttcttgtagtgtgaacacgggactcaagacatggacctagacccagacccaagacttaactcggatctgggactgaacctgagactcaaacccaagacccagaacccaggactcagatctaagactgatcatgggacccacgacctagacctgcacctgtgatcgaactcaagatttggacctggaccgaccttggaccagacctaggatatggaccacaaacccagatccctaacccaggacctaaactgacctaaaatcctaatcttacatggacctaaacccaggaccgaacccaactcagtccccgaccccgagtcttagattatactaatagagaagtgatagacaaataaattacaaaacataagatgcaattaatattatattatgtaattatttttttaaaatgattttgtaatgaaatttaataactaagtttgatgtttgaatattaattataacaaattaaatttgcattttgctactctacctctactactagatatacaaaatttgactaagttaggcggcaaccatgaatgactacgtgaacaactagtcgttttgactttggtaagacttaagtcacgaccatgtgcatatacatcaacataatattactaaaacaaatcacttgtggactaagtcatttcaattttagtccaatatattcatctttcctttatttattttaaaaaataataatatatatagatatatcaagtatt

SEQ ID NO: 303219 - DNA, 2136 bp, Cannabis indica
aaataaatttttattcacatataatgtaattaagtactataatgtacataaagttataaatttctctctatatatgctggtttatgcaaaatttattatcatgcattagtatgtgtatacatgattgttaggttaactactcttttaaccctgaatcaataaatgcacattttattgatattaggttgatttagttcataaaagttagtattattataaaattaaaactcatgtgtccatgagtccaatttaacaaaaaactaatccaacatatatagcccaataaccctcgattcaaaaccaaacccttcgagatagctcttcttcggttcctagggtttgaaccacttcgagaaaccctttggaagaacacttctgctagggttagagattcacacacaaatcacaaagaaaaaaaaaatgaaatcaaaatcacagagagattagagttagagaaattcaaacgaatatgaaaaacaccataattttctcaaggttcacccctaaaaatatgggctacatccttatcgagcttgccactgagaaagtcaattttccactatcaaatcaagtatggttacatatatcttcctttgatttcgagtcgcatttgctttagtgataatcaatggtacaaaatttgaatctttttcttttttttccttttacaatgaattcagtcaaactttcttttatttttctttcaaaacaaacatgaatggagcttaactcttgcactcgtctctttctctttctctatctctctcactcactatgcatcttctctctttagctttggtataaaattctagctttgatctagtttaaataggtattttagggtcggttggagaagtctttgaatattcggtgagctggaaattagttgtaaatgattctgtttgaaaaattaaggtctttattttttttctcatgtagtcttgagcccaggtgtaatcccttgtaattgatttgaatgtaatgcttgagctcaataagaaaatttattcttacaaattctacctaaattatcttattgagcgatgataacaaatgtaatctcggtgggtcttagctcattgaccatttaaggtcatccaccatttccaatcactagcaggttccagcaatttttgaacttttctatgggtaccacatagttcccatgtctggagggttgtcctctgtgggaaccatttccatagacacttctccttgtgtcactttttctcagatgaagtggtacttaatctccagatgttttgtcctgtcatggaagacttgaattctgtataggtggatacaactatgattatcagagtatattataggattttcccctaggatatttagttttttaggactcctttaactcatactacttctttgataacttctatagctcaaatatattcagcttttgtagtagatagtgcaactggaccttccagcttacataatttccacatattcaaaagaaataggaagatgtagatcttttggtgtccctatttccaacataattaaaattcatagtatccttctatcttagttggttcttgtgccttcttatagtttagtcctatttttgtagttccaagcaggtacttgaatatcaaattaattgctaactagtgaagctttcctggattagccatgtacttacttaggacactcatagcataggctaagtcaggcctagtattcaccattaggtacattatagatccaacaacatttgaattagattcttgcttatactccatttctttagcagtagcaggacaaaccttcttagaaatttgacaatgacttattataagcttattaatcttcttagcatcctccattaaaaaattcttaataagttttaccacatagtccttttgacataatctcagtgttcctttgttccaattttatttataaaaattcgtaggatcttagttgcaataccgaggtctttcatttcatatttggaacattttatttctgagcagaagagcagtttttattttcaagtagtgtttgatcgattacgtattaatcaatattcagttgattggtctgaagttattgacaaaaaagatttgtctaagacttcctttctttttgtccaagttacttcttgttttt

SEQ ID NO: 303220 - DNA, 925 bp, Cannabis indica
agtctcacattgataatgtatggaaactaagcaccatagataagatgcataggctcctctcattggtaattgattttgagatggaactcccttgcatcttacaatttgaacatggtatcagagctaaaccaaattttaaagagtaaccaattgaaatctaaaaatcagtctaaaaataagaagccgaaagagccacttgtaatccaaggatagtgagccaaaaaaaaaagagtcgttgtgaaccaaaagagccacaactaagtaccataaataagatgtataagctactcctctcattataaattgatttcgagatgaaaccctttgcatcttacaattttaacatacttgctatttataattagttgtgttgatttattttgacaacaacctattttctttatcttaatctacaaaaaattgtatctatgtcactacgataaaaatatcatactttatcaattagttagcattacagagaaagaaaaaagaagtagcttaggattcatttgaaaaacttatatatataaatatatatatatataaatcggatttggtgttttatcttattttatttactaaaaaaatacatgagacatgttaagttagtgttaagttgattgtatcgtgtttaatccattttttattttgtgtcattcttatagatttacttttgacctatacttaatttttgtgatcttaacccacaaaaatttgagtcatgttgatagccacccaatatagtgtttagcaattgttatattgtgtgagggaaaagcttaagtttagcattattattgatgctctaaatcacagcactcctactagcagggccggtcccagcattttgggggcctcgtgcgaaattttaaaattgggccctttataaaaaaaaaatcatatatattaaaactacaattctatt

SEQ ID NO: 303221 - DNA, 1588 bp, Cannabis indica
tattagtcacaaaaactataatttgttatgactaaatgtatttttagtcataataatggttgtgattaaaactaatttagtgacaacttgtatttaaatactatgttttaatcacaagtaactttttgttgtgactaaaaattatatttaatcacaaaaaatttatattataactaaaaaattatcatagttgttcttttttttttttagtgaatagcaatatttttatttaattaaatagtgagattgaagaaaacataatcacaactcacacatgcaagcaacaaagaacaatgtaggtgacatatattatgctgtgattttatcttgattttgaattaactacataaaagtatgtatttaattatataatatatatatatatatatatatgtatagtggcatacaactgtgaattagtaagaagttatttttcttttgttcatacgagcttttgggaaattattagtaatatctttggctttacgaaactatacacaacgcgtacactccaaactatgtcatttatatacgtatattaatctaaaaaataaaaatgccatctatatatttttatttatatatatatgaatgaatattatagtatctaattttcgatataaatatttataagtttaatttggtaagtacatgctgttaaatattaattgtaaattattgtgtataatataattattgattgctctaggttattaaatttaaatttttttaaataaaattaatttaaatatactaataaaaaaataatacgtataataatgatttgatttgatatttaacagttaagtacttacgaaaaaccaaaattataatttaagtattattaatacaaaaaattaaacttaaacatatttattaacaacttaaaggtttttttttttaactcatttacatctaagagttaaccttaattgctacaaattactcaataatatatatgagtttattatatatttatgcctcatacaatatgattgtactattgatttgtacctatgccctatcgtatctataattataaatggatgacatgagtagatgtactgtcttttatttttatttttttacagctaaacttataaatataaaacaaaacaaaatggaatgattatttaattaattattagtgggaatggaggacccatcatattcttacatgaagagaaaagcacaagaggaattgttggaagatatagttagtccatttacaaaaatacaaaattatttagtgttcttctctcaataattatggtctctctaactacgagcacacaaatctagtcaccattaattattatatataattatgaatacttttacaatgcacttttaaaaagagtttatcgatctacattatttatttcgtaattagaaaaaaaaattagtctaattttttaatcgttatattgagttatttaatttaaacattctatacaattttaaaagattcgaaaaaatttaatttgttgaaaatagggttcaaataaaatttattgtacgtatgagactcttttatttatacgcgtgtaaaatagactatttgaactgtatttttgacgtgttattt

SEQ ID NO: 303222 - DNA, 1768 bp, Cannabis indica
attagttaaaaaaaaaaaagaaaaaaaaaaaactactattaaatatttatatacaatctatacatctgtacgattttgttttattttattttatttaattttctatttaaccatgagcaaataatatttaacaatatataatgttttctttaaaacttaaaatctccacgtgggaagtgttatcatacatatttacgtatgctgatgtgtataagctttaaattcgatcttactattgatttatgagattttactgaaagattgaatacatacattatatggtctacatgtatcaaatcggtttaattaaatatatattattataataatataatataatataaaatagttttatcatgattagagagtacatttcatgatgatcagtgcagattaattagttttgcgtaacgcattagtaaaattaacattattggataataatcttatataggatattgatcacaatgtcctagtcattctagaagatttagaaatactattaattatcatatttataaatatgctgcatattaattagctaataagaaaatatacttgaattaatgttttcttatacgaagattagatattgctagctcatgatttgtatggttctagctaattaattagcaagtattatatatataatatccataaataaatcaagagctgattgagcactaataataatgtccctgactcactcaagggattggagaagagtagcttcaatatttttgtacttaaggaattaattaaaaagagtttggtctttccataattatgactacgtctataattaaagaaagaggtccatccccatctaactagaccatatattataaaaaggtgtgactaataagcttgatatatataatcttgatcatctcagcaaaaatgtaattcaaatttctatatagctagctgtaattaatcttgaactcttttaaagagagaatctttcaagctaactttattgaacaaactattatatagttttcgtcaccatcaatacctatatataggcatggcatgaataaaaaaattggagtaaaccaatggagccatgtcctactttcccaatatgctgtgcttaattattatataattaaagtccaaattcagaggccagatgtagaataggtgagtcaccaaagtcacttgtgcttttcattagtttttaataccccatttaccctaaactggtatgctagaaacttctttgagattaaaataataagtcattataccaataaagaattacagaaaagtaagcattttaagattgagtatatcaacacctgttgctatctcattggctcagaagccgttttcgaggagacaccaactacccactagctttctcctcttagatggctcaaatcaacaactttattatttctatatattgttaattttttttttatttaattatttaaaataataattagtgtttttaacatgactgattttgtaccatagatctagtaaactggtcactgaactatacaacaatgaaacaactataatgaagtccctatgtcatcaaatatagttacattaacctctaaatattaataacatcgatcgagatcagataatttcaaattatattatttttcttaaatcaggtttatttgataattgtattaatttttttttttttaatttttttttttaaggtaaaatggtaactttattaataagaagattcaaccattacaatagaaagaaaagcaggaggaacatcatcctcactaaaaat

SEQ ID NO: 303223 - DNA, 4700 bp, Cannabis indica
atgtaattattcttatatagaggtatattttgttaatacgagacttggaaaatgtataactaattacaatttagacgttattcttatttataactgacccaaattgggacttgatttttttataacaaattagaggttattcttgaatcgagtattcttaaatagaggttctactgtaattataaaataagtgaagatcagtttggacatgttaacccgaccaaattgaacaaattattaaacgggtcaaactttttctaaatttaattgggcggattataattaaatatttgtaatctaatatttatattgggttagtaaaaatatgttacaacccgaccaaaccgaccaatgtacaattagacgccttatgaataataatagttagctttaatagaatttttaaaacacaatttttagtactaaaatatgttctattgaactgtaaattttagcatacatgttgttgtgtgagcattgctataaagtattattagtgcttagtattatctagaggtggcgtctattgatattctatactagttattaaattaaattacatgtaatatgatacttaattacaccaataacaatataacatatgtaggtaagtactagacactactaatatattattgcatttaaaatatcagagtatataccatgagtacatttttttctcatgtcttaatttatattaatatatatatatatatatatatattaattgtgttatattatattttaaaaaatatatagtaataaaaaaatatttttagtataatatttggtgttgaacttgaatttgaaaaaaatatatatttacaaatgtggtgtttatgtaaccctatttggtattatataacataatataatattgtgattggaaaagatctagtcttttaggttggttattaaaattaaattaaaataaggattaatgttaaattgaacaatagtaatatataatacttgtacttgtagttttagggtaggcaaaagatttctcatccccaaaattgatttcttttgtccaaaaacccaaataagatctctactttccaccgacgaacttataactattccttattatagcttaggtagattaataccatttagtttttctagatgaaatcaaacaccataggaataatataattgtacatatgtaaatatattgcaataatcctacacaattgtataatcttcaattggcacccccaccacgtgatcttggtttagacatttaatattgtgacaaatgtcaagttaaccatatatttttaacaaaatatataattttaagtattgttgtttagtaatttaagatgtatacacagtacacactataattaatcagcaatttttcgcattatttattaaatcaaatgtatagatccaccctctactgaaatagtgaaatgtgtcccttagatgttgtatggttttactttcgttttagtatacatattcttattaagtaggtgtcaatttaattaattaattaattaaatcatataatataatatggaatggtaatgaaagtgcaggtatggatgtgaactgcggttcttacttacagaaccacacaaaatcagctgttctgaagagaaagcttccagtgtcccaaatagacagagctctccacaacttattcgccgttagaatgagactaggcctcttcgaaggtgatcccacaaaatccctttacggcaacattggtccaaaccaagtgtgttcacaaagccaccaagctctggcccttgaagcagctctaaacggcatcgttttattgaagaattcagccaagctcctccctttttcacattcaaattcaatcaccttggccgtcattggccccaacgcagactccccgaaaacccttcaaggaaactacttcggtcctccatgcaaatccatttctctgctccaagctcttcgggggtacgttaagaacgcggcttatcacccgggctgcgctgacgccgtgaattgtacctctgtcgatatcaagagggcagttgaggtagcgaaaggagctgatcatgtagtgttggttgttggattggatcaatcacaagagagagaagatcatgaccgtgagcacttggagcttccaggtaaacaagaggagctcatctctgcagtagccaaagccgccaagaaaccggttgtacttgttcttctttccggtggccctgttgatgtgtccttcgctaagtatgaccgccgcattggaagcatcttgtgggcagggtatccaggcgaagccggtggacttgctcttgcccaaatcatatttggtcatcataacccaggttggtattcttatggtactgttgcttattctgttttaacatatttgaatgtttatactgaaatatcacacacattttgttgtagtattgtaaattattctaaatttttatttaaaaaaagtacgtcagcatgcattaagttgaacaaaatgattgaagtaaggtatagaatatatcattctcgtaccaataatgtgttatataaagatgtgtatatttgactattgcttttttgtattgtataacgcaggagggagattgccagtgacttggtatccaaaagattatgtaaaaatcccaatgacggacatgaggatgagggcttcaccgtcttctggttatccgggtcgaacttaccgattctacaaaggccccaaagtatttgagttcggttatggccttagttactctacatattcttacaaactctcctctcccactcaaaacaagctctacttgaatctgtcgtcctcttccatagctgtggcagccgagtctcagcagccagactctgttattgtttccgagctaagccaagaattctgtgaaacaaaatcgttttcagtttcagtcggagttgagaatgaaggagaaatggaggggaagcattcggtgttgcttttcatgaagagggaaataaataataacacaaataatggaggcaatccactaaagcaactggtgggatttgagagtgtgaagttgaaagcaggggaaagaggtgaagttgagttcaggttgagcccttgtgaccacttgagtaatgccaatgaggatggtatgatggttttagaacaaggctctcgtgtgttacttgtgggagaagaagagtacccaattcatattatattttgattgttttttttgggggataatatgatacagtaccgagtactctctcttactatgatcaaacattatcagcttcaaatttgttggaagcttttttttcataccgtaatctgatgaatggaatttcaagtataccttaaatttagtaattgggtacacttgtagatcgaaaaaaaaacaaaaaaattaaaataagtacttgggtaaacatgagtaatatactaggtttttaaatttatgctataatttgtgaaaaataataataatgtacgagcaaattgtttcttgtttgtttgtaaaagatataaaactgaaattagaacacatgctccaaaagtctaaacacaggacttgtactggagtgttagaagtattaacttatgtgtgaatgttgatatacacttatacagtagcaatgtaggaataattgcacctgtatctgtatgctgtgtgcttattatttaattgtgaccataataaaatggtcaataaatatattatataactagtcaacttattggtaatatacagtctctattatcttaatatccgcctacacaatccatattgtatagttacatatttggataactaatagcgaaaaaatatatggttgaagacatatcccaacacctctaccacattttatgaccactttgatatccttcgagctttttcgggtatggagttcagtagtacaatgccctgatcctcctcaatgtcctcatcaattttatctctcatcccatgtcggcaaagcctatgacaatcttcttgagttcatctaagttttgatctaattagtgtctttgtagaacccatcttgaactcaaatagcttttcttttctagatagatcttgttgtgtgtaatgtaaaattgtagccacattttaacaaccacaacgatatcttcagaaattacttgcctgacaatattatctgcaaggtagaggataactatcgaacatgcaaaatctcttgctcttcagtcatctttctctggtagcttgcttggatcctccaacgtctttgctatacatgttgattaagcaattctctcttatcttcatccaccgtaaactaaaatcatcggtgcaatcaaatatatcccatcggaactttgttacatctattttctaagaaatgatgttcttgaaaatttcttgatcacaaaacattcttcaatgagctcaaatccaaacaaccacaacctatctctagtaccactgttggaaattttcctttacgacaccaaactcagcaagatcacaacatagtaaagatctaaaaatcacaggtaatgcactaatgcactaagatcaagttaaagctctccctagaactatttttccaatatgaataatgaagaagatgattacagaagtacaaactcgaaattagagataaaaagaacctatcaaactcttttgtcaaaacacaaaccaataataacaacaccaaaaaagtacaaagaaaataaaaagggaatctcatcttcttcttttctttctttctttcctttttctttt

SEQ ID NO: 303224 - DNA, 2025 bp, Cannabis indica
atttagcttgtcttgaataaggccctcatcttaatcttaatcaacaactcgctcttctcaagcccttcactaacaaggaaatcaagcaagttcttttcagcataccagacacaaaatcacctggagctgatggttatggatctagatttttcaatcaactccagcctgacttgggagctgaattttgctctgctgtgaaggaatttttcagtacaggtttcatgcccatagagcttcactcaacacttatttctcttatccccaaacatgagaatccaactagttctgttgattacagaccaatagcctattgtaccatagtgtataagtgtatctcaaaattgttatgtactagacttgcaatggtgctaccaaatctgattaatcaaaaccaaggagtgttattcaagaaaggttcatagctcacaatgtgatgattctccaggatcttttgaagaattacaagaggaaaatgtctccctacgatgcactatcaaaattgacattagcaaggcttatgatattgtaagttgggatttcatggaggatttgctagatgcttttaacgtaccacataactttgtttggtgaattatgggatgcctcagatcaacatcctattctatagttatgaatggtagagttgaaggtgggtttaaaggggaaaaaggtttgagacaaagagattcaatctcccctctcctctttgttcttatcatggaggacctcactagaagactccatatggcaactgctcattctagctataggtaccatctttgttatgtagatgatttgatcctattcattaagcactctaggctctcagttatggctctataataggtgcttgatgattttagcactatcttaggcttacatattaactctagcaaataccaaatctactttggaggcatgaaagccaaggagaatcaagttgttattgaaggttttcaactagctgagggtacttttcctctcaaatatttgggagaccctctaaggctgacaaagtgaaaagatgagcactgtgggatcattatcaaaaagattaagcagagattgtatacttggttgagcaaacatctttcctttgctggtaaggttcaattgatacactctgtattacttggcctttgacattattggatgagcatctttgtttgtcctcatattattactaaaggggttgaaaagctttgccgggttttttttggggcatgaatggaaataggagtaagatccacattacttcttaggagaaagtttacctttcgaaggcttatggtggccttggccttaaaaatgcagtcaaatggaatcagtctattcttgcgaagtatttttgggctatttcaacaaagaaaaaccttctttgggttaaagtacttttagatataatttatgagtaaattatgaattatataaattatattatgtttaaaaatagtttcttaaaagttcttttgagagaagctataaattttaacttctaaaaggacttttaaataaaaaataatgtttttaatttttatccaaatacttttagaaaaaaataattttagaagctaaaaagtaatttatatagaaactaaactaaattgggtcgatattacccaagactaaaagtaatactctttgcataattgtcattattattaaatataaataaatatatttatattaatgttgctaatttaactcaaaattatttatagaactaaaagaatattgtgagtgggaaaaaggaagtgattttcatttccatatcataatatggatgcaagtgtttgtaccctgtgccattatgccgttaatcggaggaaacaaccctgcattgcttagtcacttgcaaggcggttcaactatgttggaaccgtgtaggaattggcacaactccaacacctggtgcatcatttctcgaccggtgcatcactacttttcaagcagtaagttcggagcagaaaggtcttatggctgctgtttgttgggctatatggggagcccgaaataatctcgttt

SEQ ID NO: 303225 - DNA, 636 bp, Cannabis indica
cagatggctaactccttattcatagcttacattacattacaacattacatctcctttttcatttttttgttacttaaaaataattaatttaaaaaaaaaaactatctcattatcatgtaccaagccaattaattacccacttcatctaacaaaacatcacgttaagaattattaaagtcatgcatatatattttattttttattctttgttattatgttacatatgcaaccatacaaaatttgcccatactgtattatgtgatgttgtcaatatataatctttcatatataggtcaaataacaaaatattggaaaatgttaaggggctttaatgatggatcccttcgagttttcgatatccagatacttttaatttaaaaattttgtatgaaggtgtacaacatatttaaaatatcatgcaaatttttaaaaaattaaaaaaatttaatcgtgtcgaaaagtaaaattcaaacaatttgttatactcgtgtctcttttattttatacaaaatatacaatttaaattttattttctacattataaattattttaaatttttctatttacagagtatctcaaataattaaaatatctattctatataaagtatgcctatataactgaaattcttggtt

SEQ ID NO: 303226 - DNA, 1219 bp, Cannabis indica
ttattaatttctttttctggtattagaatcactgcaaatcaaggtttttatctcttgggactgtactatgcatctccaacttttgcttcagcaatgcaaaactcagttcctgcaatcacttttgttatggcttcagctgtaaggtaaatgtagctttgatataattgtctttcttctttaacttgtaaaaagttattttactgaaacttaattgaaaattggcagaatcgagaaaattaatatcgcaaggagagatggtttggccaaaattttaggaaccgttgcaagtataggaggtgccactgttataactctttacaaaggccctcctcttttgcatcaggcagagaatatacatcgcaatacatcagcagtggagattccaaaaaacacacagaactggacatggggctgtatatacttgcttggacattgcttatcttgggcaggttggatggtctttcaggttagcctactgttctctaggtcacacttgaagagtgaattagatcaagacaattagataagttttattatgtcattttgttaaaagctaaggctttgtgtccaagttgttttccctaatttattattgtcgggaagtgatcaactcactcatttctctacgttttgttttttctttctaatccaatctcacttgccaaacgtcgcctcgccttaagaaataattagttattatagacaaatttgaaaaaggaagaccgcctacttatgtaacttatattgtttaaataatttatttacaggctcctgtgcttaagaagtatcctgcgaaactctcacttacatctttcacgtgcttcttcggattgatccagttcatgatcatagcagcttttgtagaaacagacttagagcattggaaaattcaatcggctgaagaagtgcttacaattttatatgctgtaagtagtattactattacttctgtaaactatattccctttatgtgattatgatatccatatatacatatatatatgtgcatattatttttgtggttttgttcaaacttccaattcctttttctttcctcaggggattatatcttcagctgtagttatagcccttcagacatggtgtatccagaaaggtggccctgtatttgttgctgtgttccagcctctgcagacgcttttagtggctattatggcagctctaattctcaaggatcagttatatgctggggggtatgcag

SEQ ID NO: 303227 - DNA, 3041 bp, Cannabis indica
taattattgggtttatttgttaacaggagatcaaacgtaatcgttaaatttaacagaatatttttttatttttaagtatattctaatattctgttaaaccaaaaaatactgttagatagacacttttaatatataaagatatataaaaaatagatataattattttcaattttccctttcaattaattttcttacaatttgccattagtttctccctcacccggtggtcccatattatataaaaaataatttattttcactatacatacaatatgatgctatataacatatatatgcatgtttttataacccacggtgatatcaaaaggagaaaaattacaatgttttctccctaaatggagaagagaagttgtcgttataggctattgtcatcgctaaaatatcgttgcaatagtctagttgttaaatgctcactacatcgatgtcaatttaatgtcgttgcaatatattttgtgtatttttctctgttcagaagggtatgtagatgggttatgtaaagacgacatcactatagacgcgacgataatccttcaattgagtttttaatcatataacaacaatgtcattgctataggtggcagtaaaattttataattgaattatcgaagaaaataattgtgatatttccatatatagtggtaaatatttaaagacattgtaagatatgatatttttttagaaatgattgactcttctaatcatcttgcttagggttcgaatcccactatagctcatcaccaagtgatctccttcttttgatttgtaaataactctttttcctaatttattttttggaccaaagttgggagcattgggcgacgactcatctcgcctcgcacaataatatgacatgctaatatgcaccaaagtaaggagcattggacgacgactcatcttgcctcacacagtaatatgacatgctaaaatgcaccaaagtagggagcattgggcgacgactcatctcgcctcacacagtaatgtgacatgctaatatccaccaaagtagggagcattgggcaagactcatctcgcctcacacaatatgacatgctaatatgcaccaaagtagggagcattgggcgatgactcatcttgcctcacaccgtaatatgacatgctaataaacaccaaagtagagagccatgggcgacaacccatctcgccttcccttaggtttggccaatatagtgacgaaaataaagaaattgagctcaaattgagactgaggcagaggattttattctatagcctaaaggtaaatacaaaggacctctcaaatattgccaagtggcataacagaaagaattaagagaatattctctctaatagaatggcacaaaaagcaatagcgtgtaatcttatttgtaaccgtacaccaacaacttggggagacaattatcagctttgatacagagcaatacatgtacagtgtagcaacattgattagtgaaggctctcaacaccacccctcaaacgaaggggtgatagtttcatcccaagtttgtccattaagaacctgaatcaagagtgagagtgaccttttgcgagacaatcggctatttgatctgatgatggaacatatctgatttcaagttttttcttaaatactttgtccctgatgaagtgaatgtccagctcaatatgcttggttcaagcatgatatactggatttgaagaaagtgcacttgcattttgattgtcacaccatgtaacaaaggtacaaagaatcttgaactttaattcctttagtagagattcaatccatgatatctcagaggcaacatttgcaagtgctttatattctaactcagtgttggaccttgagacaacaacttgtttctttgacgaccaagcaaccagagtatcaccaaagtacacacaataacctgcaatggaccttctatcgtctggacaacaagcctaatatgtatccgtgtaactaacaactgataatttgtcactaggaacaatgtgaaggtcatgttctattgttcctttcaagtacctcagaacacgtttaacaccactccaatggctagttattggtgtttgtaagaatcgactgagtttatttacagaaaatgcaatatctggcctggtatggcacaagtattggaatgctccaattgcacttctataggttgttgggttctacaaaggttcaccatgagattttgagagaggcttgccataaatcataggagttagatagggttttaaattcagcatatcatatttgtgaagcaaatcagagatgtatttgctctgtgtgaaatgcattcctatatcatcttggcgtaattctattcctaaaaagaagtgaagtgttcctaagtctttgagatcaaaattcttgttcagatcatttgtaaactgcttcagtttggtgtcatcattacctattacaatgatgtcatccacataaattagaacaagaattatagtctcgtttgtcatgtaaaagaatagggatgtatcgaccattgagttaacaaacttctagccaagcagtgtctttttgagcctatcgaaccaagctcttggagcttgtttcaagccatataatgacttgttgagtttgcacacatgatttggttttctaccatcttcaaagtctgatggttgaagcatatagacatcctctgcaaggggtgccattcaagaatgcactattgatgtctagttgtctaacttcccaccccttgctgatagaaattgtgagaatgattctgatggtcgaagcttttattactggactgaaagtttcactgaagtcaatttcgggtctttgatgatagcattttgctacaattttggctttaaagaattttacagatccatctacattccttttaattatgtatatcccaattgttttcccactaaattatagtgagatgaatatggcaccagtgtgtaggcattgtttcgctttcaaggcaccccatctcaatgttcatggcttgattctagactttagctttcaaggcctcttcaatgcttctagaattcctcttcaa

SEQ ID NO: 303228 - DNA, 3778 bp, Cannabis indica
taaacaactgctaatttccaaattaactaagcgggctttacataaataatacaactgaactagagcctaaccatctcaggattgagatcatttgatctaagatcaactaggtgatattgaattgaatagataatacagtaagtttattatatttgatccaagttcaatatcggtccctttcgatgcatactgaatacatccaacccaagcttactttaaccaattccctagaaaggacataacatttatcaaaggtgcaaggaaactacattgtagattatcctatcagttaaacaccgtgtattgataaatcataggaatacatttaatcacacaatgttgattactttccactgtgttgaaacacaataaacaagaatatcaatgtgataagaattttgatgaatttataaatcaaacaaatgatcacatgaaccaagaaatacattaaataagtaatgaaaaaataaatctgttttctttattaaaattgaatataaaaaattacattgaaatagagttttatttaaggtacaaaaccaaacagctataatgtattttatatggtgtctaataccacatgcctttgatagtgatgatataatacttaaaagtttaatctaagttgtttaacattactacttactaattaaattataataagaggaaattacttattttatcgtttttgatgcaaatgtgtgtaaagatatatcttttttttttcaaaaaaattgttaatctattggattttttttttaaaattaaaatatatgagatttttttttgacataaaaattgttaaggcaactagttactttctcagggtagctagttacacttgattggagagatacaatatcaaaatacgttttcaagcaaaaaaaaaattgcttatgttggtcaatagttcattgaaggatttaattaaaaaacattttgaagacaacgtttctttggtaatatattcagaagttttaggtaatatttgattagagggaatgaaataaaatagaatagtttttattctatttttttatttagttttattttaaagtattaaattggtattttgttctagttatgtttttattcattctaactaaatgctacttactggggtgtttgttatctgactttgagttggagaaaataaaattggagggagtagacttagaaaaaatataaaatccatgcctttgaggggattaacattagcacaattataattaaaaaagtaagacctacttggaaacacaaacatcttgttattcaaatttaatttaaattttacattcccattccaatctagtctaaatctcataccaaacgtctctttagtatttaagagtgcgccaatagaaaataaaagtgacatgcaagatttttttttctcttttaaatgtacaacatatagtacactaacaattagacaaaaattacacttataatgagaaatacaaatctataaacgatttatattttattacatcaattaagcacagtaacatttttggatcaataatctaagagcaacttgggagaaatattacaatattacacctgcacttgtatgtagcagtaaccacaaacaaggaggattaaatattatgtaaatatatacaataaatatgtacaaagtgggcttggtagagtttaaaccccaaaccttagctttagaaaccaaagtctctactcccccacccaagaccaagagtgatgggcattagagtgagttgaatatagtaggttggcattgttttaagttacatgcagtgtaaattaatgttattgtttagcagtagcatggtcccacgcaaattttcataggaaattgtggcttctaaaactaccaaaagtatgtgtagtgtgttgtagagttgattatgttataaaattggtcgaatttcaaagtggtcaaaggaagaaaagagaaaaaaaaaggttcatctaatcataatgcaagcacaataaaacttaccgtgttactctttctcccctcagctgtatgggcaaaaggttcatttttctgtctcaaaccacttcaaagaaattcaattttcccacttggccgccttgatgatttcatttaattctagcctagctactatcatttctcttttggtgtttcatcaacttaactattcattcttgtatacattataattacagttttacataaacactagctagctataggtaggagaccttgtgagcatgatttaactacatagttacttcgtttttaaataaataaataaaaaaaagcatttttgatgtagtctcttacatggatattactagcacacacaaaaatatgtgcgattttactcacaatatagcctaaaatttatcaaaatttgttgcaaccgctatgattgaaattacattcttaaagggttaaactattgctgtaaatacgggtctggttttttaacacgacacgaaatttacacgagtttgaaaggtacaagcatgactaggcacgaaaaaatacaaatttgggcacgacacggtacgagaagtacgaaacgcacgacactaaagcagaatagactagtccaaaaagcacaaaacacgacaagtctgaaaaatacgacccgacatattaaaaaactttataaatatttaataagatttcaattataaataagttaaaataataataaaacttaaatataattcttaatattttaattctacaatttaaattattaaaacaccataaattagattatatattaatttattaattaaatgtgatataataatttgaggtatttataagtaaatattgaaattttaatttaatatttttgtatgaattatcggtaaaatattgttgatcaaaagttatataaatataattaaaattttaaaaaatatatataatttagtaattataaaataaaaatatgaaaaattaaagtaccaatttaagtctggatatgaaaatagaacctatttaagaaatactgggtgacacgagcaaagtacaacactaatctgagctcgacatgaaaatactgagcctacgggctgtgttgggcctatcctttaaaatgttagcacaacacaacacgatccatatttttctatagtacggcacaacacgacttgttttttaaaaaacacaaatcaatacgagttgtaccagtacgacacacacgaacttagaataatagattaaacactttattagtggacatacataatcacatccatatacaaaaaattattgtatcatatatattttatttaaaaaattatttggtacgtcttatagaagaactatatttctcattgtcacataaagttaaaatagatatttatgtataagaaacatcaaagacagaggagaagaaacacaaaaattcaagcatgtcgacatataataaaaaattcatctcacacccatcaaattacagaaatatataatattaaatttagaaacatacaaaataaaatagcagctaagaataattcaagagaagccacaatatcacaaactcacataaaaacttgtaattttttctttttggaaatggtttaaaaacatgattttgaagaccaatataataataataaaaggagagaaaaagtattattaaataaaaaaaaagggatagaaaatacaattatgtgaaattgtgaatataagaaatataacaaacaaaattaaaattgtgttactgagaaaaagttgagaaagtagtagattgtaaaaggaaagtaatttgcaagttacaacaataattttaaggctaattagtaattt

SEQ ID NO: 303229 - DNA, 1980 bp, Cannabis indica
tctaattttattcaattttactatttcaatgattgtttatgtactaaaccatgttccccagactttgaaaactaccaaatcatgcccttcgaactttgacatgcactaaattatgcccctgaactttcatccatattagacttttttactaaaattagaaaaagtccttaaatccaacaatctcaatagttcaggggacatgatttggtacatgtcaaagttcaggggcaaaaatcctaattaaccttcttataatatctttaaaatatatttactaaattaaaaactttacctttttaatttttttaataaattttattttaaattactatgtacacatgtacacataaatacatataaaaataaaaatataaaatataaaacaattaataaaatatatttagtccataaatactaaagagtattcctaatagaaaagctaaaacaggtttgctaaaatttgaaagaattgtataaatgatgaattttagcttgacttttgtaatgccatgaaggatatcaaaccaacattggataagacaaatgcaacccttctttacgcttttccttgtcacgtacgtagaagaatgagtagaatatatgaatatagttttttttctatttatttagtcattatttcattaaaggttttaaatttgaaaaggccataagtgaccgttagattttgtccttactagtttcttttttatgtgataatagataggataaacaaacttggatcagctgtatatttagaacacacacaaagttatgggtcctatacctatctctcacattgccaaccaatcatatgcattgatctcaatttgcacacatatttttattaattaatacttaatacccatacattattttcagttttgtgatttttaagacataatatataatgtatatgattgtggacagtattttcatatataatttgaaagtcaagttcatagaccaatatttttgtaatatacacatttgcacggcataatgtagggattattttgtttgttatcttatggttccaattacttaatcataatgtggcgtttgcttggaatctctcgttaagtctttctgtttatgttattagacactttttctaagatatatatagctactttttttcattaactttaatttttgttattattacaagtttatcatctaaattttcagcatggatcattaatttatgttgttcatgaattattatataagctctcttaatagggaaataagtggtacaaaaataaacttacaggtcactatttatttatagggttttggtcactataatttgaagtccaacactcacatcactctctatgattgttatcaacccataaataagtattttatgggttacagaccttgggaataaagcaggacttaaaattcattaagtgccaaaacgttttgcaatgttttttaaaaattgcacacttctccagcacacacataaataaagttttggaactctttttcgacttatcttaactttcatgttttcttattcattttatatgattcaaataagattactaacctcttacatctatataatgataactttaatactcatattaatttgtatatattatacttaattacaaagttatgataaaagagttacaaatttgttaccaactcctacttttatgttatttaaacatattaaactatataatatgtaatttaatcaccatacatcaatatatattaacacattaatatataagaatattagcagctaaaatacttgagctataaattttttaacacttaaccataaaaattgaaattttgatgacaaaacttactgaacccccattccattttgggatattggcggctaaaccacctgaactttatagtttgtaacatttaatcacaaaaaccgaaattttggcggcataactacctaaactctggttctgttttgctctgcacacctccgtccaaaaatca

SEQ ID NO: 303230 - DNA, 1532 bp, Cannabis indica
ccactagattaaaatgtgtaacacacttgtaacatttatttaatcaatcaaaatattatatcaaaatataacagtttaaacatttgaggttatggatgcaaatccataatcaaccacataaatatttttcaacagctaatggtaatttcttgggtaatctcgctagaaaggttgtgagagtggatttagaagatgatatacttttctcatggtgtaagtttatgaaagtgcaagttgatattgattttgcaaaaccactgacatctggatgctatttcgacttagcaaacggtgagaaacgatggatacagttcaagttcgaacgaataggaattttctgttataaatgtggtgtgcttggtcacttatgatgggaatgcaatttatcttcaccaatgatgattgcgaatcgtgagggcaaccctttccccatgtttgtcccgtggctctccactgcttcaatgtatttggatgtattctcaggtccagtttctagttttgctcgtggagcattggcctcggcttcggggaagtactttcgtgatgtgactctgttgaaggcagtcgacggggttgctggtgttggtctgaaggtcaatgctcgtagatcaaggagaacaacgatgatggtgacctctcttagtcacgcgaatgctaattccgagaagcctgtgcaggcggtgtggcaccccaagaccgtacctgatgttactgttcaggcaatagctacttctggtaataggagtgaggaaggtcatctgttaggagaaaaggctcctgagaagatacccgttttagcgattgaaggaagttaccgtgcctcgattgtgcgttgaatttgaatgtaggaaatgaagtgggttgtgttttgggtcatgggccgagtatgttgggtcgaatgtgatatctaatgtgcctatgaccaattctaatgtggtagtggggcccgaagttttaagtggaaaaattggtaatattgagagtgtggaggaaggcccacttcatggtgggcagtcaaaggcccagtctccattcgaccaaagcaataatatgggccccaaagaattaattaaggacccacctggtgggcttgtggccgagaatagtcaagatgaggaaaaggctttgtctctctttttttaagggccaagaaactctcttacatgatcttaaacattttgggaagatggatttatttgagattaggcaattgggaggtgatattggtgtgttgactacgtcggaaacaactgaaagaactacaccatttaagaaaagaaaattgtatgatgccccttattcggcttgctccagaccacagaaaatactccgaatgcactcgggtgttgtacgggacttcccttgggatcctaaggatcaggacttggaatctaaggtggcctttgaagaaccctctgatgatatctttagttccccagaccgcactgaaggagttatgaagaaccctctagttggttcttttttgattgaagaatctggctccagcttgtctgctcactctcatacccctg

SEQ ID NO: 303231 - DNA, 1677 bp, Cannabis indica
gtaaaataattccaacagtgtcagcataatagcaataagaaatattttattgttaacctctcattgtactatatatacatcattatatatagtgaaataatgagtacatgcgggcacaaccaacacaggatatagctctcttaaggttacaaagtaggaatcaaagatggcaaatctcaagtgttaagagatgctatagtgggcgtgagtgagagagagtgaagtgagttatcagacttaattaacactttatgacttacgacttttagggttgagttaaggctctttatataggatagcttaaactaatatttcataaactaatattttagatcctataatgatacttcagtaaactaatattttagatctgatatagctctctaaagggtacaaaataggaatcaaagatggcaaatctcaagtgttgagagatgctatagtgggcgtgagagaaagagagagtgaagtgagctatcagacttaattaacactttatgacttagggttttaaaggttgagttaaggctctttatatagggtagcttaaaccctaattaacaaatattaaatacaaaagactaaaatgccccttaaacataagtattttctatctactttattgggttgttaaggctcaattcgtagtacagcttgtagtccacatgtaaggctgtgcaccagaatcctgtcaagtttaatcttggacggccaggcacctgtaggaagctgactagccggccctgtgctatctagaagctattggccagcccccttgaggtggctggtatgtcacatgtcgtcctgtttgagtactgggatccccattggcttggcaattgacttgacctcgttattggtgagctgtaccactacgtggcgctgatattgtccacgtaagcatgccactttaggtgggcaaaaattgggataagaggtatgttgactctcgttttttgaatcatgtatgcaagttaaataaagctttatatgatctttagtaggctcctcaggcatggtttaacaagttaaaggaggttctattgtcccttcatttccaaaatttaatttcagattcctctcttctactacaaacatgttggtttcgaactttagctcctgatttatgttgacgatattcaattgactagcaataaccatcaacgagttacgaaaatcatcactcaacttaaacaattcttctcactcaagtccctcgactccatgaactatttcctttgtttgaaatcactcagggagcataagggatttacctttcccaaggtaaatacaacattgatttgcttaaaaaagccaacatgctaacttgtaaaccaagttcatctcctatctctctaagtgaaagactgaacagtagtgatagcaaattgtttgatcaacctaccttcttcaaaagtgtacttggtggcctttaatatctcactcttagcaaatctgacatagcttttactgttaataagctaagttaattcatgcatagtcccactcatcatcattattttgtttggaaaagactacttcggtatcttaaaggcataattgggtaaggaattatattgaagccttcaaatcattggtcaatagagtcttttagtgatgcggattgggttgttctgttgatgactgttgaccgaggttttcggcaactattaaaat

SEQ ID NO: 303232 - DNA, 2161 bp, Cannabis indica
tcaagattaatttcaataaaatttgttggtattattcaaacatacctcaatatagcttacaattgcactagtgtctgatccattgggttctttcaaggtagaaagggcttcaaaaatcattgtattgtacctgtattaaaatagcattatagaatcagaaagtgtcaataaccagaaaaaataaggagtatcatcattagagtagagagactggctatttgtatgatgtgaaagcagaaaatagtggataaccattgaagtcaaatagaaagcactgcctttgttcaatgaatcaatgtttatttattgcacatgtccaataaaatcaatagctggtacttgtttcaaaagttcaggtgttaaagcttctacataacttctgtagaggtgcttgaatcaatgagaaaacagcagtaaagaatagcacagagaaagagagagatccgacgggagacaaaagcatgatcatgatataaaattccctccgaatacaaaaggaaaataactatcctctcgcagaggtaactaagacgttgatttagacactatcacatactcacatctatgtttcccactactaaaccaagaaaacttcaaaatctggacacttagttttctgttaattgagcttttcgccgagttctcttagaaaaatgacatcatgtactctaaggcaagcaaacggcagcaaagccagcatgttggatcaaggatcagaacaaaaatgtactttttacaaatctactaccttattacttcccaccatgaaattacagaaagtggtgagcccaaacacttgatgttagagggtctaaagcctaaggattcaggtcaagtaagaacctttatctaagaagcatatcttagttttgctaaataagtggcctaaactgcctttggcttgacacacattcactacagtctctctcttcctcacagtctaggcagctatgcaatcatcacagtggtggcatgctgctaaattatcttgctccatccaaatcatatacataaatcttctcactcatcataccacaccatctcatattcaacaaaatttccactgaagtaacctgcataatctctgctacaaaatgtattaaatagcaacatatggatcaggggaaagaacaacaatcatacattgaagagttttttccatctggcaaagctttggaagaatcatccgtgcttggaactgctgcggaatcacgggcagctggagcagggacggcggtctgtggagtagacacctgactagcaggggcatctgagttagctttagctttcacggttctcgacttttccctgggaccttggccattggcactacaactcatattccgccatttgtcctgtacacccacaaaacaattttagcaccataccaccagacaattcacatcatcaatacacagaaaattacactaattttattgcaaattcacatcatcttcaacatactagtacataaccagaataagatatcataagttttgatagaaggggaaaacccaaatcaaactcaaacttcaggaaaaatgccttccaactctttttgggttactttggaattaatgaaccaagccgggagtgacttcttcaacagctattataaaaatcgacagtatacaaattccaagaactgcccatgaaaactcttcttgattatgtataataaaaagaaaaggtcaagccttttatgcccaaaaagaagacagagaaaaaagaaaaaaatcggagaccttgagatcaatattggaacgattgacaagatagggattgaactcggggtctctctgaatatccttccactttccagtcccatgctttgcgactcctgctcttagagcttcttcttcctccgaagtccacttctgcttcggattacccatgttctcttttctgtttctctttctgtagttgattttgttcaaagtctaaacaaataaaagaaccatataatatattccagctgaggtgtggagttttgatggtgctccccgcttcagggggaaacaagggttgcttgcttcttactttcacggcccgcaaccattagagtccgagtccaactccaactcgggcccccacttccatcaacaaatatcttttttaataaatgatgcaattttatttatagcaatcaattaaaataata

SEQ ID NO: 303233 - DNA, 1464 bp, Cannabis indica
cttaatagtttagggggaatttttaacggccaaaaaagttcaagtggcatgatttagtacatgtcaaagttcaggaggaaaatttgctaattagcttaaaaattatatatttgtttaaataaaaaaaaaaagcaagaatcttagaaagcaaacctttgaccttatattccttttattgttgtttcttatcaactaactttcaaactgtagaggaggattggaataatattcttttaggtaagagcaagtaaacacttcgaaggaggtactttgcttcttgaagctaatgtatgtttgtgtgtgtgtgttagtaaaaaaatggccaaataaatgaaaggcttattatataatgaaatcaataactacgattcagtaggtcaataagtttcttctcctcaagaaaaggaacatatataatatgtgaacaatacttatcgtcgtggatcacgtgcagaagaaaaggtgataaaatgggtccaaaatagttaaggggtatcgcaattttaagccaaagtggaatcgtgggcaccacttgttccacgtatggcactcaattcttagctgtaaaccaatagataattacttaagaccaccaaaaattttgagaaccaaattcgcacacaaaacatattgtgttgtgtttctttgctttatttaatcgttttctttctttctttgtttctttttcaagaaaaaaacaaataataaaaataggcgtagcaatagtcccttaattgaggaatgacaccaccaacttaaatggcataaaattatcttcaaggtatatatttgaaagctatagttttagtttatatccaagtgcccgaaatggaataattttccatttaggatgtttatgtgaacttcaatttgaaaattagtttctccctagttttatttatttttcacttcctaaaaggtccaaaatcgaccctcttaaaaggctataagttcttgtccttctaggtgttagtgggagtaccactattgatctatctaaatgggcctttacaaggttgatgtgtctgaatttctggtcaaaaaagatgctgcggttacaagagaattttctaagacatctttttcgtttgagaaaatggggcaataagcatgggcaatggtcaaccaatatacgccagaataatagaaaccaaacaaggcctgggaatatttagatttaagaaaaaaaatatttgttccctaccagaaaagaataaatgtgcagtgaaagggttgtggttgtggatttagtatccccaagcgaaagtttactttagaaagaaacgaagaaaccatttcttacttcaacataaaagagttgctctctaaatacggaacccagaacaaggttgtcaaaaactaaggtgaaaatataaataagtgtgcacacacacattgctattagaatgaagtaataccttacaaacggctagaaatattttaaataattattaaattaaatta

SEQ ID NO: 303234 - DNA, 2782 bp, Cannabis indica
attttgaatattttccacccttttctctctaaccaaattgtccagcagagttccataaaattagagcttcacagcctctttcctcaaatgtttttcacaaggaccacagtccttttgaaaaagatccacgatatgactaggactcatgtactggaaattaaactcagcttggctacacaacataacttatatggtaatgaattgctgcaaagaacctcttaaaaatttgacagaagtaatatcaaaagattttgagttaaaagtatacatcaattcaaatagataccacaaaattatcttaccaaaatctcaaacagatgacatcgtgacagataaatagataaaaggaatgaccctcatcccaaaaaggagaaagactaggtatatatatactactgagtcatatgcataagctaaagacgaatatgaaaatgatgattagaaattataaaagtgtggtaatataagcatacaaacatatatatatataggatcttcatctgcgttgtgtatcatataaatgtatacgtgagagaaggacataaatttaaactcacagataaattactctctttgattttggatcacatctaactcctctccaacggcatgggtcaggatcctccggtctccactgaagaaggacgccatttgaactaacaactgatgtcctaaagttcaaaagtgcctcacctataaatcatataaggggtttaatataacaaattgccagttaaaatagagaggtgataatgcataaaatatggacatgtctttcagtttcacttgccaaatgaataatataaaaaacctactgaaaattcaatacaataactataacaaaaatatgtaacaaacatgtcataaaagttctattacattgtaaacatgtcaagagctaaaaataacagtgaacctaaaactaatactctctaaaaaaaatggacaaatagcaaccaagacgtaatctcaccatccggactgatagctctgcttgtgtttattgaaagatagagcagtagactgtaaagccacaagccttgccatttcaccagacagaggcccatagcggtactggtcaagcatgcaatatgtactatacttcatctgatacacagagctttagaatgttttcctctaattgatgttgacatccagcagctagaaacaaagataaaagttcctgaaagagaaaaactaatataaatatgacagcaaaagcaaaaacttattccagaaagctctaaatagattagctccgacaaaatcaatggtaaaagcattcagttgcatacgaaaggttccaaaagcttccttcttttttctttaatcttccttctgttttctctataattaatacagtgcaaatgatatgagaataacaccttccccaagtgtctcaagagctatctcagtaccctatatatgcaaaattaaacaattttctaagaagcgccaagtataaaatctaacactaacacatagctcatgcagatgattatttcataaacttcaccatcagtactgtgcacagtattttcatacccaagactctcaaatgcaccatcagaaaacctcctaagataaaaacgttaaattagacccattcacaaacaaaccccaaccgctcaaagctacaaatgtgtaaatcaaaaccccaaactttttagtgaaaaacctaaaccaaagacatgaaaaacaagaattaaaataaaaaaaaaaataaaaaaaaaaaggaaaatggagagtgaagctgtaatagtcaagatttacccagagaaaagtgaaagatcaatgaggaaaaagcaggaggtgttggatccgagtgaaatgcaacaagttgagctgtaaatcagagagaaaagtcagtagtgtagcggttggggaggagcagagcagagcagaagctatggaaaattggaaatgaaatgagtcttcttgttgggagttagagagagaaagagagattcgagtgaagagagagagtgatgggagtgtgtggaaaataagatgggtatggaattaaaagaggcatcacacactaaccaatcagaacacagtagcttacgcacgctgaccttccctacgtgtgcgaccgaccgacgcctctttctctctctttctcttctcttatctctcaccaataaaccacgccatttatagttttattatttattattattataaatatgtaaactaataagtaaatagatgtaatgtattaaataaaattaataaaaatcttgccttgctgtctgtgtctggtttttgttggattccctacagttttcgaatgatgcactttgagcccatattctcttgaaattaagaacataaatgtacgaaaatgacttttgactacatttttagtagcaattcttttaactagtttttaccacacgtgcaaatcacgtgtgtatgtgtacatatgtattattattattattattatttattagagctttgataattttttgagaaaatattaggttaattaataaagggaaatttatatttcttactatgtttatttttaatatcattatattaatgccatatattttataatttctttttgaaaataatatttatgtaattttttttcttgtatataagatattgggtgattctacaatgcacccccttaaaagagatgtactgatgcacccttaacttgtttcggtatctagaaaaatattttagtctaattttttttcatattcatgtacattatagctatttaagatatcctacaaaattttgaaaaattcggaataattta

SEQ ID NO: 303235 - DNA, 4564 bp, Cannabis indica
tatatatatatatatatggtattattgaataagctacgaaagttcaataaatcttttccatattaattaaaccattataattagttggctgccgattccattaataaataatctctcattctcacatacacactattacatacttgtcatctaaatttgatggatgtcaaatattattgatgatagtgtttattggatcacatttaatatttataagcttagtaaattttactattggatccacgatttaattaattttagttatctgatcgatccaacattcattggatatggaattagataggttttatctattgaatgtatttcatgtatatatattacattgattcagatttatccaatagtttagacctagtattttgaggaaatttgtattgtattctttgtttactttatctgatttaatttttactttcatttccatattttttaagatatactaatttttatagataatgtcttcattatactttttaggttaatgtaaattatgtactacacgagcgagggtatattaatcaactcactcacaaaagtgggtagattttaataaaatataatatgagagtatttttaattaatagatacaaaaagagctatttctcaacttatccctaatattttttgaatcggatcgaatctatattctaattttttttagaattcagtatttattagattggatccaatcaaatctaataaaaaaaattaaaattttaatcttaatttttatacatgcaatatattttaggtataaacatcataaaatataatgactcatctaaactataaatgaaaatactaatgagttcaattcgatattagatgtattgaatttttggacaatacatctaacatccgatttgatccaattgaatattgaaaacaacatctaatccaattaatatctaatatttaatggtcgattgtaattagattggatcgatttttaaacactcttaattttcttagacaaaaagaaagaatattgattgcatcgagaagaaaattaaaagtatatttaaatgtatatatataaatataaatataaagtagaaataattgagaaaaattggaaagggaataaggaacaatattagttggcagtaaagtatggggcaaggcaaggcagattattattacttaaaaagtatgcccttaatgaatttttgttgggtaagtaagtgatgcttggaaaattaattaatttaatactacttgatattatgtatataagtactgaattaataatatgtatatatatatggattgatcgagtataagataccatggcaaagccatccatctagtagtgtttggaaaagttgtataattcgagtttttaaaaatacttgaaagtctaaaagatagacaaagaatatttttcttttctttttcttctcactatttgaaatcaaatcatatattaaaaaaaaaatcatgtaaattatgtaggagcgcccaatattgatccccttttgcaacaaataagccttaattataattttcaaatactatcacataaggacggacccacgtagaagagaagaggacaatcatcttctaaaaaaattaagaaagaaatgtatttatattttaattagttaatatatatatatatttgtaataaaagataattactaatgctatcacctcgatgtcgtttttcttatggaaactaagaagaatgcattggatatggagggtatttggtttcgtttgggctttctcaatggggcggctgtttcttctggcgcgtccggcggactagctcttttttggagacgcagttgggatatacatgtgattgaaagtgatttcaacaaaattctagttcgtttcggtggtaatgggaacaccggggattgggtgggttgtttcacctatgccccaccgagaagagacgctagaatggttttttggagggatttatgtgcaactatgggaagttttactgacccttggattgttatgggtgatctgaattctgtgttgtccccggatgacaagagtgggggtcgtccggtttcccggtcggagggccaagggctgagagagtttatgtttaacttgggagccgttgatttggagagtgggagtgtcttgtttacttggactaatggcaaagatttggataggctgatccgggaacgacttgatcgggttgtggtttcctcaagttggttgtttcttttcaagaaagttggggtgaggaacctgcctatccacttttcagatcatggagctattactttggatactcatatggaaagggagaatgttgtgacgccttttagatatttggacgcttggagtcgagatccggatcgtagaagggtgattgaggaggcttggagggaagctattggcggctttcatagctttattccctgtcaaaaattgtctttcactgctaaagccttgaaggtctggaatgccaatgtgtttggacattgccaaaccaaaatcaaagctcttgaaaaactgctttgtgaggttcaaaagcggcctccttctaatgagaatgtggaattggaagggaccattatgttggaattggaggaatcgtagcttcgtttggagtctatatggaaacaaaaatcaagggagagttggcttaaggagggtgatagaaactctaaattttttcatgcctctgttgaagttcgccgaaaacgaaattttatatgggatgtgactcttgaggatgggactttgattgagggcagagataatattgtgcactatttcagaacaaattttcaagaaattttcacctttacaaatcctcggattgatgatgacttgggggaccttattcctcggtccattttggatgaggagaacagtttgttatgtgttattcctttggaggatgaagtcaaaaaagtggtgtggtcgatgcctccgcttaagtctccgggtcccgatggttttccaataaaattctttaaactttattgggacattgtgggaagccaagtggtggagtttgtgaaagaattctttcattcggggaaattctgcaaaatggtaaataagagtttcattgttcttatcccgaagaaggctcatgcttgccgttttgatgattttcgcccgattagcttatgtaattccatcaacaaaattgattccaagattttggcgaataggctctcgtctctcttggataagcttgtgtccccgtttcaagcgacttttgttaagggccgtaatattgcagaaaactctattattgctaacaaaattttccatgacatgacgcgtcagaggggaagggaagcctttgttggaattaaatgtgatatgtctaaagcctatgataggctcgaatggaatttccttcttaaggtacttaaagcttttggtttcaataaccacttctgtgatatgatcatgtttggtgttacttctgttagctttcaggtccttattaatgggggtatcaccaaaaaatttgttcctaatcgtggtttgagacagggggacctgctatatcctttattgttcattttgtatgcggaggttctctctaaactcttattggcaaaagaagaggaaggtcttatctgtggttattcgattggtagagagggtttctcgattacacacttgatgtatgcggatgatcttcttatcttcgctaaagctgagaatggtaatgtgactgcaattttggatgctctggataaatattgttattggtctgggcagcagattaatgtaaggaaatccaaggttttcttctccaaaaactgcccccttcggtgtcgagattcaattaaaaacctgctgggctttgaggaaatgaatggtggggaaagatttttgggaaatcctttgcttttcaaaggcaacagaagtaaggattttgactttattattgataaaaccagttcccgctttgaggggtggcgggcgaggcttctttcacaggctgctcggttaacattgatcaagagtgtcttggcggctattccgatttacacaatgtctgtttttaagctcccaaagaagacaactaatcggatagatggtattatacgaaggttttggtggacaggacaggctaaggatggacgctacctctctttaaaagcgtgggactctttgtgcaagcctaaatcttgtggtggtttgggctttaggagggcggaagacattaacttctgtttgcttgcaaagtttggttggactttggcttcgaagcaaacttgcttatggaaatcaattttgcttgatagatactaccatgagacagcttttggggactcggttttgccttcaaatgcttcgccggtggccaaaagcatatgggcgactaaggatttcattgtgaagaatagtgtctggcttattggaagagaagcaaaagtcaaaattggcaaccaccaatggtcgggttttgatggggatttgattgactcgggatgtttaaatcctatgatgtttgatgatttgtgtgtgaggaatttgatgatggaggatggtttgagttggaatggccaatttgtaacgccctaatgctaaggcacgctac

SEQ ID NO: 303236 - DNA, 814 bp, Cannabis indica
acgtagatgtacacatagacggtccaacatgacacttaacacctaaaatgaatggaaatattaaattactaatataacactagtattaagggttttgctgctaaaatttgaattttaaagattaaatacaagcaaaataaaaatattaaaaattttgcaacaattaactcataaaaaaatacaagacaatattgagcaagagaaggacatattggatagcaaaccctctacccgaaatcacctttgcaccttatacttttttatacccaaaaatattttatagtttgttttgaactcaccctataatttaatggatcaatctataatcattagcatgtcaccatggtcttaattagataataggcaatatacaatctttataattatctttatattctaataaccgcaagggtagttactgtgagtccatatcaaaaatattttaacatgatattttattattttaggcctaaagtattcatcattaaaaaaaatataaagatgagatgagacaaataaaataacgttgcaaaagccaatgcgaacttgatctcgttttccttgtttggtggtgttaacgtagtaacagacaacaatagtgaggtttcggtgacacacggataattatatatcgttgagtctcttcttacgaatgtcagctttgtatgcaaaagccgttgatgaatattgttgtgtattatccttaaataattaataatgaaaaaacaattttcatttccctcgactatttctatatatatatatatcatattatactaggtgaatctaagtgccgagccacgtattgctagtt

SEQ ID NO: 303237 - DNA, 2362 bp, Cannabis indica
gctcagttgggtgaaggtgggttgaggggggtgtgcctgctggtgtggttgtggagtcggactcgctgctgctggtgcaagctgtgcagcagaagaagcgcttgttgtctccggtggggcttttgatttcggattgtgttgctcttatgcaatcctctcttttcttttctatttcaattagttttgttaaacggtccgagaaccaggcggctaattttttagctcgttcttctggttctactctaggctgtgtttcccgcgggggttttgtccctgctggtttggaagctatcttggtagctgatttgatttaataaaattttattaatttttttttacatttttaaaaaaaaaaattagtaaaattttaatttttttgctaagaaaaaaatatttatttataaatattcaaatttttatatcacactcaataaatatataattttaatttttcatgttgtaatagttttaattatagaatgataatatttaatattatattatatttaattttttttattattttaacctatttataattgataaatccatatttatcttattaatattaaaattattaaattataattttttttgtcatgtatcgtgttttttggatttactttattcgtgcttacatgtcgtgtcttttgtatttttcgtgcccaaatctatattttttcgtgcctagtcgtgctcgtaccttccgagctcgtaccaatttcgtgtcgtgtcaaaaatttcagcccgtatatacagcactatatgaaacattcaaaatacgtgagggtttcaggtgtgagaatagcaataccgaactcatctgtttatagtgaggatttgaacaagttgtgggtttcagatttttattattattattgaattaaattgatttaaacatctatacaaaatctttaactttcacttttgtataatcataaataaagtttagtataactactatatgcaggttccagcatatgtggcaacaaagatgacaaagtttgaagcaagcttatttgtaccaagctcagaaaagtacagcaaagcaagtgtaagaagcataggttatgagaaatcttgttctccttactggtctcactccttgctttgcttcatcatatctctcctaccacataccttcctcaactaccttctctattcaaaaaatgttgccttaattaataattagtaatttatgctatgaacattaaacatgatgtaataactacatacttttgcttattaacatttgtaaaaaataggtgatggtttgtctttggttaagatttgtcctttgaagaaattatcagctatcacctcaccataattgaaatattgtcgtcctacgattaactgtcgttttaattgaaatattgtcaattgtgatgtcgttttaagaagatatcgtcgtttgtcttcttactctcttcaaaattctatttggagttcaattagagcactaagcagccagagagaaacagccccaatgtcacaatctttgtattgggttgttgcctaatcttttaaaagagctaaattttattaaaataaaataaaaagagctggtaaattctcaagaaagtaggtataagtagtttatcatagtctaatttgactcatcaacaagagttttgtgctgcattgccttttactttgtctctttgagttttgccaccttatttacggcaacaaagtaggaaaaatgccccaattgagtaaagtatgatgaggcaatgcatttgctatgaaccattggagagagtgagaccagtaaggggtacagatttgttcatacccaatgcttcttacacacccaatgctatgaagattgagctttcttttagctttgtcatctttgtggccacatatactggaatctgcatacatacacatagttgttgtaaataatgacacccaataaatgtagacagatacagtcataaaatcagaaagctaaaactagtttaacttgaactctattaatatctgatgataagacatatatctcatcatgacttgttcaatttgtatctgtagccaatttgtttacatattgattacaagagaaaagttcaatgaattcacctgtgaggaagctcaagatgtaacatttaaatgtatcaacattgttaaaactagatgtaatcaatggtcatactatggtattatagtgcaatagtccaaaacaataataagctaaaatgattcactacaaatcttacttaaaattaatttttttgaccatctgttttgcaaaagttatcgatttgactctttactttgttaaatgataaaatggactctgcattttccaaaatggtaaaaataagattctgagcttaattttcgacaacttttt

SEQ ID NO: 303238 - DNA, 968 bp, Cannabis indica
aaaagaggtccaataatactcacattttactttaaataaaacatatatttaacaaattttttgacacattattactcaaggccgaccctgtatgagagagagcacgatgttttaaaagaaaaaatgtaattaatccaaacaaaattcaattaattaattaatatcattttgatcaaagtcgtgagtctttggatttatcattagctcttgaatgattgtgacacgatccatatatattgactaaacaatattatactaaacaatgataagttataatcatagaatagagttttaataattgaataatggtatgattttatagaaaaatattatacttgctattaataaattaagcacattaattaacttctttactctatcttaataaattctaatatcatacatattaactgtaaataaaatagaaaagtgaatcacagagcacaagttttagaacgaaataaaaataagctcatagactctatagaacctaccctataagatgctggcacaacataagtttatatttttcaaattttaaaaagtgtatatatatatatggactccacgtgtgaaaataagttataggagataaaatttgcaatagtaatacatggcactagggttgttaatataaattggaaaatcacggtttaaattcggaccacgataattcgaactattgtaaaccgtaactggagaaatcgtttttggtggtttggtcaatccggactgtttacggcgtaatgatttggttgcagttcgtaataaataattaacggttaaatcggaccggaccgtttatttaattatgacttatatatacccaaatttatttgaataaccaattataatagcacaaatattactttaataaaacaaatcatttgtaggatcatacgttcacgtacaatctaaataagaaaaaaaaaaacttaaactttacctaaaactaatatttacgtgcc

SEQ ID NO: 303239 - DNA, 3588 bp, Cannabis indica
gtaaaataaatttccaacaatttatagagcaatagagcttgtacttagttactttttccctctaatgggaattttacagataatacacagatttaggcttatcttgtgaagcccagcccatgaggcaatacatgtatgctgatgtggagatcagatcactgtgatagttgttcatacgtgtcctttgattgtggataattaatgtgatattaattatttgatcttcgattaattcagtttctctttgtagacaagatattgttttctgcccacgatcttaggagaatatcccttatttattgcggagcagtaaatgggaaactaggattggcttctggatacacacttagaatcttttctaggtacacggtgttgacattcttccgtatgctgactaggcttgacggaagctcatttggtgaggcatgcggttgttctcccaaaaggccaaataacaattgggctcgacctagtttatgttattttgggcccactgaagagctttaaacttctatttggaatccatgtgtctcttgtcgaaaatgcagataatatttacccctaagctttcgaaatgctgtggattgcagtggattgtggaggttggcttcagtctgtacaggtggacaagtggaggctaaatgtgaaacctttataaattataaatactttatgtgaatggaagaaaactttccagttttcaaacttcaagtcttaagtggtgttatcttattgactcgcgaaacatctgttcacttgacgaagtgagcatagtgaagcaattgaatttggtagctactcacttcagctcgagtctcgaagggaatatcatcattcgatttacctcggttccagctacgacattaaatgcttgacaaatgggtttccaagatgtggatctattttgtgttttggaagatgaaattgggccattaatcctggcttcatgcagatcattcctcgaaggtataaatacctcttaatgccaacttttaccacttttactcaaacttccaaattttctcgtttcaaacccaaaatctttgagagcaaaaatcataattaaaactctggagaaagacattgattatttcatccactttcttctttgaattagggcacaggaattttcagacgctccaccactagtgattacgattccatcaccagaagaaactacgaatctggatatcaattttgagatcgattcccttatcaaccacgccaattccattacaaaaaggcttgatcgtcttgaagatcctcctattaagggaatttttctacgactgtccttcgacgttagtgtgtgctctcccaggccatatctctactcaagtccagaattatcacctaattcaccaccaggtaaattttcttctttttgatttcgttgactgtgttgcatgttcaatatataggaattatgtgtaatttacttgatgtttgagaattatgactttaggcttgcgactggaatattattattgatagaagtagaacattttggatactattttgaatagctttaggaaccagtaagagtcaagtctgttgttttattgatatgggaaaagtttatttcgctgcaaaaatgttagcaaattttttactcatttgtccagagcccttatggttctggatagtggatgagctttcttctctttcacttcttgttgttcgcgattcactatctggaacaattgttcttttgagaatattgttatgaatctggtgggaacctctccaagtagttatgggggaggatttccatgtgcctttactatcatcgttggtttgggtagctaactgcttgatattttttcagaatctgtcatgcctaagcgagttcagaggaagtagaagtgggagaagtagatgatgtgatggaacaagtcactgctccaaagttggtattgaattcatttccatgggagatggatcaatatactactaagttctgaacttatggaaacttctgaaagtatgagacataaagagggcttgaaagtgttccaagtctattttggaatagactgtctttcttaagagagaagcctagccaaagtgtgttgagggaggcttctgtatatggagttgggaacatgtggaaatgggtgcctatcttcttttgaggtgctacttcgtggaattctacacagtagccagagtggctccataccagttcattccacaagtgtatcatctgctttccggatggtacgtcttgtgcttccacaagaagaaatcagttcctactctagaggagattttgtacttctacaaaatcaaagcctagaatatgaggaaccacaaggagaaggtcagcttttataggttggaaaggcatttgaaagacttggtatgccccattagtgtcatgaagtacacatacgacatccaagactactgattttacacctttgactttccactaaagagagttccaactcttagtctcgattttaatagcacaagtaagtgtagctatttacttgaatttttctgatttctcttcattctcttctcactttgagtattgaacttattttgcctttttattctctccatactctatctctcaattgcctttaactccaaagttggaggcaaggcaaactttctacaagtctttaatagtaaaaaagttacaggttgggaagcttgtaaccaccaagaatctctaagaggctggtttgttagctcctcattagagcatcgatactctgactgtgaaggatccagtaagggatcttcaccatggagatgttgatgaagtgaaggaagtcattgcagttatcaccattgaagaggccttgaaggtcgttaaagctgattagaggtggttggggactggtatcgtcaatttccaaaaaagttaagcgaggatgaagagatcgccattcgttttaaagacagtgttcaaaacgaaggtattcctagagcaagtacttcctgaagtggtaagacattgttccgtctagttagggctctgtctttggcgaacttagatcgtttcgaccaagtcaggtttaacccttgcttcttgcacttaaattgtcatagatatcatatcaatgattatatgaatagagtagacgacattgttaggagtccaaaccattttattccactaacacatgatgtctgggtagataactttagcaagatgttgtattagggttcttccaatatggaagtttcttagacagagaagatattgcccagttttttagagagaactccaaatatgctaaaataaatggtttgaatctcactcgtgtactgctttcagtcatattgttttgatgcttccatgcttattgttcgaatttgttttattttttacagagcaaccgcttacactctaaatgggcccggtagacaagtttttggggtaccatctgttggaattttatgccctaaataaaactcatttcaatataatcttatttgttatcaatagaagattagaagtcatttatgtttacatatagttttcatgtttatggtttaatatacaatttctattaagtccagaacatatagttattcacaattacagtgatatcaacacagtggaaggta

SEQ ID NO: 303240 - DNA, 1159 bp, Cannabis indica
ctgacaaagtccttgtattttttctccttaaaaaaagtccttgtattttttaatgtactttaatgaaaaatatagaagtcaatatcatattctcctaataatttataagaggaatcgaaaaaaacattaactattattagtgcaatttgtctctaagttctaggtccaacaaccattatgtgcctaagtcgctagttcatagattcttaattcataagttagagtctttaaatccatagtattatctatccactttaggaatattatttcaccaaccaaatataaaaataaaacgctctttcaatgccttttttgactaataaaatatcggtgattactttgtcacaattaaacgttattagcaatttatgctcaacttttcttttatattttcctttttcaactttatggggaagaaaaaatacatatcataagaagagttactagagaaatgtattcagagaagaaaagcatatgaattgctttattgattttttattgatcgaatcaagtttacaaaaatggttcaactatattgtatttatagaagtaagttgtattagtcagctagctaacagaataactaaaactaataaactgtaactaacttaatgactctaaataattctaataggtttttttaaggtttaacgtgtatcttgaatacaatctcattaaaatgagaagaaaataagtgatttgtgtctttgtgaaaatgtcagttaggttagtttgaggaaacatgattattctttaaaagaatgttgttgtttttgtcccgaataaaataacaaccgattttcacatatgatttgtagaggaccagatttttggatatgtgtatggttgcattgttgtcatagaagagactggtgggaagagaaatgtcaatttagaagtttttgattatgatagtgagctaggtgagttcgcatctcacatttgcaagagtttggtattcggcttcattagacgatcgagactgtttgttctttgacttctggaaaatgaaagatttgccaaggaaaatgtagaagccaaatattgatctttgagtgtcaagatataggcccaatctacatcagcaaatgttgatagtttgagtgtgttatataaattaacaattaacccaagatctatttgtatataacatagaaca

SEQ ID NO: 303241 - DNA, 3361 bp, Cannabis indica
ttctacgttccccccccctttttttttttgacttgtttcaaaaagtaaacaagcttcccattttatttcctattttttggggaaacataattgatgtaattattccctataaatagtgccgccatttcactattctgatatcgaaattcaattcttcaagaaagaaatactcagaaacatttgtaagcatttaagagagatcaagaacttcttgcttctcttctcacaagtaatataagtaaaagaggagtaggctattaccaccatcacggggccaaacctctataacaaatttgtgttcttattttgcttaatcattattgaaattctattatttctaattgctttaaagactcagtatctttggctaaaagtgaggtcaacattgtggttctttcgttgagagcaaaagagcacaatcttttaattctattcaaaatacacgaagatggttgtgaccacagggggaggtaatcccacttaaacaactaattcaatggttacagatcctaatgtttaaacttcagcgaatcagagagatccaatgaggacggatctcgatccaaccattcctcaacctccaagaagtccccaatcagcaggataaggagtgacaacccctctgaatgggttcacatcgggcatacaagaaactggaactactagtacttatactagtcagactggcctgggtattggaaatcaacttgttggagaaccttgagtgataattggtgatgatacttagttgcaaacttgcgagctactttagggtggatgcaagaacatactaacactcttcaccatgattaggaggatacccaagaagttgtgaatatggaattaaaacaacaaaaatgtctattgcagaattgaatgaatcaacagatggaaatcatgagagcccaaaaagcagcgattgataattactctaggcaagcaagtgtgctgattcaacgagcttatcaaattactggagagtaaccggtggaagatactccactcatacgagatccgtatagaaggacaaacatctatatctctaacagaccacaatatggcccagaataacatctaaccagcaacactcagtagacccaagttacaggacggtctaattcgaggccacataatcaaactgtgggccacgcaatagagaagcaagcttttccagcccattatctaaggggaatggtcagtataacatccatccttagacggatataccaaatcaataaattgctgataacagctgaacaaggaggcctccaagtgaatcagtcttcaacatattgggactcatacacgatttaagagattatctaaattgtataaggcgataggatggacagtccatccctcttaatactcaaccaattaatgtggacaactatgtgcctagtgaaattttagggagtccacaggtaacacaggtcagtcaatagacaggccaagttgatccagtggtgcaagcccaaatagatcaactcaagagccttgtacaaagcatggctggcccaaaaatcaccgacctagagcttgaactgacatgaggttcaccatcttaaccagaaatcaatgcccttgacctactgcccaagttcaaaattcctacatgaaaaatatatttggctacctcacatcaagtactttgaaatgtaaatggacttttaggcagtgaagggtgacgtacggtacaaaatctttccagctaccttggtagaggccgcctagcagtggtacttcaagttagcaccaggaaaattcagttcatggaactcttttatgctagagtttcacgcacagttctcctcttcaaggtaacttccaactcatttagaagacctggtccaagtaaaacaaataacaaaggagcctttaagaaattaagagattagatcgatagatttatgatagaaaccacaaaagtgaaagggttaattggagagagaaaattggtcgctatcctaggaggaattgaacccttaggataattatggaaagacatcaaaagacttactgtaggatcaatgcgagagtttttagaccaagcaaaaaaaaattataaagcttgaagaagcagttcaccaagtagacatagttggtcagaaaaagaccaaccaaagtcacaccactgttgccaatacatccttgcagagtcaaaactatcatcacaataatagcagtccaggtcaaggtggtaaaaggtcaaataatagcaaccaacaaggaaatggaaagaaaggtaagcttagtaatgactctgaacaatagcaccctcgagagaaatccctaaagttcatagcctttactatgcttactgaaaagattaaaactattttcacgacaacccagtccatggtgccataaaaaagacctcctccgatgaagaaagatatgagcaagagggatactaccaaataatgtcgctttcatgctcactacgatcatgataccaatgagtttaataatctaaaataagaaatcgaattcctcattaggaaaaataacctgcacttatgaaagtacattaaaactgaccaggtcgccctgccaaataataatcgtgactagttaatgcctagccaaataataatcaggataataataaggaccaataactactggatctttgctatgggaagatctccaaagcaaaaaaccagagactttgactgattttttgacaagagcccaatgattcatcaacttagaagatgcttacgcctaagcttatagagtacttccagcaccttccaccaacataataactatccaaacttcacagatgactgctccatcaattttccctctaaaaactgcctttacgactcctatagtttatggaccaagtgcttctgcgcaaccaactgcacaggctagtttttccaggttcaaagcaatacaaaccgaatacagtgccgctttcaaacaaacaaaccaaaaagcaaaagctctagagtctaatgtaagcaaatcacagagcaaaacaagttccaaaggtccaagtcgaaatgattctaggaagaaagggaaggctcaagagttaagatactccaagtacacaagccttgtcgatacttgagagaatgtctataaagcaacttgtaacatggtccattacaagaagcctccaccaatgtacaaaggtagaagacaaaaaagagatccaaacaagaggtctgaatatcacagtgatatagggcacacgtgtgactatctaagggatgaaattgaaggataggtccggaatggtcatctattcaattgggtaagaataccaattatttatcctagacaggggattgcacatggtcagcttttcattcctggacaacatggagccattaatcctcctcag

SEQ ID NO: 303242 - DNA, 1905 bp, Cannabis indica
aaagacccaagagtcaagatacagtgagtacacaagtcttttagatactcaagagaataagtataagaaaacttgtaacatggttcattacaagaagcctcgaccaatgtacaggggtggaagacaaaaaagagatctaaacaagaggtgaaaaaatcactacaatattgggcagaccacaaatgagtgtgactatctaaaggacaaaattaaaagactagtgcgaaatggacatctgtccatttgggtaagaattccagtcatttatggaggacagggggttgcacacggacaacttttcattccaagataacatggagccataaatcctcctaagggagtaggtcaaccacaagctcttggaatctaagcttaaaatgtagaatccctttagggtgcacaaaatgctttagtagcaagaattgttataactcttggtcctagaaacccatatcttcctagagcagattagccttcactagatggtcatgtggaaactaattttgggggaccacacattgccaaaagcacccaaaatgcacagaagaggtacttgaatgaatcagtcaagatgagatgtgcaatttgatacagtcacctgcccaacatccgcgaatgatgaatttgttgatgatgttcatggaagatgaatctaaacttgcgcactttccttaaaatgacccattagtgatatagaagcatatagaaaatgaaagggtttatagaattcttgtagataatggaagctctgtcaatattattttcaaagatgcctacaaagccattgttttggtggaagccaatctgctactgtgtctaattcaactacaaggcttcaatggagacacgctgatccccatgggaaaaatacaacatccaatgacaataaatgtggaagttttcagaagcaatgcagtgtcatctttcaagtacaatacctttgtaataattgatttccttattgcttacaacgttatcttgggacgaccatttttttggttaattttaaagcagtgacgtctattcgccacttgtgtctaaagttccctagcgataccaaaagtattggtatgatctaaggcaatatgaaaatttctagaagctactataatgtttcaatgaagaccgtcctcatggtccatgaaggaaatgtagtagaaggcggaatattttcccaaccagcactaggggtggtccaaaaaaagatgagttagatccatgggtaggtgtggaacaaaaaaatagaaccaatggaagaggtagaaaagcatgtatgagtgatcaagaccctacaaaagtcatcagagtggggaagaacccacttctgccagtgaaagaaaagattgtctccacagtcaaagaaaatggcaatgtattgacttggagtcattctgatatgattggaattagtccccgtgtgatttgcgatgcattacatatagatcccaaagatgatctagtaagagacctttagatctagtaagatcagaagcagtgaaggtgaagtggataagttgaccaacattgacttatttaaagaagctctatatcccatatggcttcccaatccagttttaatgagacatggagaatgtgtatagattttgtataattaaacaaatcttgtccaaaaaactattttccgctgctgcgcattgataagatagttgacaaaaactcagggtatgaacctttaaccttcatggatacatactctggctacaatcaaattaagatgcacgtggctgaccaagagcacacaagcttccaaactagcaagggaatctactcttacaaggtcatgccctttcgattgaagaatgttggagctaccaactaatagatggaaaataaaatcgtcaagaatctactggggaagaatatggaggtttatgtcgatgacat

SEQ ID NO: 303243 - DNA, 2625 bp, Cannabis indica
tttttttttttgaaagaaagcatattcatcaaaaaaatattaactattacaggagaactagtaaatcgaggacaaacatccgtctattcagattcccctaaactaataatagaattagttagtgcatgtacatcaccattagcaaaacgcaaaatagtattgcaaaagccactaccaacaactgctaataacaaggaaatattatccattaccttagaaatattatattcttaaaaaaaggaaactggaacaataagcagtacaatatgacagaaaatatcctgacatcggtagatttagaaaataataaaaagtggcaaagccaagaaaagaagaaaaaaaaaactcttctgttcttggtaaagggtggaggattaaaatgttaatgataataagaataattcatttaaaaaaatgttgcatactcgagattgaaacttggtggtcgaactaaactaacattcttttgcaagcaaaaaacccaaacaggtacttttttcaataaaacccaaacatatttctcagttgatcctcattaagaatcaaaatgcatacttgctaaccaacctctctattctcatgcataagaaaatcaattcaatcaagtagtatcctaattttttgttttgccgacgggccttcttccaaattaatctttataagatagcaataaggttcaaaagagataacaaaatagtaggataaagaaaccaactaaaatgcactaacagcaatagtcccatgagcacgataacagacctgcaataatcactcaaactctcataaagatcacgtccaacatagtagcactcctgaattatccagaaagagaatgggaagaaacaaaaacactatcagtaatcattacattgctaaatcttcacggttactctgaaaaggtacaaagaggaaatacctgataaatccttttaaaaaatttgaagaatgattgatcaggcattgcaggtaatgagtgggataccggaaattttagcaagagtccaaggactaaacgttggaagaatgactgatcagacattgcagataatgagtggcatgctggaaagtttagcaagagtccaaggactagatgtaatccagcatacacacccagtacaagaatatataatctgaagtaaaatgaattgttagagttgtggctatttctttcatccagaaccttcctgaaattcattaaaccattattaaagtcataaacagaagaaaataattaatttatgttcttgctcatatttaaaacaaaacaagtcaagaaaatacttacaagtaaacatatgtcacaaatgttgtgcacagaccaaaccagaaaaacctaattacttgtcttgagatagccatgcctcttgccgaggtgtaagacccaaacatgagtatgatatccaaaaaacctatgacaacagcaaagaatacaatgtaaacagaaggaaggggaggattctggaaattttgttcttgttcttactaaaagattaagaatcacatgaaagacggaaaaaacttactttcaatgaagttcataattgaaaatgttggtccaatactaagtacactcttaaaagtatccatatccaagcgcccatcattgaaagctataattgctaaagtctttggacagaaacatgcacaacagttaaatcaatattattaaatttaagaagaaaggtgaacttcattgagataacaatacacaggcagataatattcaacctggaacatcaaagccagaaagatccacaaacgatgaaaacttctatacaggtgaagaaaggtccgatgctcaacaaaagagcattttccaatctatcaagcaaaagacaattaaaaatcaaacagtgcaagtaaaagtgttcatcaaaataaggtgaaacatgatcaaaggagactaaagatagaagactccccaacatcactttttcttttgaaactaggatccctgcataatcctacacatcaaccacattagtattttgttaacggataaaacttaaaaatcctatacttcacgattgtgaatagttcaagaagaactcttaataggaaaatattcaagggagaacgatttggtagttccaatagttcaaggctaataatcctaacagccatttaaatcaaggaaaacatttgtagcattctcaacagctgccactatacggaatttattagaaagggaaatcctaagtctcattgaattgctgcaacagctagagattgttgatgccaaatcagctttccactggtttactttagatcagaatcacaacagtgcggattgaaaaaaaaaatactatggaaaagttgtttttctttcaaaggttaaagtctttggctaattggtagccttatgaaagttgattgtacatgatataatgcaaaaaagcatccttacatcgccatctcacgtggttggtgtgtttgttgtaaggcaagtgggaagagcattgaacatttatttttgaaatgtagtttcactcaaagattatggactgaactttataaggagctttagatgtgtcacaaatgatggtacatgagattattggacgtaaatgttgtggacattatcccacatagaataaatggtagagaattgagccatatataaga

SEQ ID NO: 303244 - DNA, 1518 bp, Cannabis indica
aaatattccaattacattttaaattatgtaaacaaaacaaaataattttaattttctttccgatcaatttaataaataacataataaaatataatttctgattaccttatatttaaaatctatttatttcatctatgtggatatatggaatccgattatagtttaacaaatgtgatcttttttgaattttaataaaaaaatgttaataactttattttaccacatccatcaacaaaaacaccatttatgactctttcatattgtatcatatatataagcaaattttttctgtgttgtcatttcctccctatgacattgggttcattaaaatttgcaaattggaagcacatattccatatctagatgcattggaacccttttaaaaggtggtaaaattaataatcagaattgattgatcgaacttaaccccatacttctttgctgcccaaaacattataaataaacatggtccaactcttttagtacataaaaagccagaggatgttatcatgttgggacgcaaagctttgaaactatacattaaaacttatgtacttaaatgcataaaaattgaaccagtatattaataggtatacccattatagacacaaatagagagtacatttactaaaataaagcctaaagaaatgacacacagcctaattatttcccagtcaaattttatagagattctactgttctagtgttatttctgatgcttttcatgtatataggctcaattatttgatcacctatatttattttatactacttaatgggtccaccaggatcaacaaaaaaacattagcatgcagcccatttctatggccccatattgtctttgaaatatcaatggctttttcttcttttatgatacaaatacactgcctaataatatacactgctttgggttcaaaattcaattacatgttaccacgtaagagtattagattggcatatttaatttctatttattttacattattattaaccaaaagatatatatttgctgaaccaccaagtaaatcccttgttttgagtcttctctccggcaagtggctacaccggttgacataataattctcattaatataaatcttatcatgtaattggagttgatagaagacactgatattgtgtaattggaaaggattgttttgtgatagtcggtagttctgtgattcgtaagagaagatactggataagcagtacaatctcacgtgtgattattctgagactggataactagagcttaaatgatatgattagtactacttatataaataagccttgttttttttaatattattgttgggttttgggccctaaacaaaacttatttttatattatcagatttactaatttataaaagattagatatcattttatgttatatggctcacatgatttatttcatgattatatgtttaatgtataaattctattaaatccaaaacatatatatatatatatattcatgacatgttttcaacacagtgaaatataatcatgattat

SEQ ID NO: 303245 - DNA, 1120 bp, Cannabis indica
ggaaacaatttcaagctcaacctcaaaattctagacaaggacactttctcagacgatgatttcataggccaagcaacgtaaaataaactactcatcatatagcttgcagactcaataattttggtgaaatgggaaatcatattttctattctaattcaaacatttttattagagcaggatctatgtggaggatttattggcattaggagctgagaatggagctgctcaactacatcctcgtaagtacagtgtcattagtgccgaccaaacttatagaggagagattcaagttggtgtaactttcaccatcaaggtatatatatatgtacttattactttcttcttgtaagaaaaaatcaattggtttggcaattttaatatagctaattgattaagtttaatatgataacaaaatgtgcattgttattgagcacttgtagtaacacattctagacgtatcgtcttttaacacgtaggtaacacgtaggagtgtgttaggcgccactaatactttttggaatttctttaacaaaatacaacttttcttggtagatacatacttatcaatgatgaatgtgatcacaattattacttattattgttacttgttattgaatgtgtaggcagaggctgaaaatgagggagcaaagtttggaggatggcgggaaagcagtttctagtttcctttgttattacatttaaatattagcaaacaatgaaatttcctttctcctcgttttgggtctagtgagtagtgattaacatttagtaaaagtcattaacaaatgctatgtttttttttatatttcctcttaatcttttgttttttattaatctagcttttcttttttgaaattttaatccaacttttcttaaaacattagttaattgtcatttgacctgagaaaatactcaaaagcataatatacaaatttaaaattattgggcttagaaagaaaataggtcaaagagtgttgggcccaaaatatttggcccagaggctttcatctatgtaagtattctcatattaaatttgttagaaaaaattacatttttacacactttattacttggggtaagttgaaaaatgcctcttttattcatcaattaatcaaattta

SEQ ID NO: 303246 - DNA, 751 bp, Cannabis indica
acaagttgaagtcgtgaataaaatcttgaaaacaatgttgaagaaaaagctccaagcatgtaaagctcattggccagaagaacttatgtgagttctttgggcctacaggaccatggagagaactttaataggagacacgccatacacaatagcttactgatgtgaagctgtaatccttatgggggccatggtcccctctcatcggcgagacacttataacacttttcggaaaaattccttgctccaagaattattaggcttaatcgaagaactttgggaacagtcacgggtccaacttaaaatataccaaggcaagatttcatggaactttaagtccaaagtgaagagttacacatttgatgttggagatctcatcttgagaagagtattcccagctttgcaagaatgaagagtggggtacttggcccaaatttggagggcctatatgagatacttaaaaaagtaggccaatgaactttttcagtttaaaaagaacggatggatcgagggtccctaattcctggaatgtagaccacgtacgttggtactactaataggccgaggtgaccataccttgattaaatcccttaagctttgtgtaaatttttatataattccttctttatgtaaaacctccaggcataataacatgaaaataaaagtattttacatttaaatttacgatttatgtttttaagccacaaactatgttttaaataagtgaccaagaagttggagatgtccaaacttc

SEQ ID NO: 303247 - DNA, 3537 bp, Cannabis indica
tccagtgtattgacaaatcatgggataaaaatttgaaacatataatcatgattatattccactgtgttgacaacactataatcatgaataactatatgttatggattcactcgaatttatacaataaacatataatcatgaaagaaataatatgaaccatgcaacataaaataatttctgatattttattaattagtaaatttgattatactgaaatgagttttattcaggacataaaatcacaataattcaacacatataaaatcaagtcaaataattaagttgagtctctacctccttagaattgtcaaactttttgcaaaggagacaatcttaagccatcaataagctccaataagcttagtgacttcaaaagtcactttttcctacactccccaactgaataaataattattatagttgtaatttaaccttcaaattgagtccaaagacatataatatgactatatttaaagtttgaagttttgaaccctcatctaagcggtgtaccatgacaatcggtggtggtacaaattggtataccaaaaatgtcgtaaaaaataggagtatatcaaaatgagcctcttgacgaatagatcacggatgtacaacccattaacccaaacaagcacgaccttgcctaaaaatgcttctaaagggtagagatgcttaaaatcttatcacagaaaagtattgagttgacaaaacttagtgggcgatgctctcctcgtcatgttaactccaatggtaccaaccattcatcaaatggtcactggagttggtcataattttgactcaaggttttgatgtcattactttgcacctcatgtgtgtgtgtctcagctccgattgccaccaaacttaaggtgtgagattactaccggtcggtggtcgtgcaactccaatgcatttcataattggcggtctggagggtggtggctctgagcttcggtactggtttatgaatagtaaaaagagaagaaaaggttgtggaggacaagaagaagaaaaagagtcatttgacttatgtgggtcacacccctattatattattattattgtcttttgttttctcggttctcacaacgataatctgttttagcatatgagtgtggacccattgctcgagtagtagacaaagctgcgctattctccccaccatggccaagcgacgatggaggtgaaaggtgagacaagcgctcgtcaagaatatctttgggtttctccatctgtgatgtatctctttgctctagtttaagatctaattccctactcatgttttggaatagttgcacgatctcttcgttcttcatcttaaggaaagaagaaatcaatgaaagaatcaatgtcagttaagtgccttcttcgtgacaaggtcaatctcccacaacaaatgaaatgccaattttattcatgataatctcaaattaattacaatttcccttatatatttttgtagttttcctcaaagtctaagaaaatttagttacagaatctcactctctcaatgattgagcttcagccagctgggtctcacgcgtccacacttgctttgagccccaatcttctctattttgtcgagtagagtttctatttcagatattggcttgcaagtctcttcatgtaacctttcacaagctattagaatttaggataagatgcatgtggttctatctcaaaactaattgactattggaggagtagcccatttatcttatatatggtaatttatttccacacaatgtgtgggactaactctaatacacatttctcacgtttgggcctaaaaagtgtgggtataacgaatgacttttaagagaccacatggctgaatgtgacatttgaaagaatcccacaaggccaaaaattgggaaatttgtaggtgtacacgttggagaatttgtagatttttgaaacagatcaaagacccaacactggaaactggcatatacattggccgaaaggtctcaaatggaggttaaaggggagacaacagaagtttttaagtttggctcgtctatttttggactgtcggttctttgtgctcacatatcacaaacggctcttttatggctcaccgttttagaccgacagtactttattaagcttacaacgaatcacaaggggttttgttaccatgttagaatttgggataaaatgcatggagttttatctcaaaatcaattggccatgggaaaagtagctcatttatttatatataataatttattataaaactaattcaaatacaagctgaagtattctttttcaactgggccgagtccctctccaagccccttatttattcctggactacaaaattgagttgaattgggcctatcatttgggagtcactaacagtccaaatatatgagatttactatagtcgcatattttgataatacatatatatatactgtatacttgttatctgtataatatatattggataattggcaaaccattggctcctgtcaagctagctatagtgttgacataggataggaaatgctaaagcaaggaatatacggttataaacatgctgtatgtacttttgttatcggaaagtgcaaactaaaccaccgaaaagattttccgtaaaaaaaagccattgaagtgcctttgttgcttttaaagagtacagtcaagccttccagtgaaaagaaaatcactgtaggcaatgatgatttcattagtgataatgaaaagagtacgaatagagagtacacacttacttgatggtggtgggtataggcaaactcgtagcactagggatctaattttgtttggcgtgattaattaaattattagtacgaacaagaggtgtggttgttgcaagtgattctcaaaattaaaatccaatatgaacagagaaacataatttatgttttgactttattatttttttctctctatacatatacataaaaatgaagaacactattataagttatcctctatctaaatatatatttttatattgccagtacagctttcaaatccatgtctctctaccttcttttctgcaagtttatgtgatccactagtttattaaaacagattttatagtggtacctagttttatacacactaatatatatatattcaggtgtcaaactctgggccaaataaatctttatattgaagcacgtaagtttgcataaagtgatttgtccccagcatatatacataaaaataaaatgcatgccccgccaccatgattgattttcaacaagagcacttcgttgtcgtttttctatcatttaattattatcttttttttgcttcttttctttttgtggaaacttgtaagggtggcctttggaatttcgaacagatacgacacagctgacgtttgcaaacgaaaataagttatcttctctcatcaattcgttcaggtgtttctttcttctttacttttatgcttttatatatactaggtgattgttacgtgccaagccacgtagtgttagttttatttaatattttagttttttattttaattaataattaaaatagtataattatttgaacga

SEQ ID NO: 303248 - DNA, 868 bp, Cannabis indica
aaacggtacatacattagaaaaatatacgtgattgagacagttatttcttcttctatacaaaagaactgttacagcttgttagttgctgcaatatatatattctaaaagtatattaaaggaatgcaacatatttgaaagtgagagagacatgaaacaccttgtgaagtagtcagggacggacccaccttgattgatgtgggagttatagccctcactaacaaaaatattatcttttaaaaaattctgagtccatcactgaaagtagttgattaaatgttatcaagcagttgtttaacatcgtacttctctgctttaattcttgacagaattcatatttgaaaatttttatatgaataatgtatttctttgcagtggatatgttgatgagatttttagcactcaatattcaatccacgcaaacgttaatgtaatttaaatatgtttatttgagaattgctcttgaacctggcaatataaacaagccttctaatctatttctgtgttttttctaataaattcattaaataatgtttaataataagattggggtatgagatgcagttacaataatggtttataatatcatctacctcatttcagcatttgatggatcaaaaaattataaaactcagaaaaataaaaacttgttaatttatttctgatgcaaaataagatgaaattttttttaagtctcgcaagctagtttgtttatgttgtggtcataacactttataatagaaatttctttgaatagttagaaattataagatcctatataggcatacatcattttttaagtctagcaagctagtttgtttatgcctgtaattttttttttggtaaataccattttggatcttgtatttt

SEQ ID NO: 303249 - DNA, 1080 bp, Cannabis indica
atatgatatataatccaattcaatataatacaatacaatacaatttaatacagcgttccaaacgagcctttagagggtaatataatatgaattacctttttacatttagtttcatatatttctccacaacatcctcatggaaaccaacgattccttaaagtctataggtgcttgtcttccaaactatgtgggatgttcacacgtagtaacttcatagttcatagtatagatgctattaggttacctttttttctttccttactagataagattaaactagtcaatgcatgcatgcatgcactttaattatcttctatgcataaattttcaaaattacattattaattgtcaaaaacaaaaagaatatatgtatatatctaaacaacccaaatgaataaggtaaatttttatttcccatgtatataagctcaatgagttgtttctatctttacattttcttatttatctaaattaataaattaagaaagaaagaaaaaaaaaagtgaataattttcaacttttattatggatggaataatttattatttatttactttttcatattgcatttttataagataaacttgcaaagatgctgtcccccatatcattggaatgaaaaatatattaaaaaatggtccatttcttataatgttttttatggtggagcaaccacttaagatcccaattcactcctctcattacttttttttatatataaataaaaacatcaatcatattattatgtaatttggaaaattttggcaaatttctcagtacaaacgttttcatttaagaaattataacttaatttttatatatatatatatacataattatatttattgtagttatacttatagcataaatcctaattttgatttttgatttttttttcaataatttataatcttatcttacttattataaaagtgccttcttagtgtgatatttgtaaattattttgctcttacaaatttaatcttattacaattctattttctttttttttttgtctctattctcaaaatcacaagttgaagtcaaacaattatacataattgcaaaaaaaaaaaaaaa

SEQ ID NO: 303250 - DNA, 3542 bp, Cannabis indica
gtatttaagtgtaaaaaatctgaaacattaagtatttatactgcaattttgcataaaatataattcaatataatactatacaatacaatacggttacgacgtatcaaacgaaccatgtaatgtttcttgcatatataggacataagcgtgttgtttttggctttgattcctaaatcaacagtcagctgtgatcaatagttaggtgctgatttgtgtaatgtttattttcctacttctttgggagaggaatggttgcatcaaacctcctggtgatacgttgattattgttgatgcgcaagatgctaatggttggttcataggtaaaaccgcaactggtgaaggttgaaatgttggagtctattggtgtgatggaggcacataatttaataagagacggattaccttcttcttgtgcatgccaatcgaacttttttttctgatgatttcttcttttggttaactactagtctctctcaatttaatagcaatgttttagtgttatttgttaaatgacaagattgctcataattttagtgttatttgttaaacgacaagattgctcattagttggcgagtaactcttactttaaagttaatcctattattagtaggagaggtatattcttacaaatatgacaattttaattactaaagtctgcaacttttattaaaaaataaaacaaacaaaaaaccaaaacaaactatctttagactattcttagttgtttggtatgtgattgaattggattgtcaaattttaattttgataatgataattcatccttaattagtaatgttgtttgtgttatttaattctcttccttccctaggagaatttgcataccaactttgtactagttgaaagagccaacgaataataaatatagatgagaaaagagagagagagagataaattatttcaattttgtccccagcgtaccctgcacatgacatgattattgatttggtcaattggttcagcgcacaactgcccccaagtctcatctcatttaaatatggtcccttttatttttatttttatttttattttcttcctttaaacttattggtctctcaactcaaatggctgtcctcttctcagttcttaatacttacacactaagaaattatttgtttgaatttttaatactaaaggtaaaagccagcattagccactaccaaacttaatcacactcagaaattttgcttatctgtagagtttgattcccccacaccaaattccaacaagtaaagcagaaaagttgaagcattaaaaaataaagagagagatctgccatctttttgtaaagttttcaaacaaaggccatattgcactttcacaaaaggcagtgccaacccttcatctcacttcccctcttttattataataagaacaaaattggtggcaattcatgatctacctattttaacaaacacgatttagtatgttgcgccttttaatcgaaaataggtaactgtgtgaagttatattataaggggtcatgtgtatagttataatatttaaattaattatgtgtgaaattatatatataatgtacacaagtaagggttagttaatggggtatcttctcaatttcttatatatatatttcatttcacactctccaagcattctaattggttttacgaataaaccatgtatatcaagacaatggtgttgcaaacttggagtcagtgtggactcggtactacttgtgatttgaccaactctctctttctcttatttttttctccaatgcatacttatttctctttgttgtttttcaagtttgacaaatcaaccttcttataaaagaatattccttctaaaggtcaacatattattattatagaaagataatgacatacttagaagattctacatactaattaatcaaacatcaatataaggttcacaaatatgcaaatctctcctctttcaaagcgtaaattattttctcttttttctaataaaaaataataataatcatattcagttggtctttccaagtcttcttattctaataatagatttagatccaaatcctatttcatttaatctccaaaataaaacattagtgcgataaataaagacctctttcactacctaagcctaatacccactttgaataacaagatagtcaacacttggtcaagcccttgtctcaatccaataaattgacaacgtgcattgggtcctgttctccattgttttttttctaaaaaaattgctaaagggcactagtggtgctaagcaccctcatatgtattaatatcgctattgatccaactaagtattaggtcccatataatttaatataataacttttagagagtatcactagcctattacaatgcgacatgtcgataaagtactaggtaccactggtgcctaataacaatgctctttttttttaatataaaaataaattttaagtctgatgtgtaagcgtcttttcctcattattctttttctttcatgttcttttgaagaggtttgaaagatttgattttttttttaaaatggaaactttatccaaggttgatcaaagggcaacaactttataagtttaatggaaaacccacaatcttacaaggagatgacagcggttggctaaccacaccaattcaaaatgagtaaaaaactcaaggctcatgcaggaataaaaagaaggataaaatcttcatgaaaagcataacaccaacactactaaggacaaaaggagaacaacaccgaaagaactaacaaagctaaaataaacaaacaaagtaaacacataaacataaagaaaaacagcttcaatggtcaccctcctaacgcaaaggaagcaacatgaaagtccaaaacaagcccaacaaaagtagaggagcatcgccatcttttgacgataaaagtccactctcagtctcccattgtggtttgaacgatgaaggtgtagagacaagggaagcacatccctttgggtaaaattcgattcccccattctacatcaacaacactctaaaagttaactactagccaatgtgcatcagaggtaggacgcctaaatagtaacccacaggcacccattgagttctaaaaaaaggaaaaaagacaactccaaagcccaagttcccaccgaaaagggccaacgcaaaacgccatcccaaaatcgaaaggtagagagccaagagaaacccaccaccatcgccaccctgcaacccccaaccagaggcatgcggcctctcaacaaagatgcccagccacaaagatcggcgggcactcacctgaaaaagcaggcgcaatggatccgaccccaaagaacgaggtttgatgccttcaccacttaccaatgccaagacccgttagaggaacctccatctttgctcataaaggataggaagcaaagctcccgagcaccaccagcctagatctggccggcaacgcccataggggtagaagaaccctaaaataaactaaaagctaaaagggaaagaaaccctaatctaagagagagagagagagagagagagagagagagagagagagagtagtagagtag

SEQ ID NO: 303251 - DNA, 2594 bp, Cannabis indica
aactgcaccgtaccacaccattttcgcagtgcggtttctgcggttttttagtttcgcggtgcgagtatgatttaagaaattggaaaaactgcatgtacgggttattttaaaataatggtcaacaaccacaccacccgcactgcaaacacccttaataaaactgcattattaataagctagtgattttgaccaaattgcgaatgcactaattaacattatatataatattgaaaacaattacccttaaaagaaaggtgtacaactttttgaaccccacacatatcccctatctttgtcttttaagcgtatctagtccaaggaaggaagctagtcaaatgtgagactataatatttgtaatgatcatgttcccaatttcttaaatttgattaatctctccctcttttgaaccaccacaaacattcatgacacacacacctatacatatatatattttcactaggttatacaattttccttcacaaataatgaatatattacagttttaaagttgaaattaaagtgttggggtgtgtatggccggacctaattggctcctcaagtcagggaatcgaagttggttgcgttgatgttgccagtttccagtcagtgcagttggaccctagaatgtggacttgttaaaaaatttcagtcactttcaatagtgatttacttttttttttttattctcttggttgcaaaatgtggggtgaggaaggttaaatggttaattaaccaacgccgtatatattttatataaaacttatttatcattaacttctagacatgaaacagaaaagcattggaaaaaaattaatgagccgtcaaatcgaacctagaatatactactttagagatgatcagttgagtttcttacaagaactactttattatatattacgatacacatgaatcttttccaccaccatttgaaaaaggtcacccacattttgtaccgatgagctgttattttttacttttaatattcttttaagtgggatctttcagtacgcaattttgtcctgaggctgccacaaaaagccactctattgttaagagtcagtactagctactatgcaaattatataataataaggaaaatttgttgcaaaagttcactaatattatctacagtctcaatttttgtttgtgcgttcatacccaatttaacaacacaattaaatgctaacaaaaaagccacgtgttgagaatttattggtacacatataaaaacaattaaaaattataaatcatttaattatttaaaataaaaattattttaaattttaaataatgataaaaaatatgaattattaaataaaacaaaaacaaaagtctcaatcgttctctccctccctcgctcgtctcttctccttctttgccatttttttgttcagaagcattcaaaagcaattaaaaagattcaatctattattaaattgattgaataaaaattaataaactttaaaatattttttttcttcaatcacttctcctcctccttcccagatctggtatatttgttcacttgaaacgttaacacccctactccgatgtcaacctccctcagtgtcaagagagtcggcgaacacccaagccgatgaacgaccccctcgcactttgaaacctcttaaattctggatctcgagcctcgatctgcttctctctcctagatcttgacgtttatggcgccccagagcctagatctggttgttttcctctctttggcgaagttctctcctttgcatttctgctcaagctctgatgaacatggctgatgggttgattctttttttgaaagaaacaagtctatttttttttttgtaatgaatttcctgatttttttttaatagatatggctttggtttggttgggaaaagaaggtgaaatagagggataattagatggatttatttttcagcataataagcacttaattggttgttgttctggtgttgatttttcaaaaaattgggtagaaaaaaaagaaggaagaaagaaggggaagagaagcgaggaggagaacgattgataatttttttgtttttattttttttaatgaatcaattttttattattttaagtttaaaaaaattattttaaataattatatgttttataatttttaattattattatatatgtgtagcaataaaatctcaacacatggcttttttgtcagcatttaactgtgctattaaattcggtatgaacggacaaataagtattgagactttagggattattactgctattttttgaggttaaggactttagggattattactgctaatggttatggaaaatttgtgttatgtggtaaaactaattagaattttcttcttcttgaactttgacatgtttaaaattgtactcccttactttatcaaaccgttaaaaattcattccaaattattgagattattgaatttgagaacttctgtcaaattccggcatgatatactgatatataaattagcaactaaagtgacgattgtttgaaattctttattttaacattaccaatttattatttaattaaatacatgtggaataatgaaactggtactgaaacagtttttctgtagttacaaaa

SEQ ID NO: 303252 - DNA, 3267 bp, Cannabis indica
atgtcaaagtttggggaaaaaaaatcttaattatccataaaaaaatacatgaatactatagtaaaatatttatcctggtgaatttgttcatattaaatcataaagagacatgtagatagagttacgtacgtggaaagactgttttgatttttaatgtttcataatagttgcattacgattgcattatagttgcataaatattttgctaattgttaattcgtctttttgaaactttcgtctgatgcaaccttcggccaaccacctagaaactttcgtcagattgaaaccatcgtctgatgcaacattcggccagccaccaccttgcaactatcgtctgatttaaaccttcttctaatgcaaccactgcacaaccaccctacacctattgtctaattgtgtgagtgatagtgtaaaaggtattttggtaatcaaaattaaataaaaagtataaatgttgtccacactttacgaagatatttttgtaaataaagtgtgaacttatatttttttatgtaataattctattcataattaattaaaaatttaatttgtttttatataaatttacaaaatgattaaaacagctcaaagcacgaaccttataaaaaagcgtataaaaataggttaataagtaaaatctctcaattatggctttcttgtatatatactacaatgcagtaataataatagagataaaagagagaggagagcaacgaagattacactgagaaccaaacaaaaaagaaaactatatatgtgacagtcacacgatatctatataatagtagatttgcccttattcctaaagctaaaaatatcaatttataatattattatgttataaaaatgatctctttctccactatacagaggtggtgactcaattcctccaagtcccatcatcacagggagagcaaccctcttgagcaatatcatcgatttgaattcctgagtcataaacacctcctatcttccaatcagaagggagaacacttttggcccaaacccatcttccgtcgtatcccgaagtcaccaccagtcggagttggattgccccggcaggcactctacttgtgtcccacactgcaccgtggtttctactcatgaaaccccaattagccgaaccaacctgtttgtgcgtgtcacattaccaaaacttaataaacaaacaaacaaaaataatgtctacatttgagattgagagcagttattgtagtgtaataacgtaccgatacctgagcgatatcaacgcccactatttcagtctgacccccttgatataagaacttgattgctaagtagtgtggcttttggcttgattcttctactctcacagccaaatttttgttcttgtaaacacaaggtactctgctccacatggaaataaaatatatgttaataatgattttggaccgttactgcattaatgagttatgtagtggttgcaaggaaactatttccataaaaaggtttcaaaaaaaagtcaaacggcaacttttgtttgtgtttatttattaaagtagagatatttaaaaggcacagaaataaatatagatgttgcttgtttgtttgtttgtttgtttacttacctcttgtattcaacgtctacaagcccaagtttcaaaatatcttggcccatacccttgcgagccatggctgagaaagctctactgctaacaacaaaatctgttctgttattaggattgagatcagtcactgttactatagtcccttctttggtacaaagagcagggttcttgcatctcatctgttcaaaattaacaactctaaattagtacaaaacaaaaaacaaaaaaaggaaaattcatatagagagtagtgaaattcagctaaaagggacctgaaagcatgcgccacaaccggcaccatctttgtaaattgaaggaactgcagccgcaacgtttccattactaaagcccaaggccaacgaaccatacccacatgccccagctgcattaaatccacaaattaagacttgcccacttcatatttcataaaaagattgagacttgtaatcaaatggtgacaaagaaaaaggaaataaaaagaattatactggagtgaggtactaatattcttacaagaaagtgcagaagctttggagaaataggcaacctttgattggtgcacgcagcgatcacaggcatttgcagaagagagaataagaaagaagaggaagcaaagcaacaaagccattttttttttccgttgttttctttttcctttgttgtaagtaagaaagtgatgtgagaaagaaggaaatttgatgctgtttatataggtagtggaagggaagtagtctggattgaaagggactatggagtacaggtcagcattttgaacgaaaagctatgacttttttattatattgtttcatgagtgtgattttggtctagattttattttttgaatctatttgtattttaagtttgagaaggaaagagacaaagagtagcggaaaaccggaaacgcggcccaaaagtgaaaaaaattaaaatggggcctatctaaccgacttctttgcctatgcacatacagctgtgtgtttgagaacacagaacatatcgatttttattatggtatggactatggagcataaataaaagaaagaaagaaagctttttgtgcctagatgactatcaagtgacaaaatttatttacttttaggaatagaaaggtagtaattaattcgtcattttttgtttatttcattaatgactatactgtaataagtcggtgattctttatcttttgtattcggttttgttttcctttttctaccacttaccttttaatgatgtaactccatgataattcggatcgactgaggcgtttatttcatcaataatttgatttatgagttggtttctttatttaattttcactagtggtggttaaagttgattgttttttcagaacaataataaagacaagaggggtttgtctgtttgtgcttgcatggctgattagtgattagtgtgattacgcgtatggtcccctaagaacaagaagaagcttgggtagtgaataaaatgtttggtgaatattatcattgcttcttaatgagtggaaagataagaaccaagtctacgcaagacccacttgtcaagcaagaatattgccaaaaaccattgtcacagctaagttgtatgagagagaaacgagaatgaaattaaaaagaaaatagctgaacatattttacttttatgtagtaatcctactaaaaccccagtaccccactttagt

SEQ ID NO: 303253 - DNA, 776 bp, Cannabis indica
tttgtactattttagaaaatacagaattcattttgtcatttaacaaaacagaagatctaattattaacttttataaaacacaggatccaaaatggtatttaaaaaaaactacccaattgtagctcaagaaattttaagcttatttgataaaagagtactcttttccacaattctttaacatttgagtgaaagaactatttatgcttttcaagaataatgcttaatgcaatgtaagtttactcttttttttttggtggcattgtaaatattattttgattaataataaagtgaaataatttataattttcataaggagaaaataacagctttatagattacgtacctatagatcttgaagtggcaagaactccgagaacacggtacccattccaatttatgacccttccacctgcattttcaattctctccaactcatctcttctgtttggctgtgtacaaataattgattaaaacaccatcacatacaatttaattatacattattataataatattgctttaattaattaaatccttacattcttacttacaagtttttatcataataattaatgagaccagagagttaaaaggagattaatatacatcatatacatgtaatatatagacataggagatctcacatatatatttgtgttaatatacatgtattcattattggtaaagaggggagtcacaccacaaaaagctacctttattttcttcaaccatcaattcaaaacccatgcattatttaataattttatttattttt

SEQ ID NO: 303254 - DNA, 1758 bp, Cannabis indica
ttattttatttatcagtaatttgataaattaaatataaatataattaattaactaagtatacataaatataccactattttgggagtcatggggtcatatcctgagccaccagaagcgaagcataccccagttgggagatcatccgagcttaaattagggtccaaatatgctggcaagtattctttaatacccaattcttccgctaataaatcatgacgaaaaataaatataaatattatgagaaattaataatttagatgtgattaaaataataattgcataattagccactaattaaaagtaaaataatatatatatatatatatatatatatatgaaaacgaataaaataatagtgaaagagtgttaagaaaaatggttaattacatcgaacactaatattgtaatttttttacatatttatgcttaaagttttattttatatatttttattattttttataaaataacataaaaaaaattaaataaaaaaaattaataacaaaataataaaaatataacataaaaatacattaaaagaccttattttatgtaaataaaatttaaagaaccgtcaaaatataaaaaactttgtacaaaccgtaattttgtaaatttttttttgtggtttttgtatttttatttttgaaattaatccctaagaaaaatagcaaatattagaacttctttaaatgatttttcttaactaaagtttatataataagatcccccataaataaggcctaatgcttacactgatagtactattgttgtttacataataataagttaataactgagaatttatagagagttctttgtaatcacatcaaaaagactaattttaattaaaaaataatattgggttgatcacaaccaagtattagtccccaagattttttttaatttttactggtttttttttttttttattttattttatttatttattttgttgaacaattactggttttattttaattttggcaaaactaacaattaatagtataaataaattgaaaacaaaatatatatatatatatatatatatatattagacaatttaagtagtaacaaaataattacgtgtgaaggccatattttcaaaaaaagttatgacacaaattattaccataataaatatgtagtactccttcacagatacacctcacccatatttataataataaatatggtgcaacaataaaagtatgactgttgcactatagaacttcatgaattaaattcaaagagaataatacgtgtccgtacaccacacaccacacaatgttgtgtaaaataatgtagaaatgttatcccaagcttcctattatatatatatatatattttagatcttggatttgaaaaagaaagaaaatcaaatcccctactaaaaataatgaaatccgaaaagtacaataaattcgtaattttattttcaggaaaattaaaataaatataatataatttcatgaaatccaaaaaaaatacaaatatatacaagaaaaatatatattaaaacaatgtaacattaaaatttcgtcgttaaaattcgaagtccatattaacaacgttttaaagtcttgaatatttatataataattctatatcataaactattagtagattccaatgttataagaatgtaatatagaactgaaaatattttaacaatgcacttactaacagggttcattgatgtatttctagttttttgggcatttgtcattgatgtatttctatttttttttttttt

SEQ ID NO: 303255 - DNA, 1972 bp, Cannabis indica
  modified_base (37)..(37): a, c, t, g, unknown or other
gttatggactaaatagttttatttgaaattgatttgnttttgttttatttatgtgataatgagtttaaatatacaacaacaaatcaagtcttttcacttcttattttatctgttgctgcattatatgattatgaacataaagatgttagattcttgatacaactttacgtaattatgtatgtgatgttttattttttaatttatttatagtttttcttcttctttttttctttctctagtgtggctaatggaggtaatagtggccatgaatggttgagatacaagaaattgaattgatttctataatcagatatattgcccatgaatgtcttagggactaagttggaggtctagctgctactccacaagttgaagccgaaaacagggttatttgacattaaaatactaagttggtaataattccattattatgtaactttgtattgaattgttgaaagtttatattgattattgaattttttaaatcaagttttatgttcatatttcacctattgtggacttaaaaaataatgaatagataaagttattcaactgtttggatttaaaagaggataaatgtatataatatttaccattgttatatagaatctccttgagatgtaccatttagttacttaataaacaaagaataaaatagtcaaaacctgctataaaataagaggaattgtacatctcatatggacctattttcattgcattaatgcaatgtttacaatatatttgagtacaatcaaaataaaagagaaataccattgttaaagatattgcaagaggttttttaactgatgaaagtgaaaataacatgacacatgtacttgccatttttcaaaagacatacatattaacttattaaaagtcagacaaaagatacatttgactatgtaaaactgcaatacattaacttatcaaaatgcttcaaaatatgaatccacttttaaagtttaggttctatctttcaatcagcaatcctcctacttatcattcttccagcacatgtcttctgtctaggctattctactgatgctggaattacagaaaaaaaaaatatagttagaatatgcttttgtttttatttgagtcattaattaatattgatgtgttcttgacaaaataatttatgaatttgtgctatattcaatgttcaatcacttctttcaaggctcaattatagattaaatataaaaataaggaattaaaataaaatgtagctaaaaaataaagtatacatgtgaattttttacttgagaagcatgttgttgtgatgaagagctcactgaaccatgaggtataaaattgatgtttctagcataactacaaggatcctaaggttgtgatggagtattgtttgcctataaaatcaagagagataataaaatcatatatagttccatattgaataaccaataaatgtcaaaactaaaaatggatgtaagttcagccacataccgaacttgttttgttccgtgaacatgttcttaagttgtgtcccttggcaccacatccagaacatttaattttgatgtatcttgtttttaatttctttcccccagctatctcatcaagttgtaatgtcctgctttttttaggcctacctggttgttttttatagcagggctcatcattctcagctttccacttctaggccactcttcttgattttgaattggaaagatttgtactgagtaactcttcatgtagtattctttagtgtaccatttactaacatacaagtcatgctcctctcttttgcaccaaattgcagcaacaccatgactacaaggaatgcccgtaagttccctgttaaactataatatagtatatgtaatatagcatatacatacgatatgaaatgcggaaaataaactgtaaacatatcgataatatatgcaatgaaagatcgatatacctccagccattgatctttgtgttggaatttattttaccaggatct

SEQ ID NO: 303256 - DNA, 2088 bp, Cannabis indica
attatataaattaatgagacccaatacttagttagaccaataacaatattgacacagggtactagataccactggtaccttttagcatttctcttctatactatactatacataatggtcaacccatattacttagactctatttaaatagctttatttaaaatcaattaaaatagtttatgtcttacaaaaaaaaaaataagatagttttatttttttttaacctttattacacatactaaataatataactataaataaaaaaataaataaaatcttatcacatattgatatagtgtatactaaataaaatatctatatttacataataatatattgaatttaatgcgtcggtacaaaagcatccaatgccattttccacttagatttttatatcacacctaattttttatttaattttctctaaacatcattttcatacctacttcaatagtaaaaaaatatgaatgaagattcaaatttggccccaccaaattaatatattgtggacaatttttttattattattctcaaaattggagaataatcaacataaatattgaatctaaacatattaaaaataaataatattgaatttaattgtctttgtgttgtgtaagctttacgaagttttttttctatgatttctttatttggtcatcttattaaagattgtaagaaatttttttgttcttttgagaaatgtttctgttatttttaataaacggtcaattaatatggtagctcacatctatgttcgagccttcatattatactctgattgtaattttaatttagaatttgttccaactgatttgttaccaggattagtagcaaaagttaatagttaatgaaaatggattttctataaaaaaaaaatgacaaagaaaaacttcaaaataaaatatatatgtgtaaaatatttatttatatattacatgctaatgaaattcatatgtgacataaataactctacacctaaccatattacttttctttaattttctaaatttaatatgtggggaccataaatttttcaacaattatttggattttcttaccacaagtttggagtcaaatttcaaaattaaaaatatatattttaatatttataaaataaaataaaaacaaaacaaaccaacaagtatttttgttttcacacaatacaatgatctacatgatattttaaagtgtccattgttatatgatgtagatgtgtgattaaatgtaatttaatattagatcacacgtgtttaagttcattaatttttgctataaattttcaaaatagatgaaaatgttggtttgacacaattttaaaaaagaaattataataaaaaaaatatttgataaagagttaaaaaaacaatttattaaagaatctaccgaaagtttacagttaaaattaaaattgttacaactcaaagtttagattttgaattaccttaattataaattttttgggtagttaataacctaattatactaagtacatgtggtgtaatataataatatttacggatgagtttggtacattgtattacatcgtattgtattatattaaattttattttctatcatatttttttgttaatattatatttggtattgattaatatatgtatataaatatatataatattttaatataaatcaaaatttaacatattatataatattttacactataatttaatacaatgcatcaaacaaattttataaatttaatttaatattagattgtgtgtgattcaatattaaattatatatataatatatacatatgccatgttattggacacccaataactatttacttttttaaaatttagatcttagaacaaaataaaagaagaagaattggacaaatttatagctatagatggacaaaagttcttggatctataatcaatataatatccaaaaattgactataaataacttttttcacatgcctaacaaaaaaaaatagtaaataaaaaaattaaaagtaacaaaattttctttaaatttattacacaaattatcaattcattttattccttattaatctcacctcaacatgttgaaaaacacaataactaataa

SEQ ID NO: 303257 - DNA, 3591 bp, Cannabis indica
tggttactacaactattagattaagattgaattgatctaacagtaaaaaaaccaaagtacatccaatcgaatttagaatacatcaaaatggaaatggatttcatctgtcgcgaaaataacaaaattgaattagtacatcaaaccgagtttagagtacatcaaacaaagtttagaatggttttgtctttgagaataaaggggcaaaattcattccctatatgtgtaaatacatagtgaaactttggatatgtatagtaaaaatttgaacaaatgcaagatatacaactagttttatacatgtgtaaaaatcttagaattcataacaatgtaatgttcacctaaatatatctccaaataaacaagcctatttggtattgaaatacaactttgagctatatatatcaataataaaccaaagattacaagttattacatttaaattaaaacaatcaacaatagtcccttttttttctttcacttttctctcacttgaaaattaaatgaaccaccaaaaccaaataaactagaaaaataaagaaagatggtatataggaatatgaatgatgaagctaacttaaacactttacttgctaatatctctaagaacaaaaattaattgcaaacaaggacaaagaaagaaaagaatctatataagagaaatttaattgagaataataactaactttattttgattttaggtagttttgtaatgtttttttttttttggttttttttttacctgtatttttgacaccttgaatagcttagcttattctccttcctttattttttgagctttaacttagcttaacttcactactaactagctcatttgttcaccaattagatcaagacccaccaagagaaatgtcaccccttggaaaagcaagaaatagaaatgtactccttgagccgaaagaaggcttctaaaggcggcggtgagtagtaagaaagccaaagttagctcctttttgaagatcttgttcgtcttttttgtaggagatttcgggggagtagcctcttgatgcccttttaatttgtttagttcggagagaccactatcagaagttcctctgaggagttgagtgtgatgattcatcgcttttgattctcgctcctccacggctaaaaggtcagattctgatgacctaccggcttttttggtgacgacccattcgtacgagctacctagtttgaacaacccggatatcatggcattgaatttggtcacggacattgtgttttcgaagagaaggtatgggacgataaagggaaatgatcccggggatgggagaatgtttaggaatgacatgaaaaccgggacataacaaattacccataaaggtagctcggcttcggggacaaacatggttaaggggagaattatgcaaaacaatgtgaatgaatagaatgggagaatcaactttcttaatagaaagaatagaagtattaagttggccttcttgaaaaatgttatctgaaatataaaatcaacaatgagcaaatgaatagaattcaaaagtaaggtaaaaaaatggatgtttgtgtttgtttgaactacctttgaggtaatgatagccgggagacataatcgaaaaagatgcatcgggccagaatgccatcggtgttgctgctttttgtaagcttcataggattcaggaagttcacaaagaacctagaaataaaaaaccgagttttgttattgtaatcgaactatctgaaactagaatcctcgcctaaccctacaatatttcgagaccaggaaactataacaactcgaaccctaaaatagcttacaaagaaaagaaaaaaggagctacctttacatcattgacaaatatgaatttccaaccgttgagatgagcgcgaacagctatatccatatcttcaacggttgttcgttcaagccaacctcccgattcctcgagtgctttgattctccaaacaccggcggtaccattaaaaccgaagaaattaagaaacaccccattaacctgttgttcaacctcgaaatggaaacacaagttgatgttttgaaggcgagttaacaagttctcatctttgttcacaaaagtccatctagcttgaactaaccccaattcaggattatcctattatcaaaattatcatcataagtaacagttaaagttaaggaaacataaaagaacagttaaacttataactgtaccttaaaatgtggaactgtcagcttgagaaaatccgggttgggttgaaaatcagcatcaaagatagcaacatattcataatctttaacataatcacaattcatagcagacttaagattcccagctttgtaaccagttctaaccaaacgatgcctataaattatattaacacccttttggctccacttagtaacttcagccttaattaaccattgtatactttcatcatcagaatcatctaaaacttgaatcaaaagtctttcttttggccaatcaagttgacaaacagctgaaattgattgttcatatacctgaaaaaaaaaagttcataaagaaacaatctttaataatctaaaactctttttaaccaatataaaaattatggaaaaaattggtcaaaatttacaggtgattctaaatatttaaaacgaagaaattgaactaaaatactctcttaaatggtgaaacaaattaagagtctaccgaaatatctactgaaaatttacaagtaatcttaaataactattacggtggaataattggactgaaaatgccgaaacaaataaaaaatctaccgaaacacaccactaaaaatttacaggtaatcttaaataactaggacgcactagagtagtctataaaagtagaccactaaaaatttacaatcatgaataaaaattgaactaaataacttttttaaagataaagaaatactaacatgagagagataaagaaagaaaagtatacctctttctcattacacatgggaatttgaacaagaaccatgggataatcaaatccaacaccttccaaatcattagacttaaatggttctttctcaacagttggtttaactttcttgtacttaatccaaaaacaaccaagacaaagaatcatacggtcaagtgattgaattaagaaaagagcaacacagaaatttgatagagaaacaatcaaaggagcaatgtagtctgctctaaattccaaccaaaacacataaacactatgaaacaaccctttgatctcagaagcattaggaagaatatgcaaactgttgttgttgttgctgctgttctgaaaataatgccaaccattcaagtgagcaaaaacttcaaaagctaagaaactcaaagccattaacaaaaatgttaatatgagtctaaacaaaagctttgatttcccagatttttcactttcttccatagcaactccttcaccaaaaatgagtctttttttcactgaaagtaatgcccacataagatttcccacccaagaaacacaattaacagctctatgtagcttttagaagcaaaaccccatagtgtattgtttagcatttttgcctctatctttatcaactggcctaaatgcttcatctggccatctatttcaagcactgagtaa

SEQ ID NO: 303258 - DNA, 4502 bp, Cannabis indica
gaccaatagcgatattgacactggtgccctttagtatttgtcttaaaacaatgtgcatatgactacaatggtaatttgggaaaaagtcattggctcattaaaataactttaattagtaggagaattaggcagagtcataaccaataaaaagatagcactactttctagccattttctagttaataaacattactaattagccattttctctcttggtcctactcctatgtcactagtgcactactcaaagatgttgtagcctaataagatcaaaacttaaaacaaaaagtagagattaaagttatttgcaagccaaatctcacagtcaaagaatccaatgaagattcatgaatataaaaggtggccccaaaggaatcttccttatctctcgtgtttccccaataaattattacttttcatgtaacaaaatcatttacataatacatttaaaataaaagacagaggagatgaacttacatataactccacgtatagtattatctgcaaagacaaaaccaataagcatataagcatatcaaaactcaacttgaactcagaaattaagaagaaatgaatttgaactttgaagggtaggtagactaaccgaaatgataattcgaccaggagtgccaaaagcagcttggccaatatccgggtaagtctcgagtcctggctcgctatctaagcaacgagccagaagcacgccagtgtagtaagaaagcgccgaaaacacaaacaaaataacaagtccaagccaccctccttgttggactgcataaggagttgacaagattccaactccacacaacacatttattcctgcataattgaattagttattaccatgtctaaatatgattccaactcttcatattattactcattctaatatgattttttaatcaaatcagaatttatattaatttgacaatatatgatatgtatacactgtcagaagcctggcaggcctagatatttatatgtatatttaaggattgataaagaagccaaaacagcttagtcatatagaaacagatgtatttttgttggttagttaagtgtctccatgtgcaccatgtgcaataagagagtagaagtctaagatacaccacatgataattcatgctaagtttgtttggaagctcctaaatagaaaatgcaaagtttgaaatgataatgcagataaggagacatactctatactcaaccaaatttaaagataaacaaatctagtatttttaccagcctcaaactaatttatagagaccaaagtaataacatgttattctttttaataaatatatactaggactaccaacttgtttcaacttgtgtgtttgagaggggccaacatagtaaacaatgaatggccaggaaaagtggtctactaaggctgaaatagatgggagaaatagacatattaatatgattgggcaacaataagaagcacagggtcctacatgattggctttatttgccactaggtgaaaccttatatttattaaatattggaaatttcaatttttgttttgttatcatagggaaaaaagaaactcataagttacttaccatttgccacagtttgtgcaaatgagctgttgcgagagatagggagctcatgtgagactttagtaaatgatttttcatctctccttatggaagaccttcttgatggaggaatagcaggagggagaaggtgagagctatgcctgtgaggtggttgtggcggtagctgttgccgttgctcatcttctaaaaatggtctcgtcaaaggtaacaatgaatcaggagtgtgccttcttgtaagcgaagacgacagaaaagaacttcctaatcttgagaatgaattaggagtcccaagaaacccaagatttggagatggtacactactataaagatcaatggattgcctaaaaccaccaaaaagatagaatcaaaaaaaaaataaaaaaaccaagtcaatctttgtttaacaagtcaataattaaagttcagaacattcacattgtaggtccaattgagtggttggagacatttcatcaaaattaaacaattaagtaaaagacacataaatgaaatgaatcatatgtgtatgaaagctacccaaatcaatatataattcatcttggattatctgccacttgtagtttcttttaatcagtagcccaatcgtagtatatacttaaataaaataatgcttgccaatttaaaaaataatgtgatatgatttttgaaaagcaacaaaaacataaatgattaaaaatcaaatgataagaggggtaattggtttattaaaaattatattcagaacaactatgatttgtgtccattaattcttacataaagttcgaatctcagtttttagaggttcatccttaatgatggaaactgtgttcacaagattgtaaagtgaaataaaagaagatgaaatattgtacctataactttgaggccatgcggtattattgtatgagcctggtcgatcatggttctgatcttcagccgaggaatcagaacaatctgagtctgagttattttcttcgtcttcttgacctttgagtaaccctttctcatcctcataatcttctcctctttcaccttcgtttaactccttttcttcatcttcatcactctcaatataaaaactatgttcatcaagcgagttgttcatctttttctgcaaatataaatttaacctttcaatcttgaccgtgaccacattcaagggtctcaagcaaataaataaataaatatatatataataataataaatatttcgtgtttattaatttttacgaaaatataaagaaattttcacgtgatggtgtgtgctaattatgttaatatcatcataacagtccaacactaaatacagaaaagaaatattaaaaagagaaagagagaaggaaaatagagtgaaaaactaacaagattcgaactctgtttctgtttggttgaccagaaaatacaggaaaacacttttggaaaataatctcaaatagcagtgaatacaagtgagaatttttcttttggaactcattcatatttataatagtttacgaatcctaattaaggtgggattagtacaaatcaaattttacaattttctaaacgaaaaagattatattaaaattcaaatcttaatggggtactcctatttaatttaggattatggtaaatattattattttttttttttttttggaaatggaagattattgaaaacattatcagattacacgttttccaaatgaagactcttttttttcctctgatttctcaaataccaagaaataaaaataaaaataaatcagagacttaaaattctcaaaaacaaaataatcagacttaactacacatacaaaaaaacaaaatatttatggttagtgttaccttttattctcgaagaaagaatcccctaaaagctgaagagaataataataataataataatagataataataataaaaaaaaatctcttgttttttttgttgattcagacccagtaaaagaagaacaaaactgagaaaagttagctcaacgtataaaggtcctgcaatatcgtcacttctctacacgtgtactattactatcaccatatatatatatcattgaatatatagtataaatatataacaaggagattcaagttgagtctgaaacttttgttctgtaaatttgtggttgggttgggttgggtatatataataagctcgatcgaactctgtttttattttattttatttattttatataaatgtattatgattggttatccagcaaataattattaaataaaataagggaaacacagttcacttacttgatgccatgatgttaataatgctgccaatattgctgagcttattgtactttatttatggtaaataatgttccagaaaccatatttgattttttttttcttttaatttttagaaaagataaatggaaacatatttttctattgaattatcatgaagattctgcatcaaatcacaatggtagtctaagttcacaacaatggcggagccaaccaaaattttgatggggccgatacatgaaaaagtataaaaaaattactacaatgtatcttttaaaaggggtctatactttatagatccatcccttaataaatctcacctaatgaataaataataacaaactaaactgattacaaattggagaatgtacattcaagactcaagttaagtccatctatggaatacaacagacacatgtaagattttttttttttttttatattaatgttttaattgttttgttaaaatatgggttgatgaattacttattttttatcactttagccatatagtttagtgctttatattttatgggttattatgtgtgttaattctagttagcttaagtttttaatgagagttttactaattctataaatatatatagtctcattataattctatatagttaatgatcagttcatttacttttattttagagatttaaggaggaagactta

SEQ ID NO: 303259 - DNA, 1585 bp, Cannabis indica
ttttttattttatttaagtcgggagtccaagtctgaagccggggtgtggtccaagttcgggactgtggtcaaggccggagtccgggtcccaaggtcgaggttggagtcagagtctaaaatattaattaaagaaaactgtttaaaaaaattttgaaagaattttttttattattttaaatttttttaaaattttagttctcaattaaaaaattgacaaaatgaaaacaatttaataaaacatatttttgaaaatattttcacttaaaaaactaattaaaaatgttaccaaatggacttttaatatattttaaaaatattttcacatgccacgcgcagggtcacgtgctccccttatctgaaaagcataaaccaaaacgacagaggcttgagagcgaaacgtgaagcaatgagcagcgcagaattatttgtgactcaaaaagccgaaaagtgtccttccattagatcacatttacagctctaagttgcttcaaaacgacgtcgttttgattctcatccaatgctctccctcacaccttttattctgaggtggtaaagttggattaaataattaaacaaaattgtttttatttttgaaattaaaagaagaaaataaaaggtcagaaaaatcagacccagttatagatgatctctaatctatcatgttatgtggaagaagagtttggattagaatttttgaatccacagagtgttagggtttttttttgggttcgataatggcgaacaacaggtggaactgggaagtgactgggttcgagccaaggaagactacgacgacgacgtcatccttgtcggcaacgtcctcgccgaagtcgacgtctacggactttgatgattacaagcatggtgcgccactagtccggagatactcgatctctacgggctcggtgttgccgcagcattcggagctgtctaagcacaccattgcctctaaacttcagaaactcaaggataacattaatgtaattggatttgagctctggctaacagcattaacgtttttgtgttttgggttttgaattttcattttttagctggttacgaggtgaggtgagtggtagtattggtttggttgtgtttgattgttggcattgtactttcaaactgaataggaaatgagtttatggtaatttgagttcagcagttggaagtttactagttttttgttttttcccttcttcttctcatgaggttggttttaggggatttggttgacgtggtttgtttggttgatgtattttataacttctttttcatttaaattttgggcagctagcaagagaggattacttggagttgagacaagaagcaagtgaattgcaggagtactcaaatgccaaactcgatcgagttaaacgatatctaggtgttcttggtgataaatcccgaaaactaggtcagcaagtcctgtctatgtttatttgtaattttgtatggttgagatagtagctcaatttttggtgttgctttctgtatcgtgtaaacttgggtggcgtttggtttggttggaggtaatgtaatgggatggaatagaatggagtggaaataaaacaatttttattctatt

SEQ ID NO: 303260 - DNA, 1712 bp, Cannabis indica
ggcataaaacccaacataaagttgataaagtagggaagctatcatatcgagtaattctagtgagatttattccattacagaaagggatgaagttgttaatgaaggatatgtcttttttaacgaaagaccaatggttatgaaatcttggaaccccaacactaatttcaaaaaataagatgtgagaaagactctgatttggatttgaaatactggggtgagaggtcattgttcaaatttgttggcgaattcaggaagcctttacatgtggatttagtgacaaaactcagggataaactagggtatcaacaagtgctcatagaagtatccctcaaacaagacttccttgatcttatttggtttgaagatgagcttggttttgataacaatgtttcgattacaaatgaatggaaacccatcatatgtggtcattgcaaaggtatgggacatgccactaatgtttaccgaaagaaagaagggaggaagcaacaattggtgattaaagaagatgcaaagaagatgacagaaactaataccagtgttgatcggaagattgatagtgaggggtgccaacaagttactaaggggagaagagaggcaaagaagtaacctattgttgagactcataaaaataatgcattttaggtgttatctaaaatactaggtccctcgatggcatctattgaagaacttgtgatagtagctgagaatgatagagtaatagcaggtggctcagatgtattgtaggtggatgagaacttcacctttgagaaggcctcattaaaaggtttagcaagggtagaaaggaaggaaagaacatgaggagggggagtacctcctctatgcaatggataaaatcctaaattcgaatgtatgagggatcaacgatcaataaaaatagaatttagtcaagcaattgattaattctcagcacattactcttgttggtcttctcgagacaagagtcaaagccccgaagcttggggctttgtatgtaaatatgttcaaaggatggtgttttacgtctaacatagcttggcataaacgagtgtgaataatagtggagtggaatccatgtagcttcactgtaaatattctgaaatgtactagtcagctagtacacttggctgtctcgactttggatggcaaaaataagttttttgctacctttgtctatgccttcaatgacatggatagaagaatgaacctttggaatgacattcaacacttaagaaccattgatcctttgattgtcttgggagattttaatgatattttgtgaaaagaagagagaattggcaagagattcaactacaaaccagagagaatcggcgagagattcaactacaaaccagcttctaaattcgttaattgtgttcagttttgtcaactagaggatgtaaaatatagtggaagctttttcacttggagtaacaaacaacaaggcagtgacagagtttgttctaaaatttatcgggtactagcaaactagcaatggttgagtaccttcacttcggttgaagtgttatgcttgattaaagggttatttgaccactcacctgctgtcttgacagtgcatcctgaaatacaaagtgttaaaaaaccagtcaaatatttttgtatgtcatcttcacatcctcggtacccactgttatttaaagaaacatggtagcaaccaacctgtggggctgttggaatttattttaccaggatct

SEQ ID NO: 303261 - DNA, 1638 bp, Cannabis indica
tctttataatgtttcttactaggtaaagactacccctactcaaacttgaagccctctgatttctatggttacgcattgaacttggtgtttttgcttgtagtaatgtgaagctactgttaaaggaaaagtaagtagaaactagaaacgtttggtttgtgtagtttcttgaactctcaaaacacttaatttgtaacaaaacaaacactatgtcactatcctctgacaattaataatttgttttgttatgtttgttttggcttgtgcttaattgttacgtggatatctcaaatgaatgtgtttgtgataatgtctacgttgtaacgttcattatgctgaaattgctgtttaatttttttttttttttttttgtgatatgagctcattaagtgtagataatatatgcccaacatatattaattagtagttggaaaattgacatcacgtagagattgctatgatgaataatgaagtgtaattttgaaaaatagcagtgtacaagttcattaattaatgttactcaaatggttgatattgagaattaaaataatctctcaatttgttataaggatataatacaccatgtatataaatatatgtaggagtacccacccaccaaatatttggcttttacaataatttaaaacttcatcactagagatttctacaaacgattattttatttaattaccacaaagacgtactgtagttataataacttttcctagctaattagctacaccaaccaaaacgccaagtttcagttgatagttggaccacctaaagaaaaaccaaaaagctaacacaaaaatttcacttagcttatgtcttaccaaataaaattgttatataataagttctaaatgctctatacagtatctcatcaaattccatttctaaaggaaaaaatatattgtcacacacccaaacaaggcaatggctctagaaaatggagacaaagcaaaggatgagtcaagtccggtggcagcagtggcggcggcgatgatgaaggattggacccttttcatgcttaggttagcttgcttcttggccacggcttccgcaaccattgtgatggcacttaacaaagaaaaaaagactttggttgttgccaccattgggaccagcccagttacagccactcttactgccaagttccaatacgacccagcatttgtgtaagaccttagctaaacaatttactttgtttttttaattatagctaattaatttctttgtttttattatatctataatatgtatactaaactaattttactatattttaatgaaaattaacaaggggattgcaataattatgatttactttgatggtgcatgttaacaggttctttgtggtagccaacggattagctagtctgcataacttgttgatgatagctcttgacattttcaagcacaaactcagcgacaagggtctctgccttgtcattattccaattttcgatatggtacttccttttttctactcctattattaataaaaggctaattaagattttctccctgaattttgacatctatcaaatcatgccatctgaacttttaagtcgttaaaaatgtctcttgaagtattgagattgttgaatttaaggacttttatccaattttagtaaaaaa

SEQ ID NO: 303262 - DNA, 3647 bp, Cannabis indica
aaacatattttataaaactgttttgactttttaatttttattcgagaatcaaaattttaaaaattttgaaaacaaaaacaaaatcactttcaaaattttttcaaacaattttttaggaactcggtctccggcctcggctacaggcctggactcaaaccacgtccccgacccccagacccggacctagacccgagttaaataaataaaaaaaataaaaattatagaacacatttttttctatttttaaaattaaaaaagcaaaagtggttatagaacacatttttattttttaaaaacaaaatttttaaaaacccaaattttattttcatttttgtgattaaaaaaattaaaaaataatagtgttaccaaacgccacctatatatttaattattattattaatgttaaaatatttctataattaatctaatatgtttattatttttaatagaattaatataatttgtttattaaaattaataataaataagtttaaaaataaaatatttatgttttttttttttaaaaaaaaaaacttatgtttataagttattcagaaatgtgtttttaaaaaataaaacagtaactaaatgtgacattatgcatatattatggttatattttatattgataatgtttataaattgttaatttgatatatatagttttataaataaaataggtatgtgttttatttatttatatatgacttaggcaaaatttattaccttatatagatttatagaaaaataaatttagatttatgtattaattaaataaattattttgtattacatagtataacaaaattatataatatatgcaaagttataaatttctctcaatattactattattattattgtgaaaaattctgaataacttatagctaggggttggatctcgttacttactattatgaacctctcctaatttgagttggcacggcttaacttctttaattagtttgactcttttttgttttttatgattattataaatgttatttatcttacgtacaaacttgatcctatacttaattagtttgacttttgaaatgttcgccatgccgaccttttctaaatgatcatgagattttgaagataccaagtttcatgcaatatgatatgtatacatatattataattaatatatatagtgatgttttaggcacattgttttttacttagaattgcaccacacaataatatgtcagattaatccaccgagatgcattatatatgtaatattttatgtctggtagtttaggatacctaacaccttatatattaaattataaaaaattggaaacatgatacaaaatgctacctcatgtagtcttgaatatagctaatttaaatcaaattaatcaccatatatataagatgtcttatatcggttaataatagatatagtgtcacattatatgtcaaaatattctttaataaaatggtaaatattgatgtgtatgcttcttacgaaacatttactgtgtgttcctatatataatacatgattatgattgaaactgaatgaaatattgcaaattcatacagggagtaagtagtggagcttgtgcagctagtgtgcttgtaaaaaaaggaaaattacatgtagctaacgtgggagattgtagagtaattctcagtaggaaaggagtagctcatgtattaaccaacgaccatcgtttgaccaccagagaggacgagcgtcttcgtatcgagaattccgtacgttcaccatcttattatatattaatttgcttaattgtatattattacatacatctaatctaattatataagggttgcagggtggatttgttcactgtcgcaatggagtttggagagttcaagggtcacttgcagtctcaagagcaatcggggatcaacatttgaaagaatgggttatttctgagccagaaatcaaaactattcctataacttctgactctcaatttttgatagtggcctctgatggactgtgggacaaggtatatatttatatataattagaagatcttagatttatatatatataaatataatatataagtatattttatgtataatagattattaattatatctgcagatatatgaccaggaagcggtggatattgttctaagagaaaagtcaacattgaaggcttgcaaaaggcttgtagatatgtcttcaagcagagggaatatggatgatattacggtcatggttgttaaacttcataactttatgcacatataggccgttgttagtgatgccaaaatgtcaatatattacttaaagcatacctaaaatttacataattagttataataatagaatagtactacttgtatagagatttctgtatcggaaactttttttttgccgcattacatatgtttaattgtattttcatattcttcaaaaaaaaaaaacattgtattttcataaataattaaatctcaaaaacattatctccatacataaatgttattcgcatttcgaacgtgagacactggcattcaatgagggggatcagcctagtaattttttgattaaaactgatgcaatcctatcacctcctggaatcagaaatatggtcaaatgaatgagtatacggaagcctactcaaccttgccttggcttcccgaacgcagaaggtgaattgcctttcctagacccgaaggggtctaaacatgaaagcttgcctagattatacctgaacgggtactcaaaggccctaatgtggatgtcgaccactttagagtgtcgcggatgtccaccttttacgcatgccagatcatcaagtgacggttatgctttttctgacaaagactggatcgccacgcgtccatacggtacaaaacggtccccattatctactactacaaaatgagctattcccaacggttaataatagggtctattaagcgaaaatttcacatttaaaatattaaaaataaatgcaaaacacaatttcacctatgatgaattatagcataagaatttattagtttaagttcgagccatccaagattataagaataaccccttaattacaatccttttatttaaaggagataccctttgattccaattacgatgatattaaatgatttgaaataaattaggaaaatttggggtaaatttggaattgcagctgaacttagtccatttaattaaccgagctgcctacataccttctttgtgaaggatcaagccacttgtagttcagaatacggtattttagaatttggatataaggattcaggtagatgaccactttcaggaatccttggctatttaaaaatttaggaaaattcctacgtgtatgaccttttatggaattttaagatttgtatttttataatatttttgcggtatcagcgactgcacttagtcttagcaactaagttgcctacgtatccttttataggaattaagtcaaacttagttctaagttttaaaatttttgaagaggtgaatgacttctcttttttttgaatgccatttaatttgctatggctttgaattttagtgcactttttaatttttttttaggtaaaattaccatttttgagattttttgtgaggttaagacctctttgaaatttggtgaggtgaatgacctctttaatattccaagattaattttagtgagct

SEQ ID NO: 303263 - DNA, 1387 bp, Cannabis indica
aaaaaaatgattttctagaaaagagattgacttgacctagactttatgaattacatgttatgtaactcaattgacttggcaaagaaaaattggtctatgtccactctctccttcaaaaaaattggtaatatttttccaaggctattggcaacaataatttttttaataaattgagtggagaacacagggataaaattttgattttccaatcaaaaaggaaatgactgtgagtacattttccacaaccacagataattggattggacttttcaaaaaaatattagtgcttgtcaagtttcttaataatgccattttttttaaatgctagtggtattagtgctcataataagcccactcaattattatttttctaaaacttatagtttttttttattatattttagtttttatccttataaatttttttctcataatttttcatttttgccctcataaaaaattatatactttgtttagcttccacaaaattaatcctacctctataataattttttatttagcttcccattaatgtcaagatttatcattaatgggatacattcaagaagatactttttcatgggatatcattttttacattaaaagtggtagaaatccaatttccaacattaaaatttagtgggcttctgaagagggcccatctaatgatggcatatgtgaaattggaccaaggaatccaatataagaacaagcagtggaactgtggattggactttaagttttttttttttagagtaattcttaaaattagaataatttacttaacaatttttttttctatttaactatattcaaatactatgaaaataactcttattatctatatataatagttataaaaaattaaaaaaatatatttattttatacttttagctataaataaaagtagaaacttagtcgaatagaataaaaaaatctaacttgcccttaagcagaaactgagaaaacaacttcaataatgaaatgtgtcttgatttgttatttgttatttgttagtcattgttatttgttatagatatagttttgaatttgtgatgaatctatattttactattgtaaaatattaagattgctctaagaaaacaacttcaataatgaaatgtgtcttgattttttatttatgttatttattttatgttttgtcttaaagccaattatctttccatttagcccaagtgccctagaatgcattgaatttaagttcatttttcgttgaaaggattattatttaggggtaagttgaaaaataccccttttattaatcaattaatcaaatttacctctaattttatatttatttgaaacatacctctttttatatgtattgtacccaaaatatcctaacataagagagtcacatggaga

SEQ ID NO: 303264 - DNA, 1994 bp, Cannabis indica
aaggtcttatctatataaatataggacctcgccttttgtgaaacagaataaatctatctaaaaagagtagaaagagtttggaagcccaattacccattaataagttttctttttctttgcaaattcaaaacttatgtggaattgaaactcaaaaaaccaataattggaggtattttttgatcatttagttatatcatgtatatatgtttaattgtgtattttcatacacaattatatatacttcatatttaacatagagtttctaacattataaatactattagagagctatgaaagaaaataaaaatttaaaataaaaacaaaattataatacgagtaattaattacattaactctacaacaaaattaaacgaaaaccctttatctattatcacattatgataataattcagtttcactatgaaatgattaataacaaaatatcagttattcgaaatctacaactatatagaaaatggaatggtacacatattgtatgaaatcctttcaatttttctttaattaattaattatatgaaaatgtactatatatagtatattttattgtgagatattctctatatatatagctagcatgttgtcaaggtgtttgacgaattgccttaccgttggaggagatattgttttcaagcacccaattatttgtagaagacccatttccactactatgatctccatctttattattattattattaggattattattatgctcaaaagtactcgatgatgatccaacaatcgtattattattatggttgctttgttgatctttgttcattagagatgtaatagcagccgctacagcaactctaaacttgggatccgaagctatggccgacgtcacattctcggccatagatgtcgtcttttcctctcctcctcctcttcctccttgccacgagccctcgttcaatgctcccgaggacggcctagtactgttcggaatagtattccaagaaaaattgttattattgggtggctgatgatgaagtgaaggtaatgggaattgtggggtgttagtaatattgtttgtgaggtcaagaactattcccttggaagggtcattattaatattagggttaagagttctaaaggttgatgatgatgatgaggaggaggaggagttgaaatgagacatcatagggttgtttatgagcatatgatgagtgtagttggaggtagtagtgtggttagagtaaaggttatttggtgatgatgaatctagtaacatataagaagatgccccatggccagcagatgtggttgaagccatggctgttgcacccactgggagtggatggttgtgtgttccttcatatgttgttataagtatggacatgtcttctaagcacctttgcacctgcgtacatataaagattaattaattaataagatatataaataaataatttagtaataatatgcatataaaaagatctgtgacaattaattcaccaagtcatgaactgtgctttaaataatgatgagaaataataatattgtttcttatgatttgaccaagtttctaagatttagaaaagatttggatcctatccttaatatatataataatctattatagtaatttaaagggactaacatatacatataaatatatgatatgatcaatgctattgctagcccaattaattaaataaaaatggaaattcaattaatttaacacaagaacatggaaagtagtgtttggtttcaagcaaaaaaaaacattatgtaagaaaccatggttaattaattagctctcaaaattaagtaattcatgatcgatcttataattaatggtatataatcatgataatccaaacactttccaatcccattaagtacattattaagtatatatatgtatatgagtgtaaatatatgtatattattacctgttttctgactggacatcctggagctacagtgcatcgatagtaagctctggggcaagggtttcctttagctat

SEQ ID NO: 303265 - DNA, 3715 bp, Cannabis indica
gtatgtttcaaataaatataaaattagagacaaatttggttaattaattaataaaagaggcattttttaacttaccccataataatttagtggatctttaactaatatagccatttctttgagttaactgggccttgagaatcgagatccaaatcccaatataaacacatatatatattatataaataggttatttaagatttttgtttgtcataagtataattatgctcacagaattgttcagctaattaaaaataattatgaattattcacaatgtacaatagttattctgtcaaattttgttacactttgacaaacatgattaaagaaattaatcttgcaataaacatgattgattatttgatacgcttaaaaattaatccaatttatgagtccttaacgcttagtccgttttacaaacctggccgggctaaatggaccgagatcaacaatggcagcacgccctttaagcacaagctcggccatggctgcacccgtggccggaccattcagaattccccaacaactatgtcccgtagcaacgtagcaaccgttgatcccaggcaactccccaattatggggagtccgtcgtctgtgcatgggagaaagcaagcttgctcagctttcactcgggcctctccttcccttagatgactcgaaacactgctggccactcgcttaagtgcctgtatcgattcaggtttgcctatgatctgttccgggtcttcgggaacatcctcctctgctgacattccacatatgtacacctcccctgccaaaaaaacaaaccaaatcaagacacatttcaagtaattctatataaaaataaggtccaatttgattgtataaacaaactagaaattgaaaactatgaagtccaaccattgattttcactcacagttttctcacgttattcttttactcttctaagctttgatcaaaacacatagctttttctgaatcaagtactaataataattaaccatactcatcaatctttacggattgaaccaatgagcaatgtaactgttgtaaaatctgttacttaacaatatatcagcagaaacaattaaccatatttaagaaatttaaagaaaagaacaagttataatcattacagttctctttgtccctctctctctctatatctcactcactttcccaaaccccaagtacaccaaagctctcaataacagtctgttctttacagagcctttctaataacaggctgtcctcccatgttgcaacacataaaatgaatgttcatgagagaattaacttcaacaataattgtctaaccgttcaattatggtgattgaaaggttccaattacactctccaattgtgtaagtacaggaaagttttcactttaaatattaactttgcataattctagtctcctgggcattttctcaaacacccaccatactccccaaaaaaaccaattttttctttaccactttttcaaaaatgttgatcaaatcaaacccaaatgctgtattgaaaattcaaacattcaaacaatctaaaattacctgttggacgaggataaacttctgggtccaatggctttccaccattagaaggataatagcttaagaaaagagcatgaggagttatcaaaccaggctctttaggctccaaaacaatgctatgagctttcaaaccagaaaccctaaacaaacaagataaaagctcaaacttcccactccatggtccgagtgccaaaacgacggcgttcgactcaatcactcttccaccttcaagaaccgccgagttaactcgtcctccttcctcctccaactcaactcgttctaccttcccaatcacaatctcaacgccgtaactctccacccctttcgcaatcaatgtcctcgcgaagagttggggatgaacctgagccgtggtttccactgtcccaattgttcttgggctccgagctgtactcccgtcgatccacgacggtaatttggaggatcgagaaccggaggagggaggattttcgtttagggtttcggagatcgtgagactgagagtgtctagggttctgtatccgtacgatttggggccatcgagttcttcggagagcgagcggtggagattgaagctagctcgggcgagagaagagacgggtccgctgtcacaccagtcgagggcgagaaagcctccggctttacctgaggcggcgccggcgattgaagatttctcgacgagggttacggcggcgccgtttttggctaggaagtaagctgtgcatactccgatgactccgccgccgcatacgacaattcgtttggggtggttggtctgagaatccatggtgaaacggattgaggtgtagatttttcggagttgagtacgtcggagaattggtgggagtgacactgaaaatggcggcgaaagtcgtactgttgtaaccgccgccataactgtttttgtcgaaacctttgtaagaatttgacacgtgtgattttcatgggccattatctataatcgtttcgtttcggtttgtaaattgggttgagttgggcttgggccttaaaaattatgtaataaaactataaaacttattttgattttatattaaagttgattcatgaaaccaaacaatatgcaataatgacaagagaatcaagattttttgtgtttttgtttcttttcatattaaattaagaaagagtaagtattttttttctttttcaaaatagagtaaatattattttttgaatttgtgttttgtaaaaattattaattagactttctattttgttaaatgatgaaataaattctgtattttataaaactgtacaaataagactctaaactgaattttttctgaaaataaaacttaataataacttaatctagaggtattatgacaaagctgattatattttcaatatatgttcgtgctaagaattgccttcaagttagttatcttttaagaaaaatgtcaaaaattaagctgagggtcttattttcatcattttagaaaagacaaagtctaatttatcatttaacaaaataaaagattcaatcggtaatttttgtaaagcacaagatctaaaatagtttatgcccattgaaaaattatatctttttaatttagaaaattgattttttttttttaacttagaagtatacatatgcataaaattagatatacataaaatacatttgataaatagatctaatctaatacctaatagatatttttaattgaatcgaatttaaatagatttaaaaatattgaatgtaatctaataaacatctttaccggtggtgtgtgcacattttctttgttaaagtagtgtctgattcgaaacctactaaatctattcatatgttcttttggtgaaaataatctacactccttcttagatttcttaggttgaaaatgtaaactagatttgaaaatcattaacatgtttgagctattcaatttataacatgtgataatatcaacaaatatacttactaatactcaataagtggtgtaaaggtcttgccagctggcatgtgtgcgatttttttctctccaggtttgtaggtttcagcgttttgacggcttcgaaggtttcagcgttgacggcttcctgcggctaggttgttcacgttccgttcattgtgttttcactggtggagcatgcattcgaacgtctaattttttctcgtacgatcatagagtttcagcatctctggattgcgtttt

SEQ ID NO: 303266 - DNA, 3431 bp, Cannabis indica
atattagacacaccttaaaatgtctaataataattaataagaatagaactaattaatggaaacatgcatggttcattatcacaaagctcgatccaaagcacaaaatatattaaacttgataatattagtcttttttagcttgtgttgacaccactaaaatttaatttaatacgtaaataatataacatgtttttatttacatgacatcttattatactgacaaaaatatatacaagtcatttcacaactacaagtgatggaattattcacattgaaaaccaataaataaatatcatttatcaccaaatgataaggataacgatatttattggtttttttcaacaattgcaggaactgtgacttgaatttaatgaaactccttgttaaaatatttgtaagtcctagagttgacatgtgatttataatgactggtaatatttcagtattaataatagtaatagaaaaaatagtgtttatttattcattcatgatgtgatgtgttagctatagctagggtaggtttggttgataattaagcttttaattaaacttaaaacaaatttatgcagcggtcaaatataaattcacatagttagatgtcgttttctgcacgatatatatatatatatatgttagataatccagattttatctgccataataagtcgtgattttctctggaacaaatatgcggtttgaagatcttcgccttctccagctctcggtttagatcttctttttaaaaaaaaaaaaaaaaaaaaatatagcggtttgatttgattcaacgtatgtcatcattcatgaaagtgattattataaaaaaaaaatgtcaaaagtatattatatggtctcaaagcttacaacaatgctgtgatatattatatattcagcaagtgtttaaaaattaatagttacaaaccggatctaaaattctaaatatacaaaaaatacaaactcaataacccaataaaaattcaaactttattaagtgagttgaatattattttaattccaatggggaatctacatataaggctatggggtgacctgcatcctctaatatttttgggttttatttttttatatatataattgattcaaaataattaaattaagtatgaagtctcatataatttagaaaataatttttaaaagatatcactaactaatcaatcataagacgctacttataaaaagtgttaagtactacgggtgctaaaatgcttttaaatttagttattagaaagaagataatgtttgttgtacttgtactaagaagaacgtgatgaaacaggaaaaaaaatcaaattcaatattgaattgagaactcatttgtggtctttttttatttgttgtaaccattgtatagtggtatttttttttttatattagtgtgataagtaattccaaaaaataaaaataattacttgtttcaaatttttgtgtgattcctgtgtacatgatgttttttttttctcaactgtacatgatattattatttttatttgaaatcctaaatgatagctatatactaaaagagaaaaaataacaagaaaaaaattaacttggcccctcttttcatttttgcctggtttcaccactgaattcgcccatgcaataatttgaataaacaaatttatattttttttttagtaagcagcatgggaaatgtaacatgttagataagagttcgaaatgttaaattactttttttttcttttttttcttttttggtaatgaaagtttaattagttgaaagttggattgtgacacgtccaaaagagcatatagtataatagtactacagtctatagcgtaaggaatttattttaaaaagttaaatgttatggcatgtaacttttctttcagatgatgtcatgaaatatttaattcaaaggaaaaagttaaataaagatggatcatgattgtggaggataatgattatttagtatatatatgtacacataataattatcccaccatatgatctttttaataattaattatacaaattgtttttcttagtgcaattaatgagacatgtgtgatgtgactatggtcaaaggtggctgcaacctaaaagaaataatattaagtccacaattttttttaatggatatacatccttttaggtccataaatttttatatagagatcatactattggattgtacctattggtagtatcaaattttatttttgattttttttaaaacaaattcattttattatacaggggtttattcaaaatagattagtattttaaattttaatttattaatatacttttttcttcttcttgaaaatggtattaatatagtatttttaagtatattattttacagtgtgcgagtttatttttatattcactacaaaacaagcattaaaacaattatttttaagttttaacttccaagtgcttgataaatagcttgaactgtatgatccatatatcaattagtagttggtgtaaaaatatatttaagtactataagaagggtagaagtttagtaccaaatgctgcacacattggtcttttttgatttaagcgtttatatattacaacatgtttttacctgggactcgaacccaggacctccaacactcacacacccacttatgaccacttgagctagccccaagtggccaactgcacacattggtctatcataggatttttggatcacaatagcaatttcttgctgtgcccataaatagttattatataacactttagtttataggaaagataggaagagatagtcattgtgacactttggcaatctctattcttggattggtataattacaacatctgcagccttgttgttttggactgtttcttaggcctgcaaattgtttggtgcagtttcaactttagatgcttaagtcatctcattccttgtagatgttgacttgacttttccaatacacgttcttatcataagatcaccttagctatatataaataaagcaatgaagtagtgtgtatctgggtagaaaagggtcatatttatactgttaattttccaactcacaaaaacctttttggtagttagttaatagttagtaagaaaccttaaaagtctgtaattaaatctatataaagaaacaaaaaggaaaccttaaatgttctttaaatgttcttttttattattattattattactttagtttagatttttgttaaaggtctaaaatggacgaaggacatggtacatacatgtcttacaaacattgacagtgccctgtaggggtgttcactaagtatccgatccaattcaatccgcacgatccaatccaatccaatccgcaaaatgcgaatatccgcacttgcgcggattggattggattgaaaaatctaaaattcgcacttgtgcgaattggatgttgtttggcctaaaaaagtaaccgattcaatccaatccgca

SEQ ID NO: 303267 - DNA, 2558 bp, Cannabis indica
attaacattatttttaattctatatcacaccaataacatatattttttatttagtagaatagtatatatatatatatatattttttgtatagttttatgtaagttgctatatagattttgattgttaatgtgaattaaaaaaaaaaaaaaaaaaaaaaaaaaggtaataaaaatgggaaaactcatttttattatatttttcttacttaaagaaaacacacacaactataagtatattagtaatgaatatcacgataatttcaattcaaactacagaaaagttggttattgtcttctgaaattgacactatccttttaaaatttaaaacaaaaatgtcactatacaactactttgtacagcaaagtacctaaccctaacagtgaacctaagttagtatatactttctttcatactaaaaaaaaaattgagagactaatggttaaaactagttagtccaaaattacatgatgtgagctcattaacatccaaaatttgatgataatattaggtaaatgtattactgtcataattatatatatagcagatttcatgtaatatactcttaatcaacaatatagaataataataatttatagaaatgacttaaaaattagctagatttttttgtagttgatgattagttggcttgttctctaaaaatgtcacaatcaatgaaaaggtcactaaagaaagctgagattggaaattttgaataagtaataatcgatctccggacttaattaattaatatattcaatttgttgtttaattaattaataattataattcattaataattaattaagatatttagaaacaaggttttagataatctaatctcttctcttgccgtattagcaaagagaaaatacaaacaaagagccattatttgtgttaaaaaataattaatacttttttgtaattattagttggccaggtaaactataataaactcttcagatattagtaatactctacccaataatttactatgtatagtttcacaaacttttgtcccatttccaaaaaaaaaacgaaaagaatagcatttcattatgtactaagctttattttatttatttattttgaaacaatactaagctttatttggtttattttatgtacacttactactctctcactttgatatacttttttttggttaattaataatagttgaatcaactaaattataattcataggatataaaaataaattacgttattttcgataaaatttgaaaggtgctttattaaatccgtactattttatttataatatattcgatccatactaaatgtgtattttatattattgatccaattcaatttttaaaaatacaaattaaattggttgtgttttttaatatctattagaaaaatatttattttattgttttatataactaataataaaaataaattaattattgttgttttatgtctctagcaaccaattagaataaaaaatttaaagcaagaagaaaaaattatatgtataaataagaaaaaatatacatttaatctactatgttttgaaatacattaatatcatatgtattaaatttttaaatactatttatttatatcaaaatatcaattgtacatataattttttaaatatatataaatatgtatatatagattgaatttgatcaattattttattcaacattcgtataagtaagaattttaaatttttcaatctaattcaatattctacaaacgcaaatggattggattggattaaagtgtacaaattggaataaattaagtattttataatactcctacaaaatttaattatagttagttaattaattaaatagcctagctagccaatgcatgtctatgctctataaaataaattaatgtaatagattatgcaaatgtgcatagacgagattattagtttaacatgaacacaagtagttaaacataacgacatattgaagattatataccaagacaacttttattattaattcttttgtctactcatcacctattacccacgcacataaacacatatacaaatataaatatatattcaattatatatacatacaattctacaattaaaacaaaaaaattcttaaaaaataatagtgatgtttagtactattctatgtcatactgttattaatgtgttatcaagtatcacgtcttatataatttaattaaaaaaatattttttaaataatatcgttattcaattatagaacgttacttatagaaaatgttaccggtacccggtgtctgataataatgctcttaaactaaaggctaattaagatttttactccctgaattttgacatgtactaaatcagccccatgaacttttaaggtcgttaaaaataccccatgaactattgagattgttgaatttaaggatttttttctaattttagtaaaaaagtctaacagaatgaaagaccagggagccatgatttagtacatgtcaaaattcaaggtgtatgattttgtagatttcaaagtcttaagagcatggtttagtgtataacaaatactgaaattaaaaaattgaatgaaat

SEQ ID NO: 303268 - DNA, 4545 bp, Cannabis indica
atatatatatatatatatatatatacatatatgtattatctgatggatgagaaaaaatttcatgcgctttggcattttcttagtgtaatgtatattattttagctaattacaatatatatttgtaattaaatgttgtaaatattaacaaagacttagttttggttcaatggttaaagtacttcatgcaatataaaggtcaaaatttcaaatctcaatttagaaatttttatttttaatttttaaaatttatttgttgaaaagataaggatttcaaatgtgtttagcgccttaaccattaaaaccaacaattttgtagttactttttttacttcgaattatatttaatactatataaatataagtttgtatcaactttttatatattatattatgtagaaaattaaattatgcccctcctaacttacgaaaaaaaaattcacctcctgaactttaattttgggtccgccactactgaaaggtgatggggttttatatatttattccaactagatcctttttactttttagttccatgtgaaacattttttgactttagttgatttgttggttgtgactttttatcttggttcgtgcggactcggcataataatttgagactcaccttttgttgctgagatgagggtgttggtcattgaccagcttgagagatttttggtccttccaagtgatcactagcagttgttcgccattcttgtattgattcataatttaaattggtcaaattactattttaccctcataattatctctttactgtttagtaccattaatttactagtggtagttaacttatgatcatatcacaaattcgtgtacaattttccagtactagagttaacacttaaagttaactaatattcaatctaatagaaaagtcaagattttatattgtaaattatgttcccaaccatccacattattaaactcccaaaacagaagttgtcaattccctatccgagagattttaacaactgaatccaagaatgtaataacatgaacagaagttcataaaaactcagagacttaggttgatatactaattgattatctttatgatatgaattaggtctttatgataaacgataaagacaaagtaatcacatatcagtcctatcatagataatctctattatatgcattacctttatcgagatgtcaaactacatcaacaatttgaatcaaaattgcttgcactgattgaaggacatcagtaaaccatattaggaactgttgattaaggattttatattttaatatgttgctgactattttattcataatttataatcttaaatctcttgtgtagctactagatcacaatctcatgtatcaattataaattttttatatatttatatactataaattatttaataataatttaatcatcaaatataataaaattgttcaatttatttaacaattaaaatgtcttcatactttcttaaggcataacctttaatatgaggaactggttttgaatctatcagagatttaggcttgttagggcctattttttattccatgaagtctagtaacaaagttgttcatgtgttggctaactttggcttttctaatggactctactttgtggtttggggattattcatccaatttagttcgcattatttactcataattcatctgattcacactaaatataaatttcatattctggatctaattaaatccacaaaataacttaaatctaatccaatcaaatctataaaaatacgaattagatcagttattttgaatttattactttttaatataaatttatttaatatttattaaaaatatatcttctcttcacataattaacaataaaataaaataaattattgttgatatatattcccacaaccaattaaataaataaataaataataacaaatttaaagaaagtaaagaaaaaattagatatagaaacaaatatttaataagaataaaatatacatttcatttattaagttttgaaatatatttatatcatatatatatatatattagatttttaaattaatatctttttacattaaaatattaattgtaaacattttttctaaaaaaatataaatatgtataaattgatttaaatcgattactttaacatatcagtcaaaactcaatccatacaagtgcaaatattcacattttatagattgaattgaaattagattggatcgtgcagattaaattttatattttataaacccacgtttactaaacagtattcagaatcagaataaattaatagagaaatgtaacggaataaataaaaaaataattaaaatcaatatttgtaatatattgtttactaaaattttttgaaaatagaatacttgtgatttatcttgtttactttattagaaaacgtaattggaatgcttaaattgactaaattgtccttttgagttaaactatattatagagtagttattttgtaagatatattttgaaggacaaaattatcattatatatttaatattaaaaaataaagtaaaaataattaaaaatccattacctttggcattctttataaaattggtgggagaagttcttcttttcttttctctcttatttaatcaaggactccctttcctaattttaataatgtaagtaaacaattgtgaaaaaatgattatcttactatttacttattagtaaaggtaatggaaagattatttatgttcggaaggagcgtaaattctgtatcttaatctttattatgctgttagttagacaactaatcaaaacgaagaagatgacttattctttattcctaccttaaacagctaaaccaatgatggaagtcacaatatatctcctttactcagcatcattgattgtaacatcaatgcaatgccctttagagtacaagaccttagaatgataaagcacactctagtttttcatctgaaaccttctgcaacaagccttcaggagccatcctaccatgtcatcttagaaagtaccagtgcatgcaacttgcaagcacaagtagctcgattacttaggcaagattgtatctttctctgttctcgatatcaataaagtaagcatttcatctattgcctaccagaaactcgcaccagcagtcttagccattcatcttaaccaacaaaagcattgactcaaaattttcttacagaggttgtggacgcgtctggactataaagatgtctttgccaacaacacacccttccacatcctgtgggcagccaaacttctgctccaggaagaaacccactgaaccaaggcgttgacctagttggcgacggaaaactgggtcaatggttaatggtttcttgctgtagtccacagtcaaatgtataacctctccatcagcagggccggcagcaagaaccagaagctccttactgaaatttgcaaatgagagtgttttcacatttccgtcaaacttcccagaagatagacgccaggctgtgcccctagtgcctgaagccaaagtttcaccaaggccagatgcaatctcagcttcaatgtaattgtgatcttggtctgttggactttgtgtgtggagcacaaatgacaagtccggtgaaagcatttcctgtactagaattgccattgaagcttccccttgaggaacaccagctgctcgacggctcaaaattgctctcctggtgtataatgaagcccatactcgactaatacaattggctaagactgtaggatttgaagtactaacgttgggaatggattcatagagtccagcagctgatagtccagccaggtcttcaacattagcacttgaacgaacaatcaatcgtgcatttccaggaaacaatctctcaatgctttcaataatatttttcggtggctgtaaggaagagatgatttcctgtagttgaaaagatattttgtccagttcacctccttcaaatgttgcagtttctacctcatccagtaaggacctgaaagtttccattaacttgctttgctttaatgccaactccattgagccaaatggtattacagcccccgcaggaacaaaaaatgatgctgggacaccttggtcattgtaaactgccaacaaagaaccatcagaagcatcacaaacttatattcagaatttcgctaaattgtctatgatatatgtttgtatacatacatataaatatagctagtcatcactcttcaatttaggtaaagtgaaatatctgacttacatatactgaacaaaacacagaataaaacagccaaaagacagtgaacatatgtaaagagatattctggcagcaaaccttaacaaaattcattcatttttcttttcttcaacacatatgtgccctgcccactttgctaatgaccccttctaagttcagtagcaccatttcatgtattatatggcatatgtaatgaaataaaaaagcaatctactatcacctaaaaccactgttagagtattagctgtatattagttgtaaaagaattagagtaacttgtatttagtattttcttattttagtctcctagctttgtatataaatatgta

SEQ ID NO: 303269 - DNA, 2203 bp, Cannabis indica
atatatatatatatgtataatatcatatcatacataataattttagatattacagaatctatatatatatatgtattaattattggatgtttgatttcaggggaccattatttgaagccatttgtgatatcagaacctgaggtgtgtatatacgaaaggagtgaatcagattcattcctaataatagcaagtgatggtttatgggatgtaatgacaaacgagtttgcttgtgaaattgttcgaagttgtttcgatggtaatttcacaacaatgtttcccgacaatactaattttgtcccccgaactattaccactactccgaccacagctgcctctgcttcagaggcagctgctttgttggccgagctcgccatggctcgtggtagcaaagataatatcactgtcatagtcgtcgatctcaacaaaccatcgctatctaataattaataaaattaattattattattattatgttttaagtagaaatagtgccacgttaattaggatggttgtttgtaaaatattcaagttcgtgcatggctctacgtgttttttttctcttttatatgtacaaagagtttttgttagaagagatataatatatataacaatggggcatgcagtttaattaattagttgattttaaatatttgttctaaattatgatgttcttaattattcttgtctcaaaaactcattattcacatctaacacctgagttaatccaaataacagcatgaataattaaatggtaataatattttagttgttaatccaatagataatttaataatttttattataattaaagtactacgttgacatatatttttttgtttaccaaatgaatttgaaggaaaaaagattagataataatgattctacaatacaaaagtatcaaccgttcactatattatatttcttcttaaaatatacaaaattaataataaaatcaatataaactgaaaaaagaaaaacattatttgtgtttttgttacttttggatggaataggaattttaacactttaatataaatttgttattttttttttcttatgttattttaaaatagagggcctcattaagtggagtatgcctatgtgtcatatatgttttttgttgccatgttgtgaaaatccaacaattatgagttaaaaaataaaaataaataagtagatcaaaaaattaaactgcacaaactatattcatattggtatccaaaaaagcaaatgttgcaaaggttacaacattttaacattacaatcacaaaaaagaaaagacattcaaagcttgctctcaagtatacaaaatagacttcttagtaacatttgagaagtcactaaaatcacttctcatctctctctctctctctctctttctctttctctctttttcaaatttgtctatatattaaatagtgtcatggagccaaaagaggatgagctctattcttaaactgtctcttcactcctttcttcccccaattcttcaaccaaatcaaatcaccaaaaaacactaagtatagattaagacaatgtgtagcttgacactgcaacatttgctggagaagcagagtgaatgtaaacaaactcaaggctcttcccagctggtatattgttgagccaagatggtaatgtgtagaaatcaccactcttggtaagaccccagattggaccatagagtttagatatcgaaatcttgacaaatttgacatttttagaagacttgttggtcaccacagttgagtatctgtagtaagtttttccatttgaaatccatgagcttgtcaccttctgttgtatcgaaatcgggcctgaaaatgaagctgttgaagaaaacatttggtaaaattgttatgcaaataaaaatcattcaatgatatagatggttgtacctggaccaggaatgtaagttgcagggtttggtttagactgtggaacaggttttcttgggttaacagcctttggcttttgtggggtaacaatctttggagttggaacaaccactgaaaacaatcaaaattcaaaatgttaattacaaatcaacaaaaaaccaaaacaaaacaaagattaacatcacaacatttagctctaaaattatagttgcagaaaagaatttaggcgtttggttggtaggaatgaaaatataagaataggaatggaaatgggaataggaatataaatggaatggaataaaatttaa

SEQ ID NO: 303270 - DNA, 969 bp, Cannabis indica
tatttttgtaagtttcccaaatagtatctttaacctactatatatatatatatatatattcaaatatataaacacaaattttaagtagtgtttgttattattacttaaaataatataaaatcaaagtctaaagtaatatggaaaagtaaaaaataaagagtaaagtggtagaaagagatattaattaattaattagcattaacaattatgatagaagaaatgttaataagaatattgcacaatgcatgtttgcatatgttgctttcctttttcttgtcttgtttttcaaactaatgtttttcaatttaattaatcaataacacaattaattagtgacctttcaaccaatttgtttgtttgttttttattttaattatttctatataaacaaatgtagttcttgaaaaaggatgaaaaagaaacatccacgaaactatctatctatatgaaaatgatcaatgaagacacataattactttgaccttttactttttatttctttctatatatttatttacttttgtttttgttttttttcttccataaagctaggttatatagtgaaaaatatgcaatcaattctttggttgtgtacaactataatcaaattaaagtacaaagataatggaaacataatctattgaattaactattcacaactaattaatctatgagaagtctccaagtaaaaataatttagaatataattgattttttttagaaaaaaaaatatactccataatatatatgaagatcagaactattactatttatatcatatatgatagtgatttttacattttaagtatcaattactttaagagtttgatataggtataatttaatattagattttatatatttttatttaataaataaaataaaaaataggcttttttatttttacacttcaaaacaatttttttttttgtatttttacgaaaattctacatagaaatccctattgca

SEQ ID NO: 303271 - DNA, 2305 bp, Cannabis indica
taataataagaagaaacatactgtagaacatatacatattatatgtacatatacacaaacttacttcacatctagtaatggtttcaaggggatatattcttaatgtccgactggtattaggatcaagcatgcgaattccatccaaaccaatctgaagcaccaaaaatatcaagatgaatatgaaatcaacatcagttaaaaatgtacgtgacatgaaaggaagaatagataggtgtcacaaagcatcaaataataggaaatcaagcttcataattaaaagaaaccaaagtggaaataaataaataaataaccatgaaataaggggaggtaggaaagtttatttattcatttaattaaaaatctcaaatttataactccccaataagggaaatattaccagaactcttcagagttggcaaagaaaggcactagccactagcaacctcaatagaagacaattcacaaagtagtcaagcaaaagatctttaataactagccccaaaaaggtagtgacaaagtaaaagctttcagcccaagaaacatagaagacatttattaaacttaaaaagagtttatgtcaaagcaattggcacaattatttaacgaagtagcaatatcatgtggtcaaacaataatttctaagcctggtcagcgtcgttcgttaactttgcactagactggaagaatcataggcgacagtagagcatctcccggaaccatcaataagatctttactcttaaattttaagtgaacaacaaaagattaaacagacataagcagctaaatccaagtactgactttccaaccatcattagttaatggttctatacccactatctctaatcatagaaaggaaaggatgacctaacaattgtatcatcttacagcattaatagcagtagccctaacaaaacagtttcaagatgttacatagacaaacataacaacattgctaaaagagggaatttacatgatgaaaaacattgcaaaaaaagtcttctattttagctatctagaaatcagagcagctatgaataatttattagagaaataaaagaatgagaattggcgcattctctggcatacctggcaaagaacgtccatggtactctgtcctccactttcagctaacagcttaacccgaaacttctgaaccccacttttcacgtcttgctgtacctccgccttggggaccgctctcacaattttggtcgagctattactcgaatccttactggaagagaaactaatcgatctcccataatcgtcgaacaaagtcgatgacttattaggcgcagtgcccctagacccatacggctcaaccttgttcccttggtaagcataaactccatctccgaatccatcgtcccgacccgaatcatatcgctttccatacagatccgatcccaaatcggaccgtggcctctggttgtaacctccgtatctatcatctaaataaccactaccctgatcgtatttcacagaattctcatatgggttatcgtagacgggcggcaccgaagctcccgattgaccatacgaagaggaatatacagaggaatattgagaattcggggtggggctaggatttgaaggcacggaagctgcagtaggagcataattaggaggcgtctgatgctgatcgtacgtgggaaagtacggctgctgctgggtcggaggttgataaggcgtgtgggcctcaaacggagggaaagaagtggcctgagaagcggaattgaaggactgcaaattagggtttgaaggaggggtgtaagaaggagcagtgggaggagcaggatcgggattttgaggataagcagggtagttttggggataagcagagtagtcgttgggagcgtatccggagttgaacggtggggcggaagcgaatgaagtgtgaagatgatcggaattggggttggggttggggttggggttgggattgggattgggattagggtttggaaattgattgtaaggaggataataggggagagaagtgtaatcgccttgctgcatcgttaaggttaggctgttggagattcaaggctttgactatggagatctctctctctctcttgggtaaaagtggtttgaagaagaagaagaagaagaagatgaagcgtatagaaggaggaagaagaagtgttgatggtgctgttttaaatttatgatttaatttgatgaagtaaagaatattagggaatctctattattattattattattattattattattattattattattattagataattaatgccattagtggtacctaaatagtcataatgttattag

SEQ ID NO: 303272 - DNA, 2549 bp, Cannabis indica
taggcacgccacgacaactgattacaaaaccctaatcccctaatccatgattactagaaaggtaagtgcgagatatttaaactttatttgaaacagaatgaaaataaaacttgtaataattttaaactttacaaataaccaaaagatacatgtttcgggatcctgcaaatattttcacaaaatattataagtctatttcacgtgccaacctaagcagtaaaattagagttacaaaatacatcattagtagaccccaactcgcttggtctagtgtggcccgaacatgtacaagcactgccaaactctcacactcatggctgatcacagactaatttaccctttcctgcacagtagaacacccatgagccaagcccaacaagatagtataaatatcaataatcacaaataatatatcacatatataattaagccatttcacttattgtctatttgatataaaccagcgtgttacgctcacatgcctatttatatctatgtggcatagacccacgtgttacggtcacacatctaaatacattaaggccttagaatagttcatctcggttctaattcccgagtccaaccaaattataccttgaacgcataattcttaatctcaatatatatagcatggcataacatttaaacattaacaaatactagggtaataaccctagactatataaccgctcactttaggtaataaccttaatctcagttcttaacaactcacaattataatattcaatatgatcaccaccgagcttaactctacgtgtaattactatcatacctgatgtcccgcgaatgtggagattctaaatccctaggtgttcctgaccaagtgtcggtaatcctagtcacaatttctatgatttacaaatagggttaatccttaactccatttccatataattataaaattggcattcaaaatgagataaatatatagagctcggaacaactttccaacgatatgcagaactcctgaaatagagtcagaattaaaaagttatgaagaagggcgggtcgcggcacttgggttgaaaacccaggattcaacaagaggcgggccgcggtgcctagtgagtggggtcgcggcgcctgcgttccaaacccaggaaactccatttccagctttgaaactcaaggccaaaacacaactgaatcaccccaaacatgcatataacttacaatcatattccatagattactagacaccatagcagggcattagaacccacaattcaagataaattctcatccaaacatacatcctataaaaatcagattaacaacactcaaaataagattcaaacattgagttataatcatcatattttcatataaagatgttgcactacaaagtctcaaaataatctcaaaaacctagcattcaattccaacaaactgactttaatttcagtattccaaaccccaatttcaacctaattaacacacaacataatcttaatggaaaacataaaatttccaagcttaaaccacatacaaaacaccccaatttcacaatcacaacaatcatgtttttaagaacatcatcacaagaaattcatgaacatttaacttcagattacatcacaaaattaaagcaaaaaaaaaaaaaggtggaaagctacctcaaactcttcaacaagaaaagcacccaaaactccacaaatcaagcttgaaccaaagctaatttccaaaaatcaaagttggttgagaagatgaataaggagagaaagagagggggtcggtttaagggccaagcaaaaatcagaaaatgcttctcaattttctctaaaatttatttttgttgaaagtaattcacaagtaggcaaatgactaaaatgcccctagggccatgatatagcataagcccaactcaagggcataaatgtcattcaatcacacaccacacttaaaataatatttagaatattcaaatatccataaaaaggccaatacaaaatcctgaaaatgtatttcggttcgacccgaaatacctgattgtgactatggccgacttgtcaaaaaacacctgtagaaagacaaaaaaagtataatatataataatatagtctataagcacacaataaattcacagttttacccttctcagatcaaaattatgaaaatgcccctagctctccagcggggtcttaacatgtcatttatcaaattaattcacatataattccatataaatacacatttaactagttagggttctctaatccattttcttaatcttaggatattacaaaagtaaaacactaaaaacgagcatcataatgacattaaaaatgtgttccggagatccctattataaaaggtttacaaaacgactatatacaacaataatttaaaatactaaaatcaaaatacatagtagatacaacccaaaacaactccaggcgacttggcacacaggccgatgggatcattatgtacattgttgtagaagactgtcacattatggttgatctaacttttcttttcctttacttgcaccacatagcacccgtgagtcacaaggactcagcaag

SEQ ID NO: 303273 - DNA, 2000 bp, Cannabis indica
ctaccccaactctgccatgtctaggttcgagagttttggggtcgggttagggttcgagtctgaatccaaggttgaggttaaggtttgtggccaggttcaggtctgagttcgagttcgagttcggggtccagggatgggttagggtctgagccagagtctggggccgagatgtggatttggagtccggattcagggttcaggtcgaggttcagggttgagatcggggtcggagtcaggatcctgggatcgaggtcagagtcagggtccagggtcaaggtacggggtttagggttgggttcgagattttgggtttgggttcgggttcgagtcgggattcgaggctggggctggggtcgatgccagttccaagtccaaacactttctaaatattataatacaagctaatacagatcatttgttatgtacttaaataatacaattcacgttgtaattaaatttatggccgtaaataattaaatacaatataatatttatttaaacataaatattatttgttatttaatacaatacaatttttataaaatctacccaaaaaaaaacccctttaattctttattaattcttagtaagttgtgtacacagtattactagccgctatacatgtgtgaactaaatactaataatactatttcaaaaatgtacacatattctttgtccttagcagccttcatttttcattttaattattttaattaattcacactagtactacttcaaagtccaaataactatatatgaaagtcattcatatttgtaatttacaataatttatacgtatatgtttggagattaattaacacgttgaaacatattatatttataaataagtgtaatattaattattaattaactaaagttatataatatgatatacagaaatctaattcatgatttcaaaatcttgttagtggtgcggctgtgttatgaaaactaagaaaagtaagaaaaaattaaattatatatatatatatattcttatatattaactcagtggattttctgtcccacattacataattaaatatataaaatattttattaataattataaattaagtttttcatatatatgatattgaaaatggtttgataatttcatttcttggctagatctacaattattgagtcaaatttcttgaaattaactctacaaagacttcaaataaaagatatattgaaatatatcaactagacctttagtttaaagtggaatttgaacaatttataattattacaataatgatcgatcgacttattagaataaatatatatatatatatatatatgaataatgctatatagtacaccatatctaaaagttgtttccactttatatgtatttttaagattattttagtttttttttttatatatatattattgtagttatttaaaattataacgataaattttttataaaatattttaaatagtttataatattaaaacttaagtttcaataatttaaaaatatatatatattttgttacaatttttatgctcacgataagtaattatttttgagttttttatttagtattttaaatatttaaaatttttaaatttataagtgatcgattttaaaaaattacaacatatacaatcattaaaaagagttagaataataaataaaaaaaaaattctattaaatatcaaaacagatatgaaataccgaaactacttttattgggaggtatactacaaatttatcctatatattcatatagaatatacatttcccaaatcttttgggcttgactagattatttatttaagtattaattacctaattagctaatatgagagtacttttaaatagaatatttttacttagtaaaaaaaggaacaagaaaagttggcaattttttaattaattaattaaactaaagtatatattatatcaaatatacattcaaatggagtatataatataatgtgacagtcagtagtcccgtgatccgtaaggggaaacaccgggt

SEQ ID NO: 303274 - DNA, 3147 bp, Cannabis indica
atatatatacatatatacatacactttatgtataataaatattatattctcagttgtaaatacacttgatgtcacattcatgaaagtatatgcatcctagctacttaatcaaatatgttcgtcagataatcataattagtatgtgtgtatatatatatatacatatatattaaaattatggtaattataaatcaaataataattaatcataataaattaaaatcttggaacagaagagtatatatataattatggcatgggatagatgtgtagtgagaggaacgtttgtctgagaatctagaaaagggaaagtgaaaaatagcccaaagataagggacttattatgatctcttttcatactacatcatcattctctcaataagaaccccccacccacaccacgccttattatttattaatttaatgctcaatgacagaaacctatcacatatattttcatccattactatatatagcttatagttcgtagtagtactactactactacatttactactatatactactacgtgtatacacacatatatataggagatcagcattatcagattaattagtagacttgcaataaatcatcaaaaataaaattatatatttatataaatgtctccggtgggattaccaccgggtttccgttttcatccaacggacgaagagctagttaactactacctcaagaggaaaatcaacggccaagaaatcgagctcgatattattcctgaagttgatctctacaaatgcgagccctgggagttggcaggtatgaatatacatatgaatttattttattttgtatgaaatatgtatacatgtatgaatttaattaagttttgatatatatataaatgtgtatcagaaaaatcgtttttgccgagtcgagatccggagtggtatttctttggacctcgggacaggaaataccctaatgggttcagaacaaatagagcgacgagagctgggtactggaagtcaacaggcaaagaccggagagtgacgtgtcagaatcgggctataggaatgaagaagaccttggtttactaccgtgggcgggcgccccaggggattagaactgattgggtcatgcatgagtatcgacttgatgacaaagactctgaagatcatacctctgcaattcaggtacattaaattataacgtaacttaatttctactacgtacgtacccggcccatgcattactgatgaacatatatatattaaactcggtgttatttatttattttattattattatcataataattaaactcgttttatttgcttaataattactagtgcactaatcgtaatattttgcatgtttatttcattaaattatttttttatctggacttaattcattaatcattttaggaattttttttttatttttacactttaaaaatatatttttttttacatttttttgcaactctgcaacttaaattgcaacaaaaaaatcgtatagaaactattattgcaactagcgctgcaatgatcactttagaaactcaaaccgtaaattaaaaaaaaaaattaaaaaacaatatgaagtaatttcccatcattttaattagtcattttgattttatatttatgtgcatataatatatagtttattattggctagctatagcgaacccttttaatattgaataagtttttcttaatcattgaaacaatatatatataatataagaaacttctcaactatacattgaatattttatatgttttttcctttttgctgattatcattgattcattattatatgcgtgctgtacgctatatctctcattttaaagattttataacaattattccacttatttgtaattacatatatatcatataagattgtttgtaaatatactaaaatagcaatcccttctctttacgctttagcatttcacatttttaactgtagaattataacacgtgtcaccatttgacttggcaagcataaaggccggtagatataaacttcaaccataggctagccaattgaataaggcagaaaactaattagccaaagataaaagctttttcctttatccttttattttgtttttctctatatataatcttttcaatcatatgaaaaaaagaagaaaaaaaaaagtactaattaataaagatgcactacgcacgactatatcacccttcattgcacactaaatccaatatatcatatatttttctttcctttatgttatatttttgttgattacatattatatatatatatatatgcacacagaaaaatggagattggaatgtgacccttttcaatttttcataatcattttctattgtttataataaaattttaatataggttagaattattatttaattagctaaactatagacatatatatacattcaagaatggtatcaaataattattaattagggaaaaaagttgatatgatttctgattaaaagctttgtatgcaattaggtgtgaataattaggattctgtttccatttgtcactactgtcatttaatttaagaatacattaattctctaagttaatataaacatcatgtttaaatgataaaaaaattaaaaagaataaatttgttgcatattcgttgcttgtactagtgttagatctcttgagtgttattagctaccatctcttaatgcctttttttgtaataagacaaaagtaccattcatcgtatatataataatatataaagaatatcttactgaaaattataatgatacttatgtactgttttttctgatctagaattatattattatgtctacatatctttcagctcaaaaaagaagatggggctccccatcacttttagggtgttaagaagctaggggttactttttactttattcccagtcctacacatttatataaaataagccatctatctaagattaatttgttgtcatctagctaagttttattattatccattatatatatatgctttttcactgccacattgaacttcaattgactcagccccaataattgacccattttgaccatctatatttttattggtaatataactaggtatatatagcttcaaacttagagttaaagagtgtttaaggtttttttttttttttaattaaccgtttatatatta

SEQ ID NO: 303275 - DNA, 1440 bp, Cannabis indica
caatcgaaagatgagaagatccaagtctagttcttgatcatactctataacataaatgatcaagggttagagaactaagcggaaagagaaattatattctgctgcaaccaatgtgaggttttataaccattatgtttcatcgtttaaggtttattcatatttaggttgttagattatagaactataatcaacgtatatatatagtaaatattacatcctgataaaataagttccaacatggatacctcgagctagctagaaactaatcaacactaaataaattggattcttgcaaattaacctcacaacctactacataaagaaatactacaaaattaaaaatttaattacttaactactcactatttatataatttataagtacctagttactaactagttatgttagtaattcattacaaactagtacacatgaatatgaatgaaaattagtaactagtaactaatagtaactaactattagttactagtttgtaaaaaaaaataaaaacacatggaatgaaaaaaataataaaagagttaatatttaacatatttaatataccaaataatatactttaaaaccaaaaatcccaaaaactaatatttacatctctctccatttcaccacactaaacacaacccaaatatggtgatccaaggaagaagagtagctcaccacaaccagagctgttttcatcaggatgaaaaaaattagatatggtagggttcgctttttcttaagttttctttgctgaaacttcttagaaaagcatacccatttatatgttcttatatgtatgcataaatatacatatccacactacctgattatacatatatacccgattaattgaaagtattttttttcatattataaagtaatatcgattatagtagttatacccatttatggtcttgaaaaaagttgataaattcacacaaatactaaaatagaatcaccacatatatatagttgagtgttattaacatttcaatctaatctaaaaaaaattaagctactactccaatctaaaaaaatctataacaatactttgaaagtttatgtttttaccttattatttaaatttggctaccaataccgactaaaagtcggccaccacgcacaactaaaagaacacaatcttaacaatctagaaaaatcctaaaaaaatttataaaattaaaaataaagcaatttacaccaataaaattattagaggttagattgataagttaattgacgttgaaatttaataatttcttcaacaaaattggcgatcgaagctacaaccactatctctagctcggtttacacttaaaaactaaaaatagatcaaacaccgagaatatatttttcggtttgaaactaaagattttaagaagaaaataactaaaaatgaagggtaaatgaggaaatggggctttagaggccactac

SEQ ID NO: 303276 - DNA, 1335 bp, Cannabis indica
tgatgctacttttgtatgtaacaaaaaaaaaaaaatggtagcagatctgatgggtagtccgatgggtggcccgatgggtggtccgatgggtagtccgatggtgtaaatgagggtgatgtaaaagggtattttagggatatcaagttgtcatatccaacaaatattagttattatttgtttagaaaattttttttaaacaaatgtaagcataaaaaatcaaatttcccaatacatatgtaactgcttttatttgaaataaaagaaataactgttgttgttggatagacttttcctgcgttacggacgagctggtttatagcagtacttttcttcctcagggaaacactgtaggaggctgcatactagatatagactctttgtcagtcaccttggtcctgattccaaaccttccaaggtgatcaacaggaacaggcttgtagataagttttgcatttcctcgtcaacaatatgtactccaagttaaacatatgatttattcttctcctcaatcggatgtatcatacgagatgatttttcctgaattgtgcctacgtcactctatcatttaagaagagagaattttcctcttatgtttgaggcgaccttaaatattttagtctattgcgagttgccttaatcgtagtggattttcacctaaccagtatccttcgagatttatatgttgaatctcaattctttgatgaggttaatttcattaattgtgggatttgatacatgtgttgcacaactgaatctatatatttattactcgaaatatgggtataacatttagtaaataacatactacatatattaaattttatttttttcatttattctgttatatttttttattaatttattctaattttaattactgtttagtaaatgtaccataaaataaaaatacataacataaattaatttaatgtcatgtaaatttttattcttatttggcataagtaattatactgaaaaattatactacataataattaactttttaaaagagtaattaacattttttttcctgaattatgaaattaccaaatgatgtttttataatatgcgactggttaaaaatacctcttaatataatataattgtagaaatttgccccttgttaagttttgttacatttacccatttaattggtgatgtggcatttcactaaagagtaataaagtaaccgagtccaatttaaaaaataaataaattgacatttaaatacaaatctttatatatatgtataaataaagagattaatgaaaaaaaaaataagtcattttagaaaataaataaataaacaaacatctatttttatatatatatata

SEQ ID NO: 303277 - DNA, 1774 bp, Cannabis indica
catgataattgtgacgtgtaaacataacagacgtagtcaaaatattttaacaaataggattctttgtagaaagaaaaaaatcgttactatctagattttttttttcccttataagaaaattgtataacagaacagatataaatcctaattatactattgtattttttattttatttgccccagaactctcaatggagcaatgaatgctcttgctaaatatggtttacagctacttaccctttggagattttttccttagtagtgttttttgagggtattttctcaaaaaaaatatatatatacaatatttgaaagataataaacatgcatgctatcatttacttatataaatcataacaattaaatattcaagatggtgcaatcatataatatgttggagtatttaaacaatttaacttagggttatctaataattaacgtttacaaagtttaaagaatttccttacgtattacaacttacaatatgagatatattaattatcaagagtaatataattcgattagttaaaatttaattatataagcagatttgactaataaatatttaagtacagagtaagggtgtcaaatgagctcggagctggaaatgggaaaggggcaaagtttgcgactatagtatcagtggtgacatcaatagtaatagggctcttcttttgggtttccattatgatattccacaatgagattgccttgatattctcttcaagcaaagttgtccttgaagttgttaataaactctctctcctcttggctttcactattcttcttaacagtgttcaacctgtcctctctggtaatttttttattttctaaatttcccgagtttaatttttctaatcaatttcttaacgaaaaaattataataaattaaattgctttattatgctaatttctcttaataatttacaggagtggctgtaggatctggttggcagtcgtatgtagcatacataaacttgggctgttattatctttttggggtgccacttgggttattgatgggctggggattccaccaaggagttatggtaagtttaacataaattaatttaaaataaaagttaataaaaaaatattatggatcttatattataatacttgcaaaataacaaacacaaaatattagggaatttgggctggcatgatttttggagggactacagttcaaacttttatattagccatcattatcattcgttgtgattgggaaaaagaggtaaatttatatatagttatgaatgaatcttcttttaaattttcatgacaagatgttaattttggttaaaactcttgcaggctgagaaagcaaataagcatgtattgaagtgggcaagagaatccaaataaataaataaaaaagaaaaaggtgggcaagagaatcaaaggaccaagtgtcgtaacatgtgaaaaaatttactccattatttgtcttaaattcatttcccatagtttaacttgaaagacattgttcataattattattattattattattatttgtaaacatagattgaacccgattttgaactatatcaataacaagttgatgatccctgaaaaaatttaattaagaacaatttattatttaaattatgaagaatgtctttatagacctaggacacttcatataaaaagatttaagaacacttgattaactttaagaggtatataattatagggtaatactatggtaggacctagcaaaagtttcttaccggtagggaatttttttttttaaccgttgattttagat

SEQ ID NO: 303278 - DNA, 1362 bp, Cannabis indica
gagacactcaagagtctgagtgtcaagttttagacacagcttcaacaccagtggagaaaagaccaaagaagaacctaagtggtttgaagagtacactgaaatgaagattaagtcaaggccatcgagggcaagtttaattgttgacccgcttcaactagttgatcagaagttactctacagtctttggaactggtgtgtaggcatcatcaggaataagtatccaaggtagtacttcactggtcaacacgacttgaaatagttcctaaggtggctcgataataaggaatggatttttgatgatgtaagtttctaacactatgtactattttattgttgtgtttcctttttcttttaatgtgcttgtttatgacatttgtttgaattgcgtaggatctggatgctacatttcacatgatgagaaggcaacaacaattatacccagatgtgtacaaacgccattacaccatcatccccactgcattttttgcgtcagtgaagggtcgatgggatgcgtggaagggagatccagaccaccgaggctttctttaggatgactccattttggatttggttcgtggtgatgaagtccaatttttttcttcttgggagaaggaggaattcatatacctggccctgttcttgcatgctcaaaaacattgggtagccgtagaggcagatttagagttgtggaaattattcgtcctcaattctagtattggctcgatcactccaaatgaattgaagaagttgatggacagttactgtaacatattcacatcattgatcgaccagtctggtatatttgatacccactgcttggtaatggtcccttagatgacagcctctgaaagccaagtcgaccattcactcgggatctcaaggacagaacggaagtaccacagatagaaacgagataatacgttttctaagtaatttgatacataggtatatatgattataataacactaacttattgcttatttactaatgcaatggcgattgtggtgtgtacgttattgagcatattgagcataagattcttgagttgccattcgatggagtgaatgacgataacatgttgtttagacaaagatgggctgtagatttattctaccaaaacttagaatgaattattttttttgtcaaaatcatgccagttacagcattgggagaacaaaaaaattaatagtgaattataatatatttttatggaaaattgtggtttttattattattatgctaaattttctgtttagcccgatataggtccgatacatgtatgattattgtcaataggattttgttctattttgcaatggagtagattttccttattggaaaattagaatggaaacttacct

SEQ ID NO: 303279 - DNA, 3536 bp, Cannabis indica
aatttataaatcaaatagacaaataattgataaggtgaaccaaaacatacacaaatcaatgaaaaatacttctgtttctttattgatattgaataatctggattacattgaaatggagttttatttagggcataaaacccaacactttcctcatcgtgcggtgtagagtgactgatgaggacctttgtacgaccttggacacgtgtcgtccaaaggtatatcctttacgaaatagtctctacccagtctattgagaagaaagcatgctcaagggtgcgtacgtgcattatcatgatctggtataggggacaatatttgatcttgtgtcagaggtataaccgtctatagagcgccattttgtaaggagctaacgtgttcgacgtcttccaaaacttgtaccgctttcctagttccttagcggaggatactgtctctgaaatccattacctcttactgcctcccgggtctaggagtcatttcttttaattctctcggatcccttgcgtagaaaccgtgttcccactgtggtcttgccacgtgtctgatagaaggaaacttagataacaatagtagtttcttgcgctttgctgatcacgtttaacggtgccgatgcaactattgttgcaagggaacttcatgcacaaatgccatatggaagtcacgacaccaaagtccactaaagtcgatcgacctagtatggcattataagttgtcaagcagtcaactacaacgaaggtcaaatgtttaactgcactcgcttcattatctcccttgaaggtgattggcaactagatttttcccatgggcattagaggatcactgttgaaaccttacagttggaaagggcatggagttagattcgcttcagtaagtctgattgctaggaatgcgaatttgaacaaaatgttgatagaacttccattgtcgaccaagactctggagactcatttgttggcgatctctacatcaattactaaaggatcattgtgagggaaatgcacattcttagcgtcttctttagtaaaggtaattaggagattcatcattcttagacgctatgcaagagaccacactaattcactcatctctccctcttccacctccttaaggtatctcttttgcgcattacgggtacttctagaaagatggggcccacctaaaattattatgacatgtccgtctactggtggcagagcaattcctgaaggatatggagttcctggtcccagagtcagtaaagctactccagcagggactggcggagcaggaaaagcatgtaatgatgttcaaggagcttgagggtgcacaactgcctgctagggattcacgtcaccctattggctgggaagcatcatgtgtccctggaccaccccttgtgtgagatagattatcaagatgcagacccatttccccagatgccccgcgcagaccaacatttcgatatcatctttcaaatatttgcattaatttgtggtgtggcccttttctccatggtattcgcattgcttattatgatccttcctgttcctcccaccatttgacatgcgcgggggctttagatagtggaccacgttacacgtcaccttataaacattctcccgagtatctatcagacttgtgtactcgatatactttggattgtactcctttcttgatttctttactgaatcattacgactatgattcttacctcccctcttaccccgcgaatatcccgcactggaatttaggactagagtcttagattgtttgggagccacgctgcacccagtctgtgctgccccatacctggggaaatgggtttgcgtagggacgagactggacgcagtaggtccgtagacagtcagagagaactgacgtccttgaagggacaaagatggggcatgagtttgagatgcaatgctcagagcagctgtagttggggttggtgcaggtgggactccaaaggactaaatatacgcatcctcaaggttaattatgtcctgtgccttagccatgaattcacttagggtctcagctctctttctctaaatctttcacccacaataaggaacctacagctagccttgactggccccatcaactttagatcctcactgaccttggttttggcagctgcctccatcattctctgaataaaagccttcagactttcatttagttgttgcttgacattagttaacgaaccgacttccatatccttctcatgcgcagtaataaatttcttgcaaaatgttgactacaaatccttccagctatcaatcgctccttgagccaactacttccaccagtcttccgcgaacttaattagagtcagggaaaagcataaacacttagcatcatcactaacgtgggcgacttgcatcatcttgttgtacttggtcagatgcgctcgcggatcagttctcccctcatacaattcaatgtgaggcatcttaagttttcagggagcagagtttctgtgatcctccttacacaaggttttgggtcttcgtcttcggagtctgataacactccaatttgctttttaaccaatttagtcaaagcattaatctattcttccaatctcttgatatcactttccgggagatcacgtgccctcatcttatcacttagatggtttcttagatcacctccgcgtggcctcgccctttcacttatgtacctctcgtactttgcgtccaaccgttgccattgatttcctgtagaccaactatctccagaatggctgataggaatcctcccattttaatttgcagaatcactaggaggatctcctgccttctaagcctagggactttcgcggctggtccttttggtgcaaccctatctcgagggtcagaagggcgtccaagctcgaaagcaccggtggccttctacgtcctcgagggttgtttgacaagaggcgcatctttctaatgaggtttaggagtagtttttcgtggaggttcacccacttttcccttacccttgtccatgcaagggtttgaagttccagcgtttgtttgctcatgggcttgcttctcagtcactgtttctactgatggttctccatccgtcccagtcaaacaatcaaaattgctctaaagttgttccatagttgttttcatctgagcagtaagtctttgttgttcttctagggctgcctgtgtagcttccaactctgcagttacttgcaccagaccagggtcatgctcatatctttataatatccatctttatagtagtaatcatcatcatcctcttcgtaaccctctgtattttggcaatcaccatgaccttctacgacgttgtcggtgttcctctgttgattctcagcgatggtgttcttctcttggtctttagtagcagctacgacttctccctcattttttacctgagcgttggccgcattagaggtgccttcctccatgaccgtatccagcaaggttcctttaccagaagtctttcatgtttttaccctgatcaaaggacgatgaacactacccaacttccttcacctctcaatgaaagcaccaaaatatttaccgagtttt

SEQ ID NO: 303280 - DNA, 1501 bp, Cannabis indica
tcatatctcagaaaaaatatagctagtatctttttagtattcctcatgctgttttttatgcttgcaatggatctttagtggagatgtcattatttctgcggggtcaggtacctgcttgcctatatttttgggagagggggtggcgtggattggggaggggtcagttatgggtatagttttctatgcgttatagatctctaaggtggtcaggagatcaagcccttccttgactccactctgatatacatgacttatgtatatatttaatccaaaaggttacaaacccttaactcttatcactgtacatgtactgctgcctacttgtctcgcaaatcatcatcttcttcctagtacacaatctccgtttctttattgtatttaggtttctgcattcataattcatgtcttgatattattgatttttatttcctgttgagaaaccgtggttgcatatcctttgactgatgtttccttctcaaaaatctccagggactatcatccagagaatgtttttcaatccatggagacaataatgacccttgtcttagaagaaagtgaagatattccaatggagcttctcacccctatattagaatgcgtgaaaattggcaacaaagtaatttactgtccgaattacagattacattttttttgatcttctcattttctttttcctaataatctgttaccataatatctttttaggatgttttgcccattgctcggaaattgggagagagagttcttgaaatatgtgctccgaaggttaagccttacttggtacaggctgtaaaggacctgggtatttcattagatgactatagtaaagttttatctaccatatgccaagatgctgatggtgatgttgagcagaatgaagtccaagcttctgatgagaatatggtacttatcttggtattaagaagtgtgaatttattgcttattttgtgaaaaaatgtattaattgactgctttctactcaaaccattttgtacctgagcttgctttgttcttcacacttttgtttaagttgcatttttatatgataatttgtattttcattgccctttcgatttcttgtcttctgcctatagcttttctccatgtggtatgttttgtgattaaacgttacaatgacaagaatgaaagttgactgcttgtgattaattcctaatgtcttgtggttgttacccgttcatcttatccttttatggaaattgtttagaattctttgtgtttgattttactttcttttgttcagcaaggttttatttgatgaatgcatgttgtcatattatcatactttctcgcactatcttactccattaattttccgaattgtttagttctgttattgtcacttaattatacgcatgttttcaggctgttgagagcaggccaacgaagccacccttggataacggatcccaggcatgccatctttctactttaattaatttaggaataattacataaggcaccattttttgtaaaatattta

SEQ ID NO: 303281 - DNA, 2939 bp, Cannabis indica
ggcataaaacccaacaattttgtgtatgaaattcccctgtgacaatgggagtgttgggatagttagaggtgtcacaaaagagtgcaaggagctattacaatgtctctgttcggataattttcatggtttgggaagagacacttgttgctcctagagtggaaactccagtagaagccgagactgtccaagaagattttgaagatgaactagacctaagcatggggatgaaaagagaaattgagccaatggaggacatggaagaagttggtatctgtgaaaaagaccctgccaaaactattagggtaggaagaaacctatctccggcggtgaaagaaatcattataaatactgtcaagagaaatcaagatgtgttggcatggagctattttgatatgacatgaattgacataacaccatttgccatgtcttgaacatcaacaaggatgcaatgctagttcgtcaaaagcgaagaccattaggcccggtgaaggtagaggctataaaagcataagtggataagttgacccataaacgacttcctccgggaagctctatatctcgtctggttggcaaaccctgttttggtccccaagcctaatggcacgtggtggatgtgcattgacttcacagacccacaaggcttgtcccaaagactgtctccctctcccgcggatagatcaaatggtacatgccacgtctggttatcaattactcaacttcatgcatgctaattctgggtacaatcagatcaagatgcacgttgccaatcaagaacacaccagcttccacacagataatggtgagtactactacaaggtgatgccattctgtctgaagaacgtcgaagcaacctataaaagaatggtcaataaaatgatcaagaaccaattagggagaaatatggaagtgtccattgatgacatgctagtgaaatctaagacacttggagaacactgtacagaccttgaggaagcctttttagttctccgaagatacaggatgaaactcaatcccaagaaatgtacattcgatgtctcctctaggaagttttgggtttcattgtcagctcccaagggattgaagcaaacccaaagaagatcaaagcattcttcaacatgccttctccccgaaagcacaaggaagtgtagagtgtcactggaaggatagctgccctcagtaggttcatatcaaagtcaacaaacaaatgcatcctattcttcaatgtgttgcaaggaataagaggtttgaatggactgaagaatgcgaggaagccttctagaaattaatggagcatttaactaatgcctctattttgtcaaaacttgtggaaggggatgactcgtatctttacttggcagtgtctgaacatgtcataagtgtcgtcctagtgcgagaagaaggaaaagtctagctaccagtgtactatgtcaacaaaacattattgagtgtagaatccatgtatcctttgattgaaaaactgaccttttgcttactagtcgcctcgtgaaagctcagaccttactttgaagctcatgctataaaagtgaagaatcactctctctgctaagtacgtcaaaagctggaggcttccaacagactattaaaatgggcaatagagcttagccaatttgacatccaatatcaatcaaaggccaagccctagctgacttcgtaatggaatgggtcaggttgggtgacctcttggacaatccagtctcagagctacccacttggaaagtgtatgttgatggagcatccaatgaaaaaggaaatggagtgggagttgtattaatctccccgcaagggcatcagctacaaagcgctctccgtgtcaaatttcttgcctccaacaacaaagctgagtacaaagccattctggtaggactacgactggctaaagaagttggagcttagcatattgaagtgcacagtgactcccagttggtggtaaatcaaatattaggagaatatcagactaagggtgaaaggatggctgcctatgtaatgatgtctcaggaattgttgcaagggttcaaaggctacaacatccctcaagtcccttgagatcagaactcatttgctgatatgctggctaagcttgccacagacccagagacattcaatatatagtagtccccgttgcccacctagaagcttcaagcattgagacatggggggtaaacaccattgttgatcattcttactcttgggtatggcccatgtaccaattcctaaattcaggagagcttccaatagacagagctacttcttgcaagattcaatataaggctccccgatatgtgatattggagggaaggctttattgcagggggttatctatgccctactagtgcatggccagaaccaaaataagtgatgatatcatgaatgcgatatgtcgggcgtcataccttattagttacgggcggtagtgacatatgagtaccgaacgtaggtacaggctcacctgattaggtgatgcaatatgttgggcatcgtaccttattaggtacgggcggtagtgacatatgagtaccaagcgtaggtacaggctcacctaattaggtgatgcgatatgccgagtgtcctaccttattaggtacgagcggcagggacatatgagtaccgggagtaggtacgggcttgtttgattagatgatgcgatatattggtgccaggttgtggcatgggctcacctgattaggtgatgcaattatgtactgggcttaggtacgggctcatctgattaggcaatgcgatatattggtgccaggttgtggcacgggctcacctgattaggttataatgtaattatgtgatatatgggtctaggtttttggcatgggctaacctgattaggtgatgtggttatgcaatatatgggtgcaggctatgtcacgggcttgcctaattaggcaatgcaatacaggattatcaga

SEQ ID NO: 303282 - DNA, 1101 bp, Cannabis indica
acattcccgacggtttaaaaccgtgtcctatactataggatagggcacggttataactcgttgcctatacccagttataggtgacgattttaaaccgtcgagaaattcacattagcgacggttttgaactgtcgcgtattctgcctgttttacgacggttatataggtgacggttataaaaaccaatgagaatactttaaacgactgtttaaaaaacgtcaagaaaactcattttttgtagtagtgttttcactgagtttggtagtgctagcggcaaaggtttgaatccttaagtgttgggttctctcggtggtgggctgcggtgatttcaagctggtttcgtagtggtggtggtgtcagtctaaactaattcactacaaaaaactgctatttttaatgacaacattttagttacaatataagtttttgtcactaaatgtgacttttagttacaaaaaaatattacttgtcactaatttagttttagtcgcaacaagtattgtgattaaaaatacatttagtcacaataaattgtaatttttatgaccaatacctttagctacagaccttttactcacaacataagaataatgatttataattagtcataaattttttacttttagtcgcaagttttgttgtgactaaaagtaaaaacttttgtatggtggtggtttccacaacaatatagcgcgagagagagactgaaagcaagagcgagatcaagagagatagattgaggaatgaggaagatgggattttaagcctttggatgggtttgtagtcgtttgggggtttcgtttgggttctcggtggtaagttttgctagttggattctcggtatggtggagagagagcatgaggaagagaaaaagtcaagaaggaaaaattaaatagaaaaaagtattttaaatatttagagaaaatattagcatcattttatataaattaacttattagtgtctaaattttaataatgaatgtacttttaagcatgtataatcaaattttactttgaaaactatctatatattactactgactttttcatgtaccgaattttatgctcaataatgaatgcttaatatcgatcatcttata

SEQ ID NO: 303283 - DNA, 1134 bp, Cannabis indica
attgaatgggttttatttaaagcataaaatcccaacaactacaccattaaaaattccttcaaccacaaagaataaagaagactaaccactaatagtgaggtgagccatcaaagaacaaagaagacgaaccaacaacaaaacaaaacaaaattatttcacagagataagactaatcatagtagcctaaataaaagatactcaaaactatgtcacaaagacaagactaatcatagtagtaaaaacctaatcacagtagcaaaattcaatcgtagtagcgaaactacagaaattgaccaagccacgcctaagtccaaggagggttggtgggcctggcttttgaaaaaagtcaatctttggtagctaatgatttaagaacaagaaatcctatagtagacgatatgaaatatttagagaaaccatatattagcacaatattttgatagagacgaatgtaaaagaagtttgatgaaataaaatagagatgagataaataaaaaagaaaaaaaaagaaatgaagtcgttttgaaagtaaatgttattttcttaaagtaattataatatatgaatgttcttttgatgataaaatgttagtgaagcccatttgataggcccaatacaactcaactcagaggcaaccatgacaaaggaaaggcttggagaagaagttagcccagcaggaagagaacatagcagctactgaagggttacttgtagaaacgtgcaagccaaaaattggagaagaagctttgctcaacaaaatagagggaagagcaactcgaatcaagcgtggacgagtgaaacctggctggctaaaggagtatgtgctgaagcttggtcactaagagagagtgagatgcttgtaactaaattctgttagagttgagcaaaaattactagaatatataaagagataattgtaattaattgagatcatcatgaatgaaattggcatttgatttactttgggagattggccttgtctcgaaggaggtacttcactaacattagtgctttcattgttttcttctgtcttcaagattgtaaagtctttttttggcaagttagttgacaaaataatttttccatttatggtaagattgttgtgcattcatattcgatttcttaccttataaa

SEQ ID NO: 303284 - DNA, 948 bp, Cannabis indica
gtactagaccatgcactaggtaaccgagatagtccagcctataaatacgaactgaagtactagataatcaaattttctctaattaagcactctaatctgataattaaacctaattaattaagagaatttattaatggcaatgccaatagggtacttatctacctcttgtaatgtccacaccaataacaacaacaataataagaagaagaagaagataatgatgagtgtggcatctggattattgaacaacaccatcaaagctcttcgaattgcagtagtaataccagtttcggggattaataaagaagttgcttatttggtcaagtctaaaaaatcctccattcctaaataccactttgctgtctatgttggagaacaacaagaaaagaagcgttatgcagtacctgtttcgtacttaaatgagaataagtttcgagaactgctaagcatggctgaacaagaattcggatttgatcagccggaaggacttaccattccctgtacagaagacttcttcattgatttcacttctcgattgcagtttaatttgctgtaaatatcttaattgtaggagtacaaactattttattaagttgtagagaccatatgcacgtatactatttttcagtctttttatcttctcttttgagttgtctatataagtagccaaaagagggaaaaaaaacttaaatgcaatgacaaaaatgttacttttttatggtattttctttttacagttattttataattgttgtccaaaaactgttgtttgctgctgcaatattatactatgtttccacaacgtgggaaaaaaaaacagtaaaagtgtaaaagaaaaataaatattataaaaataatgagttttaagtagtttgtataaattttcctagtataaatcatgaaattttcacataataaactaaaaattttaaaaacaaaattacaaaa

SEQ ID NO: 303285 - DNA, 2429 bp, Cannabis indica
taattatacgtgcattgcatgtaatatcaacctagtaatattattctagtatatatataccgcttttttatgttatcacgcacttttcctatatatagatcctttataaaaataaaaataaataccccattcaaatttttagttttattttggtggtcgtggtgtgcttttatggagtctgagagtttatctgttaataatttgatggagaggtgggatgatatttgtttgcagaatgaggatgacaaagttttcgtgtcaagagaggcggatgagaaggaaacttttgatacaaggtggcatttagtgtggaggttgcttaccaaaaggttttcaaaatttaacgtttttcaaaatgtgatggcatcgctgtggcatccagggcaaagtatgtttgtcaagaaattgagccataatttattcttcttttaatttaatcataaagtggatactactagtgttattgaggggtgtccctggacttttgatcttaagcatcttattttgcaatgcctaaatgagggagagagaccaaaagacgccaagttgaatatgttggatttatagtttcaagtgcatatgacttacaatcggggtcatgttccgatagagttttaaaagtcttggtaaaccatattgggttgtatgttgaatccgatagattttccattgatgtgaataaacctttcaaacaaatgatgaagttgaagagggagagtggtgaaactttttgggcaaattttaaatatgagaaggtccctactgttttatctgtggcatcagagggcgaaaaagaagtgcgctcgagtgtatactacacttgcccacttgttggtttagccatatgataactttatgcgtgctacgccataaaagtcttcacatatgagtatagctaggtggctacggtcaactccagtggtggtgggggagaagggtgtgggtgtttatgggggcgacgaaggtcgtgtggtggatggagcgggggtgtcggctggagatggtgatgtaagtgggggatacttcatcaatggggtacgaaataagggtaaggttgtggtgggcagagcagtttcaggtgataggaatgagggtgttggcaattagttggttgttgacgaaaggtcgtcacatgaaggtgttcttgatctggtggagatggaaaaacaaaagttaggtgttgagggggatgggccgattgtagttgttggtgaggtgatggatcatgatgttattgagggttcaaaaaatattcgaggggcgggacctgtagtgcaggctcgcctgacgcaatgagtatgttatattggaattgatgtgcacttgggaacctacggacgacccaatttctcatggatcttattatccaaaagagacccaaatttattctttatgttagatgatttgtagtaaggaggttgttgagagatccaggggtcgtattggttatgaggggtgtttctctgtggatgctcatgagcacagcggtagtattgctatgttctagaaggctactgaggaggctactatactaggctattcaaaagaccatatcgatataatcgttgtggttgggggtatggaggcttggaggcttacaagtttgtatggtgagccgaataggaggtttagacaggatataggaggagtgttcttaattttttttttttctaaaacagagaaagagtgttaaaataacataagaaaaattgtgaaagtaaaataatcatattctagtaaaagttaaaataaattaattaagatttttttacaaaatgtgattaatgaaaaaaatagtatttaatagtttgagtgtgaatagtaagaatatgtatatagagaaaaagaaatattataagtgtttgtatttttttacaaaaaataataaaatgggtgtgctcttaatgggtattacccataaatgggtatttaagtattgaccattagatttaatcaaatggatgatatttatagttattaattatttttcaaaaattaatattatttattttgacctattacctgatgacatgacagtttattttatttttcaaacccatttttttatgtgtgaacctcattctttgtattcctaattgaatgaaataactaaaaaaattaatttctaaattaatttgtaatgtcttactaataccatttctctgatcttgaaaggggcacgagaattttcatcttcatcgttcttgaccatgtcaagtgtatttttttcacaacatcaacatattcaatcttcttgttctttctttttcacaacatgagcactagattggtccgtttgttcatactacaagaatgaatcaatacttttctagacacatttcgcattaattaaaaggcgcaaaaatatagaggttttctaaaagtttattttacttattttttgcgaaatatttttaagaaatactaaa

SEQ ID NO: 303286 - DNA, 955 bp, Cannabis indica
cttgtcaattcaattatgaataataatatattgccagtacaccgacaaattaattgaaaacaaaagactatagtgatacatcttgatattgcctttatgttttgaataagcctttaattttcttttatgattaataaatcaaactctctgcaatcatgttggatccttgtctcactaacctttatttttattataaaattattaagtatactgctcagttggtagattttcaacttttcatatttgtactataatatatatatatatgtatgtatagcttgaataatagatcaattatcgatgaatattaaatttgttgcaccaaattctttaatcatttcctcagtcccatactatgcgtacccaaatcattaatgtacacatctagttggatatatatcatcatcatctccataaataaataatgttatattagatttaatttatatatatatatttgcaaatatatatatatgtatacgtatgactgtaatgttcattattgattaattaaaattaataaggaagagaagaaaaatattattgttgctctacgatgatatgtgtcctcaaaaagcttggcacacattaaagtatgtaagagttaagacaagatatgtcttctttaattataatatatatatattatataataattgtgttgttaaggattccattttatggaaaatgtacttctttattggcccaccattttttaaaaggagaattgagaaattgttaattaatcagtatttttctttctttttcacaataatactcttttaattagataaatggagaaagtttgatatatattttaactaattaatgtgacactaagaatgtaacaagataaatcaatttataaacaattacataattaaaatggataaataccattttgaactctgtgttttgtaaaaattacaaaatgaactatctgttttgttaaata

SEQ ID NO: 303287 - DNA, 1617 bp, Cannabis indica
tttaaaatagtaattaaatatattaaattcaactgcttcctttgttgtatagctccccacatgatacatatcttgatcatgagacaatgaatcttaattaatgagtttcaaataaatctcccctttaaaaggttgttttgattaaattaattttttgattaaattaattaattctcacaattagtagtttttgccctttttttgggtaagtaattcaaggctgcggtcaatgaaaaagcactctctctatatttatagatgaactttattaatagatatgatgagacttttccatttgttgtgtttggtaaaagagagaaataattctttcctcttcttatttttttttctttctaatgagtaatcattaagtctcaaatctagaggaataatctactttgtatttgaatgtaaaggacacctatattgattagagtaatgtcaaaagcactaattgttttggcctttgtgacattagattaagaaaaaactatggaattaggataaatcttagaatttcatgtagtatactataacactatgtatgacaaaatcctcactctaatgaataggtcaaaagagagagagtttctaaattttgtcattacatggatgactaataaaaatatttttaatggtaaaaatttagagaatacttgttaaggtggacatattaaatgacaaaatattgagatgttatactattggagagaaatgtatttcattctaaaaatttgtatgaatgtaatccaacattgatgctatgctattcatttattttaataaaaatttaaagttaaaaagttatttttgctaaaaattaaaataaatattatttaatattgtatgatatcataattatagtatctttgaagagtgttataccattagagtatttttagaattaagagtgtcaaaataatataaaaaagagataaaataaaatattatatttttgcatgatgtgaaaaattttagcatccttaaaagatgttaccattggagatactctaaagcaaaaatactttctattctgacaaaattaggcgatgaagccatgtggaacaacatgaatggtcaaaaatttgatagagccaactagcatgatatttatttctataaatataagagaaatactaaaaaatagttggtgtctagtattctccaacgagtaacatcgctattattagatattgagtctatataatttgattaattaattattattaaaattataaactaattataatgtatcacatttaaatgatactagacactactaatatcttgctaccattaggggtgtgcataaatcgatctaatccaatgagaaccgaccgatctaataacaaccgaccgccaaacattggatatccaattgtgatcagatcggattggatgttatttttaaatatccaattggatcggattggatggtggatggggtgtctcaaaatccaatacatctaacatccaatcaaactaattagatttttcatttagtttggaagagtaattagaatttatatagtgttatacgtcaaatctatatgtatatatgaaaattaacattaaagttttatttttttttcttggattggatgtatccagtccaat

SEQ ID NO: 303288 - DNA, 2134 bp, Cannabis indica
ttctgttttgctggtttagcttcgacaccattacatataatcaatatatgtgtgaccaatactaatttttctcgattgtactttttatcaactatactaaacatagcgtgcgattagactttatctcgataacacattctcgcaaatctatgtcatgcgagattagctggaattatttgttgacacatcattctttttattagaaaccgaattcacttgtcaactatctacgagactatacttttattgttagataaaaaattcacgcgtctcaactatttactagactataacaaaaagcaccaaatgaaatgaaagggaaggattgaatttttatgttatgatgtcatgaatacttactactgcaagtacaaactgagacaacagtacagtactcctgttgtaatttctagtataattaatcccaatatacaagatgattatccaacggtgtgtaaacaagagatgatgattttgatttttaagcatgcttcataaaacaatagtgacagatttgtctatattacatttaagaatctaagagagagtggagtttaattgagttattggggaaaggaggaatctcagactgataccgtgtgggtgggtgtatcctattcctatatatctatctattcctacttactagactagtactgctactgtaaaagacttaacaactctatctatctaccaaaaaatatggctcactacttttagttttcctcacaccacattaggtaattttataatgacattggcgtgacctttacgaaattatatacaatattatgaccctaactaaggatcgatcatttcgattcacaccaaataagacttagaaaatctcctattggctaaattctaatgtaatattatgacaaaattaaaaaaaaattaaaagaaaattacaattttataaatattaaatatttatgtccttaaaaataaatattaaacttatgtctcttacaaacttaaaactttatataattataatatcatctaacggagtgggtgatacgagttgggcggaaaattgatgaaaaattaaactaacaccagcaaagtgcgactaagtaaaaatctaaccacatgataaactattaagagttagtctcacattattaatgtatgaaaataaattgtgatatataagataataagctaccattgtcaattatttttaaaatgaaacctctcttatcatatctcaaattctaatctaaaccacatttaaattaataatttatatgtaaaaaaaacaataaacataaccataaatgctttttggttgctgttaatgattaatattcaattcaagcgttttattggttaaatcattggtcaagtcaagagagctgtctctctctctttctctcttggagttgttttaattctattagttaaatccgtgttccctgtcaaaacgacatcgtccaccaaaactgcggactccttggaacaaaaattgggtcccatcccattgattccagtctcacgccgggcccacccattctctttttctctttaaaaaaaatatatcctaattaaaactaatatttaattagttttagaataatacaaaatcactatcaattatatcatcaacaatcaacccattaattgtatgttatttttatttttaaataacgagattatttcaaagacaaattatagtaatgaaaaaaacacaacttaaattatctatgccacgtgaaaaatgcatgaaatagacaaattcacgtaggaaattaaacacttcattgattttatatatactaataatacataaatactaattaattactagtttaattatattaattataacaagttgttttgggtgatgatgaaagaggtcatgtctgagtactagaaaacaaaatttcccaaatctcagagaaagctcggacgataatcccatggtgatctctggaattaagagacaagaaacaatgcaagagctgttccaaatctttatcttcaaacatttgtttctccaaaatcatttccatcatagacctcttaaaatcctcgtaaggatcagccgatttcttcaccacagcaaaactctccctcactttcccatccacactacaaggaatcatcctctgaaacatcgaaagcctcg

SEQ ID NO: 303289 - DNA, 2687 bp, Cannabis indica
gaaatagtaaaaatcacacatttttcatagtggaatccttttgtgaaatagtgaaaattatatagtcgaccctttctctctccccttctcgtgttctacacttgcagcctctccatctctttcatcatcacagtgtctcatgagtagagtacaaactgtaatagaaaaatagtcatcgtgaaattaattctacaagctcacacttgtcctgtgtggtgagatactgatctggaagacattgaattgcgttggaatggatgatcgtttgtatatacaagaagaaccaatgataccctgatagttcatcagcaggtataatgatctcatcttgtagtgtaaactttatgtatataaatatgttgagatcttgagacttatggttcagattataataatctaaaattatttagaaaaatattttccctttctactctgatttggaccataaaaatcaacaaaacctgatcaaattatttctaccagtgaataagagtcaacatcatgtttctaggacatatattgtttcccatacaacaaactatccctaaagagtaatctatgagaggcctccaagaacacagctcccttaaaggactcaagctattcaaactcgtgacaatgtcgttgctccctcgcaaggaaacccttaccctataggaacagcaccaccaccactggatagccacgtcgccacaatctccagagaaccccacctgagcatgacatctacgaatgctcaaaaaggtacctcatttggtctaagacccacaaatttggggcggactcaactttttactactttatcaatagctgggttgatccactctcaaaatctttattatcatttagtacttagagaatggtaccaatgtagtatgtaataagaacaaagtcacacaaaatgtgtgattaatgcatatttatatgtatacattaccaaactatgatcttattaaatgagttatttaattaagatataaatttatatatatatatatagatatacattcataaaaacaactgttttaagtggtatatatacattaccaaactatgtctccatttcattagtttattttttgaaatttattttaagtacttttcttaacaacattacaaaccgatgcatttgactatacaatattgcatcatcgaaataaacgtcgattccaaaactaacgcaaaagattattggcttcatataaattgacgccaaaagagttttttgtaatagtgaaagtaacattgcaagttattatgaaaaagtaactggttataagatattagttttagatatttgattaagcatttatttaaaaattacacacactaattaacaagttatgatcacttgtactcgagcaatttcaagactataagtatccatccaattttgagattaactataaatcatagaaaatttaattgatgcagccaagcacatttctatggccatagaattttatagcttgtctgatatttaagattagcttatgttcacaatttttagtcacgtgacttttattttttatatatatttaattacactaataaaaaagatattatctaattattaaaattttataatgagattaagatttaatagctactaaatgtatcttgatttttgataatgatttatgtgccaaaagaaatcaatttagatagttatctactatattaccaatattgtgaccattttggataattatttacattccatcttaaaattaattaataaatagtaatcaaacagttattaatatacaattatctatgctagtcatataatttaactacgctatttttttaagttattgcaagataaccatgtggatatccgtgatagtttaccaaatgacaatatgacgatactgcttaaagacttaaagttatatatctcaccactttgtactaattagaaagaaaatagaaaacttttggtgctgaaagtttacctattcatcttacctttttttttaaaaaaaaacaactttcatttgtaaattccaatcaaaatttaatgtagttttacttttaaaaagtgccattgtataaagtagtaaaaatgtttaattgagaaaaaaagtgggttgtttcacaaagtattgggaagagagagcccaagcccatcttatcaatggtgtgttgacaagccacttatatatctagcccatatctaccaaatccaggcccagcccactatgcatatataaatatatatatatataggaattattgcgacataaatagcttatgttttgaattttatatactttaatgccacatgtttttttatggattaaatactttatgtaacatttgtgttacttccgttactatatatatatttttctgttaaatataccatagtttaatttatatgccacctattgataaatcggtcttcttattttttctattttttttctcaacatttcatggcatataacttgttttttttttattctattaaaatttcagtacaaaattactttatgatgtctcgtacacacatcatcatttagtatgaggtatgttcctttataagattttttttttttcatatttagataacccttaaataattaaagtaattttaaaataatattaatgtaatacaatatatttgcttagaataaagtttttttaaaaataaataaataaatatataaaaatattaaatt

SEQ ID NO: 303290 - DNA, 3759 bp, Cannabis indica
aactttaatttatactaaaatattatatatttaagtgtacataaaagttaatatcacatataattttatataaaaatattgcataaaatataattcaatataatatgattcaatacaatacggtgtaatacgtcgtaccaaacaaactattcaagaaagtattggaaaccacgagaactagtcaccagatttgttggtttctctcaacactctctcatccttctacgttgatattacacttcatttttgctgcaacctcagattcagatctacaatcgatctttctccctccatcaaccacgagtatcttcaagccttcgtcgctgctcaagaaaccttggattgcgtcgaggttgaggttgatgcactcgccgattgttgtgacaagattgccataaaaacataaatctttaaacttttctgatagtatagttattaagagcatttcatcaacttctttattttattttccaaaatatattactaaaattttacattcttaattaatgacattttttaaaatttaaactaaaatcactaatgaaattaacttttgatcattttttacttttatgttctctactttaattaaagaaaagaacattgtaaatcatctaatattgctttattcgactttatagtttataccaaaatgaacttcattatgagttgcaaccattcccaaactatttttaatcgtatgtagttaccattatagaaagttccaattccaataacatatatatgtctaaattacaagttaaaactaaagcacacaagaaaaaaaggaacacaagtttttaaatttgatatggactcaactgtctatttacacgtactatcatatatttcaccaagaaagatagcaattacacttaaatttattgtaaactgaaaagcatgttaatcaaactaattacatttatagttttatattaatactatgtacacacataatctacatacataacacatatcgacaagttatttttgataaatgaaactatcttaaaaaaaaaataattagttaaaattacttaccacataatgtgtgtcaagtttgtatgtgtttacttttaatgagagttacttatgaattagcaatattagaaaattttgtgtttttaatttttctatctaaaattctttaaattgggttgttccatcgacttaaaaaaaattaacaataaaataaaagttaaatttaatttaaatattttaatataatgtaaaaaaaatatttttttaattaaataactaaattaaatataaaaatttaaaatttttaattaaattttttaaaaattaaagttaaatttagttagtaacaactaacattaaaaagtgttacataagtttataataacactctaaaaccaagtaccagcttcactggaaaactccctaaaattgtctttaagacttgtccccaaaattgggttgtttctagtttcagtttgtcactttgtttgtcttttgctgttttgtttgtttggttacggttggcttctcaaggatggctagctcaagtggtgttaagaatagaggcaatgaggatgtctacaactttcagattgaagaagaggacttggaagaattaacagtggggaatgaaggagaggaagagggggttgatgacagatggtgtcttgtcggaaggtttttgactaatcggttgatagactttgataaaatacagaatattttagcttcattatgccaaccgggaatgggaatgtttgtcaaaaaactagaagataaccggttcttatttcagctgattataaatggcagcccgtggacttatgatcgaatgcagctgattattcaaagcctaccagtgggaggggatcctaatctgttgcagttaaatgatcttgacatgtgggttcagatccacgacgttaaactaggatgtatgacgacgagtacggttcgtggggtaggtaatactctagggaaattcattgagtcagatccaaacaacttcattggtgtttagcgagattatcttagggtgcgagttactcttgatattagaaaaccgttgaggaggcgtatgaaactaacccgtgataatggaagctggttttgggcacatttcaaatatgaaagggtgccaactttttgtttcatctgtggattgattggccattccgagaggttctgtaggcgtttgttccagcagcctattgagcagatagtgaaaccatatggagagtttatgagggcggtgccgcaaaaatcttacaagaacatcagagcaaggtggctgcgcaatagagggtggcagccggaaggagtttctggggacaatgtacctggacagagttctacacatcaaccaaatatggaaagaaatccttcggttgacttagccgataatcatgctaatcaaaatatgactaataaagaaggaaataatggcatggataatttgatgatggaaggggatcaatgtgaggaagacacgggtataatggagggagaggttagtggagatatttatggcaagaataaagcaaaggggaaacttattgaaggaaattctggtgtggttatttttgacaataaaaagaggaaggttggggaggatgggattatgggacacgtggggcaggcccaacagacaagtgggctttcaaaaaactcttcattggcgggccttggtgttggggctcgccagacattatgaaacttttaagttggaactttcgtggaattgggtcaccacgtagcattcagttcctaaaacaattggttgatcaaaaaaggcctagagtgttatttttatgtgaaactttgagtaacaaggagaaagtgggtgctctaagtttgaagatgggctttgaagggtgttttgttgtggaggctcaaggtagaagtggaggtttggctttaatgtggaaaagtgaggaagaagtggttattgactctttctccatgaactatattgactgttttgtccattttgaggggtataggaagtttcagtttacaggcttctatggtgagcccaaccgaaggctaagggaaaacacatgggaattgttacgtactcttcatgcaaggtatcaagaagcttggtgcattatgggtgattttaacaatatcttgcataataaggaaaaaagaaggggtaagccttatccaagttagcttttggacgggtttcaagaggttgttcgacattgtggtttgtgtgatttagacatgcatggtcatagtttcacttgggagaaggggagagatacctcggcttggatggaagcaagacttgatcgggctatggtcatgaatttcacatggcttaccattttttctgatgcgaagttatttaatttggaagtgtctccttcagaccatactcctttatttttggatataatgcctcatattcaagctgctgggaagaagcaatttcgttttgataatcactggactcggttccaagagtgtgaagaagttattcggcagagctggtgcaactcgggcatgacttttttgcagcacaaaattcagttctgtggccagaatttgcagacgtggggaactagtattgttgataatttctctgcaagaatcaaacattgcaacaaagaactgaaagtgtttaaaggaaggcgtgacagtgaagggaaaaagctatattcggattctaaacagatgctgtttgaaactctaaaccagcgggaaatattttggcgacaacgttcgaagcaattgtggctaaaaaatggcgatcaaaatagtaagttc

SEQ ID NO: 303291 - DNA, 1372 bp, Cannabis indica
ggtgcatcaatacatctacatctattttaaggggtgcattgtagaatcaccctaaatcatatataatattattagaggaatttagacaagacacaatatcgtaaataatcaaggaaaccggtcaagaatactcaaaagtaataatatatgcgagtatccgcttaaagtcttgagaactcatgaatgaaatcacaatagcaataataataacaaagagacatgagaattatagtagttcaacaaaacttgtttctctacttcacacgattgtgattaagtttattcgaagattgagtcactcctttatatacaaatgaaatttttatattaattatgtttgaatataataattcttttatgaaagttttaacatatataagtactcctaattgcattgtcaagcgtccatggattaatttacctaatcttgtgggttatggaggatcgtgacagactctcatttaggcaccgcaattgagaaaaaaattatgctttagtttgttattttattttaatttgtttgaaatcaaacaccaaaatagtaaaaagtcttcacaaatatgttttataataataaaatctttacaaaattaaataaatttattaaaagtaattataatatttattggaactagatagatatatgtttttataattagccttcacaaagtaaaaattttaagtctctcatcgtaaatgactaggcttaattaggtgtacactttaatcgtagttgtcgttgtcgcacattataaccgtgtttatacaaatggagcggaggagaactattttatgcttgcatacgtatgtggatcctacattgtgattctgttacgttctcttgcataagtatgtttattacatgtatgtatacttagtgcaattaggaaacatgcatcattttggtaccacaaagacccaatagcatgaaattgggtatgtattcattttggtaccacaaagacccaacagcatgaaattgggtatgcattgcgagactatactcacaataggatgaaactttatcctattaacacagataagatgtttccatttcaaataaaaaaaaaaaaaaacaaacaaagaaattagatatgttcaaaaacctttccattaatgttttaaatgaatattctttgtggtttaaatttgagtaattacaacataaaagaaaataaattagtactgcaatagtgatggaggtgataacatcatcaatgtggtgccatcgtgatagtaatggtaaaaagagagcggggttgtagttattggtaggaggaatgatgtagtcaacataaaaggaaaatttgagtttttatggttagtgaacacctactgattcaaaacaatctctcacttttttttttttttt

SEQ ID NO: 303292 - DNA, 2921 bp, Cannabis indica
aaaaaatagagagagagtattttgatttgaatataatgtatggttgagtctcataaattgttggttgatattgaatttttattaaaagggaaggcaagtatcgacaagactaaaattgcttggttcgaataagagtgtgagattgatttttacaagagctgaaggccatttgtataaggatttggagaaaagaacaaacccaattaaggccctacggtaatctcaccaatacctttatctaccgcttattccacaaatcttatccacttctttctctctctctttcttctgcaatcaatatcttaattaatcttcacattcattcttttctcgacccctcttcttcttcttctttatattttattattatcttcttttgtttatattcgtgcgttatctgttgagggaggcagattgggaggtagggaggttggaggaggaggaggaggagaagaaggaagaggaagggttgttgggtcttagggttttcttcttgttcttcttctttaaaaccctcgagtaatctcttctgtacttaaagaccgcacctttttgattccaatcgagggttttaatttttttcgtcatttgagtttggatatggctttggtttcggtatttttggagattttccggagacccacgattgtggaggtgttgggtgagctcgtcttgttcattgctcctctttggattgcggtttttgttggggttgtggttggttgggcatggagacctaaatgggccagtttggtgggtagggatttgtctgattgttcggcttcaaaacaagaagcttcttcgtcttcgccaccaacatcgtcgtctctctactttgcttcgatgccaagcttgaattcgttaaaatttcagctgcctagttgcgtttcttggggttttgaggatgggattcaagagaatgctctcgccgaaccagctatggtcaattctgattctgggttcgttaaaaaatccgaacttgttctctgctatacttaatttcattatctactatgttgaaatgtccactttccaattctgcttaatactgataatttgtatctgatttccccctcttttccattgtgtagttcttcacggcctgctaacgaaattgcttctattgtgaatggaaatgatttggagcacctttgtcggattgttgaggagaaagatggagggcctgcttggattaagatgatggatcgttccacccaaactatgggctatcaagcatggcgtagggatcccgaggtaggtttaacttttatttcttttcaatcttagtgttctatgctttgcaactttagcttcagaaaagcatgaattggatttggaagagaacctgttcacttgtcatctatttttgggtgcaagaactctttgtatggctaaattgttaaattgaattgttctttggtttggtgtcttttcagaccggacctccacaataccgtagcagaactgtgtttgaagatgcctcacctgagttggtgagggatttcttttgggatgatgagtttcgaatgaagtgggatgacatgcttatacatgcatctattttggaggaatgcccaactactggagccatggttgttcaatgggttcgcaaggtgagctagagcttttatttatcctagactgattcatctcatgatttctgtgttttcattcatagctaatactttttgcaatgctctttgttttttggaacagttccccttcttttgcagcgatagagagtacttgataggtcgtcgcatttggcaatcaggacaggcttactactgtgtcactaaggtatgaggaggagaaacttgttaccatttttgcatcattttggcattttagaatttgatcataaaagtttctagctcggtaggtaagtactttaactttgagtagaggaaataattgagtactgtcagtcctttaataatgtggagtacattcagagatagttttctggcatgtttatgttgatcaattaaagttcctagttaagtaaacttattttcttgtgttcaattgtctttagggaataccatacccatctgttccaaggcgcagcaaacctagacgcgtagacttatactattcaagttggtgcatccgtccaggtaactgtcttagtctattcatttaaggataatcttttgcccatgtatctgctttgttaaaatgtatgaaccttcttttagtgtatgaaggatgctgatttctttttattatgaatcagttgaatcaaggagaggagatggcctgatgacttcctgtgaggtcttactgtttcaccacgaggatatgggaataccctgggaacttgcgaaacttggagttcggcaaggtatgtggggagctgttaagaaaattgaacctggcctgcgcaaatatcagaaggctagagcatctggagaaccattttcaagatgcgcgcatttggctcatattaacacgaaagtcagtgccgactacctgaaaacaatagaaaatgcttgtcaagattcatcagtggtggaagaacacaacaacacattggagaaacaagaaggaaaaagcatacctaaacttctagtcattggtggggcagttctcgtcgcctgcagtcttgatcagggactattaacaaaagcagttatttttggggttgctcgaagatttgctaaaatcggacgaaggttatgatccaggttccagaatgatttttttgcatgttcggccatggaagaaatctcttcatttgtaaattgtgaaaattgctcaaatggtggattttcccactcagctactttcatgagctactactactactaccttcacaagcattgaaggttattctttttcttagtatttatttttccttgtttgggcgctaggaaagagctgtagaaatgacaaccccgccaatagagtaaacagaa

SEQ ID NO: 303293 - DNA, 2403 bp, Cannabis indica
aaaaaaaaaaaacaaaagttaaatataatcaagagtcacgtatcagaggcaagaaggtagtacaaatctttccagcgcacacgaacgacagtagttctttcttttttatttttatgaaccagaacgacagtagtttcatgctttagtaataaaacgcagataccttctttgtcgtctattgttgacttgatacaactaaacagtaaaattccactaacccatgtgatacatggatttcctgtgtactctcttctattttcaggtcaaatgtttttacttttctcttttaatatttacacgcacccatattttatatattctatatattactccaataacccaacacaccaactttcatcagtttgaattttttctcttttttagtagttaatatttgtttcatgtatagtcacttttcttctttttcacttttaatttatgtaatggattctagtatttgatattttcaatattcctttttacttctaactgaaactctccacaagacaaactaaagaaaatattaataattaataaaaagtaagaaaaagaaaagaagataaaatatatatgtataaacaaattaataaagcggttggtcattacatatatttaggtatttggttactttcatgtcttggcaaaattctctgtgtctaatcgtcttttgtgtagaatttgacagagactttcctactagcttcttcttattacctatataggatgcttttaatctagactacatagccatatagtaagtgtatatcttttctcttttttatgtcccattatatagagatccataatccattctctattagaaacaaccgaaacccaaaacaaacccctgatattctcttccatcatattagatcttctacacatagatcttaattcaccagagagagatagtgagaaagaaagagaagtttatattgatatggcgtcgacgtcccaggccatggtgaaccaagggttgtatgaggatgaagaagcagtaccagcccagttgggtttcttttcttatgctccaaacagcagttatttgaccctaatcccaccattggtttgccttaaaaatttctcttcttcttcttcttctcctccttcttctacaactactactacctttttgccatcctctaataataataataatatgtctcatgaaaccctactttcctctctaagcagtactactgctaattattctaagcaaagagaagatcacttctctttgtctgatcatcataatcattatgattcaggatcccaactcctttctttgcagagatcaaccgctaatttacggtaataataaatcaaaaccctattaacagttatttatttttcctttcatgcaaatatatacatgaattatgtgatttttttttatgtatactatatatataggtcatggggtgatgtgaatgagtgcttgggaagcaagagatcaagtatcataaataatggaggggagttaggccatgaatatcgtgatcatcatcatcatcagcatcggcatattggggtttcaacgatgaagatgaagaagataaaagggagaaggaaagtgagagaaccaaggttttgctttaagaccatgagcgaggtcgatgtgcttgatgatggttacaagtggagaaagtacggacagaaagtggtcaagaacacacagcatcccaggtacctaattaatattcatttattcattaatttataatattaacaactctaacaatgccattaatattaaagcataactgaactcatcatattcattttactgctatatctctctctctctctctctctctctcttcttcttcttcttaacaaaaaaaaccctaaccctataaacaaaagcataacaatttatcagcaacagaggagaattagatgccaaattactaccctgaaacattcaaagcaaaaattgaactgaataaacttacaacttaagcccgtaaataaagaaagtccttttatttttgtttaattcaaattgaacgttcaaaattttccatttttacgaaacagtattaacagaccatagaaacaaaattaagattaaagagtgctgaaattgacctgggaaaggagccatcgacgggagtgaaaagctgagaagcagcagatcgatgagcgttggtgatcggttgaaagacagatgcagcttcacagatcgtaatcaccaaagccagtaccagaaatccagcaaggtttctggccgccattgctgtaaaaaacaagaaaacagaaatcaaaatcttcaaacctacatacaatatttatatagatgtagaaaatgagagtagtgagattgagaaagagaaaccctagggttttgggattgattgagaaaagggttaagagatcagatcgtacgagaaatgtgagaat

SEQ ID NO: 303294 - DNA, 2859 bp, Cannabis indica
ttatttaatttacgtgagccaggtagagtttcattagtaacaacttcttactgttatttctattcatgacgtttagcaaccacattggccttgcgttaatagtgggaaaaaaaattagcgcgcgaggccaatgtggttgctaaacatcatgaatagaaataacagtgagaagttgttactaataaaactttatctggctgtttagagagagagagagcaacaacaacaggcaataagtaaaattattttggtaaagctttttggcgaatacaatacaattattagcgacaacaaacgttgtcattaataagctcgtttcctgtagtgatatgtaggtgaatgaaaaaaatcatgcaagccaaaacagcagaaagtgatataaattttgatgtggacctccacaagccacgaaaaccatccgcgcagctgaaccacggtgaaaagcagtacattttattgattaagaaagtatgagaaaagtttatatgtttgcaatattgtgtaaataatgtaatattttgttcgttcttactacactagctagttctttgtctaattggctagtattttccaagagtaaattgcactacaaaaagctattcagtgaaataaatttgtacatatttatttattcgtttttatgaatgaatggtaaccctatcacattacatttggtaccatacattcatatatacgtacaaaataataccaaatataacactatatataaaaaactgtcatatataatatatgtacaatatatacaaatataatatcatgtaacacgggagtttgtggcgtcaatgatcaaataactctttcaacaaaagtatatattagaggtgacaatttagttcacaatacgacaacataacaggagttcgatacaaattattacagattaaggttataaaaagtagatgcgggtcaaaatttgttgaactggaacgacgcaataatatatagtgaattgtaatttattttcaataaaaaataaataaaaagtagaaaggtaattctttacaagaataagatagcttgtcacattgatattaagaattttgtttcttgttagtttatgataaactatttaattaatcaaattttatttattggcgactttatatatttttagttaataatcatacaaattgatacatgaaagtttaatatataaataaatatataattttttattggcatatttaataaaatagataaaaataatatttgtagtatttttgaaattgattttatttgtgtattcattatttcgaaaatatagttttcttttttttttcttttctggtgtgaaaaggctttcaaaattagattctattcttttttgactttatttgtaaataaatatgaattttccttatttagattatttgatattatttttgtatttttaaagaaattcttaattatatttatttattttttacctgatttcttaaccaagaaaccatatatagctgtgtgtgtaaaggttgtcaaagttttcttatttatttatggaaactttgttaaaaatctgtccaggttcaatgtacccatttgaacagactcgttgtctgttcaaataggttttgactttcctatttgggaagatttttcatttcttgatctggttgtttcttggttgtttgaccacgacctagagggattctaaagtgtaatacacccttaggttgctggtattttgctctcttggtgtataatttcctaaattactttcaaatttagagaatttttttattgtgtgaagaacttgagtccaacaagttcttagtattttattattgtgttattatgtattgtttcttgttgaaattgtgcaggttgaacaccttggatattcatcaagcttcggaagaagtcttgtttgtgagtcacttttcaggagaaaaagtgcaagttagtcactcttcgggagaaagattgcaagttagtcactcttcaggaagaagattacaagtgagtcactctttaggaggaagattgcatgttaaacactcttcgggaggaagattgcaagtgagtcactcttcgggatgaagtgtgcaagtgctaagatttgaagggagttcaatgtctcaacacttcagaaaattgattagaagagtaaattacaacaattgcgacaaattcaaagatagagtctttatttgtataagtcaattttgttttgtaatcacttgagattcatctaataatttttattctctgggcgtggccccgtagactaggagcaattcgaaagggttgctggtaccacatatagaatgttgtgtgtcatttttttctgctattttactttttgcagtataattctgttctgtcaaattctgtgtctgataaaacagagttaaattctgttcaaataattttattatagttctgcattatttaaattgtttgataattttatttagtaattataaaaatagaatttcaattggtatcagagcggttcactaactcttagtgagatcttatatttaatttgtttcttctgtgaaatgtctttctaaggaagttcaatatctcatcattcgctactcaatgactcaaattatccgtactaaaaagtgaggctgagagccttcattaaagcacagtgtgaaaatgtatggaaagtaattttgtctagatggtctcctccctcagaggaaaataaggatggtgttataacaataaagcggctaaagatacatggactatccttcaaatccagtttgaaggaattgcagatgttaaaagatctagaattatcatgttacaaactaggtttgatgattaaatgacgattgattctgaaacactacctgaattctatgtgttgggttttatgcc

SEQ ID NO: 303295 - DNA, 2266 bp, Cannabis indica
gatttattcaataactttcagtaattaacttgttaatccacctattataaacatttaagtgtatttttgttttttgactataaaacatttaagtgtgtattaacttagtcaaaataaatattgggcaaatttataaatatagtcatacatagttactcacactctattcttacacaaacaacaattcatttttcaactaagacttttctttcaaaaactaagactttcatcaaacaagttgtaaacaaaccattccaaataaaagaaattaaaattaaaataaaaactcaaattaaattcaacattttcaccacaatcagtccaaattaaattcaacatgaacaaaccaatatcaaatcattctgtgatggtggccgattctgaggcagatgagctcacatcagcttcggcctcggcatcgtcggtcgccgctgccagagtccactccggtggaagctgaggcaaaggagcgtagactgtgggtttcctctttatatcccattgctgggttttgcgaggacgagtcttcctgtggtgagctgtcgacttcttcgttggtctggaggagcattctatcacggccaatccaccgccgccgttagaccaggctggccgcctagccgcgacgccgaccgaagccggaactagtgggttctgtacggacaagagttgagagccgaagagagcagaggttgacatttttgggggtttggaattgtgtgtgtgtgcctctcgattttgaggattacgtattttatcttctttggaggatttggtttgtaattgggcctaatgggctttttgtcatgtttctttgtgtttggcccatttgtgtttttgggggttaagatgaaagttttatggtatttttaaaaatttcccttttatgacaatcattagtttgggttaagacacaattgtgtcagtcatacacaccttctatacagattgttcttcttcttgggctgttaatgaatcaaaagttttaagggattatttaaaaaaaaaaatacaaaaaaaaattactaaaatctatattatttgttattttgttgttgttttaatgttgttttcatattattttaatgtaggtttattgtgtctttacagaatactgtaaaaaaaaattaaatgtaagaaaaataacaatttatataatttttgcaaagtaatataagtacacttaaaatcttaatatcctaaaagaattctttcattttattttttatttttaaataaaagagctattataaattaaacatattcatttctaacaacaaattatataggggaggggacatcctccaaccaaactaagtcattattcaactctaaaacatattttgctaagttataagcgactgaattagcatctctgtgaacatgagagacaacaactctagaaaaaaaagataaaaaactaacaacttttacaattataggtgttaacgtagataacttaaatgtgagctgattaatcgcagtagaaactcttagtacatttgtttccacctcactgaaaagtaaactatgaaataaagtcattgcttccattttgtgagccttaaaacattctttgagtggcttaaacaaagctggaatcacttggccatgttcatttctcacaatagcacccacaccaatagcacgtctagccacattgacaggagcatcaacgtttaattgatcagtctcgaactcgcagaaggttaatttccaaggttcttgtggtgctgaagggactaaaatcgggtcatcatggcttttagttgctctaaattgtagcataaagttagcagcgtaagaatcgagggccatcgctggtcttacttgatttccatgaacaacaacatttcgttctttcaaaattgaccacattgtgcaaataatggattctatctctgatttagacaagagagttgataaatgaatcaggtaatcaccttgaaccatggaatttactttttggaagtcataagaaagacctgcatgtctccaaacagctcgtgcatacttacagctaaataaagtatgttcaatagacttccaagcatgtgagcatagaaaacaagtggttgttgtgatgatttttcgctgcactaatttagtggatgtgacagtcagtagtcccgtgatccgtaagggaaaatattgggtaagctgtgtaatcctacaccgcctggggaaggtcaagtgggatgattctgagactgtgtaggtatgagactacatagttgaagtgagcttaaatggattgattggtact

SEQ ID NO: 303296 - DNA, 1222 bp, Cannabis indica
ctgctgttatttttttttgtcacaaatatagctgtatataacctttgattccacacaacttcgaattcatttcgacaagcccacaagtgatataccactgctgcaaagtcataaccaccacctgctttccaaatttagatagctttgccctagctattctcctcaagagtgttggtaatatagcagccgtcactctccagccaagccactgttttatgatcagtaaacaatgtctactaacatgacaatcaaaaaataagtggtctcttgtctctttttccaacccacacattgcacatttatcatcttgagctatattaagcacatgcaatttatcaagcaccgacaaccatagaataaatctatgtttcggaattgttaatctcttccacacttccctgtaccaaaagactttcggttgagtagagcaaacgagagtgtagccatcacttattttgtaattcccccagatgaagttttgcaccatattaagttgcttgtaggcttctttcactcggaccacttgacgtcaataccaactacttgtacttgggaccttgtaggcccaccaattctcgattcctatatagactgtgtgaacccatcgaacccaaaaagtatcttgctttgtctgccactgctgatacatatttcccaatggctgcttcattccacatggtaatcttctaaagcccattcctccttcactcttagaacgacacatatcttcccaggccacttgactcgagctattggagtccaccaaacctttccataagtagtttctacatatagcgttcactctatgaagaactttcttacgaatgatcaaaatttgtgcccgaaaagagtgaatagtcaagagaaccgaattcactaatgttgctcttccggcataggatagattcctagaactccaagttcggatcctttgaaccatcctttctataatcacctcacatttcatagctgaaatacgcttagcgtaaatagggattcccaaatatttaaaaggaagggaactcctcttaaagccaaatacttggatcaccctttgtacctcatcttcattcatgttactacagtatattgaggatttttcctcacttggcagcagccaggaagtttgacaaaacctctttagtccttggagcaaccgataaattgacttgaaatccccatgacaaaaagtaaaacactatctgcaaaacacaaattattc

SEQ ID NO: 303297 - DNA, 990 bp, Cannabis indica
gagagagagagagaaatcaaaccggtcgtaatgggtatccataaacatttagtggagcttggctcaaagatccacctccatgttttggatggtggaacttgcaggacgcaccaaatttacaggtcccagtttttaagtaatactgaacattatgcaacaagaccatgcaaaatcagaggaaagctaagaaaaatatataatttatttatacataaattataatctacattataaagatcacgacaccaataaaaatatgtaaccaactttacctgacatataggttctcccactcgctctgggtactccccagtagctctcacagctgctgccaccttaagatacatattaaagcaaaccaaattaatcaaaacattatttgaactgataagattacaaacaaagtaagttgtacattcttcaatgtcgataagaataaaacccatactctacagagccaaaaacacacatactgagcttaatacagaaaaacagtaaacaacaaagaacattgagccccatattcattctacttccatttccgtttacttataactaaaagaacgtgaaaaacaagcttaatgtaaatgaacactaaactcaaaacaagttatttaaaggtacaatcttgtggtactaaatgattgagcagagtaatgtcgaacaaaaaaacaaagaaaccctcattattgaatacttaataaaacaataaggatttaccgcagcacgatcacggggatggttgtagcgacaccggttaccatatccacaataaccagttcgcatataatacacacagttcggcacgccgggacgctccgggtaagattcgccgccaccatcgccggcgccagtcagccccaattgccacatcgattctacaaatttcgcccccaaacaacgaaacccaagtcacatcaaaaaccctaatcaaaaccccccacattttcaaaaccaataatggtgaaaagaaaaatataaaaaaaaaaa

SEQ ID NO: 303298 - DNA, 5091 bp, Cannabis indica
tatatatatatatataatgtatcataaaaattaagaataatattataaatgtatattatttgcagatcaagattatgtatactaagaacaagaacaattaccctacaaaaaaaaaaaatgaagatctctacagcaaaatgaccacaacaaaattattttaattaataatgtttggtatataatagtttaattagttggtttgatattagtatcatcatcatcaccatcatgaaacgtcagatctcaattttcaaagctagatttgtatgtatgaaggttaatgaattaatatatatatatatttatgattttgtgaaaagaataaaagtagaatcgcggcccggccaagaacttcggattaataataaagattttaattaattaaactaaaaaaaatcggcattgcaaagtatataacacacacggtgatcatcatgaattaaagaactcaccttttacttacattaaggtactaattaattgagataataataagtagataatatagtaagtagataaatcatatttatgaagaacaattgcaaatatatatgggaatctgcaggtacattattaatcgatttatcatgaacaagtaatataagatcgagtccaaaaatatatatttgagagagagagagagaacctacagacacataatatgtatatatattatattgaacctaataaattaatatataccactgaaataataagaagaaaagtaattatttttaaatgagaagaaacaatagcttgaagtaatatttgaagctactacttgaagatatttatatgaagaacttaagtatatgagagtgaaaaactaattaagcaaatgggtgatctgatcatgaaatatataaagttaataaattaagaaaagaagggggtaaaaaacatgcagatcgatctccaggaaaagaaaaggaagattctttgtatgtgtaagctaattaactatatatatatacaaaataagatcagtactatacatgttcataaaagaacagatctaaaagagtaatgaccaatgcatatttatatatatatatatagataaatcagatctgtatatatggtgatgatgatgatcaccgaacagtaaatatataatatatataatatttatttcttaaaatgatgaatcacagggcacagacctctcttttggggttcctactccgggcagttaaggagatcagctttcggaaaacccttgttcctaaacaaggccaaagtgtattgtttatatcctataatataataacacttgtatcacttctttcttccatttatagctctcttttctttctttgtctatttatatataattaataatatcgacaaacacacacacacacacacacacccttctctctctctctctactactactacttctcttgagaaattaaagaaaagaaaagaaccttacattaattatgtaatagggtcgtttttgcgaaaagccaaattataattaaaacttggtggtttagctaaatcaaactgcaattttttcatgatgattattatagctagggttaattgtattaaaatgttgctgatgactaatatgtccctggcctttatcaatactagagaactttgattatttatatatatatatatatataaaccatgcatttggagattaattagttagttaattaactagtaaagatgtgtggttttgaaaattacgtacggatggatgtgttcgacaaaaactagggttttgtgctttccacgtatgggtgcactatgcagggtgttcaacgagaaaaacaaaagttataaaacaaaaagtgaaagaaaaggaaaatgggtcatttcatttcttacatgagaaaattggtgtcataaatacctataggatgtatgttatgtgagttgaacttgaaataagtatagttagagagagagggtgtttaattagattaagtggaggaagttaacattatgatcattattaattaaacttataaaaaatcagactcaattggaaacacaagctctaattaactcattaaaattgaatttactaaatatgggttgagtttgatattctcattaccaccaagatgaatcctcatactaaatgcataatttagtactcaaatcttttttttattattattttaatttttagcaatatttttgtaggatgaagtgtttacgtgcgtcctcgagtggctcgactcatatttttttagtacattttaaaatataagttgtgttgtatcgtgccatgcatacttaaaaaaatacaaatcatgtcatgttgtgttcggattcaaaccgtactttactcatgacatcctattttcttatacgggctctaatttgcattttacttgttcacattttattttgcattaaattaatgagataattagtaagtgttatatgtgtttttttatagtttcaattatttttttttatagctttttcaataatatattataaaaaaattatataaaaaaattattaaaattttaatatttactaataaatactcaaattattattattactattatcatattataagatttttaatgtgttgtgttctcaagttagattattcatatttatgtgtcataatttttaagtttattatgtcgtgtcatgcttaaatttatttattttttttgtatccaaacccatatttatgtgttgtactcgtactcgtgcctcgtgagcttgtgtcctataaaaaaaaagtaggacccgtattaccattagatttatgcatttaaaatgtcaaatttttgtgaagcattgttattttttagtacttttatcataaaatattttttcaatagttttctaaaagttgtgttattaatttatcacaagtattacaatattaacaaatatacatgttttatatacaataatgtcatcaaacactaatgagtgactttaattatattaattatcattaataacaattacttttcctatcaatttacatattcaaaggctattatatgcattcaatcgtagctacaaaagttgtgtttttctttttaaccacaaaagttgtgttaaatatataacattatttactcattatttgtaactacattataatttgtagatggttttaaataccaaacatatttataaaagagaacgttaagaaaatataagtagttgtgcttagcacgttttaaggtgtgatatcgctaatagtatatataattaagtattagattttatataatttaatacaataacttttataatatatcgctaattaataagaaagtgccactcttaagtactggtgttgttgggcactagtgatgttttattgcaatgctctttataaaatgcttattggtcttgttacaatgattggttagagataagttctatttagcttagctttttacttttgtttatagctaaaagtataagataaataaattaatttatttttttatcgaattattactgtataaagatttgttttaagtgaaaagtttttcgaagtgcttaatattattaaaacaaagatcttaagtatttaaattattctgaaatcttttcgagggaagctacaagtcttattaattaatttctactaaaaagaacttcaaattaaaaaagaaaaaaaatatttttgcatacaaacacctttattagaaagatttttttttaattaaaaaactaaaaaaaaataaaaattgtcactatcaaaaatcttacttttagtcaaatttgtgattaaaaataaaaaagttgtagctaattctaaattattattattgtgttgtgactaaaagtctaaaaaggtccgtgggtaaaagtaatagtcacaaaaattacaatttgttgtgaataaatatatttttagtcacaatatttgttgtgactagaattaaattagtgacaacttgtaattaaatactatgttttagtcacaagtttgttgtgactaaaagtctcatttagtcacaaaaaatttattttgtaactaaaagttatctctaaaagtaccaattttttatagtgtgtgtgcgactgtagtaatctttaatcaaataaactgataaggtaacaaaacaaaattactattttacaaacataaactattaatacctccaagtaaatatacataaattaaatatgtataccatctttcatcatataataaatatatatttataatatatatatatatataatatatatttatagatatatatatatatatatgtaatatatatggctgtgctggtgttgtaaatcgtgtgcacatagtatgaggtagcatcaatcatgtatagtttgtgctcctgaaacatacacgacacatatcttggggtatgctagtgtatggtttggtattataataaatatccaatatgtttaattttgtatcactactacttattgttttcttaattatgtacaatgttgacttttattccattcccatgaatccatatatatgtaatgtcccccacccccatacttaccataatcattaacttatttgaacctgagctgcttccttatatacttaattacttcataaatatacatctacacaatacatatacttaattaatttgtttaaatataatgaatatattaattaaagttcggtacatataaatataatattttggaaaatgagagatttgtattccaatgaaccacacttacatcttattatcacttttgtaaaactagaggcctgaccaaaactatagctgtatgaatcaagtgaaactataatttctcaaaccattaattctttatcatgtttgctaatattttttggtcaaacaaataatactctacattttataattatcaatatcttctttacaagaatatttattgtagttactttcaaagatcaccaaaaagcttcattcttagctttcaaatatggtataccaatacaagtagaaaagataagtttcttaaacttaacttagctcgatctacccaacgaatcaactgctgagaggcagccaatacattccagtcaagccagtttttaggtggtgtttggttgggaggaatgaaaatataggaataaaaataggaatgagaataggaata

SEQ ID NO: 303299 - DNA, 2026 bp, Cannabis indica
ttttaaaaatatttacattttttttttaaataagggctcaattttttttctttatgacccactatatgtcaggccagccttacttgaacggcaatgcgcgcgtgtttgatgagcctttgtgtgactcatctctctttcacaaaagtgggtaacccttgaggcccaatccaattactcatatctacactatatatacacttttttttccaaagaaatatgagactagtcctccaaggacttcgaaaatcctttccaattttttagtaataattcacaaaggttccaacatttattaatttcttctatcaaattacactaacttggtctatatatcatatcaataaatagtatatgcctatatggagtactacttactctagtttattgtaatttagtgagaacaaagtagtgaataaaatttgttcatgaaaaaattagttcaaaagggtagtgaacaaaattgaaaacgttataataggctgcttctcattttcgttacataaaagcttcttcacatatgaaatgtttttgtagcatatgtaagtccgtacataaagagtagtctaaactgtaaggataaggtttatgagttttgccagccacacataattttggcattgttgttcgcaagtatagcctgttatgcttagtttaaagatacaatttcccgacaacttcttcttcagaattctatctaagagtcacgaaatcctattactctaatctcttcaaatggggtgcaaggtaaaccattcaattaactctctagcacttttcaaagtctcaacaaaaagagcaaatctttgccccagaaaaatcataactttctcatcctctcccaacagtcaaatccagcaaactcaagagataaaaactgaccattacactgtcaatttcaagactttgggagcttgtaagcttggaattgctaaatatcctgattttggttacaatgctgaaggtgggaaaggaactgggtctgcttcgagaaaggctgaagaaaccacctctgatgatgatgaacttttggtttcttttgatcttaacacactgtatattccaccattgacgagttcaaccactaagttcttgggcttaccactgccaccatttttgaagatcagtatcgacccacagcactttaaagggaccatcaatcaaaactctggccaggcacgtataatgtatacatagatagaccattattattattattataactactttctcactatacatcctgttatacataggttgatcttgaattcaaagccaagttttggtttacaatagggagtttgtacaaagcgccagcactgatagtggagacggtgttaacaagtgaggagtcattagttgggaaaatgagaagcggaagaggagaaaggttggacaaagatggaaagtgcagattggtgggagtggctaccgttgatcctattgatgatttcctcatgaactccttccttggacttcctactgagtgccttgccgaccttaatgccatcatatcctttactccttcagcatattgatttctttgttaatatatttcccaactatatatatatatatatatatatataatatgtatctatattaccttttctttgttcataataaatctccacacggaccacacatacgtgtacgtaatagcagctctctagctaaattattatagtaagggtattctcattaattgcaatatgagaaatttcaattactgtaaataaaattataacttgttcaatcgatattgtaaaagaaacagagaaaggtactaatggtttcttccttctagttatgacattctggttagtcattctgttagtttattaggagtttgttaaatctacaattgtagctcttaaagtcaattatcccatacttctatagttgtatgtaatgagttattgctcttatttgacaattcaaatctgctttaatctccggtataacgtggaagtagcgtagactgagggtagtcaatgtcaaacgaaatatatgtttccaaagtcttaaa

SEQ ID NO: 303300 - DNA, 1342 bp, Cannabis indica
actcacttgatcttcaagaaccggcccaagagaggagagatatttttagtcactaccggcccaatagcttccaaaataagaaattacattaatattagtattagcatccccccttttcggcccaggttgcacattggtctcacaatcatcaaaggacatataagaattgaccccaacctgcccgtcattttcttgagccagaggaaccggcccatataaagaagagataaaacttggggagaccggccccaagaaatccctatctttaattttgccctgctgggcctcctgcccacaaaaagaaaattctttaggctccaactccttcaaaggcctcaacccaccaggcccaaaaagcaaatgcccaacactactactcggcccaaaccccaacccattttcaacaccaataaatccatacaaggccgacccattatccaagacaaattccttaccacaagacatctttgataccaacgggtaaaacacccttttgtccttatttgtaggctccaaaggaggaaatgtagcagaaaactttcctccaaaattcaaatcgaaggtgtccccattaccattactggtaatcctctcaccacacgtatcaggtacactcttgggcctccaaacttgtagcataccatgaccctgccccaaaataccccgagaagtcactatcatgaaacgcctcgagccacgagaagctgtgaacagacgcctacgcacagcaccacccacctctttcccggccacggtcacagggcgaacagagaacctcaccccaatcaccaaaacccagtctctatcatcatcataaccaaaaccaaacctaaacaagttactcttcgaggcagaatcagaaagagcaacgacagtcacaaccttcatccaaactctagtcacgaaatcggacacagcagatgctttgacaagcatgggagcgaccactttcccaagcagacagagaaacgacaaagccttaagagaagtagcacacggagctaaagagatagatgcttcaacacaactgaaacatttgcctttaagagaggcaacaggcacatcacattaacaacctccataaaacatacagcaagagacaaagcacccctcacctaaccagatacaactaaaaatgctcatgacaaaggagacaacggaacacaaagaggaccagcacagaccacacacaaaactaaaacaactctataggccaggaggcacaaacaaaaaacacaagaaaaatgactaaagagagacaaaggagaagaaaaagacacacagtgatactcacaggacaaaccaaccaaaacaaagagaaaccagatgaaacaagacagcc

SEQ ID NO: 303301 - DNA, 1246 bp, Cannabis indica
gcacaaaaccaacgtacctatgttaacaaaaatttacgagagagagcgtaggtggagaaggaactgtaaagtgccaaactcttagggcaagaagtgggaggagagagagagagagatagctccggtaactatggcggtgggtgggtgggtggtgcggtgagtggatgtattatgtggctacgttgctctcaccactttaaatgaccattccatcactatgttttgataaaaacaaaaagaaaaaagttttgaaattataagatttaaagatttttactcaattttattaatagaaatttgaagtatgatgaaaatgtaacgacacgatttgatacatgtccttcgagtgataagatttaatagatattaaaatttgagagcataatttaatatataaaacaggctttactgaaattgaataaaattgaatagaagtaattgaatctaatgattttaataaatattttcctttaaaggaattactatattttaaatattataaaagtctaagagcctcaactcaatgaagcattttagtgaaatttggtagtagtttatatataatttaatttaaatataaatgtggaattccatattcacttgtaataattgggatttagaatgttcactataaaatagaatattcttagcaacaaaaagatgtatacaattttaaacatgtatgtatataaaatgagtattgctatttagtataattatattgacatgataataattaaatagcagtattttatattattaattgaattaattgcgtggatctaatattaaaatacacacatacagtacaccattttttatggtgattgataccttaaagtgttccttaatatttctcatacaaaatatgttcttaatttggtttagttgaaatccaacacccttcaattcggtttagactttagttaaaacccgacacccttgaattataaagccaaaagtcagtggtggctgaaaaaaattatatgaagagaaaagttggtggaatggtttaagtatcaagtttctttcaattgcaaataagatgaaaaaaaaatcacgcctcagtctacctttattacttagtaagttcaactttcgtatgatagagcacaaatttttattttagattggtgggaagtagatcatcgccctttgatggttcacttgatagtaaatgattcaaccgaaaagcgtgagaagataaaatgtaacaccctaactaacataggcgtattacgtgatt

SEQ ID NO: 303302 - DNA, 2379 bp, Cannabis indica
tttcttcttttaattttttttttttggaatgtacgacgaacccccccccccaaaaaaaaaaaaattcttctgcttcctccttttttattctgccattaccaccaccaaaaccaccacaccaccatcccgccacaaccattgtcacacctctaccaccattatcaccatcattgtcacaccattaccaccacccttatcactaccacaataccattatcaccaccattattatttccaccataccatcatagccactgcaacattttcactaaacctaaaatcacaaaaataaaattatccccccagtaatattaatatcctaaattataaaaaaaaaatcataaattaaaatcacaaataaaattcacattaaatattagatccagctctttcaccaaataaaatccaccctacattcatattttttttaaaaaaaatccactaagatttgataatggcagagatggttgacgctcgaagaagtcaaacttggggttctcgcaatttgggatctcgcttggggtatcggggttgacaaatcaaaggtagacagagatgacttattacactgattacaagtattgttatttgaattaaaagtgctagagccagaggtgacaaggcaagcatgattttgaactaagaagttgggagtaggacaagatgaaggagatggagacagcacctaaaattatcctggatcaaaagtatataggccattgtggggagttccagtcatgattatggctttggtcttctgatccttaacatgagaaacaagagggtgaaactcaaagaaaacattattattaagagcaaatttagaaacacttagaagatttttggtgatttttggtatatgcatcaagtttttaagaatcaaggtcttatttgaagctttagacttaaggaaagtacaactagtgtgttgaatttccaaacctaatccatttcccacatagagtctctattgaccattgtactaaacactctgcaccatattattcacatcatatgtgcactgatttgtggtacctgaattagggtaccagttagtgtctccaccttgggaagactgatcgagctacatgagcttgcattgattttgagccatttggagcaggaaagacaccagtaaaactcttgtcgaatttgtaaacactcaagagccaagtgactaaatttgtgacaaagttggcactaaggtttattttgagttgttggaaaccttcttccatgttgagtagcttgacttcctcttacattgttagcatggtttgatccccctcgaggagtaaatcttgaattagatcctctattattataataaccagaggaattatatgacaaatattgtggagaattaaagggaaactgacctcgaggtgtgtttgaacctctgaaattgtgattgaagtgagcaagaaaagcttcataagaccattgattctctagatctagtccagtgtcaatagcagcaaggttaacatttagatcaatcttcttatcggtcttttcaattcttaattcagaagcaagaaataaagcttcaatttttgctactaagtacccatcaagttgagtgttcgatgagataatgaatgtatcatattcacttggcaaccctttgaagatcacagctatgtgatctcgggctgacccttaaatatgaacattcacccctcacttattctcatctccagccatcgtggctcactctacacacactctgatctctccaccacgaaccacgatgaaagaacaactatgatcgcaccacactagtccaacaagaccaccaccacttttgttaggtttttttttggcaatttaattgtcaatattttatatatatttttttaattaatgtacatttatattgagcatttaaattgtttttttacattaattttgtgcctctaattactcttttcttctaaggaaagattccttttcagctgtcctttttttggtttaggaaacttcttgcaagagaaagaattcttttatgaaaaattgtctaaatttgggaaacttgattttccctttttccaattgatgatttcggtttgtctttattagaacatatcaaacaaactttatttgacaggtttgaagtccaatttcgtgatcttggtcgattttggaaagtttcctttctagtcttggtttgctgctgcagagcctgattccgatgcttcaaatcatgaaattttttaaggaagttttgtacagctggaaaatcgtttttgtggttgtttataggattgctatgttctataaataggacttagagagcagctaaatgaatttatctcttctagtctcatattttcgtatctttctttgtgagaatagtgtttcatttgtaaaaatcta

SEQ ID NO: 303303 - DNA, 2906 bp, Cannabis indica
ttaatctgtactttttataccattcactagtctcttgataagccccaatcaggatcctcaaacaatgacaataataaaaggccaagatggagaagattgagaataaaagttcatggaaataagtagcggatctggtatgtgatattgaatgaaggcaatgataagaacaaactaaaacagtgagttattcgagaaacgtcaactctccctagagcaaaaacttaattacaatatatctcttctgaattctctcattccttctccaatactatatatactactctaattcatctcgtccatttctcatactacaactacccatatacccttctactgtcgttattatattatttaaccactttgcccctcactctcgttgcctatcatctcttgaatgactggtttatatatcaggaaagatggctttcttgctagctttttggtccccaaatattgttaaggttaggcgaggatccttatttccgaaaaaaaaaaaaagaagaagaagaaggctttctgatattttgtagcccgtcatattttaggggtgtacatgtaaataaatgaggaacaaataaagcttgtccttgccacttttgccaaatatgctgtatctttatttggtaccaattttcagtttaagaattttgtgtttgagtactactttgtgagatcagctgaataccagactattaagatacagattcaataggttacaagacactggcgagtcttctagccatcattgatattttgaatttcagtattatcatactcttttacatgtcaaggattcctaaaagactttgtgtaactgatatgatctgtgttcgtttcagatatgcctattcggaggaaactggagatgacttcgatgatgaggaaggtattccacttactggaagtggagttaaggtggctggagatttgtcaaacatggtagaaaggaaagaaaggaagacattaactgcagctgatcaccttgtgtttggactaagtgaagatcttgaagaggacaagagggagtaatgaattcttttctcatatttatttcttttctctttatataacaaggttcctgtacagaagaatgtcatcttttactttgcttatatctcttacaaaaaggccttccaccccccaaaaaaaaggcatgaaaaggaggtgggaagtgggaacaatgggggtattaaaaaaagaacatattattaatttcaccactgaaagagattttacagagctaggcttcctttgggtttggggtttgggataacttcatgtactgaaaagtgaaaacccatgaccaaagctattaatatgttttttatttaggtaaaaagagatatggtatggttatggtatacttgctttacttatgatcatgtgacaaacagatctcagccgtccaattagataccagctgctttgttctcacaccattgtcctttggttaacataaagaaaagattggaccattttattggctatagctatgacataattgagtaggtgctgaggaaagaggttacacactcactacacagattagttaatgagatattattttaactaaacgagttacttaatgctcattggtttgattcgccttgtaacaggggtaaccactttatatattaatatagtatatatataatgcaacttgttttaacttttaacttgatgaagtcaaatttaacatggattagctttcaatttaatttaataaatggttgatgaaggggtttatgtgaacttgtttatgatctgcttattagtttgatacttaaatcatttttttaatcaggtcaatttggaatttagccgatggacttgattttgacttaatactttaacccgcatatttatatgcaaacctaatctgcgtgttgttttttgattatgtaattgtgtgtaagtctctagttttaactaatgaagagtcaatcttgataacattattgccaacatattcctactagacactaattttgctaaacaccagatttaggggtcttcatcaaatcgtccacaccacaaaaaaaatacggtttgaaattttttgcagtgcggtcgcattttaaatttttcctaaatcgcgcggtgcggtgcagttttcggttttgaattgttaatatgttgttcaaaccgcaccgcacgttatgaaaaatactaatttttatatttatttaggtccaatatgttaatgtccaactcaaagcccactaattattgtattattattttttttccatatttattttcaagacttatggtatttttgacaagtgttgctcaagctttgttgtatttgtgatagtttaattattggtgatagtccaacccgcaaaaattacatcgcaccgcatcattttttgcggtgcggttttcgcagttttttagtttcgcagtgcaggtgcggttttagaaaacgcatgtacggattggtttgaaaaaatggtcaaaaaccgcaccacccgcaccgcgaacactcttacatattagaataattagactatttctaactgttacactaatttagtgtagaatttggtataataactttaatgatttaaataaaaaatctcctcaaataactatattttatttaaaagatcttgtattttatattatatacattaataacttaaaataactaatttatgatataattatattatggctactagtaagaattgaaaatcttaaagtaatttagtaaataaaatatttattaaatcaattaaatattacactttagttttaaaaaaaaaaattattaaaaattctatagttgatcctagtatacacgatcatttttaaaatgaacaaataaagattatgaaaaaaaaaaaaaaaaaaaaaaaagctcaataacaataccaaccatctcaagaatatttaagatt

SEQ ID NO: 303304 - DNA, 2060 bp, Cannabis indica
ttttatggttcatattttaatcttaaagctactccacctgattctttactgtgtttccaataattgaaattctgttaatgtccccaggaagtgagactagtgaccctcattgaaggtgttcttgctgctaatatctttgactggggatcccgtgcctgtgtggatctctatcataaaggaacgataattgaaatttatagaatgagtcgtgataagatgcaaagaccttggcgggtaaggggagcaaagcaacaagagatgatttgttttcctttacctagatttcttgttagccagtactagtctttgttttctgttattaggtggatgattttgatgtcttcaaagaaagaatgttggggtctggagacaagaagcctcccccgcataaaagagctttgctctttgtggataattcaggtgctgatgttgttctagggatgcttcccttagcacgtgaactccttcgtcgtggaactgaggttagattctctaaatatttcgacttatgcctaataaacccctgttaagttattgctggaaacataggtgttttaacatattgtatctcaaaataaaacaaagacaagaaagatgaagaatttcccaaaagtctgctttttttggaagagctgactgtgatgttattgagttttcatgttttccattttttagtctctctttttcttgtgaatgttttaggtagccattagcatcattgttaattggtagaaaagacacggtttctcctgcagtaacgcccgccttaacatctattgaagttatattatgaacttctgcaggttgttttggttgcaaactcactcccggcactaaatgatattactgctatggagcttcctgcaattgtagctgaagctgccaaggtaatttcgttttttccttttgggtacataaccatggcatgcaactcaatgacattgtgattgaaaagaaagacaatttgagtggatttccgttactttgtttgctgttaccttcattattttctcatttttaacagcttttttcttccttattcagttgatacaaaatatatttacctgcatgagttcaaatgcatatatatgctgctatggaaataattaatcaaaaacaaaattgatctgattcttcttgtttgcagcactgtgacattctccgcagtgctgcagaagcaggaggcctacttgtagatgcaatggtgagtggtctagatggtcctaaagaaaattcatctccggttgttccattgatggttgtcgagaatggttgcggtggtccttgcatagatttgaggcaggtcagctctgagttagctgctgcagcaaaagatgctgatttggtatgatgcttgttttacttattgattattattattattattattatgtttggggtcaacttcaaattaagacacaagcaaaaatgaggacagaacagctaagtgtaatggcatgatacataaaatgtgatattgcagattatcttggaagggatgggcagatctttgcataccaactttaacgcgcggtttaaatgcgatgccctgaaggtgagatttcactgtcatattatttgcttgatgcctttgggtactttggtaaatggaaattaacgagaacaatttggttgcagcttgcaatggtgaagaatcataggctggctaaaaaccttatcaatgggaacatatacgactgtgtatgccgatatgaaccagcaagttaaaattaggaaagagttttggtcagtacaaaatttctcaaaggaaattctttgtaaacacatgttttagcaaataatgataataataataataataataataatataataataataataataatgtggcacttggcacggtagctaaaccaataatctctaatctcaaggccttggtaagtgtaacattaatttaagtgtagctatgataagttatttcaattgtttggtaagagaatagagtaatgattgagatcacgattttttttttagataataaagcacaaatgattcaaatagttgaatttaacacatattaaaaagaaaaaaaaaat

SEQ ID NO: 303305 - DNA, 989 bp, Cannabis indica
tagaatgcacatcgtggtgcctccatggtgtaatttttgccgtagcgcaagtgtagggcgcctgacacccaaaaacgttgttttcgtgtttcgatttagttccacaccatattctcgatatttgatcaattttcacatttcaagtattgaaacctgaaatcaaagaaaacaagcataatctcattccaaaaaataattgaaaagaagacaaattaactctgaaaataacccgattcataagctaaaaatagcagcttattgcaattttgcaaataatattgcaacaaactttggtcaaaaatctaacattgagtcaagacaagtaccttttggaattaaagttggtgtagttatattgatctctttaggcatgcattttttaatgtgttgggtgtgatgtttgaaaacgttatagctttattgtttaaattttttggaagcagttttgtcacatgtggttcgcttaagaatttagtagcccatggtttgacaaagcatattttttagtttgacgatgagctatcgtggttcaaggaaggtcatgctctgattgagaatatctacatcctaaatttatcatgaatgattttaatcactatgtcaaaataaaaaataataaaaataataatattaattacaccaattacaaaatattgattacaaattattcaaatgccttttgaatgtggacttctggtgtgagagttcataaatctccaacttgagttgagtaatgtcaattttaatgttgtcaaatgttcagctaataagagagtgcattttcttgcaagtagtgcttattatttgttagattgtgtttttcattttaacgacttcacgttggagttgttagacattgtattggctgaatcttcattttattaaaattaaaatatcatatttccattaaaaaaaaagttaaaatatatatccattaaaaaataaaaatatatattatctttaaaaatgttgttgctatatttttaaac

SEQ ID NO: 303306 - DNA, 2965 bp, Cannabis indica
attacctgcaatacgtctccggcttgggtaccaaacaaggaggctttctcgataatgaaaagctgttctttctccgtggtccagagcagccgccaagtcgcggagagcgaactcccggtggtaacggtgtcagttccgagagaagctaaggcgtcgattgctttgacgattgcggctcgctttgttgagttggtctgggtctttacgcctcgttcttgatcggagatgaggttgagaaggtgttgctttgcgtgagttgcaagggaggagcaggtgatcttaggggtgtaagagttggtgagttttcggggtttgcagggaatggttggaaggaggaagaagaaggacgcagccatgggagtaagagtgttgattgagtaatcttctacagttggagagtgactctcaagaaattaacaatttgtgtggatggaaatttttatcataaatttgtcacaaaaaataaatttatgtttttttttatacaaaaaaaaaggttaaatgttaaatttagaaaaattctatttgcaatctacaattaaaatttgtcaatgtgaaaattcattaatgggtttcaccatagaagagtatttcgacaactataaatggtgtctaatatctaagtttcaaaattgtatctaatatttatcgatccatctttttatgtcattattgaaaattgtaaaagcaagactttattgccaacaacaactaaaccaagacaaagacatcactagctataataataataataataatttcaaagttaaaaaaccctccaaaaaggaaacaataaatcaaaatcaaacgttacaaaaagcaaagtaaagcatctttctctctctaccctttccctagaaattaaaaaacatgtttataaacaaaagaaagaccaaagtataatcaactcaacaatctctttctctcaccataataaaccctacaattacattacaaatccaaacgaaaaaatcatggatgagtaaaacccctctccctctctctctctctctctctatatatatatatgtgtatatgtatcatgtatatacatctaattaagatgttcatgttgttttgatattttcagatctgaagaatacccaaaatcttactcaatcggcaatcagagagcgatgtcgatgccatcttcatcatcatcatcgacgacgagcgtccacgtcacagctctagacggtctagtcaacgtgaactcactcttcaccatcgccgtcttcgtcggtctctctctaaccacaccgggacaacagagcttggagaatcgagcttgcgacgccggaatcgatgtagccaagaagcttctagtattcgaagttgtttcgtttagcttcttcctcttctcatcgctggtcgcccaaggtcttaagctggccattaatttgctgaacagtaaagacgtagatgaggttttcaaagctcacatcaatctgaaggtgcttagatttggtatgatgggatcagcggttggatctgttatgggatgcgttttcttgatgttgtcaatggtgaatgtgatcgagattaggttaggtatgctttcgtgcggtagtaaatctgcggttcatgcggtgacgacattgttggttttggtatcttctgctctaatcttttatctttctactgcaatctatgcttttatgcattaattagcttagcttaattattctctttttatttaattaaacttcttaatcagagctcttgatcaatcttgttaaatatcgttaaaacaaaaagaaaatgtatatttgtatcttatttttataaattttcatttttgggtgtgtttgaatcaatttatctacttgttaaatatgcatttgagtctacattttcaattttttcaaaccaattatatgatcaaaccaaactaatccattaaaagacaaattggtgtgaaatcataatttatatttggaagttctaaatttttttaccataattttttttttatatataattttgtttattttaataaatttataatacaataaataattattatcttaacaatataatattctatctaaaattaattttaaatattaatattttgccaaaaatatatattaaatatatataaaataattaccgctagcaaattttttttaaaattgtgactaaattagagaatttaaaacggtctaaattgatcaaatcattcacatccgattcatttagttcgccacggatttgagtggcatttttttatagaagaaaaattatatccccaaccatttttggaaagagctattgttaaaacgacaatatgtttactttgatcaataatgtcgttttttttgttctatttcgtaagagaccatactttcctttttctgtcttgtataataaataagtaataattgtactagttgttttatgctatatttcttgatttttctttttctaaaagacaacaaaactataagcaaagaaataagttgtttacacgttaatccaataacaatctcaaacgccaagtttagcaacttattgtattgtatacataggaaatttatggagtagacttgtaatgggtagttctagtagatctttcatttgtttgttttggcatcagaaagaaaaatagtttcatttttttttttccataattacgaatattgtaattaattaattttaaaaaaattcaaataatttaaattgttaaaagttaaatttaaatgattcttaccatgcgttttaaaaaaaaataattacgtaagataaaaattttattttagtattatcaattctttaaaatttgttaaaaatttacaaatgatgtgaaaacactatcacgtacataattataaaaaataaataataactaaaagaactcttctgtatatagaaacacaccattatataggatgtgtacccatatatatatatactaggtgaatgtacgtgccgagccacgtattgctaatttcatttaagattt

SEQ ID NO: 303307 - DNA, 1586 bp, Cannabis indica
catcaattgagtgagaatccatactcgtatctaatatcatgtaatcaggtgtgttttccatcttattaattcataaaataatcttgattatttgacatgagtttaagattaatgtgtatttgtagatttaatttctaacggaatatccaacataatgaaaaatatacttgtaaaattatgcggtcataacattcatagatctaaatctaagtgacaaccaagaagatttatgtggtcattacacttaattagggaatttcaatggtttataatacgaactgatagttgaaggttagatagtttggtgaagtgggtttcacatgaaatggacaatattcttttctcacataattatatgttgaaacttccttttccaaagtttgttttgatactttttatttctcgtagaagaacaaaaactcacatgtgactttctttgtttctcattctacttacttttcatatatgtagatgactaaacactatatcgattatactattaataatcatcattatataaaatttgacatcattactcttggtcaagagcttatcaaggaaaactcaaaatctattactcttattataatttaacaaattatggttgaattgtttttttcttagggtagaatgtggcctttttcttttggtagggagggtcgaagtggctttgattacttacccaaatgatccaaagaagttgcttttgtaattttatattttattttctgtttactttttataaaggtgctaaaggaggttacaataatttatggggaaattatgacttctaaacaaagcaagcgaattactcttagatgatattagcaacgaattgagttgcctataaattcttttttccttctattcattcataattgagattcttttgtaatcaaataataataattaacaattatttaagatcaatgaatccaacgtagaataacgaaaatcaatcatttataatggacaacaaggcccactcaaacatggttttatctattcggcatattggaggaacgagtaggaggacaacacaagaatgctatcaagtagtactaatactcactatgaatacagctaataatatggctgtaaattaatgcaatttctttttcatctaaattttaatcattttggttgagtaaattagtggatactggataatatcacagatccgtacaaatgtaatgccgtatgttaggataattaatttaatatgggacattttatcaagtaaaacattagaagtgaggcttagtgttctcattagtttcataaaaaaaaaaacaattgtttttatagttagggcttatgaattattggttgtattaccatttttgttcagtgaatttgttgataattgttaatacatttattaaaatagttgcaaattgacattaaattcttacagcagtaaaagaaaatgtgtcaagtgaacaaatttattgttcaaggtgactacgtagattatgtctataattttgcttattcagcacatattttagtgtatttgacacaattgttttagttcacttggtagtactaaaataaaacatgtgtattcaaaaaaaaaaaaaaaa

SEQ ID NO: 303308 - DNA, 2469 bp, Cannabis indica
tttttcttaattatttttcagacaaatataattttcgatccctccgagttttccctctctttacagtgtttggagggaaaaacttccaaaaagccaaagcccttggctgctttcttctactggtaatagtttttcatttgctcaagctttactctcaacaatctatagattttctctcttctatgaactgatttactattcgtaggacttggttatcgtcattatttttttctaactgtgatcgatttttggttcaggtaatttttagctctattggaagctttgtttcttgttgatttcattattaagctttggtttagggttatgctggaggagcttggaagtaagttattgtttttttctttgcattggattttgtgattttcgctattacgctttgatttgtggtaggaaaaatctgtgtagcttagtaatttgcatatttttggatttagagtgatgcttttggtttcaatttgagaactatagagaaatatgctctgaacggagaagggggtgagggttgccgttgtctagggtttagatttgtaaatttggagttgctcattttttactaatatgcataatgagtattcagagaacgaaaattgatcgcatttcccattctgaagcattatcgggtcttagtttgagaagaacttgtgatgctttgattggctagtatgagataatgagtttagtttgttttttcagctctaactaattgttgtttatgcttgatgatgattctagttttcttacatcggtagtctctctctcattagtggctggtacagagttcttaagtgagttttacttgtgttttgtttcatttttccttaatgtcggtatttgtatattggaaaagactgatattgatgttcaatgaagtctgcgattgacacttggtagacctcacaatcacaagactagggtgttcttccaaacgtgaaaaatgcaaaccaagaaaaagggtagtgggagagcggttggtagaggccaaactggatccagggtttctagagctcagaagaaaatatctgcaaatgagcaggactcagaaaagaaagtttctgacttgattacatcttcaacaaggaagccgcctggtaagtgctgaaattcatgcagtaagaattcatgtgtttgtaccctccattgacattatatttgatttatgtcaaaatcagagtttaaaccacgtggactcagaaattctctttatgtacagtatgttatgatacacgcctaatataatatcaacatcgtcaccaataataaatacttttaatgcactttgcaaatagaagttagaaatttgatgtatacactatttacttagcaatgaaaataataacaatgcaacgtaatatttaatatagttgttgttttctgtctgcattggttcagtttccacttttttaaaaaagaatggtgaacaagttgccgaaacaaatttggaggccaagtatgagttggtgcgtaatgagatttctgatgcttgtttgggtggaaataatgatgattttatggatcataaggtaattggctggccttttatgccactgtaggtttacttgtatagacatgtatgttggctgtggcgtttgtaaaatcataacaatgcgttgctttattttatttttgtctgttgcaggatagcagtgatggaactgatgatattgagttagaaactatattttcttctcctacctttcatatagctaaacatgatggggaaacaactggaggtaattagaactgtttttcttttcttttttaaaattggggaccatatgctcatatataatttctgttttatctgtatattgtctctgtttcttcattggactattacttgtagctatggtgtactttttatttgatttttaattgttttctctttttttaatcatattgcagatgttgaggaagcaagtctttcatctgaagtttcagctatatattttgcaatgaaaaattccaagttagaatgtgtggatgagcatggtcatgatcccatgtcgactgatgtttgtgtcgaggatgaagactatgaagagtttgatgactttgatccctatttattcataaagaatttacctgctttgtcatcagttgttccaacttttcggcccatgttgctgccaaaacagacgcggagttgcccttctactactcttgttttggacttagatggtgagattagtttaatatctgctaataaagattcattcttattgcgtgcaactctgtcataaaacagattatgtttggcttattagcattcttgcatcaaatttaggatatcaatatatctatgtgtaatatagcacataaacacacacactatttatccaagatgggtagtccaaatgctcaggcatgtagtttgtttccactaggtctgaggtttgagtccctcttgggtacctacatagcaactgctatagttttctggtcctcaaa

SEQ ID NO: 303309 - DNA, 3327 bp, Cannabis indica
aataaaaataaaaataaatatatgcatctgaaccctcatgtgtccatattatgagttaataacgaagtggtagtagcggtgtaagagaattgtaacatttttttttgcctccaaaaataaatattaggtatttaagtgtataaaatctgaaacattaggtatttatgccgcaatttacccaaatataaaatgtatacaattaaaagtggtttcatttttttttttctagtgaaaagctgtaccatttaaacaagatataaatactcaaagttttaagattataaacagaataaatctaataatttttttagcgataaatattaataaaattgtaattttttgtcaaattatatcagtccgggctccgttagtatcataaatttataatcacacttattagtttttaaatttgttgaaagaaaaaatttgagaatagttactagttactacatgtttctgtgcaaagcttaattatttataatttagaccttacatatatcttgttaagatgctaatagagtctataatgataaaattcaattatttagaatttaggctttgtatattaatgaaactagatgaaaattacaattttactagtattagtacttatgtcgctaaaaaaaattattgtatttgtttattataaattcaaaatttaagtacttataccgtaattttttttaattattaaattattactaatatatatactaatatcatatatatttttaaaaaggtattgtatatttattataaaaaaaaaataggtataaaagtataatattttaaaaatattaagtattttaatcataatatactttaagataaaaacatttagtaaaaaatggcacaatgagttcttcacttatttggcaattcaattcaattactggtaagattaggggtaaaaatagagattggattgaaaagatttgtacacgaaagggaatgagtttaaatgtttgaattgtaagaatgggaatgctttaaagaatatttaactaatgtaaatttattttgactattggagtgaaaaaatatgatagaaaaatacctaataatatggcatccctcaattaaatagtaatataatattattttaataatttttataggtatttactattgaagcattaacaaaaaatgtcaaaaataatatagaaaaaggataaaataaaatattatatttttaggcaatgtgaaaaaaatttatattttaaaattgttaacattggagatgctctaaatggttcaattttaattaagaatagtaatttaagtcacgacctgcaagtttgacatgaatacgactcgagattttatgagttcgacatggtacaatcgtgttcgtgttttataaatattttgtgttgcaaattgtgttcgtgtcagtcatttaaaataaatttaaaaactctacacgatacaataacactaaaaatagcaattcagcttattatctgccaacacactacgagattttacgggttcgacacgatatgaaatttatcaaatcgagttcgtgtttaacaaattttttgtatcacgagtcgtgttcaggttaatagtattcgatacgccaacacgaaattgccaccctaatttacccaataaaaaaaatcaaacctaagttttgaagaaaaaaaaaataataagaattcaattgctataacttataaaacccagattttaattgctaacttttttcataactatttgtttgaaggttcttttgtaattaaacatgaattctttatgtgttatttgaacattttttaatagtttatatttaaaattaaaaaaaaaatcagtaattacgcagtatcattaaagaataaaaaagtgtaataaaaatccctcaattaactcaaattaaaaattaaaatccaattctaccatagctttccaattcaaataacaagctcttattaatgtattcaatttatgtttgaaattcctaaacttttatgtaaactgaaacttgaacacatatgaatcttgtacattcataaaaattatacatttattttatatgtgaaccaaaaaaaaaactaatctgagaaaaaaattacttgctcagttcctaaccaaaaagaattgtattacagaagaaaaaataaaaaacaactcttctaggctaataacaaagacaccaactcttcttattttccttgctcaaattcttcttggatcagaccaaaatgtgtttattttctcagattgttaagaaaagtaactcaaaaagagaaatttgtgcacaaaacaaggaaaaaaacagcagagaacagcaaaggaaaaaagcatagagaccctttttgtgagacttcaaatccttctgacccttcttccattatgggctctaatttagtatttgaagaagaagaagaagaagaagcttttttctgagatatgaaaagggctggtgccacttctccccaagttctcatgtttttcacttccttcaccatattttcaatcccaaaaaagagtaaagattggatttttaagatttcttttgtattgaaaagattggatcttgggtttttcgatgtttttagattgtttagagaaatgggttttctttttttagttcttttgtattgtaaagattggatttttggtttttgtttgagagatttgatggttttagattgttggggaaaatgggtttttttctttctattgagttgagaaagttagaggtgaagagggagtgtatgtacatatatatagacaaatataatgattttgagtagtgaccaaatgatagaaagaaagagagaagaaaggactaggaagcttgttggaactttcaaccataaacaacaaatttttatttatttttttaatttgagggtgagattgcattatatatttattagtacttatttcattttcagctatgaaaaaaaaagagtgctgaaagtttaattaaagaaagcatttgaccttttcaaaattatttttgggttaattttaacttgaatattgtgaagttctattttcagccactattttttcatttgtattttactatacaaagagatgacaatgagatcatcttttcaatcattatctgataaaaataataaaagaaaactaccatttaatcgataagtgatagtggggttttttgtattttagtccaaaattatcctaaaaatgaataaataaatttctttcttgggttgttcaaaatctactctaaaatgaatatgaaataaatttacaaatttttgaacacatagttcacatattcttttttgaaaaataagaaaatatataatttaatgagtaatttgcggcataaatacctaagtttta

SEQ ID NO: 303310 - DNA, 1276 bp, Cannabis indica
aaaaaaaaaaaaacaagacagagaaacaaacaaaaaagaaaagataatgtttatcaacatgatacataatatataagaaaaaatagcatgcaccatatatagcgtatacacatgtccaaaaaattattaataaagtaatatattctataattaaatagataatgttaaatgtaatatttttttaccatattaggacactctcagcataaatttaggctgtgtaaatatttgcataattttgttgtcctattaggctacatctcaaattaagtttcttttttctttgtgtggtttttcacttttgagttgcatctatataatgatcatatttttctttttagtaagaaacatataagataattagggatagagggtcaacatcgaaatgattaattaagttttaatcgtgtataatgagtacaattatagttgtcctatataattaaacaggacaattataatctcttaagagcaaagattattgaaatggaagattcccatattagtttcttagtaacaatcgtgcattattatgcatcatattttggatatactttatacccttttttgttttggcctttaattatgatcttaaagacatttttcactgtttaattagccatcagctgatactctataatcattgatcatataattgcttgtacaataaatatatctgaattaattaactcatgaatcaatagacataattatgacatatatattacatgtatattatatatatatgaactaatttattgacaattttattttgatcaataaggaatatacttcattaatcaagaataaactaatacaaacaatcaagcaagggccaaacagcccttagccgagacaaacaaacaggaatttacaattgaataatctataaaaacctgctctcaactctatttaatattctattttttatagtttgaacactactacaaaaatagattttcccgacgtttttaaatagtcatttaaagtattcccgtcggtttctataaccgtcgcctatacaaccgtcgtaaaacgggtataataggcgatggttcaaaactgtcgctaaagtaagtttcctgacgatttaaaaccgtcgcctataactgggtataggcgacggtttataaccgtgccctatactataggcgatggtttaaaaccattgcctatagtatagggcacgatttaaaaccgtcgcctataccctgttataagcgacgattttacgggaatgaaaaaaaaaacgaaaaaaaaaatacaatggcagaaa

SEQ ID NO: 303311 - DNA, 1090 bp, Cannabis indica
tgcataccataatccattgtaccagacagtatattttagatttctttcacttacagtttaatgtagattgaagaggactatgacataattaacatactttatttacactatatgaaatctcaagtctggtgataattagatattgtaaacttctaactattgacctataatactgagggttctctactggatcactcccttgtgctgtaagcctgaggcctgatgtcattagagtgttattaggcttggtaaattatatttttttctcgagctgaaagatccttgagatacttggtctaagatggatacatcacttgtgatttctgcatcacttcaatgcccaaaaaatacttaatttcccccaaatgcttgagggaaaagatgctatgcaattctagaaccagagaagagatgttagaaaggtgacttcctgtgataataatatcatcaacatagattaaaatgagcatgtgatgaccattggagcttctagtgaagagagaatgatcttccctggaagaaacaagcccaaaagagactaggacagaagccagtttatcaaagcagaccctaaggacttgctttaaggcatacaatgctttgtgtagtttgcatacaacttaaggatgattgggatccttaaaaccaggaggttgctgaatgtaaatatcttcttcgtaaactatactactaatgcatgtaattaaaatattaaaataatgctcaaatcctgcccttgcataaagctttgttgtggcccaagctgccacaatttgaacaacgacaatgttccacaacttttttattgttagatcgatatcggttagtccgtattcttcctgcattactcttttttggatgacctacaagtttcttctccactggtaccttgactctcatgttctggatgtattccgaagtacccaatcattatcctcaccgacaagataaattgttgcattgcaagtattcttccacgtccgttttatgtaatatgagaggtaagagcgtacacgctaacattctgattaattgacacgacacatgcatgggcataaggaatttttaacaattggaacatgccgcatgt

SEQ ID NO: 303312 - DNA, 3478 bp, Cannabis indica
gccttcacacttggatcaggaatactttcttggacatcaaagaaacatgcaacatttgaacaatcattagcggaaacagaatatattgtagtaacaatgactacaagccaagccatatggctgagaagaatacttgcagacatagaagaatcgcaagaagaagctacaaagatctattacgacagtaaatcagctatagcaatggtaaaatatccagtatttcacagcatgaccaagcatataagcatcaaatatcatttcatcagagaagttaaagcacacaaagaaattgagctcaagcactacaagaccgaaaaataattggtagatatttactaccaatgagcaactttgagctactacgagacatgatcagaattatcaaaatgtgtacgaaggaggagtattagaagttgctacacatttctacaatagtaattagtctagaaatttctacatatttataggaaaaataaacaagctagagaaacctataatatttagaagagtttagaagtaattaatcaagaaaaatctatagtaattgtgaattatatagaactagaacaatctagataaattattctagccacaaatgtagagagcatacaattataaatactccatcaagattccatattgtaaccaagcttggaaactaaaacaagttgcctactgtttcttaaaatactaagtactcttctattttttccatatacaactattttctaacttatctcaatcaactatcaagtataaactcatcaacaatataatagccaaaaaaaagtcaaaagctacaaacttacatacattctctcttctaagcaaaattatccttaactaaccatcactacactattttactattttacctcaatatcctctaaatacttaatactacattttcatttatcataaactaaaccgatacaaattattctcaaactatcaaagttacttcgatagattacacttacgtgactaatttgatatactaaaatctttcatgactcttttaataatacaatgtttgcatctaaaccatcaaatactctttataattttctttagttttattaccttatttgaatagtatatacataacattctatctcaaaattaattagttaattagttacgaatgaaataacttatactccaacaattagtataatactatcacacattttttgtgtggatactcttaacaccaagacaaagctcatttctctatattggtggatatataattgcataagtatcacaatatataattgcataagtatcacaatggttatccatttgaccgtcaatcgaatttatccttaatcagattgatgaatatttggaatcataaaaaattgtttacaaataatcaaaattaaaataaatagcattcttatgatgtgtttacattaatttagaatagaaataaatgattttaaattacaaaaataacactcattaaagttttacacatgtatatagaacttttatataaaaaaaaataatgataataataataattaaatgagagtgaaaatgacaaattataattttagaaaaaataagtgtggcaattacatgagtttgggccatagccactcccattcttcaaacccaaattagtgtggaactcacgtatttcattccaattccttaaaagaaattaagaaattaaacaaaattaatcaaattcattcttattcctattctctaatttcattagtaaacggacatgaaataaatgtttaaaaataacaattcaaagtgaaccactattgatacttctaacgtaatgcttcaactagaacgatgaaatagttttggctaatgcctgcttttgtagtgagaaggataagtagtatcttataaaggatgaagaaccagaagaaatgagcaatgtcaagtttttttttttattgtttagtaaagagattctatatgttaaactttgattatgatttttttaacatttttacctctaaaaaaactctctcagcccttcagtttcgaccctttgaattctcttaacctagttatatatggttttctcttggtcaaagcatcaccattcaccaacgaagcatatgtgttatggcggagctttggctgagaaccccctcctctgtagtttggtggcttactcacagtggtagataggcccctcatctttcgatcattattttcaattgatggcagcatgttatggcttctttggtggtttgtcaatatacaaatattgtgctcctctgtaatgtgtaatgtcgattgttcggtgcttgcttgacccttcgaattttgttttccatggagtttcaccgtttttttttaacattgacaatcttcgtagtggtcaatgtgatctctaactattgtgattctgttcgagttcttttttttaaaaaaaaaaaaaaaaaaaaacaaataattgttagtgttatggatttttttcaaaaaaaaaaaaaaaaaacctagtgtttttatcacctttgctaattgtccttggaggacttgcaccttcttctcaattttgacatgatttgtttccaccattcaaattatctttatggatagctcctgatttgtacatctaatttgacattgatagccaatttactatattgttttagataagaaaggcagtcattgatttattgtatctaagttctatgttcatgttgtgtgcttcgttaccatttatgtagatatctccttctgagatagtcttaagcatttcagaccctatttggacattgttctaatataaccattaaaaaaattaataatttttattattttcaaacagggtatttgtcaccatgtacaagaagaaggaaagaacaagagagctcataatccctttacctctcttgtcttttcatctctctttcaaaaaaaaagtgtatctttctccctaaaaaatgtctccttcccatcaaaacatatcaagtttagtgtaattgaagtgtaataataagttattgatgatttatcaagtgatatacttacttgattgttataattttattttaccattaatatagttaaaatggaaatgttaaagaagaataattaggattgcagcaagtctgcataaccgacaaatctgatttatattttcaaatttatttatttattcttactcaaaataatttataataaaataatacattttaaaccgcatatgtatatataaaataaaatcgacacattatttatttgaattttatttttgacactataaattactttaaattgctcaaaaatttgtaagatgtgttaatacttacgatgtcttaattaagcgaagactgaaaagataaaagatgtatcgatacatctactattgagggatgcattctaagttttcctacttttatgatattctaaaaacatataaagtgtttttacagtgtccttaaaaatgtatatatatatatatgtatatatatacctttcaaatttttaaaaa

SEQ ID NO: 303313 - DNA, 2109 bp, Cannabis indica
ctcatttccctagtcgaatggtccttcgtgaagataagcttatttagggccatgataagtcgaggttttactctgttaatagtgattattggttggcaattcgtcaattggatttggctcatacttattttctggtaggggaacaagttggtggagtttggtttagagtcttaatattcctccaaaagttaagcttttgcttggaaagccttttctagatggattcttatcttggtcaaccttaacaaacatggagtgagcattgatcaaacttttcctaattggtggaatttagtttggaatcttaatattgttctctactggggatcctggtattttggtcactaattttttgagttttctaaaataatatgctgcttttcttcccccttttgatgcggctaaggtatttctagttttgtggtggaggatgtggtttcgtaaaaataagattatttatgagaatgtcacgttgagttcgactttgattgctggttgggcatgagataatttggatgcttatcaaaaggaaaacatgctagggggagtttcaactgtgatgattgattgtggagttggtttggtgagtctagtggaggttcgggttcctcattggcttcgtctgtcttaagggtgttgcaagattaatactaattcaacacttgactgagggttaggcacggttggctagagaatggtggtttgggacgatataggtgtggtgttggcttctgtggcgtggagagttctggcatgttttgactcagaaattgtagaggcttttgcactttaacagtctgtctcccaatgtaagttgtttggctttgagtgtgtgctagacaaattatcaaagtgtggtccttaatcaatttttctatgcttaattcttattttgaccttattcttaatgatatattatattcttcacatgagttttccattgtgaattttttgtattgtcttaaaatagtaaatgtaattgttatagggtgaatttttgacctataaatatataagtacaatctcgtgtatatttgacacatggactcagttcccagttagaaaaggatgaagtgtcaacgaatagctctagtagtgctaacctcgcatgacagaaacttacgagtaggtgcgaccgaaataaggtctagtcgcacactatgttcactatataaagagcaggaccgagttatcgtaagtcacgtatatattgattatatggaatgatgaagtgtcccatgcgccccacgtaaagactgcatatttatggacgtcaaatttgaatgactaatgtacacgacacacatcttgaacccatgtgttctatgcagtcaatacatcaataccccaatacacgactcacatactcacaggcattttaccttataaattagcccgagagattttaaatagtccaaataccttatatgtgagtaacaccagagaacccacaagatcatatattactcaggaaagtgaaccatcaatatgcaacttccaaacatcacatacgtttggatattaactaagaatggtcgaaactgtcctcttatttattttctatcttacttaaatgtaattaatgttataacgattttgtctgaccgattatgtaatccaaaggatcacttgctttgtatataaatgagtgattcaatttaaataggatcaaatgataaactcttgcaaaagtaaactaagcataccatggtttgattgaactattaattttttgtctctttattaggggtgtacgtcggtcggtttggttaggttatagcatatttttataacttaatataaatatcggattgcaaatatttaatcgtaacccaccttattaaaaattagaaaaaattcaacccgtccaataattttattagtttggtcggattaacccgtccaaaccgttcttcacttttttttttttataattattattataagttatagtattcaatatagattttaaaaaatataaatatattatttatattttaagttaaaaaaatactatactttaaactaattttaagaactttaatataaaataaatataattgagtaaacataaaataattgaataaaataataaaaaacagtaataat

SEQ ID NO: 303314 - DNA, 3297 bp, Cannabis indica
aaaaaaaaaattggaccttaaaaaaatagagaccttgtgcaatggtccaagctgtccaatgtttgggcctgccctgtcaacactcataatcaaaatcaaactacacgatgacaattttgagtaaattgacttgagagtagttttgttaatatgaggtttttttttttttttcacaggatatgaaatcgatacgacttcgagaagcatcaagcataacccgatatgaaaaaaaaatatgaatgtagaccgaacatagtacgatattacaaattagcatgacacattatataaaatatgagtttggaaagtattaagcgctaatccttttgggaggattataaggcgggcacaacatgtgagactctttatcaccataatattttttgattcgctgtctttgatcaatgtcttgaaaagccaaacactgtactagaataagttgggggttatcttttctaatattaaaattttgttgtctactttttcgggagcaactctttctcgtgttagttacaattttaatactacgcattgattggttaaacatgtctttaagatagacaaatttttttagatggaaaaaaacctcttcatttatcttgtaactttgttacattttatctattaatctctattagttaagaaaaagcctgggcatgagcatgagcataagcgtaacacgacaaatttgaaggcacgatacataaacacaattatactaactttaaataaacagttataattatttttagtaaaataattttattttgtaggaatttaatgtttataagaatatatatgagggctttttagttgttttagtatataattataaattaaaataaaatatttaatattttaaagtgtaactattttttagtgagtgctgtagctccgatagcctattacctacgtccgtcactgatcaaaattacattaaacattgagaagtgtagagtttcgttaaaatgggaaatgtggttcgagacaagcaggagagcgaattatgagattcttggtatttcttttaggtttcacacaaacttcagttgaagttaattatgaatagtttggagggtttgagatatgatatcagaagcgaattataatgaatcacttaagactagctcaagtgaccataagagagtgtgtatgtattacaaattctgaattcaaatctcaagtaatgtattgtaatttatgaacgactaaagtaaaaatattatccttctctctcaaaatggttgggagtttttcaatggccaaacttattgttggtcttcttttaatttgttagatatgattgcaagttgtgtagcccattggacaaatgacaatttgattactcaatctaatcaaatatatatctcaatttgaaggccaattttcaaccataaataaatgaagaaaaatctatgtatttaaagcatacaatatggactaatgaaacaatatatacttgccttgtatctaccactatatctattatctatctattctatatgccctcatgagctattattttgtattattgtatcgattatttggttatagttattctatcttataataatggatttccttatagctcacatctctcatgttcaaagatttgagtaatgatagaatttctttttcctttatcgaatttaggtgtaattggaagatactaatataatttaatttattagagtaataattttttttaattaattttaccatattttttaacattgattaacaatattatattttatttttgtcgggaaatatcttattattcttaataaagcttaaattaagaatttgacagaaaaaagaaaaagattaaggcataattaaataaataaataaatatgaaggggcaaagttaataaaatacttttccttgtcaacctacctttcgtcaatactttccttacctcacaaattttggttttttttttttttcactataattaaaaacaaataaataatttgttctaaacattttttttttcaatatttcttgtattaatttcaattttatcatgttttttttatataaaaagaaaatattactaagacgttggaggtgtggaaacaaaaaaggtaagaaataaaaaagtggaaaataaaaaaatatataaatatgaaaaaaaattttttttttttattttttaaaactaatataggtcgtttaattttttttaaaaaaatggaactttgaaaaactaaaaaacataaaacatcaaaatgttattttcaattttataaaataattttattcttttaacatattatattttatattttttctcacatactcgaattctaaacctagttataaacccgaacccaaatggatttatgtgtaaaaatattaattttttttagtaagaaaaaatctaaaaatagttttaaaaaatttatgtcaaacataattaaatttttaaaatgataaataactgttttctattctcacttttaaaaatacaattttaaaaactgaaaacacaaccaaacatgcgcctccttcaaacctaaaaaattaatttatctttttattctgcacatttttttcttttatcaccattggaatcaaggaagctctctcttggagtaaagcaaatgggtggtcacatgttgtcgttgagtcggattgtttgagggtcattagtgatttacaaaaattcaaaagtatggcttctccttatggccatattttttataattgtatgactttagttgctgattttgatattatttcttttattaaacggtctgctaataagattgcacatgctttagcgcgatcttctcgtgatgaggctgatcgtacttttagtagagactctttaccttttgtttttgcatccttaattttggatgatttaatttaatgaaatttaaccattattcaaaaaatccctaattaaattacccttaattattcaataaataaaaagagtagtaaatcgcactgtgaaaaataataatatggacaaaataacgacgtcgttttagtggtttaatttcaaattaccttctgatatcactgatggtgtggtaaaaaaaaaaaaaagctatggcttaccgaagcgttaaaacccttagctgacaactgcttagcgatttcttcctcatatcatatctctttgattttcttagctcatttctagggtttctcagtatttcaaatactattctctctctctttctttcattttctcgagaaacaaacagatacactcaactcaaggatgaagacgactactcaatcaaagaaagaaccaaaatcaatttgaaaaaaaaaaa

SEQ ID NO: 303315 - DNA, 1284 bp, Cannabis indica
ttcattacatctcatgatcatcaattatatcatacgtgtgatgtatataatagagtttgaatttatccataaatactttttttttaataacaataaattcattgaaaatataataatatcatacaggctaaatatgaatactatacatctcatgatcatcaaataaatactataaatgacatgattatcaaaataatactatacattcaaaaaaaaatatgaatattcatatctagccaaacaagttgttaatccattcaaacttcaaagagcatgcacaactaatctatgagcaatacaaattagggacactcttggaaatctggataacaaacttgtaaaaactctaacaatgatctttaaattattagagtaggaaaatctaaaagtagaacaatcacagttgtaagatcttggtaacagactgcaattcaatgtcatcatcaacgttaagcaatttgttttgaaaactcggtattctttctctagaagcttgaaagataaattgcacataaataaaatatacattaatgagatggaaaataaaataataaataaataaatattattgtaattttataatttattttcccaataaataaacaaaaaatatatcaataaatagaaattataaagaaaactaacaatataaacaatattaaaaaaatattttcaatatgaaaaaatatatataaaaaaaaatgtaaattgtcatttctttaactttatttaacaagtattataaactattaattgctaaaattaccatttcctttttataatcaaaatctaaaacactaaatcaaaattaaattagtgttcaaagtcatgaaagtcaatgataatgtcaaataaattaaataatataaaaagatataaaatcaataagtaggataatatgtacaaatatttgttgtaattaatcatatgatcccatcacattgccctataattttcaatatcaacaaaatatattttaattttgttatatataatttaaactaaatttcatgaattactatttttccttattttttcaaaaattcttttacattgtatagttttgttacatatatcattcctaaacacgtaagataaagagtaactagtgttattcatgcatataaatctctattaattttcaactacatgtcgtatcctaaattatgatgattaagataaaaatgacatgtcgtatcgtgagttatcaattatatagtaatttttaaataatttgagacataaatacttaagtttaattctcagttgtaaataaatatataa

SEQ ID NO: 303316 - DNA, 3744 bp, Cannabis indica
aaaacatacgaaaatgtgttggttgctggaattaattcagtctagaaccacttttttttttaaccactattgacacaaaaaaaacaaacaatgaactccgacccacaaaatatagattcgtactttaaatcatcaaatcataccgtccaaactgggtccatactagttcaggacaattacatcgtttgaactgactacatgtcttagaaaccaaaataagacaaagcatactatgtttgaaagtaactattgacgcacaagataacaaatctctggttacagaagcaaaattgtatagatacttccgtcaaatgatgtggatgtaaaaatatgtgactaaagtttgacaaaaattatcaaaagctctagaaacacaattaaaaacaatttctaagaatcaatatggtaaaataagtacaaaggtttcttctttcttcttaatcctcaattttcacggaaatcaaagaaagtaaaagaacttgaaatttgacggaatttccaataaaaaaaagttcaatacactgcattttgttcgaagatatgacaaactgtaaaatctatacatttgttttgggaagaaaaaaattgcaaacaatgaaattcaaaataaaaaataaataaaatcgtttaagaaaagtgaattcaaaggattcagatgcgaaaccagagctaaaaaagtgaaaaatatatacaaaaaaaaaaaaagcataatttagcataaaagaagctctgcaatgcttgttaataagcaaaaaccaaaaaacagaagaaaaactcaataaagagcgcttagcttcatacttcactcatcaaaactcaacaatttcagctcaactgagcctcaaactttaaaaaaaaaatatatatacaaaattataaaaaaaaaaatcgacaatcaaacttcctttactccgtttcagagcaacaaaacagatctggattaataaaactcataaatcaatcaatcaaccaaaacggcgataacaccagagttcaaaattgagccaaaaccaaataaaacagggattcgatacataataaaaacatacatacacatatataattaagaaggaaaattcaataaaaatacctgaaaatttagagactattgtggcggtgtttaggtgggtggcgaggtcatgattagggttttaagaccggcggtaaggaaggagagaagagaagaagaaatggaaggtggaggcggcgaagagagaacgagagagagagagagggaaagagataggaaagagagaaatgatatgagacacgagcgagcgaggccttctctcctctctgcgcgtcttattaaataataataatataatataatagcggctccccggttttttttttttttctccctacagatgttaaaactttttggaaattctaggggccgtttcgaagtaagtgtagctgcgtgttgtgttagggtattttgagtataatacatatacaaacaggtatgttttaattaaatataaaattagaggtaaatttaattaattgattaataaaaatggtatttttcaacttactcttttaatattcgtatgagtctgatatagtttaatataataatttttaaagagtattactggttaatcacaaagcgacttgtttagaagtattaaattttattggtgtctaataacaatgctcttttgaaaagtttgtaataatataggtcgtaatgaaccaatttataaagagatgtgttgtatcgtgtttcgttaatattttaaggaataaggagtaaccctgatacggcccgtaagctatttttgtgtcgtgctttatttggactgacttatttttttataaatagattagtttgttttcttatataggctcaaatttgggctctacattttttttataaaaaaaaaatattgagttaattgctgaattatgtattattttttttattatttcaattatttttatataatttttcaacaatattttacacgtaatcaaattaaaaattaattagaatgattaaaatttgaatatttattagtaaatgcatatataatttcttattaatatcaaattattataaggattttacgttttgtgcttttggagtctattcgtgcttatgtttcgtgtggcttgtcctttcgtgtcatgtttaagtttatttttttcgtgttgtaccataccaatttatagcatcgtgtcgtatcgtctccaagctcatatttttcgtactaggtcgtgctcatgtcagtttcgtgacgtgtcaaaaaatttgttctgtatttagagctctaaaagtaactatgtaataactaggtagtgtaattactaatgtttaaaatacaaggtgcttttagatataatgcggtaattatatatgaatttataatattttgtttgacaaaataattaatatttacacattaatataatattttttagtagttagtattaaaatagaaaggttttaataactacactcaattttcatggggcatgtgaattggagagagtaattggaaccaatcaattacttacacagttataatacaatgtaattatatggtcatacaaatatgttaaattgtgtaattatctcaaattacacataaatttaattacattatgactttctaaacgcgcctttattgttcggatgtattgatacgccactatctctattttagtatttagtctattttatttatgatagtgtatattataattatttaagaaatcttataaattatcattcccaagaatctaacacaagatggtagttgtacattatcattcccaaaaattaaaatttacatattgaatgtcttctctaaaataaattatttaaacactattttttatttttatattgtaaattattttaaataaattttattaaatatcttaaataattagaagatatacaattataaaaaaaaaactaaaaatttgtcctcaatgttcaaagtgtatcaatgcaatcttattatatctttagataattttttttggtaaaacttaacggctgcttttctttatttttgttgaaaaaaaatctgattttattctaattgagaggagattcgagtttataaactttccttaatatgaaaatggttttatttatttatttatttatttttgtttccttagtggaatggttcattggatgtatgtagtcgttttctcaaccttccatatatctttgtaattaaatttaagttttttaaaaaaataaataaaaattgatttgttattaattacttattgtatttttcaatgtgaaaacgaaattgtggtggtggtatacttctcatttctcaatgacaagtcagaacatttttatttccttttctaggagaagtcatcaccattatttttttttttaaatagacatcaccattaataagtatactcacttattctattttggatatatatagagcgagtaaattgcgggataaatacataatgttttagattttatacacttaaatatttaatttttattttaagtggcaaaaatatctaatgttacaattttcttacaccgttactaccggccacttccgttattaactcataatatagacacgtagagggcccaaatgcattacatttttttatttattttaaaatttaatatttttaatatcaaaaactaactactacttgtttttttaaaaaaataaagtagatgcaaatctaaaattaccatagctgagtgaaccagtgtagtatatggaacatgattat

SEQ ID NO: 303317 - DNA, 1019 bp, Cannabis indica
aagtgataaaatataattaaaaaatgttataaattatttttatcaaaaacatataaatttatattatgggaaaaataattaaaaatttcatataacataattttttatacattcgtgattattatgagctagactataatattattataatacaatcttaacaactcacaacacttaaaaatttataatttaccacacacttagctcagcttttttccacagttctactacaatttttttccacagttctgctacaactgcttttcttacagcacagttacaactgttttttttcacagcacagctgtaccaaactgacccttaaaaaatctatctagatttattatcagtttctacattttgagggtctatattcctgattttggggaaagaagcacatctcttgaatttatgcctttcaggccttggctctcaaagatcaaccctcatttttcaaatataataaattagaataattgagcatgagaatgcctcagtgtttttcctactcactctactggtctcttacaaaatctctaaagattaccgttcaaaaccaagatcagactttgcagcctcaccttttgagtggatagcattgtagtggaaagaaatatagcttcaaatagactgcagacatgttattttatttaattccatgttcaacttgatatttgagtaagcaatgaaaataatgtagccaatcttgtacttaagtatcaaattaccaaaatattttcttataataataaaataaatgaataagttaccccttgaactcaaataaatagttctaatagatccaattaataaataaagaatacctgatttgacggtttttccataatgaaaaaacaagacaaaattagaaacaagagcaaggttcttgaccgaaacccctttatttctaagtgaactaactttaaatggaattatcatgttattgtaatctaatctgacacaatcacttgtgttagatattagttgtatattagcggtaaaagaattagatatttagt

SEQ ID NO: 303318 - DNA, 1172 bp, Cannabis indica
gatgttaatgaaacatacttgttagtatatctagatcctggtaaaatatttccaacacgtaaggtgaatttaatgttatctttttggttcctcatctgttgaattggcattgtatttttctaggagaaattttagcctttgattcaagagcacacggatcaccaacccctcatataaatacaagcaggggaaatctgagagagagaaaacgcagagaaaaaccaaagaacctcattttgtgactttagtgaatgaatgatctcttctacattgcaatccaccatcatctacgaattagaatgaaggagtaccccaacacacccccattgagcctgatagtaacccacccctagtcgctggagcctatatacgtttaggcaaacattgataggatccgtgattgggcattcactttttgtgctagccaccgccacccttatctatcccaaccttttccaacaagtaagttccctctattttttttaacagcataagtttatgtttttgtagaaatttgtgttaaaactttaacctggaaaaaatgtttgcatgataatatggggttcgatcgtatcgggtctgcctagtctagggacgacagggtcattttagcatgaatgtcggcaggattctgagcatccttcctcttaatttgttttttgaactgggtcgacgtggattatacctgaattaaattaggtatccaccctcttgtctagaatcattagggttccaaatgatatgctagggcttatattgtttaatctttgtgttctcaaccagttgtgcagaagtgtagctttcaaatagaccaatctatgctttcagatgaccagtccggcggggacctctccaagtagtttttagggtaggccttcccaatacccatactattctccttgagtttagggtattaactgcttgggtgttgcctttctttcagctacagtccatatgtctaacaaaaactttaatcttgaaattggctagcctttgcggcaattgacgattttcctattccactatgggaacatacctagtgggatattatgcccactagtcttttctctctaggttagtgtaacgtccccgtttcaagcctccattgggcccttacacccatggactaatggctcttatacacgagttcgtcactctgactgcttcatgga

SEQ ID NO: 303319 - DNA, 1181 bp, Cannabis indica
ttttttgcatcagttatgctctgacgcaagttagcatcggtgcacaatcgatgcaaatgagtgccaaatccgaagcaaactcaatgtctgtgctcaactgatgcaaattttttccattacttttttgcgtcaattttataattttgtcgatgttaaaaatggtttttatagtagtgccaccaagaagaacaactattagctataaatgggtgtacagaatcatggaaaatccagatgaaacaatcaacaagtacagagccagattagtagcaaaagaaattcacaaacaacctgaatttgatttcagtgaaacattcagtttagtggtgaaacctatcactattagagtagtgctgacattggatcttcatcaaagatcaaaattcaacaagatgtcaataatacttttctaaatggggttctgcaagaagtttatatgctataaccgccaaaatttaaaattgatactcctactcctatggtctgcaaattgcagattgctgcttatagcctaaagacaagctactcaagcttgctttgaaagactttattcttcactcttaacctatagcttttttttcatcaaattcttatcattctctctttgttcatcacaccaacaactcaattacacccatcattgtttatgttaatgatattctgatcactgaaagtaattagaaattcatttgatcaacttattgtcaatttgaactctgaattttctcttaagaaccttggtaagttgaattatttccttgaaattaaagtaaagtataatgtttgatggaattcatctatctcagaggaaataaatcagagatctattatgtaaaacaaagatgcaagggtcaagtcatgctcaacagaagtagtctcaaacttttagtctcaaacttttttgcttatgaaagtgatcatgcttccttcttcaagtacattgggttgctgccaagactaaggtacctcagggggacaatgagctttggattccacatgaagaaacctcaacaattctagcttactaccttttgtgatgcaaactgcgctgcaaactcaaatgatagaagatcgacttcagggtatactatctgtcttgggtctaatcttgttgcatatcttgtaagaagcagcatacaatgtccactactacaaaaacccctttagaggcggtttttaag

SEQ ID NO: 303320 - DNA, 1246 bp, Cannabis indica
tattcttattcttattttttgaaatgtttgttttgtgctgtcttattatccgataacattaattagttaaaaaatataatctaatcaaatgtatagtatttcgttaactataaataataattaattaccagataagacaggttgaacaccattaagaacaagagtgacagctaagaaaggacagagatcagagacagcctcggccaccgtgtcaccgccggtaaaagcatagctgatgacgtggcgaagcgagagcactaagatggcttccgccaccgctatcaggaatgatatcaaattcactactgttactgcgaacgctgctgattttgcatttccagctcctaattcattgctcacccttacactatatatattcattttatgtcttaattattaaatactctttcaacaacagattatataaactataataatttaatgctgctgtaatgtaatccataataaaaaaaatattataaacgactaacctcgcagctgcgttgaagccgacagaaaccatgaacactaagccgtttatggccatgcttcaaaaacaaagaaaaccatccatgcatgaacacttaataattagaataatttatttatttatttgtcaaattcttacatcacaaatagaaaaatatatatatttattatacattaattgttgaattgaatctaatttttgaacacacggaatcaattttccggaagatggtaatcaaatgggaatcgttacttttatttttgcgaatttacttttactgtgtgtatttattatatatgggaataataataaagcaattaatatatatgttgatgtctactgtgtatgttatctgggatcgattcacatgcgctctatttttgtctttatcaaaacgaaaactcgatcagatatatatatatatatatatatatatatataaataagtaatttaagtagaaaataaaagtatatttcttttagtagtttctaattctctaataattaatattattatttatatatgtaaaaaatataacgctgcagtcactccatatatagtatatgataattttcatgtacttatattcttattagtaaataagacaatacattatatggtgaagaatccggaatataaatatttatataaatctagacacataaaagtagatcagtcattctcatgaacatgcttcccactacaatatattaattattttatatttttatatacaattttcccaatcgacgtaa

SEQ ID NO: 303321 - DNA, 3125 bp, Cannabis indica
gtttactgtgtataactttgtggattgctgatagaaaatgtcatttaatttaagttacataagaatatacataaatagaaaaacaataagaaaaataataggtatttacattaaaaaaaaaaaaaaaaaaaaaaaaaaaaagacaaaaattggaccttagaaaaatgaggattttgtgcaataacccaaatgcctaatataattaagttgaccctgatatgtacatgtatgttgtagaaagttagcgttttttcaaaaccttagcaatcttttttttttcttttgtgaaaaggatggtgccaggcaccaaattcattgaacaaaggaaccgaaaacaaacagaacaacaacagcggtccaaaccaagcgacaaccaaaaaaactgtccgaagagttacaaaaaacactaagacacaaaacataattcaagaaagcaatagaacaagaacaagaaaaagaacaaacaaataaaagaaccaacacaaaattcagcaattaacccggatcagggaaccatttagtgtcatccaggagcacttctccatcaatggaattcacggctaattcaccaacagccgcatggtgtcgagcccattttgcagagttatgtgccatgaagttatgcccccagtttatcttttgcaccctccctccctcgagagaaagaacaattcttttgaacctttccgcaaccccattcagcagttgatggtctgcttctcccgcatagtcattgaagtgattaaccacagtcacgttgtcacaaaagaaaagcactttcctaagcttacatttgactacaaattcagttgcacagaccagcatcagtgcttcagcaagagtaggattggtgacattgagttgtgttgagtatatggcctgaattctattattgcagtccctaatgaccgctgctccatacgaatggtcagtatcaatagagacatccatggtacgcgaaccagtctggtgggggagtcatcttgatcgctctgtcctttagatgaggatctcgacaggatgaatgatcatgaaattggcgacacacagttataatagcctcctgtactggagtaatattggacccgtggatcgctctgttgcgaatactccacagaacatcaaagatgcaaagtgccccggttaagaaggtgtcaatgtccagattagagggcagattttttatgcagtagaaccattgcaaccaatccatccattcattgcattgaatggaatccattctgataccccatgggcttccataccaaacagcttttgcaaatgagcactgccaaaacaagtgtatcgtagattccacctcctcatcacaaagagggctgcaaactgaaggaattggcataatctgacccaatttctctctgcttggaagagcatccctcagaatctgccaacctaagaacttcagtcgtgcatgaataggcgcattccaaacaattttccattgccatataaaggagggatcgtgcccgccccattcttcactaagtggtaagctgatttgatcgaaaagttcccactttcttcacctagccacatccaagagtcatcctttctttgtgctggcagggcaatattgagaatatgcctagcgtcggccgctccaaaccattctctgatccttggttcgttccaagtgaggttctcattaatgaaatattgcaccagattagtcccttgagtagcacctagcattggacgcggtttatgatcgcccgaggggacccaagcgtcaaaccagatggacattgattttccatctcctatcctcctacatatgccttcattcagaagcaatctatgtttcagcattgctttccaaagtctcgaatcagaatttttgcattccacgtcaaaaaagtttgtttccttcaagtgaggttctcattaatatctttaatttgtctgaagcttagaccttctaagaactttgatttgcacaacgagctccacgcaatggtatggatcggttttctgctgtccgatcaaccccaccaaaagttcctgaggcacttatcgatcttagatgcaattctgcaaggaatgacattggaagcagctacgtagattggcaatgaggctcccacggattggattagacaagttctcccagcctttgacagcaaacgcgatttccatccatcgattctattaagaacttttttcacaagataatccataaattgggctctattggctgaccgaaacaaggggaggcccaagtatgtactatctctcttcatcttacacattcccaataggttggcaattttttatgcgcgattcttgggaactccttttgagaagtaaacgttgatttttggaaatttactgcttgtccagaccactcacagtaagtatgaaggcatctaaggaaagcttcagcttctttttccgtggcatgcccaaataatattatgtcatccacgaacatgagatgattactgataagttgggccgctctggacaccttgaatccatagatttttccattctcattagcatccgagattaggcgtgataataaatctgcagcaaggatgaacaaggccggtgaaagggggtccccttgtcttagaccacacttagaaaagataactccatgtctcgttccatttaacaccaaattcatattcttaatttcaatgcaactcatgatccatcctagaagccgttccaggacaccatgaaattggagggcttctctcacgaactctcaattcattttgtcatatgctttttccatatcgagctttatcatcatgaagcctttagatccttttttcctcgacatggagtgaacaatttccctagccaccgatgtgttctctgtgatagaccttcctttgatgaaagtagtctgagtcggggaaatgatcaaaggcaagacatttcgaagcctcagtgatagaagttttgagatacacttgtacacgacattacacaatgcaatgggacgatagtcattcacagtaggcgggttctcttttttcggaatcagaactagattcgtttcatttatgaagtgcggaatcttggacgttataaagaaatgtgcgatcatcttcaggaaatccagtacagcgaaatatgaacttctaaaacga

SEQ ID NO: 303322 - DNA, 1845 bp, Cannabis indica
aacataaaaatgtaaatattttacaaaaaatagtgccgtatgtaattattccatatatcaatttattattagctaacaataattcttaaaagttattaaacaatataaaatagcagggttattaaacaatatagaatagaaaggtgctaagcaccactagagcattttaacatttttgatttagaaaatatcgagttactactataggaagtgttagataccaatgaaatatttaacgtacctatgagaaaaggagactcttaggcccaaaatgtaagccaacttggtgcaaattggagtagtattatcagtagttgtactagtagtaacagtttttatgcaacctctaacgatacctacaatctctttattctcaacacccacttcagctacctgaatgaatatataaaatagtacataacttaattagtaacgtttatatattaaaagaaaatgaacgttaattaataagtaaattgaggagagaagaggaataataattaaccagcatgaggaaggatggggagtggcgaattctggaaatgggatcacccaagagatgagtgaagagacacattttgtttgtactggaaactgttgtttcacacttactctctaactcttccacagccatgctatcttttcttagatctaactctctcacacaaatcatcatcatcatcactatctcagtacaccaacagagaataagatttatatatagttaagaattattagcaagggcttagagaaatgtttttatagcaggagtgtatgaaaaaggtgatggaataatatgccaaagaatcactttatatatatatatatataaagaaagaaagctattgaagtgttaagctatataggtaataataagccagttggggagttacataatgattggaattcctcttctatcgatcgactaataaaggatgagaactgaatgattgtacattcccttcctcttctcttctattttctttgcatattaatattaattttggtgtacgtattttttatttttagaaatgggtatgtttataaaatgaatattatgtacaataatgtacacacctttggaatttattaatttgaaagagtggcccttcaggtttttttttttttaaaggggcctctcgttctcaattcccatatatagtttatgtaatgtaataataactaataagggcttaataatttcagtgttttataattaatgtgtgtgtgtgagagagatgatgattctcgtcggttacaaatgcatgccaataatgaagagagaggtggagagaaagagagtaagtggaaatggcggctgatgaggcttttactcgtaagtactttctttttctctcccattaatttataagtggaatatactgtaatatatatacatatatttgtgtagaggaaagatggtaagcaatcatattctaggaggaaattacattatataatttttatttatattttcatattttttttttagatatacccacttttatggatgatgtcctcgttaaactccttaggttatgtaaattatatgttagactcaagtggaaaatgaaagtatattaagtaatctactaaaaaaatgtgtatattttaataaaaaataatataaaaatatttttaattaatggatacaaaaaagaaatatttttcaacttattccttccaagttcgaatcaatgcctccaactccaacaattgctttgctcattcgtattcactaattttttttttctacattttccacttttatttattgtaagacccaaaaaaaaaagaacgatgtatattgcccatgagaaatgctaaagggcaccactggtgcct

SEQ ID NO: 303323 - DNA, 3542 bp, Cannabis indica
agaagtcgagaaggatgtatgtaagtggggaattcggcgcaaatattcttctctttttggagagattttttggaaatctaaatctatccctttgtgtgtattgcagtgattgggtacgattagtcactattttgttctgcttaatatattagtagtagtagggtcatctctagagcttaatccagctgctgacaatttacaatgctgtggaaacagatcagaggactatgcatgcgactactcatcaaatccagccaagtttaagagagactgactataattaccagatatttatacctatctataatatatattggagtgaagattgatcatcacgttttatctatatctatttctcagtgggctctgaaattgaagacaatggttgagactcgagcctgtctgactgcccagagtgtgtccgtatattattctttcttagcttgataagtttttggcttggaatcatgttagctaggaatgtagacagttgagaagaagtgcagaaagaaacgttaaaatatatatatatatttatatatctagtaatgatacaagagtgaagggaatccacactctgatctttgcatatcgtacctagctctttttcttttctgtctatacatggttgtaaaggtttttttctttttactttctttctgattgtgtttgcctttatcagatataatatataatatatatatttatttatatatatatatatatatttctgtcagagctagctacccgtgaatttttatcttatgtattttaaaaataaccccataataataaggctagttatgtgtttttttttgaagggatggctaattatgtgttcatagctaaaaaaaagcccttgtaatatatggttcgattcagcaatgtaacacttatacattaaagaagaagttagatactatatatatataacgtatgcataaaaagttgagcagagaatattattgtgaaacagagttaataagcatcgaaaggtgtccaagattctcctccagcgagtttgatgagaggatctgataagggagtccgaaactgagagccggtcctgttgaagttggctgctgctgaagtggacatatcatggagatgagtaggaagaggagcagcattcgatgaagaggataacagccccagtactccataatcatcgctctcgaaaagcatggtattattattattgtaattattaggcagaaagttgttatagttatctttatcaggatgagtggaggaggagaggagtggttgtgttgctgcttggaaatgagaaaagttagtctctgtcttgcactgtttgggaacagttaatggttgttcttggcattgctgcttattattccatgtgctattttgatgtgagaggagggacttgaataacacagatgatgatgatgatgttgatattgatgggtttttgtttgttgtggctatggtactactggtggataaaccatgtatcgggaagaggtgtgattgggagacaactgggttattagtaatgaggcttttcaagtcattaccactaccactgttcaggaaaaggttttggcttgggatggttcgcattgggttttgagttgtgaattcatattcttctaataatgatgatgatgccttcattggagttggagtgggttgggcttctagcaacgcaggcaagcaactctgtcgtccgtgaaagatgggatttttctctctccagttttgtgatatattctgcatatcacccattcctcctgcatttttatacaaattggaaaagaaataagagaaaaaaaaatcaacccaaataataataatgttgtcataaatgcttacacatatacaagttacaacaaccaaagccaaagttttcacagaatccaaaactactataagtatatataaccctatattttaaataaaaatgaaaatggatttgacaagcacagcaaggttaattataataattaatcaaagtgaaaataacagtctagtccatccccatcggcatgcaccaccaccactactcccacgaaatcaataaaaataagtcaacccagaaaaggacaaattaacaacatctatgattacatttacatatacatacatacatcatacatagataacttgaacttcacgtcgcacgtgcggaggaggaagtagagcataacatatataaataaataataccttaaccacttgagtttggctaagtttaaggttgtgtaatgtaatatatatatataaaggattcaataaaaagaaaaatacctttcgcgtgtgacgggatgaaaaattaccgtcgagacgatactcgtgcatgacccacttggtcttctcgcctcgtggggcacggcccttgtaaaagacaagagtcttcttcataccaagcagagatccattggaggcactgtaaacctctctatcttttccggtggctttccagtacccagctccggtggctctgttggttctcaacccagttgggtattttctgtcccttaggctgaaaaagaaccactctttctctcccatcttagccacgtctgcatgcatgaaaaacaacacagtactatatataattaataacgcatttattatacataatatgattttattgaaattaatttgtcagaataaattagttaagttattaatactgtcttacacttttctcattgtgccactgccaagccaactcatatattatgtattgttattcaaacaaaacatggtatatgcatggtctctctatcttaaatatggctccagctcgaaatatttttaaaagatatgcagttagatttgagaataaatgttcagtacggacttgtagaaatactgaaaagttgcaatattttgaccaaaaactagtcatcttcttcttcttggaaatagaagtagctcaacttcaaatattaaagacacgctagggcataagaatcgggttcaagtttcatataattttttttaaagaatatcgttaaataattgtaaattgctacctaaaaggtactgctagacacctcaataacaatactcatacaaatactaaattttttttttaagggtttaagttggatttttagtaaaggcacctagctagttttgaattataagtactcgtatatatattaaaaagatgttagggttttatggatgatcatgagttataagataaatatatataagtgagaagagaaaaaaagagataatgaataatgaatgaagtaattaattaattaattaacctggtagttcccaaggctcgcatctgttgagatcaacctcaacaatgtcaactccacaaagggttccattgaagactttggaagccaagtagaaagtgatgagctcttcatcagtggggtggaaccgaaacccagggggcaagccttgctcgtttatgtgttctccactcagctcaagaagaacttcttccatgcccaacatgatgaaaatgatgatgatgatagatatgatcttgtgggtggggtttgctgatgtgagttttatagtatataatatatataaataaa

SEQ ID NO: 303324 - DNA, 2353 bp, Cannabis indica
taaattaaatattttcaacataaaaaatatatctaattaatctcatgaaaatatcaatttatttttaatttatattaaactttaagctcattaaatatatatttttcactattaattagtgctactagaggtaaggtgcactggaaccagcccaacagaaagttgtctcaaaatcaatgtagatgctggtttgaacagcaaagaaagatgtattgccacgagttatgtgggaggaggggagcatggagaaatcgtgtttgcaacaaccaaaaacagatgctggaagctaaatgaatgagcattcgagaaggacttctggctgggattaacgaggtgctgggaaattcagtgtaaaaattgatagtttaagggcgcagtttagctgattaaagaaaaagaagctagttgtcgggatattgacggattactccatcaaattcttttactgttacaatattctattgtgttaggtttgttttttatttttagagaagcttataatattgtggcttatattttaaccaatcaaattttgttaactaaagctaatgctacgaaattggaattacacttcattgtatttatcaagcagctctttgagttgatgaatgaattccatttaaaaaaaactgtaaaataaataaataaacattaccacacatttatttaatttttaaactgagtgcacgatgcctaattgtgttgtctactgacatactaattcattaaggaccttgtggtccaaaagagacccaactttgtttttctgtgtgagactttatcaagaaaggatgtagtggagaagcttcgtttgtctctcgggtttgatggggcgttttctgctgatgttcaaggaagaagtggaggagtggctatgttatggagatatgatgaagaatttcagttgcttggatatggtacgaattacattgatgtctctattgttagtagagagattggaaaatggagactaactggtttatatggggagccaaatagagcttttcgaaagagaacatgggacttaatcagaggattaaaacatacgtatgatttgcgttggtgtatagttggtgacctcaataatgttacgtctcaacaagataagtgtggtggtaatctatatccaaattggcttatagatgggttttgtggggtgttggatgagtgtggactccatgatttggatttgagtggctacccgtatacatgggaacgtgggcgtagtaccgatgcttggatagaagtaagaattgacagagctcttcttagtcaaagatggttggagatgttcccttcggttaaattgattaactttctcaacttctgatcattgtcctttacatttgatgcctgttaatttgagtacaacggctgttactaggaaagtgtttaggtttgagaattgttggttgaaagagcctctttgttagaaggtggttgaggatacttggactcaatctgtgggcagcccgattatggagaagatcaaatactgtggggaggttttacttgaatggggcaaagattattcaggtaagtttaaagaaaaaattaaggagtgcaaagctgaaatccgaaactggaaaaaggggagagataccgtggctgttagtaattacaaagcagcccaggtaaatctcaacaatgttttgctacagcgtgaaattttctggaaacaaaggagtaagaaattgtggcttagggagggtgatcaaaactcaaaatttttccatgccaaagctacttcaagaaggcgcaacaatgcaattcagaagctgaaaaatgatgtggggaattggattggttgggaggatgagcttcaaaatgtgtttactgaatatttcaatcacctttttactactgaagtcgtggaccgtagagttgtaattgattgtatacaaccaaaaataactgaggaacaaaatgctcaatgcttggtgatgttacagctgaggagataaagaaaagcattattccaaatgcatcctgaaaaatctcctagacctgatggaatgaccccggggttttatcaaaaattctggcacattgttagtgatgatattattaccatggtacagacttttttctctactggattttttcctagtgatttaaatgataaaaatattgttttaatccttaagaaaaaactacccgaacatatgagtgatcttagaccgatttcattgtgtgatgtcctatataagattatctctaaagttcgtgccaatagattgaaagaggctttaccagatgttatttctaatactcaaagtgcttttttgctcggtcggttgatatcggataatattatggtttcctttgagatcatgcattatttgaagaggaa

SEQ ID NO: 303325 - DNA, 1819 bp, Cannabis indica
gtactactttgtcacttacacaacacttattttagttcctaaactttaatactacacaatgttgaatcttttgaccctgcaatcgaaactacttcttaggcctacttcttagaccttgcaattgattctaagttaactaagtcttaacttgtacaggtggcaagttcaacagcaacatttgttatggcattttcatcatccttgtccgtggtggagttttatctcctcaagaggttccccattccttatggtaatctttttttttcctctccaattcaatatatatgtataaatttgattcttgcaattcttatgtactataaaattctcttttcagctttatacctctcgggagtgtctgtcctggccgggttttggggacagtactttgtaagaaagatcatcaaaatacttgggagaacttcaatcattattttcattctttctggtgtcatttttgctagtgctctcactatgggtaataacatcattaaatccattacattccaatacattccctttgtggtggagatcattaagaagtttttgacaaaaaattcgcaaactttttgcaggtgtcattggcatagagaagagcatcacaatgataagcaaccatgagttcatgggattcttaggcttttgtagcagtcagtgaactcagtgacagaaatattgtctgtggatatagtaagaaatgcatcaaagtttgctcatgtgaaatagtaccattacaaagctagtgttggccaacaccttgttgaccaatcccatcaagtagtaccagtaataatagtgtgttgttgtatgagttttggtgtttggttcaatgttagctcctggctaacatgatctccatttatttagttagtgctcaaatgttagctcctggttaacatgatttccatttattaggtggttggctcaaatgttagctcctggctaacatggtcttctctacccattaataagtgtttggctcaagttatttgattatgatttatatataaaaggacaaaaataattgaagaattaagatttgtgggcacattttaattgactcgtattttctttatctatcaaaatcaaataaaaccaattgaggggtcttcagattttatggactgtgaacgtgtggacattgttattccaaagattctctttcacaattggtggggaggaagctagagtacgactcttaatattaacaattatttattctttattttttatttcactcaattatactctaaaataatgaaaggaaaaaaaacaaaagaaaacatctttttccgaattagaattatttatttctctcacaaagaatataggttttttttttctttcttttttacactttaaaatagtttttttttctttttttttttttgttatttttacagaaattcacattgcaccaacaaagcaatccaaaccgcaaatttgaaaaaaaacaaataaaaaataatatatggggtaaatccctaaatatataatcatttatgaacagcaccattattaaataatgcaatgaaatatttaggttacatagcagcataagtacttaaaattttaaatttgtatgcggcgtgaattcaatatttatatttagcggcataagtacctgttaatctcagatttagccagctgacaatagagtcgtatttattactgatgtttgccacatattagatttgacccacttaattagcgggtaatgacctactccctttttggttgtattaatactagagataataccactcacatcacaaaggttttagaatctaatgtggctctcttaagattacaatgtgag

SEQ ID NO: 303326 - DNA, 1030 bp, Cannabis indica
ttggtaagataagaagaaacaacgaaaaatattcaagtcaaagcacatagtgttattttacttggtccaaattagagtaaaacgatggtttggaaagaaatttgtccataaatcttagaatttgtgaagatgttgcgttcaaagaggatctcgcctgagattgcatctaatatgataaaaatgtggatgaaggtattaaccatgagcaaggaacttgcaacagtggggcggttgccagagattttaaagaccaagtactagtttcataatgtttttttatgacaggaattttcaccctgtaagcattgaccttacggaatgggaatggttccctctgtggcttcctcctcttttttggaggactgagaattcacctattccttgataaaaatcaaattatcttaatggaatttatagcacgtttagtacagaatattcagaatcggaataaattaatagaaaaatgtaacaaaataattgaaattaatatttgtaatatgttgtttactaaaattgtttgaaaattaaataatttaataatgatgtatcttatttactttatcaaaaaacgtaatcaaatgcttaaattggttaaattatccttttgacttaaactataacatatgacaattattttgtaaaatatattttaaagaacaaaattttcattatatatatgttaaaagacaaaattatcattatatataaatatatatatatatatatatttgtaagggttcgtgacataatcaaaggaggtaaacctgcgggagtaggaggtgatagatgggtgtggacaaaggagccaaatggacatttcacaaccaaatcggcgtatctggttcaagctttggaaagggcccctgacattgtcgttgctccaggacgatggaacagactttggagttccaaaatcctggagcgacataaggtcctatggtggagtatcttgtcaaatgcccttcccattagaggtctcctggcgaaaagaatcaacattgacgatccttctgttggaattattttacca

SEQ ID NO: 303327 - DNA, 4059 bp, Cannabis indica
ggtgccctttagcatttctccaatttttagagttgtaaaatattgaagtatttttcagtaataaatgactataaatgatgtggatgatagaaaaaataaaatattatattttaaattagtggctacatttagaattgatttccttggagatgctcaaggaagaaggttttattacttaaccctataaaaagatgaataagcaattgatgataagaattaagaaaatatatatttatagaagttgttatacctttctactggcatttttcattttaattttaatttagatattttgtagaaatatttacactgaatgagaactaatatatgtaagaatgaaaatattagaatggtgtagatattctttcttgaaaataaattactaaacaaaatgtgaaccaaattttaccaatacgtttaacaaaacttgccttgtccagtcatttgatgcacacaagaaacaaatattaaaaaaactaatagcaccaagcaatgtctaaacatttttcaatgtaactataaaataagggaaaagaaaaacagaatcaagaatcaagactccaatacattacattaatagaataaccagaggctatcaacagaaaatatatacgagtcaacaatcaaccataatttatacacaattacaattttcgacaccaaaataatctccaagtcccaaaaagaatctacaattttacagtttaaaccccatcaattgcattatttagattaccaccaaacaatgacatgagaggccccccatggactctaccctctgggatgtcaaagtccaaacttttcctcccactaccactactactaccagcacctaaatcataccttttccttcctccgtcagccttctcagcagtcaaaaagtttgaataagataccgaggacttcatcgaaagaggaaccaatacctgtgggggtattagttgttgcctttttgttggcctttccagtgaattgatgctatcagagacagcactgattgctgaagtagaatagttgttgctactcccgcctgttgttgaggctgcagatacaaggccatgaaaaagcctcggcccaatgagacctcccttgcttgatgctcgctcctgcaccatgctgctatgagcagcacataagccactcttgcctctagcaaatttttcacatttgccttctccccaattacacctctttcccccgccatgagccttgcagaagtctgtgctgccttgggcacttttcccgcaattatcatacttgcagcgcttacctccaccatgcctaacgcaacaatcagtgcgtccccttgcactttttgtgcagcctggcacagcacatctcttcccaccaccatgagcaacacagaaattggtgcccccgtgaacactttttgggcaaatgccaccaccatcgaaaaggcaacgcttccctccaccgtgtcccttacatagcggtgtgctaccttcagcaccctttgtgcagccttgaaatatgcaacgctttccaccaccatgcgccttgcaaaacatggtgcttccctgagcacccttgttacaaccctggtattggcaacgacgtccaccaccatgagagatgcataagccagcctgcccttcagcactacgtgtgcagccttcaatcttacacctctttccaccaccatgtctaatgcaaagccccgaccttccccgtgcagccttggagcatccagatggatgcccacatctcttaccaccaccatgagctatgcaataatctgttttcccctcagcactttttgtacaacccaagtgctgacatctctttcctccaccatgagccttacaatatgctgttcgactctcagcacccttgttgcaaccaggtttctggcatctctgtccaccaccatgaccaatacagaggcctgatgcccctcttgctccctttgtacagcccgaaaatctgcattttttagcattgtttgcacgttggtctaagcttgtaccagttgtttcctgctcagagatagttcccacagaatattctccagtaagagatggttcactcgcctggggagtgctgtggagctccagaagttcttgtgtgccgaaagaaatcttgtaactatccatccttggggccagaataagtgatggcatgtacccacccgatttttttgctgaggtagaaccctcatcaacaactggaatcaagagttgtttatttcctgtcgatacttggttgggtatataaggtgtattcatttccgtttctgatgaaaccgaaatacttgaaacttctttagcccctccagataggccgagttggagaatcgaatcagcttcagatggaacactctgaggttgtacagtagataatctgttgctcctcttaactgtgtaactgtaataatcattactgtatgtacttggtgttgggccgagtccaagtaccaacttacagccatcatcagcaggattggacagcttaacgctgtaattcctttgattacaaccatacctggttatgttacctcctccaaagccagggcaattcaagcagagtgcagtatcaccaatgttgtcattttttgtgaattcattatcatgagaaaaattgaaacccttcttgttcagatccattttacaatacaatctctaagaaaaccaactaggagcctacgggattctttgtacaagaagctcttaccaagtcaacatatgagtattaagtgagcatgtagaagaaattctaatgagatatttccaccgctaacaaagcctgatgtgtctgatctgtccatcttaatctatgtcagcacaaaaatcacagttcttcagaggtcttgctttcttaaatatctgactacgtttctaggatagaacccttttattacaacaattaacaatgacctgaatagatcactggagcttcttgcgcccccaattgaaaaatcatcaaccttcataaattctgaaaagaggaataaaataattagactatgaacgtgccaaagatgcaaaccaatttgcggaaatattatgaaaaatccatcttaaaacaactgtaaagttagagaaatagacagaggacgtcgagatgtattggcaatacgttaattgtgcaattactacaacaactccccaatcagaaatagtagtagaataaacatgtacagctcatagaaatctaaagcaagaatgagaacacagaatgcaagaaatttagactgaagttagaattaatagaaatttggacatctatttacatgtttacgttccaatatctactatcaagaacattttctccaatacctaacaaaacaatataacaattaatatgataccaaattaagatacttccactatgatttttatgactgaaaaagcaaaacacatgagattaaaagaaaaccaagtttatcatctaggtgataaaaacacatttgtagtccaatttcttgatagtaccagctgcagactccaaataaaaatagtactcgtatgatataagatccaaattatctcaacttctgagtggagagaataaaactatgaaaggaaaaaattcccttatttccaagtagtacgaagtcaagttattataaatacagagaaataaactattataccaatctgcataaaatttaacataaaagttaattcacataagacaccaaatttggcaaacatgccagtttccgtaaatatgaacacaaatatagattatgtatatcagaatagtttattttgatttcggatctaaatttctaaaacaaaactgcatgcaaattaaaactgaggctcaaactatctaacccaaattaagcaatcttttaaactattcatatcatagatattggagaaaacataattaatgacctgacttccagtagataagacaaacaattaaacggagaatagtcattcattctccaatatatataattaaagaaagaacttacagagcccatatttctttagctgttcccacttatatttttaatctagacgagattttctctcttcttttcaccatggtgcatcatattctactgagcttaatccgtatctatat

SEQ ID NO: 303328 - DNA, 2464 bp, Cannabis indica
atatgatcgtggccaacctatcaagatatctcagtattcttccccccctggttttcccactcaaagagcttccccagacgaattgattggtaataatttggggaacaatgctgcagaaagttcatccaagaccaggggtactgaggagcaacaaaaggagatgagttcagtcggtattcctaacatttctacatcggatgttaaagggaaaggccttgagaatgatttagaagctcccttcggactcctaactactaatcaaccgattcccaatatcaactctaagcctgtaggacaagataatatggaagtggtgtgcgaaaggttatataatgctaaacgggatggttcttggagagatgagggattggccattaacaagggagaatgtaatttatttaatggtctatccaatttttctcagcaaggggtcttggcgaatcaacttcacagggatcttggaaatcttatagaagtgcccatcagttatgataccaattgtgaagctctgaaaaagaatgctgggtcttctaagaggagaaagattgttcccaaaagaaataaaactactcgaaagtgtggttctactgaggcattgatggcagactgatctttggcaaaagaggatgacaatgcgaaggaaatttctcatgtttctgatttgaccttcgctatgaatttggaagcggcgaacccagcaagcctgggtcgccgagagcaatgatggccttattctggaatgtccaagggcttgggaatccttggactttaaacaccttaaaatcccacgtcaaggattatcatcccgggatgatcttcttgtcgaaaacaaggttatcaagtgctcgaatggaatttgttcgcattcaattgggttatgagggatgtttttcagtggatgctaaaggaaaaagcggcggattggctcttctctggactaaggactatttggttcaaattaagtccttcacgagctctcacattgatgctcttgtggaaaatgatcttggattcacttggcgctttactggtttttatggcaggccagacccgggaggaaggacgaaatgttggaaactattgaaacgactcaaggccatgttctcttatgcttggatttgtggaggtgattataacgaaattattgatcagaaggagaaaaaaggagggggactaaaacctaaatatttaatgaagaactttacggcaagccatttcttcctgtagtctgaaggaaattagtgctgacggggatggatatacctagtgtaatggtcgggcgtctaatcaatttttgaaaactggatagagttctatgcaacacggtttggaaaggaaaatttaagattaacaaggtctctctcctcaactggtggaactcagatcatagaccactattgttacaagctcaaattgggaatactgaagaagcatttactaagaaatggggaactagattccactttgacaagcttgggcggataatgttgaatgtcaaaccattattaaggatgtttgggggtaggaaaattcggtgagacctatacaacgcattactcggcttatgaagatttgtggaaataaactccaaacctggaataaaaagcaaaaaagtgaaatgatggccagatctaaggagctaaaagggaagattgaaagccttgcgagttcaactaagatggaagattggattactaaaaactagcttgaacgtgatttaaattgtgtggaggaaaaaaaaagagatctattggaagcaaaggagtcgtgctctttggttgaaacatggcgatagaaatacaaagtatttccacttcaaagcctccaatcgtcgaaagaaaaatactattgagggcctatttgatgagaaccaacaagggaaaactaaagagaaggacattgagaatattgcaattaattactttcagcatctatttatcaagacaaatgaaggagttgatatgaacaatattcttcaacagtgcgtccccaaccgacttagcactactgagaatgattttttactgctgcctttcactgcagatgaggtgcattcagccatgttccaaatccatccattaaaagctcccggtaaagatggtctcccggggctattttttcagaaaaattgggaagttgtgggtaaggaggtgacttaagcttgcctcgaagcgctgaacaataatgatgattgcagccttattaatgaaacgctgatctgcctaattccaaaggttcaaaagccaacgaaaatgactgaatgtcgcccgatcagtctttgtaatgtggtgtataaggtggtttcgaagtgtcttgctaatcgaatgaaacaaagcatgaccacagtcatttcttccaatcaaagtgcatttataggcggcaggataatccaggacaatgctattattgggtttgaaagcctccattgcatgaggaaaggccgctttggcaatggaaaaaaaat

SEQ ID NO: 303329 - DNA, 2723 bp, Cannabis indica
ccagagtcaactatccaatcattattgtagttgataattccatgtttagtagctgctagagctaatttttattcatccactgcaaatgatgcttttgcgttccattcttcatcacttgtgttttctggatttgacgttgctgcaattccttctacatttttcttcttgacccagcaacttttatccatgtggccatactttccacaattgtagtattttccattaaatttattgttattctttagtttttcaccccgtttgtctttcttctgagctttccctatttgggagctttcatgatgactatccttgtcatcatattttctagaatttctactagcattcggtcaaggctaacctttcttatcactactaaagagtgttctttgtcactctttaatgagactccagatgtttgcttatagctaatacttcttggtcagctagcaagtttctaatttaacgcttcttgatattgcagtaataaaaagttctaaattctagctttaatccatgaataatattcttctaattctagcatctgacataccaacaatagaatctaatgcacaaatttcatgacaaagtgattttaccttggtgaagtattgattggtcgtcatgtcacgctacttgattgagagaagctcattctccagaagctacagtctcatatcattattcttgttgaacagtgatgagaaagtatcccacacctccttcggtgtcttccctggcctgatgtgctccaatatttcatcttcaactgtggtctaaatcgcaaacatggctttgctcgctttattctatttcttcaaagcggttgcattctctggttgtgtgacttcattgccaccaacaatctctcacaaagtcttggccttagagatatgcgtccataagcattgattacgcgttgtaattttggtagttaagtttcttaattttaccgaccacttgaaggtcatctatcgtgtcttgattaaaattttaattttaccaagaaagcttgattatgaaacaaactttgtagtacttaagtacacacgactacactaagaaattcaacaaataacccttgatataaactaactcgactagcctctgataacacttgttgaacaacacaatatgtaaaaaacataattactttattaacttaaaattaattacaccaaaacttataacaacacactttgtgtacacactataaatgacccaaggtcgtattatagatagtcccaaccaacattaccgtatagcacaattacatggcaatggacggcccaataaagctagtatcatctaggaggtttagaagtactactctagaattttatagcaattgttttctaaatatttcttgaagctttaccatatttttagataattgtttaatctaaattattcttttgtgatgaaaggcggtggtgatcattttaacatggagaatacaccaaccatatcatgatgttcttccaactaggcatatatgaagagaacagaaattatatatattatatatatatatatattgaattttgaaagatatatacgtactgtaacgtggaagagccttattaaattaataatatgtcccttcaaagttttaagggtcatttttgtttcattgtccaaacaataagacgcagcaaaaagaaaacgcctttacacatttatttattaaaaaacaaaaaacattatcatgttccaccctttttcattgatcaatattttctaaattctctattgtgtttatttatattatttctgtagtcattgtctgtccatttgtaggttgctaaatatatatattatttcagaaaaactcataacactagctcgtcttagttatattattatatatttaactcttaagtgctaatcatcttgtatacaagtctatattaatttgttgcatcgaaatacccattaatgtggtattaataattaagtgtcaagtggtgtcaactaaacaatatcttcgacttcctttatgtggaaattaggccaagatattggagattacgatgcctaaacagattacacgtgaaactaatctaatctaatctatagttgcatatataacaacaatatttctttctaattttggctatacccaagatgtttgaattattcttattttttccattcatatattagtgtatgtgtgtgtgactttttcacacgttatcaactcgtatgttgtatatattctatcaaagaaataaaaaacgcgtatgtaatgttataaatataaacatatgtatatataaatttataatttacccatgcatagataattaatgtgttaactggtaaaagaaaaataatttattatctagtccaagatttaacttagcaaccctatgagccaacttattagactctctactaacatagaccaaagtaaaatttgaactgaacgataacaagttcttaatactaaccagaatgtcatccaagagactactgccccaattacaagaaacaagtttatcaacaataaatttacattcagttttaagagcatctacaggaaggtgaatgtaacaccctaactagcataagcgtattacgtaatttttaaacatactgtgcagctcgttgctaatcaacgaggtttatggaaatcgtgattaactaaaatttttgctttttaattaaacttataaaatatttataagtaatactcgggatcccgattacaaaaccatttacaa

SEQ ID NO: 303330 - DNA, 1834 bp, Cannabis indica
tttgtaaaaaaatgacaaaaattagtataccatgtaaatttcccttaatttatctcaatgattttttttagtgttgtttgaattggatgtgaataaaaatctcaaattattcattcactttgtatatttttcggtgtaataaatcttggcaattgatgtcctattacaatgatatattttaattgatacagacaaacaaataggtttattattatgatatgatcttgtcctgcataagtttttaatgttaatttaaaacgtcgtctcaaaaaaaaaatgttgacttaaacattttcattatgttgcccaactgcttaatatttcatgttaagtttctaagtttttaatgctaataatttgtttattaagaaaaaaaaaatcctattttgtttagttttggtcgatttgttaggtaattatcattaggtgtgtgttttttcttggagattcgaactcatgacattgtataatatgttatacattttgattaactaaactataactatttgtggtagaatatgttttactatgtgtagtgtatattatatataattttgtatattaatatttttatttaatatatgaaagtatataaatgtaataatgtaatatatcttactttataaatggaaggtggcttgattagtgtatgttattatgatttaatatttatagttttgagaaaatttaagccgtgggcatggggccaaacggataatgcggggatcaagtgggctttatttataatcaatcattttctcagtatttataattgaaaataatatcagtattggagatgattgaacgcgacttctcaaacaacttccccgataacctcaagtcattgtttactttgttctccttcttcttcaagtatggcaagcctcaactctacgatggttccaccaagacaagggtttgccccaaatttaatttacatttcaaactctgttttattcataattataattactttatatatatatatatttatattgtttttgtgaaacacagtatgatgacttggaaaagctgaaggggaaagttgtagcatttttcattactgatgtagatgttggactcacaaacagagatgaatacttactcatgtgtcagatgtacttagaaaagatgcagtgtaacagtaagtatgaagtagtctgggccccaatcaaaatattctgggacaacgatctagttaaattgtttatgaccatgagagagaaaatggagtgttacacggtctacaatagagtggcactttctcgtgccataatcagctgcatcataaagaaatggaagttcaatattgagaaacctatggtgttggttttagatgagagaggtcaatatgtgcactacaatgccctttacatgatgggcatatggggcattagagcttaccctttctcatatgttagagaaaaagaattgtgggagcagaacaattgctggaacttcaactttatccttcaccgcctccacccagacatcactaattgggtattatactttcacttcattaaatttaattaattaaaattataaattaaaaaataaaaaaaaaaacataaaaaaaataaataaaaataaaaataattaatttaattatatacataatgttgcatgtagtgatatgttacatataggcaccaataaaatacaatataagcagtatattagtcacataagtaagattaaaatagacatatataaggcataactcaatagaatgaataatttaaagatgaatttttaacaagagaagcataacttaaaagtggaaataatttattatgttgaataaatcttattaattttaattaaaatatta

SEQ ID NO: 303331 - DNA, 2267 bp, Cannabis indica
gctaaaatatgagcaactatattacaagatttagaacaatgaataaaattaacatcttagaacttattacaaagactaaaaatgtcatttaaaacaagtctcaacgacaaataaaagacatgttgctcttgacttttacaataatactcggacaatcccacaaaataaatgttatcatacattcatacccgaaagaaaggtattgaatcaaagcattgcaaagagctaaagccttcgccacctctggatccaaacaaccatcttccaacttgtagacgcgccttacccaactcatcttgaactaccatgccaaggccattgtagttttcgaccgaattaatagttgcatctgtgttgaatttgaggttgcccactaaagaaggaacttggctcagtatggggattcagtgaagactttaagaagaaagaaccgccaacggccttagctagacaaatattattgttattaattatagaaaatatttttatttttaagaaatgttttaataaaatccccaaataatatttttaaagcttcataataaacaaataaaattcatgatagtacaaatttgggtattattattttaattaatttatattaaaacatacctatgtatgtgttacaaactgaaagtagtttaaaattattcattaacagtatcattatttactaaaattcttctaattatgttttcaaaaaaaaaatcttctaattatacattttaatactgactaaataagcctttatatttaaactatttgtcaaattctccactttatcatgataattaaatcctcaacatattagtggtaaaaaatttcttactacaagtaaaaaaacaaaaaacgacattaattgcatcaacccaaccacttgtaatttttcttaaaaatatatgtaataattaataaaatttatatttaatttctatttcttaaaaatatgtaataattaataaacttatactcaatagtgtgtgtatatatatttcgataaaatcacaccaaacatactatttattcaattaccaaaattttattatgagcttaagacttgatagctactaagtataatataaatagcacaaattattcacacatgagtaggattgtacatgcaaaaatagagcctaaggcgaaataaaattaaagagccccctaatgttaattaaaatactaaaaaatttaatataactttacttgatttggtgtcgtgttgagctccctaacactttttattcaagttaggattccaacctcacattcatttaattttgtaccgaataaaattatttacgaaaaaatcattgccaaatgttaggattcaaataggttaaagcaaatgtctaatgtaccaaaatatcgctacgctaacctaattttatgtttttgaaaatttttaataaatatttatatattataataaattttttagagacctaaaggatgcggtgcctacccctaaaatcaaccctccacataaacaatgtaggacaaatattatatctatattttacatatatttatttgatgtgtaaggccaattagccaaacattgatattagttgaatataatttgagtctaattattttttgttcttattatcttaggcatttacaatacaagtaaagtctatttttggataacgtagggtatgattgaattggctctatcaattatctaaactatgagacactcttcgctttaatttggtagcttttgaagaagacaattgttttaaaatagagacaattgttataacttccaagaagaacaagacaacaattacatacatagggaaatcaaattaacttaaatttcaattgtttttcttgttttccaggaaagtacactatttatttgaaccaatttgcaagccaagtaatctgattgattaatattattaagttatagtttcttgatgcttaattccagtttggtgaagtttgattctatgttacttggtcaagtttgattctatgttttataaagtaattaattataaataaatagttttgatcactgctgacgattaatttgaataagtatatgaatatgatcataagaactcatgcctactagtattgcaatttgcaacctcaaaatatccaactgggattaaattataactattgcactaagtcaaaatattaatgtgtttatgaatggatatttatcataataaattaaataaatacacaagccttatttttttaatttactaaaaaaagagcttttttatttttacattttaaaatagttt

SEQ ID NO: 303332 - DNA, 2208 bp, Cannabis indica
agtcaaagacacttcctgttctaactctcaattctaggctatagcattataccagcatcatctttaaattttccaaaatgttcgttttctttttaaagcattagtccttgattaattttttattgtgttcttgaatgaaccaaaaagacaagtgagttacaaagaaaactttgctcacttgtgttcgatcactctctaactttcatctctctgaattggattacaagtataatttaaatgatataagtaaaaggagaatggtatatatagctaaacaaagtcccaagcctctaacagaaataattaaacttccagctaacaaactctatccaagttagtgagtaactaactgaaaatggtaacttgtaaccattcctcacaaatcttcaccttgattcaagttaacatgagtcaaacatagctctaattgctgtccaatcaagacctgagggcttagctaaccccaacattgatcaattcaaagcagtactcaaactttctgcttggaacaactttggttaacatgtcaaaggggttatctttagtaccaatcttagcaatattgacagctcctttttccacaatctcttttatgaaatggaactttatatcaatttgttttgtcctctcatgaagcacttggttttttatcaattaaataacaccttagagtatgtttggtattgttttttgttttcaaaaaaatgtttttaaagttttcaaaacacaagtcgcgtttggttagtattttctaaaaataatattaaccaaaagtgaattagtttttaaacagaaaataacattttgctgttttcaaaattcttgttttttgtaactttgttttctgaaaaccgttttcaaaaaataaagccaaacaagcctaattgttttcaaaaaaacaatttttctgtttttaaaaacaaaaacaatttttggctatgataataaacatgcacttagttgtcacaaaacacaatgataaccttttgctcaatcctgagttcttcaatcaaaccagtcatctaaagagtctttctttataatttcagtgagggtcatatatattcagactctattgtagataaagtaataaccacttttgcaagttgcttttcaactaagagcacttccacacatgttgaagaaatatcttatcaaggactttctagtgtctatgcaaccagcaaattttattgtggaacatcaatacaaattttaataacaacatttttttatctttcaataaaataacattcttatattttgccacctaaactttttacctctattctccaaaatactattgttaaagatgctttaatattgctcatgtgagtgatttgtgtttggtgagatttaattaaaaaacttaatgagcaacgtgtttttctatattccttttggaaattttattatatatacttaaaaatatatgcattatcaatttttagacttttaattaatttatattgaataatatttattttggcttgctttttcctttttacttctttatattaataatagcatcttaaaaaaaactaactctctctaactcactcatctctttgctcactctttctatcagttaaaaaaaaacctattaatgaccacaacgtccggcggtgacagcggagattccactaatgtcatgaatcacgcacaatgattgtacaaaactcgcaacactcgcaataatggataagtgttttacaaaataattttttaaatattttaaagagcgtgttgttgttgttgtttttttttttttttttttgtcgaaatggcaggatctggtttttccggtgaaatctagaaatttttacgttatatcgatagttttcgataatatgtcaatgtttcatcgatggtaagtgtaccaaaattaagaaagactcttatcgataatttttcgatggtttctcgattatctccataacggtgtgaattttttatgttttttttatttattatttttttttgcattttttagtttcttatcgatgttataattatatcgatggtttctcgataattttcatgattgtgtgaattttttgatgctatagaaattatcgaaaaaccatttatataccatcgataagaaactgaaaaaaatacaaaaaaaaaatacacaactatagaaatcatcgagaaaccatcgataagaaactgaaaatgaaaagaaaaagtaaaaaaaaaataaaa

SEQ ID NO: 303333 - DNA, 1757 bp, Cannabis indica
aatggccaatgcagaatgcacactttttattgtcttttgcacatatatgtggttataatctttttggattacttattatatatatagtacgactatactaataatcacaggcttgacagctagttgtttttttacctttttttttgttttttttttttttttaagtttacaggttttagtatattctgcttaaaaatttttttaatttgatacacatactattacaaaagttcattgttatttgaagtcgtccagtactagaatatcattatgggatatatttagctttgtgaaaaaaagtagttaatcatattcatttttcattccaagttatagagggatgcctctctctttacatgtataatagagacgtattaacaagtgtctttttgtgtaatatataagtgcagtcttcttggacagttaatctttatgtaatttgagaatatgacacaatatgaggacatttatacatactcaataaatatggagataatatatctttcagaatttatatgtgatcaatgtaattgatttgaaatcacgaaattcagtcaaccataagctatttacataaataccttgtacttgtgctattttacacataaagatgaaaagatgagcataacaaccttagtttttgttgtgtgaaaaggaatgtagtaatgcataacacaaccactatagcaatgttccaacataaacacaaacaaaaatgaaaagaaagactttttaatttggatgataagattagagatatgtaaaataatagttaacatatgtttattaactttattatttttcttaaatcttgattatgatatgattttaatattgtatacaggacaacttaataattagcaagctttattttcacagggaattaaattttttttgattgttatgtccaatgacttattttttttgtttaataatatgatgaaaattttagaggagtttgaataaatattcatatatagtgaagtaagttgtgagattatatatgtactgcggttagattggtagaataatatgcatgttagatgagtttgaatattttaaatattcatccgtagtgaagtaggttttgcgataaactacgatcggatgagtgatgatttgtattttttgttgttaattgatagatgatttgttaaattggtaaatattgtataaatagaggaaaatctgtcaaaatttttgaaaattgaactatttttaaataactagtacttaaattaaaaaattagtttgaaaattcgatagtttgatcgtttatcttacttagtgtgatttaatattttaggtagttttagttagatatggataaagaatagatgaaaggaaatagattgtttacggaatatgaagagggtattgagtatttcatgaaatttgccataaaaaatagcagcgatcctaatatgataccttgcctatgtgtgaaaattttaaaaaaggtgagtggtgtataggtaagattatacctttacaaagcttttatagtttcgtcatacaaacaatctcaatagttcaaggaatatttttaacggttagaaaaatttaagagacctaatttagtatatattaaagtttaagagataaaaattctaattaattgtatgctaaatatagcatttactaatttttttaggtaaattgcggcattaatacctaatgtttcagattttatacacttaaatactttatatttattttggaggcaaaaatactcaatgttacaattctcttatacc

SEQ ID NO: 303334 - DNA, 3471 bp, Cannabis indica
  modified_base (815)..(815): a, c, t, g, unknown or other
caaagtggtcaagaatgaagcaatttcttaggcactcacctccatccagggagcatatcctctatggcatattcctgacagaatcacaccaaatctaaataatatctcttttttcttgtttgagaagaggttggaacaaaaaaaaaaaaaagatcactctaggaattaaaatgtccaatacttggacatagttattttcccataaaaaataggaccatgtgcgacttgagacattagtgttgcataatactatagtgtttcacacctaataattttggcattgagcctctaccctaaggccctaactctaataagatttaatcacactactaatgggcttgaaactgtgaaccatccacaaattcagttcagcctagtccggtccatttaattgccttataatatggaaagatattcaccattaaaggggttcaaaaaaatttgattttacagagagaatacattgctaaaagtgtacacaatacattagtaatgctatcgtgaactaacactcattaatgtcctaaccacataaaaaaattttgtatctatttattaatttttttctcagttcatatattttttgttattagttactaaaatttgggtaactaataagaaatcgctaactcttagtactagcaatgtgctatattagtatattattggatacattatagtgtcttgtaggaatacccaatataatgagaagaataataagattccccccgccccttccctaccggaactactggccctagtaacgttttagtcccctgaactttttctctcttgcaaaaattcttcatgaactntaaaaagttaataaattagattttaagtagtttaaagttattaaataaattattgtaatataattatactaatcacttatagttagataaataaattgttttaaaatggagaatgatatatttgtaacaatttgtataattcgagagaatatttacaataaaaacaaatttataagaaaaaactctacaaagatcatagttcataagataataaaatccaatttattctaataataataatatacgttaaatttatatatctaacaattttgaattggataaagatacgcgtgaaattttgttgattgtattaatttattataagaaatactaagtaatgtgttgaaagaatttagaaatatattaaaaaatatggaattttatacacacaacatgagtattgagtatgcattttgaggaagtataaattttcatatatatatatatatatatatatatatatttgtcaacaagtttagctatgtccaaaatgaattaataagttcaactccgaaaaagaaaataaataaataaataataacacactctaaaccatgaataaatcaataaacattaaattttcatcacttgtaaatatatatactaataattaaatatgtgttttaataaagttttccttaacttgttcaagctttttttgttattgtattcttctttggctgggactttggtttaattttcttgggtttaagtaccattggttttctcgatttcttgctcgaacattgcaaactctggacgttcttattaagagcaacatcaatagtaatagcgcagttgaccatgatggacttctttttcttcatgatcgacatcacttccactttcccgctcattctcatggaactactcaaagtcaatattccaagagtcaactcatcgctatcttggtcaacattatttggcagttgagtcgaactcaacctaacaataacattattaatagttttggtggacatggtttttgccttgcccttaggaatgacaacttgtgctatggtggctccactgtaggtgaagttgagggtggtggcttcgaacttgtagggcccgaaattggtgttcttgatcctaatttgggttgagaaactcttatcgaaagaagaagtattagtagttgttttcaatgtttggagatgagcattggttaataaaatgacccgtggagacttaacaagagtaaataccaaaactataaatgtaatgagtacacaaattagaaaaacagccacatatttggctatcttgttcatcttctggcgttcgagttccttagttgataaatctcccgattcttgatcacctccattagatttggccaaagggtattcttgatctttgttctcacccattttaagagatctatatatgtatatatgatgatcactatatatgtatttatacttatgggtatatgtatatgtatgtgttttttggtttgtggtgagatcacttatggggagaggttatttatagtatttggtttgttgttttggatgggggtttggtcaaatattggatttaagtattaattaattagttttggaaacgtttgtgtatatatatatcaatatagttaatttaaacatttttatatattaattgatagtggcctatttggatgagagatttgactttgttgatggttaattggctgctggccaaaggaaaactataggaagtataataaggatgagattattgaccttgagattattgtggacaattttttatggtttataattgtttaattatacatttttatagttttattttttgaaatggtgcatgcatatatacatttaaacattagtaaattaaataatatttaaaacgactcatcagtttccaagtgaggggaaaacatacaagtctatatagtaaattagtgttaattaatacctttaaatttgacctatagttaaataaataaaaaaaaaatagatgtacattttatgaatttttgataattttaaataatttataatattagatagatatacagatttagctctggactgaggctggttctatgtttgggctaaggcgggctaagtccgtgtttgagttaagatggtttagggcccactcagagtcgatcgggcctaggtataggccgattaggcccgtgcctaggacccaaataaaaaatacattttaaaaatatacatatttttaaataatttttaaaaatactatttatctttatagtaaaggcccaatttttttttattattttttttatttttttttatcatctatgatctatttcaacttaaggccggtcccaaggtccaaaatttgtatgtagtgcacttttatgcattaaaaaatggtattttttgtaattttttgtaaaataagcctaacaatggtcacacttcactttaaatataacacacacaaaaaatattcttgaatccattaatactcggggttgccctatatatatactaggtgaatgtacgtgccgagccacgtattgttagtttcatttaaaattttggtttttttaagattttgaatgtattttatttttaaagattacaaattttttgtttgaaaaaattaaatatatatatttgaaatattatttaataatgtattaaaataatattagtgtaattataaaatt

SEQ ID NO: 303335 - DNA, 1639 bp, Cannabis indica
agaaaatgacacgtgaatattgaattgacacttaagtatttatttgtaaccgggagttaaacttaagtatttacgatccaaattactctttaatttttttttaaagaacggagaaagatttaagactagcttttaagtgtttggtgagtccatgtgagtagttggggctcaagtcttgtatttattgtattaacaaatttatgcttcttttactatggtgttcaggtacttcaggaactgccccaccaaaggactattccttagaatcatccaagtcagcaagagttttcagtgccttcagttccatctccatactagcagccattttcgggaacggaatattgcctgaaatacaagtaaagacagattctttggagcatttcattagttgtaaaacccctgctgaaaaatgcaggtttgaatttgatctcatctaatttttgtgtatgtatgaaacataacaaacatctaaccacaaaacagtttatcccaaatgatttgtagccatgtttgattacttactttttcttcattttaacttctcaacatgcccatcaatatcaatacaggctactctggctccacctgctactggaaagatggtgaaaggacttgtcatgtgttacaccgtgattttcattactttctactcggttgcagtgtctggttattgggttttcggaaataaatccaactcgaacattttcgagagcttaatgccagatgaaggacctgctttggctccaacttgggttcttggactctctgttgtctttgttctccttcagcttcttgccattggcttggtaaaatttacttcaagttattcaaaattttatgttacatttattaataatttctctgcaatatattgcaggtttactcacaagttgcttatgagatcatggaaaagaaatcagctgacaccaagcaagggatttttgcgaaaagaaacttaattcctcgattagttcttcgaacaatttatatgatactttgcgggttttttgcagccatgcttccatttttcggtgacattagtagtgtagttggagctgtcgggttcatccctttggatttcgtcctcccgatgctcctctacaacaaaacctacaagcctccgagatcatccctcacttatttgatcaacatttccatcatcgtcgtcttcacttgcacgggattaatgggcacgttttcttctactcgaaaacttgttatggatgccaagaagttcaagctctttagcagtgaagtagttaactaggctttgtatgtttaccctgtaacttaaggctctcaaaattggcctttgtatctgaaaaaaaaaaaaaaagaaaaaaagaaaatcgctaaaaaatatgtaatcgatcatctaatttggaaaagacgacaggtcacagaacaataatggaaaaaataagaaatgaaatttaaaaagagagaggttggtttggtttagagagtggaaaagacgcgcgagtaggatgagagtggggcttgaagaagggaatgccttctttttactgcatggccctcgaattattttaagtacattataacattacaatggactcttcactcattgcactttgttttaaaatcacgttcgatcgggtacccaactcaactctctact

SEQ ID NO: 303336 - DNA, 1411 bp, Cannabis indica
tttggatgcttgctttccccaattgaagagaatgatggaagccgaaatagagctccttgatgaagcatgccccaaatcagagccagaaccctgcactccccccaccatcccccaggtgaatggagagatccagagctaattcctcgatctcttcgaaattgcagcctgttaattgtagcttctttggattttcagttgcctttgtgtcgaattcaaaaaggttctccaagtcccacaacaaggaaggtttcgaattccactccatggctgataaagaagttggataaattgatttcacctactattctaccaaaaaactgaaaagcaaacttcttgtcagtcagatgctgcaaacattaactctgtactttttttattttttttatgcaataacaacataatggagcacagaggttatgaaacaccaaagaaataataatgagaatacaatatgtaaaaatattaaggaattggcaaagtaccttaaaattcacaatatgtaatcaatggccatatctggttcagaggaaaaacataaataggaggcaaataccaaataccagttcagatctgccccaattcacaactcaagctatggagacgaaggccaagaaatgtaataagaaaattgatcaacaaagcatcatcccattggaagattcctcggaagcccataaatattgccttaaccatccccttgtgaaactgctctcagaatcgaaagttgtaaaataccctttagaagagaattcaccaagctcaaaagatacctctacaaaaacacctctttgcttgatgatagccaaacacttaaaaagctggttacataaatcccaaggtccacaaaatgggttatacatatctctgccattactttctcactccggtacctaacaagtcccatcattcgcagaaaacacaatcaaactcagccccagtaaagatggcaggcgtttcccatttccctgcaacagttataaggtgatttttatgctcagatttctacttatatataattttagggttaattttacttttcttttagataaaaaataaataaataaaagctcaatggaaagaaaatttacagttactagccaaccccatctggatacttaccattttagtgtctctctctctcttcacttattactaattatcagagtccagtagaagcaagttttcagtagggcaatctatcaaagccggtttttgaagcagacccaccacggcctctattacaccaatgttaaaaaatcccttaaatcggtcaaaaattcaacaaaccaacaaatctcttcttattaagttaatgaaaatcgaaaataacaaccttcacagttcacacacctaatcataagaatcagagagagagagagagagagagagagagagagagagagagaagacg

SEQ ID NO: 303337 - DNA, 2540 bp, Cannabis indica
gtataagttaggactgagatgcgagctaccttactaaagttactaaggtattatcctttcttctttgaattccttctgtaagttattaatatttgtatcactgccttttttttttattaaactcatacatgagagttttctttttggtttcattgttctaaaatttaaatttaattaattgatttgattactaataagattagttttctttgtagtttctattggaatcatcttaggttgtttgatgttatctagaagtgttttcaatgagatgtgcattaacatagcatctttagaatttgtaagcgttgattaccttctttctggaaaaaatccttataacttctcttcacggggggaatgagttcaatccctgaaattataacctgaatcgtctttaagtctaactataaattctgtttatatgtatatttttttgaaaaagaaacagctttgtattggtctttaaaataaaaacagagtttagggtcatgctttgctcacaccagaaaaactgaagcatgatcacccagaaaattgtatacaggaaaagttgtaaaagcaactaggcaaaagtgatcacatacggtttttcagatccctgaccaaatctgaaaacaagactccctttaagccttttacattatacactcatattgctactatgaattatatattatccccaaggatatcttctgtgattgtgatgttctaaaaattctgttgttcctgtccaaccacacagcccaaaaatggccacctgctttccagagagttgaagcacatcggttaccctttatctcataatctatcaagttcttactttttaatgttggcagcatacaccaagacaaaccaatcttcttgagcaacttgaaccacaacattagagtaaactgacagtttaggaacaaatgattctctgattcaccctttaagttgcatagaacacagcagcctggagacagatcatgataataaggatgtcttttttttgttgattctcatgcatatttatcttccccagggaaagtatccacccaaattctatttatcaatgcctgtttgaaaaactattcatccttggcctgaaattttccttaaagcatgaagattttatgagagtttctgatagttcacctttcctaatcttaattggtgggatctagcaactccataaagtttttcaggaaaacctggaacagtacaagagctttagtaagctttcattagcataataccacctttcttgctctgactaagctctcctactatgtttagaagatggcatatgaaaacaacaaaaagcaccctccacaacctaaaatacaagctttgaccaccacagcacatttcttctacaaagatccaagtcagcactgacaaggatatctggatttagtattagaacccaaagtcagctggtcttatatactgtatggtactgatgtttctacttcttgaggccttagaaagtatgaaagccaagatgtgttgcttaattgacccagttaccatttgcttgtatatcaattccatttttgattatttttgggtgtgattggtactctttcagccattttttaaattttataatttgctgctgtgctcatgactaaaataatatgctctatcctaatggcttgctactgattccttcattctattcttgtccttagtgctttgtaaactttcacatcatagatggcttttgcatgcacaaccgaaatatatgtatgtactttgtctaatctcattgttattgtcttaggatgacggaatattagtagttcccactgtagcagatcctccattgaagcttcgtacaaggaaagggccattctctgagttccttgaccgcacattggcactaacaagtattgcaagcatgtctgggtgctgtcaggtataattttctggctttagcattcatgctggtgctctggttctatgcataactgattcaatctgtacaaatgcctatgcttaccaggttacgattccagttggaaagcacaacgattctcccatttctgtttcatttatctcatttcatggtgctgataaatttcttcttgatacggtcttggatatgtactcttgtctgcaagagcaagccagtgttgcatccaattcactgccattgccagataccaatggtagcatagatgcttctgaacttttgaaagagaaggtttgttcactcctacttttctttttgacggaaaaaaaagaaaagaaagtggaaaagagactattatttattgtaaaatgtgcaaacaaaggagaatgacttagcatacctaaagcagagttcacatgactaacagtcaacccagacccacaaacataatgtaaaaacaaaagaatccagtctcccaaaaatgaaaaagaaaagaaaaaacaacttacagcagaatctcccattcccattcatctatactatttcaatgctgtagcgattactttataaaaaccatattccaattctaattttagtttattatttttttttgaaagaaagaggccattgtcataga

SEQ ID NO: 303338 - DNA, 1478 bp, Cannabis indica
ttttctttcttgccacatgtcaaatattgatatctatgtcaccagggttagtttctgggtaaacaaaaggagattgtgataataaagtgggaaacatcattactctgattgaataacatggtaagagccacgatgaatgagaaaattggctttatggaagggaaggttttgaagccaacaatagaggagaaatttgagggttagatagttgttcacttgatgttggtgtcatggctggccaataccattgagttgtttgttcagtcaatccttggcgaatatgatgatgcacaacaatctcaaaaataggttgtgtgatttttccacattctcagtttttccttgcttgcactcccccaatgaaattttttagttagcatatatgagtgtcgtttactgcacaaattttcctcacacataatgtttaaattgccctcacatttaataaggttcaaattgccctacacaaagtaacaaagtacctgttcaccttaataaggttcaaattgccctcacacattcatcgtggttctcaccatttaattaaatcagagtaatgatattttccaccttattatcatcttctttttgctctctctttgctagctatgatccctcgttgaagctataatattgttaaatagattatgtttgtcctaagatctccctaagctcttaataccacgataaattctatcccaaaaattaagagtatacttatgtcctaaaatcctccttgttatactcaaaattcggctgaaggacacgtgtcaagattaagggaatgagaatcgatacaatatctttttatggaataactcattaattacgtcagtatcaaagtatatttgtaacacgctgacttaaggtcttaggcgaggaatcaatgtacaaactggcacttagtgtattagcaagaaaccatatatcgctaaatatgaatagcgaggcacccgagaaagcgacacttattaaccgagaaaatccttaggatgcaataaacaagctaagtataaaagctgaattcgctcaaagaaacaagtaagcgagataaccatctcgctatgggaagacttcctatagcttcatccatttaacaggagcgaggcttacaaccttggcgagttagaagacttctttataaataaccgcgatcgacacaagacatacattgtcaacctaggaaggaagaatggccccagctcgctattgagatcactataatcaagtttctatcgagacatctccagattcaacagttaaagatgtgttttatacacgatagttttgacccaataaaagcggaaaaatcacagctatacgatttttaaatcataaaccgcatttacattacataatatgtaaacaaatcccacaattttagggatgattgctgtaaaattatttcggtcaactttgtaattaacttcccactatgtaattataaatagtggtcgacaagctcaaaaaaagggacg

SEQ ID NO: 303339 - DNA, 1490 bp, Cannabis indica
ttttttttgaaaaaataaagaaggtgcagcctagacgttctagggtccaaggatgcaattcaattttattatttcaagaagaaattacaataaatatataaagttttcaagaaatatgataaatatggtatttaaagttgttggattttattgctaaaaaaaaaaggttgtgcattttatatgatattttttaacttttcacttttttatgggatttgttttttcacattttgataatcccaatttttttttttcttatcttttctctttagtaacaagttaccagtgacgaataattattttaaacattgatatgacagttaaccagttccctttatttttcgtgtgtaaaatgacagttaccaatatcaatattatcaaaataaatcattaccctaataataatcaaatctgaaacctgatcaataaaagataaataaatttgaaaaatacaagttctagattgtaagggtaactagttacttagctaggtaaaaaacaacagttatataatagtaactatgttaccactatcaaaatacacttaaataaaaatcagcagtaattagggcactcatcttttctactttatcttttaaaatacatcattaaaattttattttctttattttacctcaaactttaacattacatcatacatcaatcaatttctttattttttttctctatatcattaaaatatatatttatttattttaaatatataatattaatttatacacatacataaaaaaaacaaatattaataaaataaatttagagcatgaataatgcttctctacatgtggagaagcactttaaaaaatatgtaaaatacattatttgatgtatggtatattttcagccattctcttctctattttagagaattagctattttaaaggagctaatgtgagtgctcttaggctacgattctagtcaagcgaactccggcaacaaactctgcgtgactaatgtagtggtgaatttcaatcgtgacatacaacgaactccgtcggtggctccacttgcagctccgatgacaaactttggaaacgactttttttgttctctattttgttatttggtttgaagaaaggtgagtaacttcaactataccatatttttgtaaatttcccttatttcaacttagatataggattcttcttttaaaaaaaaaaaaaaaacttagatataggattctctactccaaaagaaaaaaaaaagatttagaaataagattgtcaaagaaaagaatataaaaacttggatatgggttcattgggctttgttaattttgtttttgaaatttggttcattgagctttgttaatttttttgtttttcaaagttggttcattgggctttttagccattcaattttcgtttgaggaaattatactctataccttttttatattgttctcttttatttttactctcttttttaaagtctattatttttacctttttttttaaacattgtacca

SEQ ID NO: 303340 - DNA, 3432 bp, Cannabis indica
aaaaaaaaaaataataaccaaaaatgttcgaatcttcacttctagtcaaaaatcctaataagccaacgttatattagtgttcatactgaaacatgggctaagatacagtcagttcgacccaagaaacatactgagaaaggaagcgtgggaaaattctgagaatagaagagaagagaagagaggatgaagatgaagatgagtgtgttactgattttcatgctcttctttctctccgtcgttacttgcatcgaagataaatgtgctgcttgtattgctgttgctgtaacctcaaaatctctttctctctattccaaactttagatccagaaatgtatttcactgaaaacaactcttggcattcatgattttttttttcttttttggcaggaggaggtagagcgaggtctttccaatgtaagatcaacttgttttgtttctatgttttaagaaattgagctgggaaaattgttttgtctaatgtaatggattcatcaggaaaaaccaaggaatcatttggatatgagacaccgtttggattctaaaggtcaacggagaggaaaggttattgattacaggtatggaatgggatgacttgacttcaatctctgcaatcagtatttgatttttatgggtcagccgttacagtcagactgtaatttttcatcataatcttgttgtttcaagaaaacttatgaaatctcagaatgtttctaaaccatatgaattttctataaattagaacacaatggaatgggatgatttcaatgttagcaattgtccataatcttattagattaggtcttctactatatgattgtatggtcagactggaacttttcattataaataatactacaaaaaatgatagctttgaacacaatgcagattgaaatattgaatcagtatttatttaagttaatttttgaattagctaaacaaattgttttggaacgattgttttaacagaatgagtgagttgagagttgttgaacttctggatggcctttgtgaaaagatgcaagattacactcttaacaaggtagcctataatgttcttttagtatcttttggctttgcgctttgatcttttcaaaagtctctttctaaggctttcttgctctttcatttgatagtaagaagctaaaattgacatttctcatcataaggtttgatgacattcttgtttaacttcccatgcccaggttaagtcaaccaaacatgaggagtggatcaaagtagataactgggataatatcacaagtaagtatttcctgttgttgcttcagttcgtgactcttgctgctttcattaaatattctattcaatcaaatagggagcataacaggaaacttgctgtagaatgaattttggttttattttatttcctggcaattatttttttccccaatttctattagataaacaagaagctcgtgcttattcaaaagacatctcaacctattgtggaaggtaagagggttccacttttgtttctgttatgaacttgacacttttgccaaagatgattagtataacctttgattgtgattcaggttacttgaggaaacagaagacgaggtgagttaatgctttcccattctaaaactagaaatttactagatgttgattttatttggttgttattgacagttgttcatttcattttatctcttatccatgtagttttcggaactgataaagaaaggatctgtgaaagtaggagatgtaagcaaggttttatgtcaagatctgagtcatcattgtagcagaacaaggtaagttattccttaaggtctcgtttggatggcgggattggattggataatttttataatgtaattttgttatcaagttagagaagttaataaaaaaaattaatccaacaacataattaatcctcatagtttgggataacttaatcccattagaattgatactttgcatgaaacctatattcttttaatttagtgttgggcctgttggcaaatgatcaactcattcgtttttctacattttttctcttatattttcaatccaatccatctaatccaaatgtgaccgacacacacagagatttggctagcttctaataaatgatcaatctatgtgcagcattggttcttccaaaggagatgaccaggatgatgaatcagatgcagagctgtgagtttctcaaactggagttgcagatggggcaaaaggttatacgatgtcaactgtggaataacttatgaacaagttagtggggagttttataaaagcgattattaatatgttaaagctgtgaattgcatatcaatccggtaaattttggtatgcggattgaagttatgtgatgtactattcaaacaaatcttttcttactacttgactcaaattttctttatagaatcactccagcaactggggcctttgtttctcattacaggtatttgttaggggggtttgcgttcttgagaatgggaatgtaaaattcttaatggaagacttatgtttgtgtggatcaaattcttaagcatattttgggagtaatttcaaactctttaaacaatcgggttcgaaatttccttaatctcaaattctctcaattaaagttctactaaaacacttacaccgaacacctctggtagttttttgatagattataaactaaataagagctaagagagctattgctggcatagaaatataggagtgtttgatttcataacttaaaaattgttttctttttttaaaaacaaaaagttgtttttaaaaattagtagagagtgtttggctaaatttttttaaaaataatttctaaaaagtgagttaagaaaaactaaaaatcagaaaacatcaaaatattgttttgtattttcaaaataattttttgtctaatatataaatatatatatatatatattttatattttctctcacatacacgggtttggggatggagttcgaggcagaagctgggtctgaggttcagggtctgggattggggtccatgtctgggtctaaggtcggatttggggtctagttctaggttcgagtcaggtccgagcttggggctgggctagggtttgggtcatgggccaagtccgtgtccatttttgggtttggggccaggtctcggggtcaagacaggggccaaagccgggtccaaggtttgggtttgtagtccagggttcgggcccgagggcggatacctacagaagttcaggggtgaaagataaacattaaggtggtgtttggctggaggtaatgaaatgtaatggaataaaaatgaaacaatttttattctatactttttttggttgcattttaaagtagggatttttactccatacaccatattatctcaaaattgtacatttatacggagtaacaaaaatttaaatttttttatgttttcatttgtatattttacatttatatggccacgct

SEQ ID NO: 303341 - DNA, 3942 bp, Cannabis indica
aagtcaacctagcacggcacacacatatttatagcttggtgcgaaactatatcttctatgaaagctactaataaaatctgaggacagtatacttagtgaagagtacccatgtttgcaacaatggtaataattcttcaaactcagaagtagtgtaagagtgtccagtaaggtctacaatgtcatcaaatgctccaatcttacagaaaaatgattcaacttttgacttaatttgtttataaattagtgaggcagcatctatagattgcagttctagacctccacacataaaacaagaccatcgtttgtctgagtgtgatatgtcaccttattcattgtattgtgtatacacataaatcataataaaagaattgtaaatataatatacacgtacaaattagaactactcagctttgtttgcatacatgtattgtacatacatatatgatatatgtgtgcgttgaaataagcgcatacattacaaaaatcaaattgcatagaaaagaaaaccacccttaagttaccttgtcatcccgtatgacaacaattacgcgtatgcgaacagtcatacaaaagcatagcatttctcacttttgctcttggtgggtcaagcattccaaccttacaaagttaccataaaagttacagggaatatttaaattagccctactctaatatgcaattggcctttgtgttcagtgcaaatacacgattgactcgtatgtttagcgcaaatacacaattgacctgtgtttagcacaaatatacaattgacctttgtgtttaacacaaatgtgcgactagcccctgtatttagcgtgaatacgtgattggaccctgtgtttagagcacacgcaatcagctcctatgtttagcgcaaagacaaaattggctcatgtgtttagtgtaaagacaaaattggctcatgtgttagtgcaaatatgaaattggctcttgtgtttagcgtaaatacaaaattggctcctgtgtttagcacaaatacgaaattggctcatgtgtttaccacaaatacaaaatcggctcatgtgtttagcgcaaatacaaaattggctcatgtgtttagcgcaaatatgcaattggctcctgcatttagcgcaaataagcaattggctcctgtgtttagcgcaaataagcaattggcacctgtgtttagtgcaaatacgcaattggctcatgtgtagcgcaaacacacaattggctcctgtgtttagcgcaaatatgcaattgactcctgtgtttagcgcaaatacgcaattggctcctgtgtttagcacaaatacgtaattggcccgtgtattttacaaaatggatcaaattaatactctaagcttaattttggtcatacaatttttcatcaaattgataccctaagctcaatttttgaaaggaacatcacatctggtcaaacgagtacttcagatttagtcataatgaaatattgtttgatcaaaattaagtatgttttatcaatttgatctatttctaaattataggacttgaattattatttaagaatacacaaagaccaattgcagctaaacagaggatccatttcaaattggtatgtttcctaactaaaaatctaatgaaatttgtggaatcatgtaattactagcaaggagtatccacatacataaaaagaagtaataaaaaaaaaattgagattaatcaaatataaaagaaatgtgttgagttagcaacaaacatagttaaatatacctacgtttcaatcaggttcataatgaaaaataaatagacaaaatcagagagcatatttatttaattatttatttttaaaacaaaaccaagatgactataggctaaatcaaacagtaactaaacgttgctttcatatatctgctcaagtacacattagataataattattttcttcaggtagagaaagaagaaaaaactccataaatgttactgctaagaaatcagactagcataatatgttatttcttgtgtaatttataaaaaccttatatcgcttattgaataataatgttaatgtgtttgctatacactcactatacgatctcttaaattaaataagatatttaaacaacctaagcagccaatagataatgcttaatgagcaaaaaacaaataaacaagtaaatcacacaaaccactatacagggaagcagaagaaccatcatcatagcataaaacatttgcacctcgaaatgatattgtcaggatcagcaccttctaaaaatatatctataaatatatatatatttgaagctgaattcggctacaaagaacactcatcattttccgatcacaagtgaattctaccatagacatctagaaatggtacttttttcatcagacggcaaatatcaaaatgttcaacgagatatggctctgtttttccttgatagcatgctttatgagaagaaagatttaagcagtttcactcatttagtgcttgtttgcaagtttggatcacaataaaatacataatcctgctcctaaaaatgctcagaactctgaagaaataatgagagtacagaaaagaagggttctcaaacaagtttgaagtataaaccttttttaactgattcccccaatggtgattgcagtatgatggaggctcatgcttctcagtaatattcaaagaagaaggcaaatcgaagcccggaaaagcaacctacagcagagaaggattaaaatggttttaataagtacaatatatagcaaccttttttgccaccacatggagagtcacttcagttgagtcgccaattttttcataagtcccttcgtctggattgcactgtaagattagtcattgcaaagagctgaacacattgttatgtgaagaagacaaggcaacgacactggaaggtcaagctgtaaagaaagacaaaatgtgaatgatgaaaccatagaacaaaagagatatatgcctagtcttagaatagctgataaaacatgcatattaatttttccaggaaacgaaacagaagctactaaactcgattttatctaaatgttaaaatcctccgtaacagatctagcaaaagcgtcctcaattagcattgcagggactggatcagagaagagagcttcaatcaacttccagaacctttctccgtagcaacagcttcatcactatataaatttgccatgttctttcaacagtcattcttttcttgacgtaaacagcctaaaacagaaatacatcaatttaaattaaaaaaattatgagatatatggaaattacaatctctcttattacacattaatcaaatataaatgtaaaataagtttattttataaataccctattttataatcaaattaccaaacataattttacataacttattaaaatacacataataaaaatataacttataaaattggatataaattaaggactaatacaagaaaagtaaaaatttattgaaaaaaagaaagataaaaattaaaataaaaaataaaaattaagtatataatgtaatttccttcgtcatctctaaattcttagcatgaacatgatacaatttcttaaaaaaatgacacgacacaacataaaaatatgttaaacaaatttgtgacgtaaacgcaaaactaatatatttaacacacaattaaacatattaacacaacacaaaagtaacaccattaacatatgtaaataaacactaatattactgcaagattcataatttttaattttttttatattcagagaatgagaataaaagaacttttagaggcatttttttatagtatatatagttggaatgttaaaataacgattactcataatcattaaagccaagatctagtatttatttagagcatcaaatacaataaaacacatacctcccataccatccatgtgagccattatccttcattgtcttcctctgagaatcaccaccaatccttgagcaaaaaata

SEQ ID NO: 303342 - DNA, 1522 bp, Cannabis indica
ttttttttttcaaaaaatcaaatttatttgaactaatttttttagtttttaaattaaataacaaatgttacatcaactaaaataacaatatgtttatataattataacatttgacttgaactttttaatttcttcataattttttattcataaatatatatacattaaaatgtaaaaattaatcataatacacaaaatggtttcattaattgattttagcatttagaatattatatatgcagctaaatatggtggtgggatcaaaagaaagaagtgatacttttgtgctgcaaatggtgataatttgatgcctagaaatgcatgcatgtatttctcaactttatatataaatatatatagctaaatctatgtataagcaatttgctctaagtgcaggacctaataaatatatatatgatatatatatataactgtaagtctctctaatagctaccacaatatgtagtgcatatatggccaattaatttgtgatattggtcatggataatattatatctacttaatttgtctgtataattatatatataatgcttcaaactttttctgtgagagatgatataataattattataattagtaacaacttatatatatatttgatgtgtaatatgtataataaattgggctatatatagatgattagtgtgtcaattgttattaattttttttaataaatgtgtcaatagtgctttattgtataatatatatttaatttgtaagaagattcatgaatgttacatgagatatatgaattctcattgtaataattaagttgcttagcttagataaatgagagaactattataacatatcgttaattattcataaagcgctaccttattatattgctggtaaaatttcaattgatgtatcaattagagtgtattaagagtaaaaatgaaatagataaaatttattatgtgttaaattaactcataccatatcttgtggtcaatttgacaaagcctttaatattaatgtagaacttctatagtactcttttgaagatgttttaaaattttagttgagcaagatgtttgatatcaataggataattgtctgaagcatgaagagaagtatacgatctgttagcagtaaatttgtttagggtttcagttgtgtggaatttatcccaaaatacgtacgatgttctgttatcacatgtagtacttgaaggaatacataaatcaatattatttgtttcacaacaactttcggatacgttagtgagtcctgaaaaataaaattacaactaaatttcaaaatataatataggtattaataataagaaaattctagagtaaagatttagcatttagaaaaattataactcaaaatttttatatgactttttacattgtagttatagacacattccacaaaaaaaaattgaataatttactatatattgaaagtagagttcaaacatttagtttatgtgtacttattttttcttacacagaccaaacttcatatttttttacaaaatgaaataaaaaga

SEQ ID NO: 303343 - DNA, 2873 bp, Cannabis indica
atttccaggcccgtgttcatgatgagagcttgagatatgtattatcggatcaagctatcattgctcttgctgataatattcctactagttcaaaggatatatgtaaagctattggcgaagctgatattaacgcagattcaagtttcacttctctccacccatctccatcccctgttgtttacagccatttagaaaatctttgtgatctactccaagacaagatagcctaccctgacatttttccaacaattcttcaaaagtgtttaggttcacatgggagctgtccgctatcaatattcaattatgccttgttggttagttgtaatttgaaattgccattagtttccaaacaaaaattggtcaaaaactcaaagcaatttactcggaaggcttctcgagcattatttgttcaaaagttttcttgcaaagctccagtttatcataattgtaggatttatgcaaacgatggacggctgctttgttactgtgatcagaagaagcttgaatggttggtgaacactattagccttctctttaaaattttctctcaaaaatgtttatttttgcatgataacaagacattcatagtccttcaggtatcttcgtcgggatttagcaaagatggtcgatgaaaatcctcctgccattatgcttctttttgaacccaagggccgtccagaagatgaagataacgacttttatatacaaagtaaaaagaacatatgtgtaggctgtggtgaaagaaatcactatttacgctatcgtattattccctcatgttacagaatgcattttcctgagcatctgaaaagtcaccgttctcatgatattgtcctactttgtgtggactgccatgaagttgctcatgcaactgctgaaaagtataaaaaggtagttgctaaagaatatggagttccactttttgttcgtaaagtggttgattcaaaagaacaccaacttaaatgcgagtcattggaagaggccggtgtttctcccttacagttacgaacagctgcgatggctcttttgcggcatggacctaggatgccatctgagcgccgtgaagaactgacaggggtactgctaaacttttataaattgaatatttcaattgtgcttaatatatctctgattgcaaatcgtttcatgttgcccgatttccctagaagttttgcctgttaattgagggttcaagctgcttattattattattatttttctgatcatctatcttagacaatttattttgtaaactctttgcaggttgttatgagctattacggaggaagagatatttctcaggatgatttggaaaaagctctgttagttggcatgaatccttatgagagaagacgacttaataaaaagaaaggaatttcttttaaccatgcccaaaacagctccgtaacagatatagagcatgaaaatagctccagtagcatgacaacagaagttaatatttcaaattcctctgatactaaagaagaatgtgatttttctctggtaaaggatgttgctatacattgcaactcttcatactctgatttgggaactgacggaaattccccaaccattgctgagaagagctcaaactcaaacacatacataatttctgatgcaaacaacgtcagttgtgtaaagggtgatgatgattgcgcgaataaaagtttaccaaatggaaaagttgacgactgcccttcgaaaagtgatggaagtgcacgctctaaacataactcgaagttgtctttattaggacatggacctcatgggaaacaagttgtagattatatactagaaaatgagggggatgaaggtatcagtcagttttgtcaaaaatggagacaagtatttgtggaagctgttcaccctcgtttcttacctgctggctgggatattatgcacaggtacaactaccttaatgattatagtagcataaattagtaacttatccttttccatattcgtatgcactatgcagcatgtccatgtacacctttattatgttgcttcttggttttcatccaaattttattcctgtgacagttgtatctacaagtatgttatagttgctaaatgtttgtttgtgtgtcccaaggggttaattatgagcccttcgtttttcagtggtaggaggggcttcggagaattcagcgtctacaatccttcaaacacagcatctgacagtaccaagacttgatgagctcagatggcatggagcaaaacctgttataagacttctgttttcgtgaccaaacatagaaatattaacaacacgttttcgctcttcattctcaccttattttccaaatgaaaaatgaggaactccagttttgggctactgtttagtttatcatgtttgacattcccctacggtgaaaattttgttcatgatcgtaattacacgttttcttagtttataacaagtttctcgtcatttaccgattatctatattatgttttggtgtggcttcaaaaatgcaaatgacaaatcattcatattaaaacgatggattctgctactgatattctttattatagataaatattggtggtttctactacaaaaacaactcattcactaccggctgtgattaaactgctttattagcttctcaaattatcatgtgcatttgcatgggttagaagctgcttgtaaatgaaaattgactaattaaaaacccagtcactggtaatgggtggacaatatctaattaattgaaccaaatcaatctaattcaattaaaaaaaatagatattcaattacagttaaattccaattggattgaatcgattattaaatgtcattcttaaaattaaattttaattcaaaatcaatccaatttaattatatttatatatattgaaaaaattat

SEQ ID NO: 303344 - DNA, 4398 bp, Cannabis indica
tttactttgcaaatttgcatttgaactacttttttctgtgtatctttaatttctctaaataaagatccatgcttattcttatgccaagtatccaggtgtaaagcacattgttgtatattcttaatagttgatattagtgatgtattttcctcagacctccaacaattctttattagactcttacattcttcgtcgccaagccaaagattctcaaatttgaatctttttctctttttggaacctttttgctagtccatttcatcttttatttgtaccaaaagtgctctgtgatctgagtgataataatctagatgcgtcaagcttgtataagagaaagaattctcccatgcttcattcaccattgcccaatctaatctcccgttgatactttcattatctgcactttttgcccaagtatatttatctcctttataatgcaacaggtgtaatgcgcacaactctaaagtattacggaattctttaatttgtgtttcatttctatgtccccttttattttaatcattttgacttaaaatctcattaaaatctccaatcaccaaccatggtccttcttacactattcgtaaatgttctaacatatcccatgttagtcgtctctttgatacattaggcttcccataaaaatcgtagaaatgccaagttattggattattctctatcttcataaaataaacaataatagaaaatatactcaaagagaatgggagaaactttattatgttgctcactaaaacaaacttttcaagatattcaaaaggcatggtttctctcctgaactaaggctagatttacatgaaatctctctttctgacccctttgatttcattccctttaaaccttatagttttctcaaaataaataaggaaacaactcaaatacaaaaataaagtgattgcataatattatatatactaataataatattactaaaaatttctcaaaccattattttgaccagcccttcatttatctcggttcctcctcaagttggacctcagggaactgctgcaatgagtgatcatagtttcccaagtggcttcaaacattggtaaatctctccatttaatcaaaacctccaaatcacctcctccatcaagttggcttttacgtactcccattaacttatctatttcaactaccaatttgaaattaggagtcagttgagaaggtagagttgctaatgctggagcaccccatgagctcgacgaagtggagaaatatgaaaaatataatgaatggatgaagtgacgggtagttgcaacttgtaagcgacttctttgatacgggcaagcacctcacaaggcacgtagtagtgtggggagatcttctcattcctccgagcagcaagggtcttctggcgataaggtatcagctttacaaacatcctttccccaatgtgaaattgttcatcttgttgtcttttgttttctgaacctttcatcttttgctgagctcgaatcgaatgcatcttaagctcatctatttgaaaatcctgctcctccaatatctcctcaattgttgataccagagtcatgcctttcttatactgaatcagggctagggggacccgaccatataagatcctaaaaggtgtgtgctttgtggctttatgaacgaagtattatacccatacagaacccatgccaatcactgaccccaagtacgcaattttttttgaagtgtaacaccgtaaataagtctccaaacaacgattcaccacctctaattaaccatccatgagtggatgatacacaatgctatggcggagttcaataccctagagcttgaatagatcttgccagaaatgacttatgaaaatcttatccttgttggatatgatagacctcagaacaccatggagtcgaacctcttccttcaaaaatacttcatctatcgatcgagcagtaaaatggtgctttaatgaaatgaaatgagcatgtttactgagtcaattaacaactactaaaatggtgtccataccatgagactttgggagtccctctatgaaatccatggttaaatcttcctaaactaaggttggcaaggcaatgggttgtaacaacccagctggagacacactcgtgtggactagttcttttgacaagcatcatattcttacacccactctgcaatacttttcttcattcccaaccaataaaattctgatgtgattctcttaaatgttttgtcctcgccaaaatgtctgcccataagtgagttgtggtattctcgcaaaataataggaagaatagagcaattctttcgtagcatcagtcaccctttataaaataattgcccatgttccaacaagaatcatgttgtcctatgcctcccttattacaaatcaggaataattttggaaaggcaaatatctttgtcaatttcttgtttctcaacaccacaatcaatcccttaagataccagtagattttttatttccacaggttgattgactcttgacaaagcatctgcaactcgatttccagcccccaatttgtactaaatgtcaaaattaactaagtttcccccaagctgattaacttattcttcttcctcctgtttttattgaagaaggaacaacgtgagagttataattttcacagatgagaggaaataggtttccaagtgtcctctcgtgtttggtgacaatccaatctgttctattctatgctcttgtgaagaagtagaaatagattgggactatgtcacatgcggaggggaggattttcggtaatccatgtatctgcctcacttttatgtttatatccagttattggagagtgagaagagaaatcttgagcttcaccaatagtttgaatcggctgtaattgacctttcgttggtttgcttgattttttatttctcttcatttaattaaagacatgaacattcttcgactgttgttctcaccaaccttcattgtaaatctaatgctttcaattttcaacctaacatactctttttttaggagatgttggttttcatgaggttgagggaataatttcgatgaaccttgggcgctaaagtacatgcttagccctgatcgatcctcatggccttttgcttagccctgattaattcttcaagagcacattgttgtttttgagtttcaagtgttttggcttttgagtcagatgaaaaaattagaagcttaaggtgtttgaattttttttattatggttcttcatttttgaagagatttttttttttgaaagtatttgatgaaaggatattactttttgatccaagcttattccataatcccaaggtagagtcttcatcaacaacttctctaagtacttaatctctcaatcttaaaagaatagcactacgtgctttcacctcgatctcttgagaaactttcttaacatcttcttcttgatgcacaaggagcgctttgatcttaatccaccacaatccaaagtcattcagacttatgagcttgtctattttatatttgacagtagccattcttgatgagttcatgaatccttataagttcttgaaactccaaaacttgattcttgaatctttgatctaaccgtgttgctctgataccattagtggtgaattaacacctaccaaaaataaaataaaacaagaactaaagaactagaatggcagaattaattaatgacataaatcagaaataaatgcagaattaactaaaggaaatagagacaaagtttaacaaggttcatcaccctttttgtggtgatcaattcccgagacgaatagtcctttggccaagctttatttgtcttaaacaatggaggaataaagaggagagtacagagtttaatcttaacaacaagggtgtcttgcacctcactctaatggtgtcttgcacattacaaattaactcacttgagagagatgtgatcaaacacacacatcctctttaacaaccctcctcactcattgcaaacttcattgtcatctaaattcctctccaaattgtcacctaaagaagtagaactcaaagccttacatatataggaaactaataagaggggtacccaagttagtaaactgaaataactaacttttgtgagttgactggacagacatggaacatttaacaagtcacataaatgagactaacagtagcagtataccaagttactaaaatctctcacacaaatgtttattttataacttccaataaccaagacaagagggagagaattaatgggtagtttcagcaaaaatagagtatttgaaaccttctagtgagagacatgagatataatgggaaaatggagatgaaacatggaaagaaagagagaaagaaagaagacactaaggaggcatttggttgggaggaatgaaaatataggaatatgaataggaatgggaataggaatagaatggaat

SEQ ID NO: 303345 - DNA, 1767 bp, Cannabis indica
ttttaaattttattccatttcattcctattcccattccaatgttttcattcctttcaaccaaacaggttattacactttttgcctaatagtccctcaatcatctaaacgctagcacatacagctatgatcaaatcctaaaaaatctacactccacccgcaaacaaccattaatgatggaaagacagaataacagattcaagagttcagttcaacttaaccagaacgaaatgatataattaataacttccataatatagttagtttagcaaattcatctttggtccaaacaaaccttattgcattgctttgcattgtgctcaaaactcccacaaacaaaacatggtttcttccgcctagccgacttacaattcacggccgcgtgtccttcttcaccacaattatagcatgttccccaactattatctggaggatcgaaataccttggccctcgctgacatagcagatacacaaaactaagccttcgtacagatttaaacttagattttcaaaaggctttcagagcatgaaaaaaataaagtaaaagacttacaagaagtttacgaagcacagcattgtttgcaaccgcaactggttttggctcagtaacctcagttaccactacatctatgtcttctttggtctcaacatcctaaagcaataacaacatatcacaaatctaaccctatcaaaaatcaaccaaaatctttattgtttgacataataaactccattacttcaatcgaaaactgaaacaggcattaaaagtaaaacatgcccattaagtgtccaacaaaatcagaacttcatgtcaatcaataaaatttcattcctcctaagcccaaaaattcaaaagtaaccctgatttgtattccatttcactaattaatattgtaacttcctaacgcaaaaaatacagaccagtactcacattgtcgtgtgcgatttccgtcttctttagcttcttcttctttaccttcttgatcagtctttttttctcctccgtggcattgtttactactttaacaccagcaacaccactggaaggagtgttgttcctcacagagtcaactccattagaggaaaaagaaacggggtcgtccgggaccaacttcgccgcacgcatcaatagagctttctcgacaattttgagacttaaatcttcgtttgcctcgtcttcttcatcatcgtcgctgatatttactacagatttgttgggggtttgaactcgatcatcttcttctacgaattcacgatcgagcttccctctttgaaactctcgcttgcccatgagagccttgactccgagaaggcgtaccggcagtgagatgagattttcaatattgtattgtacataggctttagggtttccagattgcttttttgtatttgggaacggtagcaattgaagtacaaattaaacttgtttttgttttctctgggaatgggatctcccttaaaacgttgcgtttttagatttattttcaaataattccgctcggaccccgttaataatctttttgttttattatttttttttaagtaataaataattttattgaaaataataaaatttcatacaaaaatacattatttattaggaattattgtatggaaaatataagtcgacactttatttataaaaaaaaagttataaggtgaggacaacacttatactttttaatatgtgcttttaattactaaaatacatcttacactatcacttacacaatcagacgatggttgctggtaggggtgttcatccgatc

SEQ ID NO: 303346 - DNA, 896 bp, Cannabis indica
aaaaaaattttgaaaacttttaagtatagaaaatcaaatttcccttttaattttgtgataataaaaagaggataaagatgcggctgagccgagccatgtagagaaaagtggctggctgggtaggtaatgagaaaatggtctactcacgtgttgaatgaccagtgagcacaagataacataactacttaattcagcctaatgatgagtactcgtactcacctgtgatagtcacgttaatcttacggggctgtgactcacttcatttgccgtttcctcactacccaatcagattccgtcgttacctggcggcgttcacgctataggctctgtaggttggtggaatttataaataaataaataaatattcaatttgctactaccattgtactgtgtataaccgataaagctatatatttaatataaaaaattaactttatttaaactaatgttattaacctaaactaaactaaactattaaatagaaaaggatatgaacgtgcgtgttagtggttttaattattcgtttaagcagacagaatggactgcagtatgtatgggaccttatgtgttattctaattcaacaccttttttatgtttaaggttcaccatcgaattgactaggaatacaaggaaattggatagaatgaactaagaaccacacgtacaaagattgtcttattctgagatttaatttagattaacttgacaaaaattatgtaaacttaaatcactaaaacccagcttttgagcactcccacatgtttctctaccttttattttgtttaaaatggcgaataatttttgggaggaagagtgctattgttaacctcctattataactttttagtcaatctctatgctcaaaaacacacgtcgaaatgttttttttttaatt

SEQ ID NO: 303347 - DNA, 2688 bp, Cannabis indica
agatctcagttcagaaactgagtgaactttcattattatggttatttttttataaaaaattatataatttaattaattaaagaaattttcgagtaccttgttggcgttgggaactagctcttgtagagctttcattctctctgcaattctttctctccgtaactgcaacaaacgaacaaaaaaaaaaaaaaaacaaaaaaagtaaaccccacgaacggattatcagaatcaaccaacagcgaattataatgataatgtttctgtttggcagaattaaaatttaagttaaacaaacacgaatattctcattacacccactttccccaccgaaaaataaaaagaataagaagggtcatttttctaagacgtactctttcggcgatactatgtgggtcggtggcttgacctcttcgagccctgactcttggtctaggttgggccgcggctgccccagacgaaccacttggcgctggagtctggctcatggttcccccttgtgctccaaagttctgagactgtaaaaattaaaagaatgatttaataattgtcgtttagatgtaaaacgacaatagtaagtttttgagtgaaattaacctgaggatggtgaaactgattcggagcttgaccggacccgggtaaagatccagtgaacccattgaatagagcttgaactgaaccgtctccaccctgagaaataaaccgcagagttgtaattatttacagttattgccatcgccaaaaaaagttacttttacttactggattcggagatttaaacgaggaaccgtcaacgacgtcgttttgagatcggtcaaagtcaccgttaccgagagacaaaggcatcggaattagaccggattctccggcaccggaaccagctgaaccgggaagacccctagacatcatcagctgctgctggagcatcatagcggtggcggctgctacggccgatttggaagcgccggttccggtgctgatctggtggttacgaaactttgaggttaagttaacggattcttcgtagttagggaaggcgacattctcgtgtccagacggtgccgtttcgtcagttaaatctctacatggcttgttggaggaggagccgttgattggaagagttgtagtagtatgatcccatggggatttgccggagttgtttgggccgaggtcggcccatgaacaggatggttggcccaaagtagaaagcatttgctcgagaaagtcgtcgtgggtcgacccggattcgaagtgaccggagccatgaatctgagaaccctgttgtcctcctccttgaagttcttgtagtgaaatttgggaagatgatgagtttaagagagaattaagtccttgcatttctctgctacaaggctgcatcgaaaagattagttactgaattttgaatagagcagtagtagtctttaaaaggggggataaaaggttactttagatatgtttgggagctgagaaaatggagttggaaaaggttgagaaaaatagtacaaattgtgggatgtgtttgttttgtttttgtgtgtgtgttttttcgattgattaaataggtctttaaaaaggagggagggatatatatgtcgttttatgaaagagaagagatattaattaataggaaaagtaagaagaagatgaatgagtgatgagaagtttgtttgtttgtttgtttaggtaatagaagaagaactactctagccaaagccaagtcttgatgtgtggggtttgagctattatataatgatcctagtcatatgatactatggtggggactattattatttattgttattattataccatttgtgttatgttgatttgaattatttacatcaacatatcttatgatgtaaaggaatgatgtattgttcatatcaaatcagtgagaattgttaataatgtattaaattcagcaaaaaagaaatatattaaattcctttttactaaaagaaaaaaataaatatttacatcaaacattacaatgtgtggtgctaaatattatgattaacataataatttaggatttattatttgcggcaatactacttgaattattcatttgttacatttaattttataaattgacttctttaagattaaaatcttccaaactcaaatattacttttctattcaaaagctctattagagcagttttagtgaaagtagtctaagggttgctcactaataaagtgggtcctaatttaacttttcaacatttattttttattattttttatttatcttagatgtgattggatatattatatccatactttgatcaataaatatacaagtttagttgtgtgacaattgtattaaatttcacaattaatgaggtaacagttaagctcgatcattgaagaatctggatttaatatatatatcccagagaatactatttaaacaaaatatcgctacggttaaagtagccatcgattgattaaaatactcaaaatcacctcaaataaaagaggaatattttctcatcctaaataacagagtgatgaaggcacaattagggaaaattatctcgcatgatacacccaattgacgagaagaagaaattgtatgttttgcctaagcccaaaatggcaaatgctgatttggtttcgtgaaacaactaaagtagtatataatgaacgcctcagaagatttaggagttaaactaaaggtgcttaact

SEQ ID NO: 303348 - DNA, 4407 bp, Cannabis indica
cggttctgtacgaattttggttgtcaattaggttactaacgctagttgtcaatagaggttcgtatgtagaatttagttagaaaaaaccaaaaaactaaaaaaaaaaaaaaaactattttaaaagtgtaaaaaataaaaaagcctatttatattatattctattttaacgagaattgtaacatttaaaaaaaaaaaatcaaaattggaattatcaattaacaaaactgatagttcataagtataataggatccaaaaagatatatcactttatctctctaataaattaaagaaatagcatacacctcaaataatattgacaatcctccaagtgacaactaactaaacattttttttttgtttggaaagcaactaaacatttaggttgctgtattatgtttactattattatttatagcctggtcttgttttctcttcttgtattattttcctcctcgttactttaatggaccatcaccatagttctgatccagtaaagctagctagaataatatatagaaccagtcttagagtaatttactaagagattaagtaaagccgcctattgagagttggcaaaaaggtgcgaaaactaaatataaattaaacaacttgttatttaacggatattatggtcttatttacctgcaccactaatgaaaaatcttaatattttacataattattaattataatcatatttccttattaaattcttctctactccctctcgtacgttcaacccctccacttattttcacatgcaattaatgtatagtctctttcctttgtcccttcatttttttcctcgaaattaacaaacgactctatctctatgcaataatttataaacatttatatatatatatgtccaagtctttgagcccattttccatatgttgaattagctcttttattatttagtcctgctcttcagttttttctctctttatttcattattcttagcctcttaacaatacatatttctgcataataattaatcctttcatgcttttctaaattgcattaggagtagcaataaggttaatttctgggaatctatatacataatttataaatatatatatatatatttagagagagagctatgaaaccagtattgctgcatgggattcttcatgtgacaatcgacgaggttgataagctttcaggtggatgttgctgcatgtgtttctacaaggtatcactatccttaaactcatttcattaatgctaaacacaacacttaaccaagcagcttagtattattattatttattagtagtagtaataaatgtgcttatatatgttgttgaaaacttccactgaaattatcagctgacgagcaaagctgaacacaaatttgggcttaagaggaaagttacacccagactttatgcatcaatcgatttagggaacaccaatgttggccgaaccagattgctcgaaccaacagcctcctcgaatccgcaatgggacgagacgtttcacatttgttgtgcacacatgacatctaatgttgtgttcactgtcaagcaaaatcgacttggccccgatgaggagattggaatagcttattttccagctgagaaacttctcagtgggaaagaagtagaccaatggcttcctctcttggatgacaagcatcacaagcctctaagagatggatccaaaatccatgtcaagttgaaatttgtagaggtatctaaagacattaactggtcacaaggaataaatggcaatgataagtttcaaggtgtgccttacacattttttcctcaaaggagtgattgtagagttaccctttatcaagatgctcacatcccagataaatttatccccaaaatctctctttctgggggtaagtattatgagcctaatagatgttgggaggatatttttgatgccatttatgatgcaaagtacttgatttacattgctggttggtctgtgtgtactagaattactttgatcagggacagtaggaggagaaaggaaggaggcgatttgacacttggcgagttacttgtaaagaaggctaaacaaggagttaaagtactaattcttgtttgggatgataaaacttctctgaagttgcttaagaatgatggagttatgtctacacatgatgaagataccgggagttatttcgaaaacactggtgtccactgcgtcttgtgccctcgaattcctgatggtggacaaggcattattcaggaattgaaggtttccaccatgtttactcatcaccagaagacagtggttgtggatagtgagaatatctcaggtgatggtggaatatcagagaagaggagaattgttagctaccttggtggtattgatctttgtgatgggagatatgacaatcctaatcattcaattttccggactttgaatacaacccattctgatgattttcatcagaataatttccgtggtgcctcaatagaaaaaggtggaccaagacagccttggcatgacattcattgcagggtagaagggagtattgcttgggatgttttgtgcaactttgagcaaagatggatgaagcaaggtcataacaaggacttgctttttgaattgagaaagatacaagacacttgtattatacctccatctcctgttatgttgttacctgaagaccatgagaattggaatgttcaattgtttcgatcaattgatggaggggctgcttttggttttcctaccactccagaaaaagctgctcaagctggtcttgtaagtgggaaagatcagataattgacaaaagcattgagtatgcttatgtcaacgcgattcgaagagctaagaactacatctacattgaaaatcagtatttcattggaagctcctatggatgggactcaaaagagttcaatgttgacgaggtcggtgctgttcatcctattccaaaggaattgtctttgaagattgttagcaaaattgaagctggggagagatttgtggtctatgttgtcattcctatgtggccagagggcattcctgaaagcggttctgttcaggcaatattacattggcagaaaatgacaatggagatgatgtataaagacattgctaaagctctcaaatccaaaggacttgatgcaaaccccaaagactacttggcattcttttgtcttggaaatcgagagataaagaagagaggagaatatgaaccctcaaagcaaccagaagatgattcagattatagcagagctcagcaagccagaagattcatgatctatgttcatgccaagatgatgataggtaacatgccagtttaccaagattttactttcacaaaacgtcaatgtctaaacttcttgacatcaaagacacataatatataaagtaattggaatgtctaattgttttaattttttatgcagttgatgatgaatacataatcataggatcagccaacatcaaccagaggtctatggatggtgctagagacaccgaaatcgccatgggagcctatcaacctcatcatgtttcaaccctgcagcagccagccaagggacaggttcatggccatagaatggcattatggtatgaacacttgggaatgcttcatgacacattccttgaacccgaaagcattgagtgtgtgcgaaaggtgaaccgaatcgctgaaagttattgggaactctattgcagggagagcttagagcatgacctacctggccacttgctcagttatcctattagagttactgaacatggacaagtgacaactatacctggactagagtgtttcccagacactaaggctggaatacttgggtccaaatcagatctaataccttcaatcatcactacttaatttcaaattatttaaactcgttatgtcaatagtgaaaatgtctttctttatttattttatatcgtgtctatagcttgaaatactaatgtgattgtgtgaggtcattattttaattgatttttcatgtaaatttgctgcatgttaatttgttaatgccattgtgccaagtgctcttttcaatttaagttcatgatttacgtttcattattttcatgtcaagtatgtatttttattgtaagcatgggacaattttttttttttttccataccaataggtaaaaatatatttttttagaattaaattaataataatctaatttattaaaataattaattttttttggaataaaaatcataagatacataaattaatttcaaacatcctcaacaataagaccaaactgtgaaagcataaaaataccgttctgaattgcttggacacacaccaagctatctgtttctaacatgactctatctcacgaatgagttgcaatccaactcaaggcttctttaatgcctattatctcagcaatttcgggttgaactcaatccaatcttcctcttcttgaatgcttctacca

SEQ ID NO: 303349 - DNA, 1969 bp, Cannabis indica
attatatcatcagaccataccaaacccaacgaccaacccaaaacacaactacaattaataaaagaataggtagaatttgagttggtcttattattaccttctcaaattacatttttagttgtgggtttcgttaaattctaatcttgcttctctctttctcttcttcattctcattgaagagtccgccttcggcttgagaagagggcataatattgcttcttctcattcatgcttcctatgtggtagcgtttattgttgcctccttcttcttcttctcttttctctctctcacacaacacaatattactattcattcatacacaacaatacatatatatatatataaaagtttatctatatatctccacacattatttctgtcacaaacttttctctctctctctctctatatatccatccacttatcaattcttttcccataaaaaaaaaaaggctgttcaagctcaatacccttcaaatattctcctcctcaacaggttagcatttcagcttatgatcaataatgtctttctctcccttcttttagtgtaatcaaaaactttaatctctaataatgttttgattcatgttctgcagaaatggacaagaagggcatgattattcattacaacagcatcaagatggattatttcttgatcaaacttctatgatatttaacaatgttggtggtaagtaaacaattttctacttcaaaaatttataataaatcccaaatattaatttactctgtttcttatcctattttcattacacagcgagtaataccagtaataataataatattaatccgaggaaaagaggaagagaagcttcggttgccactccaatcaatcatttctctcttcaacctcctcaactcatcgacctttctcaactccataaccagagccaacccaatgtcgtttccacagggctaagattatccttcggtgaacaacaacaacaacataatcagaataatcataatcatcaaaatcattatcatcatcatcaacaacaatctcagcagcttcaacagttgaaccagtcatcatcgtcgtcggcgtcggcgtcggcatctctcttatcagtaatggcagaggatttcgcttcacaaatcaaacaacagagagacgaaatcgatcaatttcttcaagcccaggtaccatttttttcgtctcttctctcattcaaaatttcttttatcagagaatttgattattggaaaatttacgtaagggagtgcgtatcctagcagggagagcagttgcggcgtacattagcagagaagagacagaggcactatcgtgcgcttctgagcgcggcggaagagtcaatatctcgacgattgagagagaaagaagcggaggttgagaaagctactcgccgaaacgccgagcttgaagcacgtgcggcccagctaaccgttgaggcccaaatttggcaggccaaggttcgggcccaagaagccacggcggcgactcttcaggcccaattacagcaagcgattatgaacggtggtggcggcggcggaagaggtttggtggacgacggaggggtatcttgtgccggagaaggaggagtggaaggtcaggcggaggacgccgagtcggcttatgttgacccggaccgagtcaccaccgcgtcgggaccgagttgcaaagcttgtcggaagcgagttgcttcgatggttattttgccttgtcggcatctctgcctttgtacggaatgtgaccgagttgttcaggcctgtcctctttgcctctccttgagaaattcaagtgtggaggttttcctctcttagggcggcccaaagcccaagcccaagcccaattgtaccacttggggaccccgttaaaatccattgtgatcaacgcaacggtacaatgggaagaaaaaaaagaacaagtaaatggacaaaaagaaaaaaaaattaataatatttgattataataataattaaaaaaaa

SEQ ID NO: 303350 - DNA, 4887 bp, Cannabis indica
tttttttttccttcttttaaatttattttggtgtaaggatttttgttatctttgtgatgacaaaattagttaattaccagtggattcatgtgctgtacattgtcatgctgcttgtaaataaattgaagttttacatgtgatatttgttcatttaatgcttgccatttcatttgctttatcttttgttcccgtacaggtcatggtaaatttgagactttgggagcattgggaatctcttgtatgcttttggcaactggtggtggaattgcatggcatgctttagatcttctgcatgtatgcctgtgctctattcctctacttgagccttaaaaggcagtatcttcttaaatgtttgaatatttgttgccaaaaggacattatatatcgaaacaaatccttgtgttgtatatgtcctgaaaagagatggttttattgtgcagggcttgttgtcagtagatcatcaaatagttaatcagtctttgatacaagatcatagtcacggtcatcatcatgttggacatcaccacggaattgacatgaatcaccctattctagctttgagtgtgactattatgtcaatatctgtcaaggaagggtaagaacctgtgtactcttattttagaggcaaatcaaataaagtttatgttcctttatgtattctttctatcttctcaatgtttcccctggcttccgagggaggaagggagggaggggcctaagttaagcctcgtccaattcatccctggagttgtataccccattcaagaattaatttttttttcaatctgttagaatcaatagaaagggcaaatcccttatggtacaccagatttttaaacatgttcatttatcttttcatggttatttttgcttgattgtcttttctttaattcctcattagactttactggatcacaaagcgagctggggaaagaacaaacagtgggcttatgatagcaaatgcctggcaccatcgttcagatgccatttcatcagtggttactctcataggggttggtgaggagcttcaactctttgttacagttttgtttggtatattgatatttgtgctccaaataaatattgggatgaatcaccagttcatgttccattatgagagattaatgacaaaccatacacatgtacgtgtttaattatttttggtttttgaatattaggtggagctattcttggagttaagtttctggatcctctagctggagttgttgtatcaggcatgatcctgaaagcaggacttgaaactgggtatcagaggtgtatatttagtccccaatctcttaatttccacggatccgccttttgtacactcttgctttgtgaaacattttcttctgggtccatcacactagtgatagcaaggttacagtatttttaatgtgtttatttgtattttcatatttcatatttttgtttaatatgtttttagcgtcttggaactagtggatgctgcgatcccatcgaagcacttggatcctgtcaaacaaacaatacgacaagttgaaggtgtgaaggtatgtagactctagactggtgccttttcatagatgataagctaccagattttggaccatgttaggtctgtaatagaagtttgaagtactccagccaattataacctagactgaagctggtgtgttcaggaagaagagtcttgaaaccaggtttctggttcttactgcagccctgagattggctataggttggcctggccatatcatgttttattgaagaaaatttaatcttttgagtccttgtatgtttggctttaatgatgtcattttgacattgctctcaatattcaaagctgttgaccttttcattttgttgcgattcgtgactgagcactgggattgcttgccaggacatacatttggaattgtcaagtcattagaagtccggcaacccagtgtttatcagtatgtcatgggccttagctacttaggggcaaagctgattttgtcagaagaaagtcagtcagtgtttagtttaccactactaactacattgttcatttatgcgattttatatttttagggtatcataccataagttttgttagtgtggggatatacacaagataagctgaagaatttagcttttgagttttgattttctgctcgttctgaccatgaacttgttgttgcatacagggatgtcaccatttgaggggaagaagagcaggttcatctctgtacgttgatgtaaatattgaggttggtttctctcaaacccaatcgcttcaccagcttcatctatgtgaaatcaccttaggacctcagttcctacttttaccctatctgtaggttgatcctttctgcagtgttagtgctgcgcatgatattggagaagatgtccgtcatcaaattcacaaatcccatcctgaagtggctgaagttttcatacacataggttattttcattttcttacttttcctttgataaacatcatgagcagttatattcaataaattatcagtatagctaaagtgttcatcccaaagacttctgagcatgggaaattggagttgctttgttttacatataaccatccgtagaatcttaattgtcaatgttattcacttcagagattctgatttctattatgtaatattatacattcgggttgcttctagatcctgcaacttctcaaatttcctcaagtgtaaaccaccaacaagaaaactcgaagaggaccacatgtgagaaaagtgacgaaattgaagctgcagtttctaacatcatcactgacaagtttcaagaggtatgttcgatgcattatccagagaaatgagctttgtggttactttactatattaattttgactgtttggtcttcagaacatggtggttgaacacataactcgtcactcactgcaaggacaagtgctactccaaattgaggtttcgatgccgccctccatgttcattcggtaacaatcttcataatatcttttgatttcacgtgcaatttttctcttctcatatgataataataactaacattttgtttattctagtgatgcaatggaggtagcaaaaaaagcagaagaggagattttgaaagcacacccagatatcgttcatgtcagcgttcagctgcgtctagggcgaccaataccacaattcaacgacgacaataaataatttttattttcaattttttaatggaggaaagcttcttggtggcgatgctacaataatgcaacaatgtaattgtaaatttataaaggacctagtattcagggtaataccatttggagagtttcatgttagtttttctgtcatttgtaacagtttatatcctttgccctcattggtttctactgtctattatacctttgtattcacactctatattcaataataacagacaaaggtattttcacaaaaatggtgggttgtactacctcttatcagatttggcatacctttggaaacgcatttcactactctcaaatccatgccgatatttccctattcaaatcagaactctccttcaatcatccaaagacaaatccaatgtctcccaacaaatatctttcaaaaataaaatactatattgaccaacttgcttgtgttgggattctgttatgactattaaaaaggatgagcaaaaagatataatctaagattataatcaaaccatttatgctcatctaaaacaatgcaatatcatcgtatttaagccatcaaaacaaattatgaaaaatagtcttaccttgtaataatggtaatgaattcctatgcctcttttgtgcttttcatattccttcagtctacacattaaaaaaaaaatagtagcataaaagtttgataaacactactctttcattctatcaacaccccttagctacacccatctctcaccaccataaatagaggcataaactcttattattagatattatggaccaattttctaatggactggccaaaaatgtttttggagcgtatccatgagtcccgagcgtgttagtatattatatttattttattatgacctaataataatactatgcattacgattatataaatatcattatatgttaatactgacactgaatgaataacacttaattatataaatccacataaaatattctaacaatatcctttcaaaattacactgatgcccttttgaacagcttaccatcataagaattaagccatatggcccatatccagaataaacaaacttgaagctcttctcatttatcaagaatcaataatgaaggaactttcttaatcttggcataatcaagactgctgtaattttggttagtcaaaattcaaatgtcaaataacttcagaaaaagaggaggcctatttcacattgttggtgtaggtatttgattagaacctaataactcttccaacacgattagtgtgattactatgatcgttgcctatgaagtataatagaaaatggcataattgatgatattattgcaaaaataattacaagatttgatcacttttacttgacccaactacaagcccaattctcactatcttttatttcactaattcttgtactcacacttaaatatttattcacacactctttgaaacccactttattagacacttttttgaataaacacaacagtcaacacaaagggcccaaagtcttatgtatatggatggtgaaggactactaaagggtaggagtgtacgtcggtcgatttgatcggtttacgttacattttatttaactcaatataaatatcaaattataaaaatctaattaagaaaaaaaaaaaatcaacccactcaatgaattggtcggtttagtcgagttgactcgtctaaaccaatcagtaatgtttatttttttcacattcaattattatattttagttatt

SEQ ID NO: 303351 - DNA, 3543 bp, Cannabis indica
caccgtacattgcctcttaccccatacagatccatcttcatttcaaaataatttaggtgtgacaaagggtcttcttttccagtctacattttccaggtctttattttgaactttgggggtgtctcaagaacttcaatttcaggcgagaaagctgaaccgcgtgcctggtcgagtttgagatcagtgtgttttgggctggtcaggccctgtaccatatttttcactttctttacttgtacttgcacaagtggatgaacttgttctgcttattgactggcctgtgtcacatgaagatctctttgaactggcaggatctgaccctctaccgtttcgcccacaatttgacttttggccttggattgggtggctatccattgtgagtttatgcggtatgccaaaccacatacccttatcgtccatttaagggaatagtagatgccatatccagttgttgattggttatttggtaggccattcttatcagtacggtggactgcctagcacaatcatcaatggttgcctgcagagccctcaaaatctccatctcctggttcctccattctatgaattgacgtctctgttcatcaaatgcaaggtttatggttgctcagaggtcttcctaatcatgatgcaaaatgttattatggcattgcatgggcccaagtgcctctcagaaattttggagttcggtgtcatctcaaactggccttttagtattagtagtggaccgagcctcagtgctgggagtggaatgatcggctgcagaactagtgttcccagtatcttgtagaccaattgtgatccaagctggaggagaagtcactccgtacagtaggaggttgtgtattaacttgctcggggctggtccctagtggtcctcttgcgttttgagggagtttgcgtgttgggatctgtcaccattgggctgccctgatcagcaaggcctccgctacgagtttgtacaaccatcctatttacctaccaaaacataagacaaagacttgtgttctctcaatgaaagcacaaaaatattgactttgcttctagccaacgacagtgggtcaaaaataaagcaattaagtaagataattaaaagaaagcaaaaacagtaaaataaagtgaacatcgattttaaagaggtttgaccacgtatgtatggtactagcctactccccttgtattgtattgatatgagagaaggaacgaagtgttcttcctcttaaatactattattattgatctctgagtaactttctctcttagatcgctcttttctctatagattatatttctacagaaattctttcaatcccattcatagagaggctatgtcactatttatagggactttgtacatgagggatggtttccttttttcttataataagtaaaataggaaactacattacatctataattacaatgtgagatataggaactaggatgtgttgctgttattctctgactgaattctatgattgtaggattgtctttacgtctggacataacaagattgatctccaaagctaccatctctcatactttaatcggcatagacatgtcttattttcctctgcccaggtattgaaaatatggaacacatgtcgtccatttctattgctctgtcatggtggagaaaacaggatacctggttatatgttatttatattttaatttccattcaaaattaatatcatcttttattttatagaattaaataaaaagggttcatttataatttttttatatatatatatatatcaactggtttggaaagtatataagcattcactagatattcttttaatttctagaaggttgtttcacattctgctgtccattgaaatttatggtttccttaaagtatgtagaagaatagtatgcacttatttgtggattttgaaataaaccagctaagtgttgttattcttcccgtcaacttctggacatctttatgcttcctacgtgaaggatgtctacaaaagctttgattttttctaggctcaccttgaaccctcaagaactgactatgaaactaaggattttcctgatgaaactccaaaaatgcatttctttaggttcagcttcattccttactctcggataattgcaaacgcctgttcaagatctttgcaaggactttcggatatcttcaactttatcagcatgtcgtcaacgtaaacatccatattcttccccaagacattcttgaacatcttgcgcaccattccccagtacatggatccatcatttttcaacctgaagggtattaccttgtaccagtagattcctttatcaatttcgaaactggtgtgctcctgatcagccacatgtatttttatttggttgtagccaaagtatacgtccgtgtaggttagcaattgaaaccctgaagtagcatcaaccatcaaattaatgcatggaagtggaaaacagtctttttgacacatccttcatgtccagttaggtctgtgaagtctatacacatcctccatgtcctgttaggcttcgggaccaaaaccgtattggcaagccaaacgtgatatagagcttccctgaggaagtatgatgtttgtcaacttgtccacttctatttttcctacttttatcttgctagatctaaaagtcttcgattttgccaaacaaactcaactttgggatctatgtttcgagcattacaaataacattggaactactgccggtcatatcagaatgactccaggttaacacatcactatttgtcttgattgtggaaacgatttattctttcactgtaggaggcaggttcttccccacttggataaccgtgatgggatatttgtcatctatgcatacttcttccacctcttccattggttctatgacacgttccacaccaacctggggatcaagctaatcttttaggaccaccccaagtgctggtttggtagatgttccggcttaagagttgcttccttcccagaccatgagtacaattctagttgaaatgttttagcaactcaaaccacttctctaatatcctctgatagttcctatgctttcggtattgttggggacctttaggcataggtgctagactgaggtcaccactctgatatcaattaaaaatggtctccccaagataggattataagcagtaggacaatcaactataaaaaaagtgctacacttaaaggaggatactgcgttacttcaaggaacttccccattcatggtaatcacaagttgtatcttgcccatgaggatcaatgtatctccatagaagccttattactaaatcacacagggtaacaggttggcttctaagagatcaatggctcctttgaaaatgatgtttactgaggttctattatccacgaggatcctagaaactcttcttttggctatctaagcttctataacaagtgaatcattataggatagtgcacgtgactagcgtcgtcttctgtgaaagtcatggtgaaatttgtaaagcccgcttagttaatttggaaattagcagttaatcatgattatttatgaaaaattatttatagctattt

SEQ ID NO: 303352 - DNA, 1927 bp, Cannabis indica
atgaattttattagaacatttcttgcacaattacatcaagaatgttactcagaatagaactacccgagtaactacgatcatcatataaccatgagagtctaacaaaagcatgagcaatatgattggcagatcatttaacaaacgaaaattaacattggtcaaagtagaaaaaagacctttgcattcctcaatacaactaccaaatggagagatcatgatcaccgaactccaaagagcttgggccatgacaaggctatccatctccaccataatgttagagaagtttgagttctttatccaactaagaacctctttcactccaagagcctcggcaaaaccttgatccacacaccgatgccatgaacccgatctagtttgaaggacatagcctttagcatctcgaaggacccaaccgaaaccaaacctgtgtttgtcacgaaaagttgtagcgtcaacattaatcttgtaataatcaacatgaggagcgcaccattgctcaccccttcttcaacctcaaccgagtaagaaaggggtgaaaagtttttctcttgagcaaataaccactgttcaagattatttcttgctaaagccacaacgttcttcaccgaaccagatttttcattccaaactttattattactatcttgccaaatagcccaacaaagcatggcacccatttgcttttctctgctgttccagcgttggaactgttgctgaaaccagtcaccaaaggacagaggtctgatgctgtccttaaacagaccagagaaccgccaacacgcagcagcaaaattgcagccaacaaacaatgcagtggacgatggattctgcttctcgattgcatctgggacaagacgagtcaatgtggacatgttgatggataagttgcacccgagtgggaaggcaattagacaatgttctccataacatttccttcactttcgggggtatctttaagctccaaacatctcgccaaggacccaaactgctagaggaaacaggagcagacttttcctgaattaaagtgtatgccgacttcactgagtagctaccagaatttccttgctccaataccatgtatctacaaagttggaaggagaaataggaatagagagtatcaaatccttaactctattattaaacaagtcagtgataacctcaatatcccaatttttaccatccataatcaataagcacttaacatctttgtcacaaaaggaaggatggaatgatgtgatgaaaggattttcaatgtctggaagcaacggatctcaattccgcattcacaaaggagcctcgtggaaagtatttggctttgaaaagtttgccaacaagagagtttggacgagtataaagcatccaagcttttttgccaaggagagcaatattaaagtcatgtaaatgccaaaaacccatacctccctaatctttagatgcacacattcggtcccaactcatcagtggatgccagatttctgcttagacgatgccttccaccaaaatttgcacattattcactctaagtcttcacaaataccttttgggattaagaacacactcatagcatagtttggaagggattgatctacagactttataagaacctctttccctgcacgagaaaaaaacttgctatcccaactctctactctctttctcattttatctttgagaaaacccaacacaacatttatatatatatatatattttcgaaaataagcgtattcatatattaatcaaataaacagttagacctcgtggtcattacaaaatagattctccggtaaagaggagatcagaatagagcagtacaattggtgggtaaaagcccacttagccacattatgggcaacattgttacaagtcctactaatattagaaaaattacaactaataaaataatgagatgacttcatacaaaaagag

SEQ ID NO: 303353 - DNA, 1156 bp, Cannabis indica
ccactgaaaccatacatgagttggggcatggttctaggtcttttaaagacaaacccattctctccaaggtttgcttaaaaaggatgtttgacgatactccgtcgtcaatcattactctagccaccatcatgttggctatttaaacttcaacaacaagagaatagttgtgaggatagaggatgtggtctgagtcagatttggagaatatgattggatgacacccaaagcgtaaaaatttaagaggtctctctgcttcctcaaaaattttcgatcttgcctcatgttgtagagatttagcatacctctctagtgctcttctcgagttacctgcaagatgcggacctccaactaccacactgagtctgcttgccactgatgtaggctggagagaaatgttgcctcatgtaggcgcctctagccttacatgaatagaataagtggtgaatctaggctcgtacgccttgtcggacatgtctctagttctagctgtttttttttttttgctagagaaagcctatttactgtcgttaaacgaccttttaccccaaattttcctcctttcccactttccctgtacgcctcaatgtcaagggtaggggagtctcgcgatttcttcttcttgttttttgagttttcaacttaagaaacaactttctcaaatttgacaaagccatctgatttataaagaaagttgttcaaatgtagacttctttaacgaaagtctgaccatatggaactcatctccttgagtctgactgttagtgtcataacccttgcgtcctcgctaagtatttttgtcttagcagctgcctctaagaaatattggatgtagtctttgaggggttcatcatcttgttgtttcacatcaacctggccatttggttcgatttgacattgtcaagatggaacgaatcaactgtcaaaggtatccacaagatctttccatgaatctataaatgtagggataggcttgaggtaccatcgctgaactaagtttgtcaatgtggcagggaagattttacaccaaacctcactaagcttagcatacgttcatcattgaaccccatagtcataagtaaaacttttagtgatacagttatccaataataattaagagaaaactaaactcaaaaaaagtacccataaaaactaaaat

SEQ ID NO: 303354 - DNA, 4144 bp, Cannabis indica
atatatttgatcatgtggactatatatcatggtgagataactaggtgctacaataatttacttaaattccacaacacaaaaacatatcatatttattctgtccactagtttatatgaatagtcctttaattttattttatttttctcaatattatataaatatatatatttatatacataaacctttaacatgtagccgcgcgcgtacatcatcaaaaattgtgaatatggaagcaaaatcttcatcacagaagatataaaaacacaaagatattatttagagctaagaaagagctaattagcacagcagatatggaagcaaaatcatcatcatcatcattggaaagatcgaagcaaactaaagaagaggggttcaagaaaagatgcatagacatggcaaaagaaaaaaggtccagattttacattttgagaaggtgcattactatgttaatatgttggcacaaccacgaaacctagcaattacgggtgatgatgatgagttttatctatatatatatatatatatatatatattcttatatctcttagaataattaattaatttcccctatatgtctttgagtgatcaagattactacatatgcaattatacttttggattttttttaagaatctctttttatatactcaaacttttatgtgttgtaactttcatatattttatgttggtttgttgaagagaaataaactaagcaaagatgttgaagaagagcaataaagaatctgtgaattagtgagctattagacaatgatcttcagactatttatagaaatatacaatataacagattgaaacacaacaatccaggaatctatgaacaaactataatactgacatgaaattcataatgaacctgaaaacaataaacgacacctgttgttatagtggtttgacccctcttagtcacttttttgtattagtaaaaaaagaaaaaacttcaactattaggatcactagatcgaacaagattctgataagttttctgaaagtgtccactaataatgaaagctttgagagtactcttatatagacttcacaaactgtgactcatgacccatgatcagggttgtacttgagaaaatggatctaagctggcataaaattatagggatcttaatatatttttttttaaaaaaagaaaaagagtaaattgacccttaaaatatttcactaaattaattacatgatttgtcttgaatttttcgatgcaaatgtactaattaaatttgtataattaagcaagcaagagaactttagtgaaagattatcgggtttatcgaaaaccaataataaataattttaaagcctaggaaagaaagatataagaattgaagacaataatttttacatagttcaggtgttaataaaatattagtttgcaagttactgtattgagcttaattttacgcattccgtaataatatggaacatacaaatttgtagggttttgactctatttataagcaggtacattcacttttgatggggtctttttaaaagaatgtactataaaatgccaaagttacatgtattgggcttggtggtgtggcccatcatccacctgatgtggccacaaattactgtgcatagtacaaagtgacactgactaccgcatgtggcttgccatttggaagcgttgagaaaagccgtgtcaaagtagtggtaggattgatccccaagacaatcgtaccttctgttgaatgcttctatacatgttggtaaagcggacacttacctaaattttgcgggatcatgttagagattaacacaccagttgtgtctgggatagtaaatggctgcagacagaatgatagatgttgctggagaaacttccgacttcgtgtactgtgatttatggtgtgaaggtaaaaggcctttacatcgttccagctatcacgacttgaccatccgggaggacgagatgaagctagatgccttagatagtgcaggaggtttaacattagccattcttagttattttgtcctagaacggggcaatctcttaattggagaaatatccatcgcctggatcattatatgtgtatgctcccaaactgcaggtccaggttcattctaaacttatactaatttaccctagttaggcctcaactaactcaaaatgagcatgattatttattgggcctcccagaggattccacatgtcttacaggtaaaaaacacaggaacatttacccttaagtctcaatctgaagttgggtggtggagacttacttgcctatccatccaggttcaatcctatttacggagatactcctagatgatgtctgcatccatgtatgtttgtatccttaattaattattagatatgccctttcaaagtcctacaatagtcaagcacgtgttatatggctagtggaaaccagacgtgtttcttgagcgagtgggacctcgtttatggcgttgacggctgacatgtgtcagcacacattctgaagtgtttccatcattacaaagggatgctttggtttctgagagggacatttaatacaccacttcaatttctcagacaattggatattatatttgtgtttcttttttattatcaaccaataggaactgttggatcaatgacacacggatctaggtcctttgagctcgtttattcgggactgttggattggtggggtgtgaattctggctctcttataattagaactttgaaaaacccattaccacttttgcgcttttgagctttcaaactagagagaaaataggaagagatacccgaactatcttctgtagctaacaatttacttaatcaccttctatcactccatcagaagatttttttcgaccaatccaccatttgttttcaagattttgctctttaacaaacttcaccagaggcattggagagctatctctgagacattcaacggttcaaatatattagatctgttgcagatgattcttacccatctccaatgacatcccgtttcgacagtaccatgtaagttagtatcatagcgagtgctttttagtctgtttcagtatcctttcttatttaccatgaatgcatgcccttagctctatatttatcaagtctgatgaattgtttaaggattttcactaacctctaggatggttctgagttattgtatgagtataaaaatgtctgttctaagtaacttttggctattagggccctatttaacttaatagaagtaatattgtgcccaaaatgttgtgggatttcttcggagactcatctaaataattcagttacggatctgcatcagggcgacatacttcaaatccagcgcgaaggatggtttgggaccatccttcctcttggactattatttttttgataaaattgtctttatcatgatgcctttctcaatagattttttttcattcctgacttggtgttttgggatcataatggttctggaaagccctatccagaggtaaattttccaggcaattctaagagatttctcgtacctaacaatttttattcgatttgggtattaaaaaaatggcttcgttttctcatctagatttttattcatggcggagatcactgttgtgttaatttgcaacacgcaagtatatgtattgttttaacaagtaatagactcaccatgagtgaggtcgatcccacgagaattgtagttgagtacgttaaaataaatttcttacttttatttggctaaataaaatttaagagaagattaaaactagaaaacaataatattttgaatatttaaggaataatgggtattaaaaggaaaattttatttatgtttgattttaaaagggtaaaagtaaggaatagggatcctatgaaggttatgaagtagaatgctataatttagttgttactagccaaagggtaatccctttggctagttctagtattttatagggagatctagttgcttagtcttggtggttggttgattctcttcagtttgaatagttttctaattaaagttttatgctgttttttgatgtttttttaggtggaacttcagtatttgattgagttaggagcattgtttgaagatgttatagctttattgtctaaatttccgggggcagttttgtcccatggggctcgctctaagattttagcggcccatggttggcaaagca

SEQ ID NO: 303355 - DNA, 1186 bp, Cannabis indica
gttttgctgtagcagaatttttctgtgctgcaaacgtttattttaatattttcttatatacaactgacatttgcaaaaacacggtttttcattataacttagcattattatcgtcaaaaatttaaacttaagtatttatttgtaactaaaaattaaactcaaatacttatgctgcaaattactcttttaaattatatcataagacgtcaatttctctatattttatttaccttatttaaatataatattttattaatactttttatgggattttcataaaaaaagttcttaaaataacaatttttttctcttttacatttttagggactatgttttactttttttacatatcatgaaaacaatatgtaaatataaaagcaatgtataaaataacatagaaactacataatataatgttattgtgaaaacaacgtaaaaataaacaattaataattttttttttttttttaaaacaacaaagtcaaattactaaaaatattgaaagaaattatagttccgtatttttaattattttttgtattttgaagtatttatgaaagtatctttttctatataaaattaataaagcataaacaagagagagaaagaaaaatgaataaaatattaataaaatctttttgaatcatttaccacgtgctctacttattcacaagaaaaaggtaactacaaggaaaattaactaaaaaaataattacttttgccattctaaacttacaacactgcccttataaaaaactaaccaagaagaatccaaagtttgttttgagtgacagttgcgagtaaagattttaagataaattgatgatgtagttgtgtactcttccttagataagaaaaaagtttgttgtatatttgtgatgcttcaaggtagggcctaggatgtgttttaatacaagttggaaaaatactttactataaaaaagtttacttgtagtcacaacaaaatttgtgactaaaagtaaaaaagttgtgactaattataaattattatttttatgttgtgattaaaaggtccgtggctaaaagtattagttacaaaaattacaatttgttgtgactaaatgtatttttagtcacaatacttattgtgactaaaactaaattagtgacaacttgtagctaaatattatgttttaatcacaagtaagtttttgttgtgactaaa

SEQ ID NO: 303356 - DNA, 3258 bp, Cannabis indica
aaagaaccaagccaacaagtgcattcgttaagctgctgtcatgacatgtccataaggagtgctaatgaagacttgtaactcatactcaagatcagaagctgaaattgaaaacgagctcatttgtccttggtcaaaaacccacaagcaacccgcctctcgatgcaaaattgaagaacgagagattctcgtcattcaacatgaaacaataattctcactactgaaatgtaagttgaagccaactataattctttagctctttcaaatactcttaaaaacaccatttgtggctcctggtagttatgactatcaatacccttgccgaaaaagtcaccttgacctcaaggtgagattgaggaatttgctcttgatttataggtatcactgtagtacatcagcaaagtcgcccagccaaatcctctcccacggcatgtaatacttgttgaacccccaatagagagcccacaaagaaaggagcatataggcatgtaaactttgttctagagggcaaatcttatagtcacacaaaccatcaagtcctttaaacccatgttgtgtaatcatgtcacccgagactgaacttaattgtttaaattgtttgattctatagccatctcaataaaagagagccctacatatcaccaattagccatatagaaaataaaaaattatcaatagatggccctattccattcaaaatacctgatagtatcaattcatacttctcaactttgctcttggtaatatttccctaaaatatcaaaatacctagtagtatcaataggtggccttttatgtttttaagaaaataaaaatttgagaaccaatttgtcaaaaaataaaattatcaaaactaatatattttgagatacagtggtgatccaattggtagttgacgttgatatttaactaacactttaaatttacaaagaaaaataaatttaaaaagtaattttgctaaaaaaaaagaataaaaaaattaagttcgtgtataaaaattaaaacattaaaaaaaaatcgcgactaatttctgtattaaaataaaaaaataaataaatatggtgccaataagccaaagagaaaaaggtgacaactttcttactaggaagatcaaaaggatcgtattttttttcttcttcaaaaccattatcgttttaaggaagaatcaatacagagttaaagctttctcttgcaatacaacacaaaaattgaatgaagggcaaaaaaatgaaaatgaaggaaaattttgggggaagaggagggagagaattagttatttagatgacacaataaataggcttatactagatctgttgtatgacttcatgtaaggaagtaggttcacaggtttgagtgtttgggttatgtctgtgatgctaagattagccttgtctaccaattcaagaaaataattgaatgtgtcaatagtgcgaataacagaagctatgagggccactggacctttccaccatggcaagcccagaccaagattgccttgtgtttctcccattgaagagccttggcagttgttaacctcctcctcctcagaatatgatttttttgtgtggtttaaaagagttgcaactactcgaacaagatgtgggagacatacagggtcatatataacatctgcagccaaaattatgtcaggcttaaagctttgaagttgttcctttgttgcagattcccatggaagatgaatgcactttaccttgttttggttcaactggttcaactccaaattaactttcatgtttgctagagtcaaaacatcacaccatcacttaacagcacctcagaagcttttacatgggaaagagtaatgccaaccaaacccactcctgagccaacctcaaaacaagatttattacaaaacaattcaggataggaaagtatacactctgataaataaagacttgaaggccaaactgaacacccagtatccccttcaagcatgttaagagaacattggagctgtatcagcaatttcctccactttggatagccatcaggaaaaagaaatgagatgcatttgttgactcttttagtttctcccatagaaacttcatcctttaatgaagtcatataaaaagcatattgttcatatacttcatctaaaacactgcagcagttcttctcagcttcactaataagcttcttcaaaaaattcttcaaataaggtgcatgaaattttccttcaactttgcttatgcaatgactccaaatgaatctctgtactctttctgaaaccgacccttcatcgcaaacccgagctaattcgatcagagagtctgagggttccatggcaagaaaagctgagaacaggtacaaacatggagatgaagctggattgagttcttcatccgccatttctggtttgctctctgttttttttttatacaagaagcttgttgcaactaatttacacaagaagcttgatagcccatattcatttcaaattttatttataaagatccaattttttcctatactgaatttcttcccataacattaactccttaaaactagcttccaataaaatcttagcaacaaaagaactaatgggagtgaggaggcctgttgtggtggatgattcctgtaatggagtgtggagagaattaatactaataattcactgcatcaacaacaacaaccttatacatctcattcttatttgtaaaacaacaaaaatataaactttactactcaagtctcaatatatgtaaaaaaaataaagatgttagctttgaccaaacatcttgtcttcatcaaatactcttattttaactccttaagcacagataagaagtcatgaatttggggatagaaaaaaaatcaaaatttgaagccataaaaaaatgaaagagctttaaatatctacgaaagataacctcaagggggagggtggtagaacagagagtagagaggcttttccggcaccggtgatggtgagtacgagagcgtcgagtgtcgatatggtgggtttagggttaggggtgacgaagagaaaagaagaagaagaagtgaacttattagattttatggcatgtttactaataagtaatgggcatcaatagtaaggtaatcattcccttacatttgtttacttgcattattaaaattaggaaagggagaagttgattaaataagggagaaaagaaagggagaacttctcccaccaattttataaggaatgccattaagggtaatggatttttattatttttattttattttttaatattaaatatataatgaca

SEQ ID NO: 303357 - DNA, 709 bp, Cannabis indica
tataacgtatatgaatatagaaaaaaatagactaaaaaaatttatctagatgctacaacaagtagaggatacatcaatacatttcttttaagggagtgtattgtaaaatcaccctatatattaaataatgcattgaaaaaatatcaaaatgataaagaaatatttcatcataaattcataatggacatatttaacaatatgattcattttatataattgtattactaattgcttgcatttcttgtttgtgttgctgcataaattaaaacaaaactattgatcatgaaaatttgagttgagtcgcgagttagtttgtttttttaataagatgtttgcggtatttctaaatattgtgtaagcaactatcaatctcgatgtcttcaagataaaataactttattaaaccactatttcagacatttactgcattgtagagaatcattgaaaatactacacccaaaaaatactattgctcaaaatatatattataatataatataataataaaaatgtttatatttttagtgtgaaaagggttgtctttctcctgttggtcctcgtgcattatatagagaacacatagaaagcaataacgggaagaatgtcatcttttttgatcatgagagattaagttagattatgggaacattgctgataaagaggaggaaaaaacgtctctattaactaattaattaaacacgtttaaaga

SEQ ID NO: 303358 - DNA, 3128 bp, Cannabis indica
aatttgttgtgactaaatgtatctttagtcacaatacttgttgtaactaaaactaaattagtaacagcttgtatcttaatattatgctaaagtcacaggtaattttttgttgtgactaaaagttatatctaatcacaaaaaaaattatgttgtgactaaaaaattgtcactagaaatagttttttttgtagtttatgtcatcatatatgaagaattggtttataatttctccacataacaaaaacacttgttagagacaaaagtgatggtcctacctaaacatttttcaagatttttttttcaaagtatttccatatttattacttcttatccttctcaaaaataaccaaggaaattatttcttccacctttctctatgaagcaaaactattggttccagctatttcaattcacattttccaacctctttagttaatctcttctcctttacatcggccttcaaaccaaacataatctgaatagttaacacagaatcctacatagcaaaacctttttccttttctatcatccttaacaagacctgtcttttatcattaagagacagaattcctttgcgaagatgataagagaaaattagttttagtttattaaagactaatgattataaaactatccaaagagaaattaatattgatgatggaggttttgtcaaaaaggaaatttagggccaaaaaatgtgactaacaatataaaaataaatgaaagataattaagaaaactcacaatactatgatttacgttgagaactagacaaaattacaatagtcaatggcaaaatcaactgtgtaaaatatcactacaatcacagaattctactattcaaggcaagacctccctcgagcaatagattttttcttttctcatccttctgaattaattctcatccatttctcttcagtcagcacataatattcttaaatttaaacttgattttacaccaaatgctcctacaccaaagaattttgctgcttacttttgattgcctcaataagccttaaatcaaagctattatagttgaatgcaatactctactcattgacttagtgctccataatggccttgaatgtaattctccattaattatattattgaggcaatttcttagagtctccttcatacaaagggtagctcaaatgatagtggtttactcccacaaggtataagattcgagtccctcctaattaccaacacagcaattgctatagtttcctagtcccaaatattgtagggttgggcgaaaaacataaagaaaatctaataatctccgtaatcccaattcatcttttgatctttattatagttgaaaagcttagtacaaggatttagctagtttgaaaagttcctctccctatataagtgaattgtctacctcaatatttgcttcaatagcctttcaatctcagtccttatattcatacacattcccaacgtaactaacctcagatcaataaataaccccacaaataacatctgaaccgaacaactaagaccacagtgcctaactagcccactaacgtattggtagcttatcatttatacgcacaacaaatgcccctagctccaaaggttgctaggggattttaaattggacattctttattcttgcttttacctcttttaagtctttaaagttataaagtagcccaaataaaccctagaacataatagtttttccagcatggagcaactttcatacgttgaaggaataatgtcacatgaatgttctaagacccataaagtaaacactagaccaaacaagataataagaattccagtcaaataatcaaaagccaattaatgaagcagcatctcaggctgcccactttcataattattgctttcaaacactcagaaagaaaagaacaactggatacctaatgagatcacacaaataactaaccccagtgctccaaacatgattaaatacagatgatgcagtgcaagacaacctctgtctaatgcattaacacataaacggtgtgcctatccaattgtacatgccttaccaaaataaggatagacagctaacctctcattaatttaaatctaatcatgactttattatccccacacacactcttaccctgaaaagaaagaaaagagtcaaccaattactttgttctataatttaacttaaccctgaagcgtcatcataaggtcagatctgaaaacaaaaccaaaaaagagtcgcaagcctcacaacaaccaaatccaacagaaaaaacaaaatgcttcagagccaataaaaaggaaaatccgaaaacgacctaaaaggagaacaatgcaacaaacaaactacttaagcactagcagagtacttttacttcagctcaaacatatacaagcgcacgcacaaatatgcacatatatataaatggtctcattgaacttacttttaagctcatcaagccagcgaccgatgctatcgaatgtggttcggcgagtgatgtcgtagacaacaagagctccgacggcgccgcggtagtaggcagaggtgacggcacggaagcgctcttggccggcggtgtcccaaatctgagccttgacctctttgccgtcaatgtccatactttgagtctggaactcgactccaatggtggccttggagtgcatattgaactcattcctagcgtaacgagagagaaggttcgatttccccaccgccgagtcgccgatgatcacgatcttgaaaaggtactcctctcccgactcatcgtccgacgacgacatgtcgtttttcgatgaaggtacttcgctttacttgcgcttttttctctacttcaacttttagctttcttttctttttcctgtgttattattttcttagtaaccaaacagaattttgatgagaaaacgtaaagggaaaagaaagttggaatcgaagttgaagaaaagggaataaattagagagagaattaatggaaagaggtgtgagagtggtgtgtattgaatgaatgatatggaatcgagctgtcacacagacaaactgcgcatgtagtggcttcataatacattttctttttctttttatatattttcgcagtaataataagaaatttttacatgaaaaatcctttttactctctttattacattattaccctcac

SEQ ID NO: 303359 - DNA, 4072 bp, Cannabis indica
aatatatttcttgattgtttccagcaaaccaatcacttttagactttacaaattcatgtactgtattataatttacattttgggtggccttaatgatgttgtaattttaaattcatgatgcaaatatttttattgttatgaatagcgaaattgtgttcagagatatattaacaaattggattattttgttatttattaagacatcattctaaatttgaaggagaaattttgacgctaacaaaacaaaaatggaaataatttaaaaaacaaaacaaaacaaaacagatgaaaatgaaaatgatccagcatgaccatccaaaattctattctagtcatccatgttcttcatgtattcctttgaaagtttagtctccattattaacttctgttctttaatcagagaataacctgattcaagcaaggcttctattgtttgctgttcatcaaaagaaggaaaatattaaagtcatcctcacccctactaaacacaaatttcaaaacacatgttgattttagtaaaattcctttggaggagtaaaaacaggaagcttttccagcttttttcttttgagtagtgtgttgccaagattttcaacaccaccaatatcctctacccactaatataaaaaatatcatttaaagaagaatcagaatcagacatataaacatgcatgaaaaacttgtacaaatttggttattcataatggatgcattgcaatctagtaagtgtattgtatgtatccattaaaaaggttgcttctaggaatttcatattaagtctcattttctttgaccataatccaaaagctcaaatttactggttgtcttttttaccaatcaaatcctccatacatcatgtaaaatttctcacaaaatactttcatgatagtttataaagtattagttgaaatcctaatgtttctctcttgatcattttctcacattctcaaactatgtagtaacaaatttaataagactcaggttatactagcttaaagttactgcgtcctcattttgatccaagtttagtttgtataaagattctattaataacttaattaatagtggaacaaaataaaaaactctgtcacataattataaaacataaaatattcagcaggtaaacaaacttccagaaactcttaaaaagtatttgtaagatttgaaatactaataaagtagcctaatctctataacagatggattcataccttggaaatagacctgtcatatgttcgagaccttagggctccatagaaatctagtgctgtaaaatcaccaaaattaataaataaaataataatgatatatttccaaaaaaaaggtttttttttttttttgcaagacaatacagacagaagagattgtgcttgcacagtcacgatctactaaaaagatctctcatgtaacttaagcaagtaatataaatttcgttcatagtagtttctttaattttcagtaaataactcgaaaccccacaaaaagttttggttactttaaaatcgttccttgtgtgcaccattaaaaatagtaaataagataccttgattaggaaatgtcttcacaatgtttatcacctcatctttagatatgccatctttctcatacattctatgaacgatattcacaatgtcctcaagatttggctgcctgataacccaaaaatgataaaatatcaaaagcttttagctaatggaaaggaagcaatactgcatctgatataaatcatttatcttttatttggataatataggacttaaaacatacaacatagctaacaattataaaattatttagtgctaaaaaatgaagttaacaccacgagcgactggttccagtcatattgcttaaaaaaaggtagaaagctcatatgattgatagggaaacaatggccactaataacacagaaggctcacacaatctaatgcataatccaaacaaaaaggcaagaaactgagtaaggaaacaatcacgtaccaataaaatttctccattcttccatcacgaatcaagggggcataaatttttgagaaatcattcccagtaacaatgataggaactcggtttgaaatatctgactctcgccagtcttgtccaacactcactcttgtaggattatcagccagattcatgagtgtcccaacaacaatttgattgttgactgtcatctgagtgtttcctatgtgacagcaaagaggaaacatgttttactaaagtaaattagcacaagtacgatatagaaaaactaatatgcactttaatcataaagggaaaatgtggaggatgtcaataatgaactgctagaagtatttatgaaaacaaggagtcaaagacacataaaaagaaatcaaattgctatcctagcgcttactataggaagtaaaattcataacttcttataaaaaaaaagaaaactcaccaaatctaccaagtccagcatcaatgtcattgatcattaagcagctcatcttgccctgagatggttaaaagaaacttttctgtcagagtatataacaagtagaaagcagacacctctcaaagtgctattttttccgttgcttattaaaacaattgacaaataattatcatacatgaataagttgaaaacaatcactaaaagcaaccaccaaaaagacaacaaaagattacagaaaaataatatcaatctctaagaaaatcagacaaagagactccattaaactcaacattacataaccataatgctgtccagagacattcacacttcaatgactaaatgatacagggtatttaggagcaaaaccagcctccataccaatggaagtgaacctagtctcaaactcagtaaagacaaaggtgaacctctacctaaccaaacttcttatcgtagccttataggcaatctatctcaccattatgagaccagatatttcgtttgttgtcaatcaattaagtcaatatctgacttgccctcgtcttccacatcttcaaccaaaaaactgaatactacaatacctcaaaattacccctggtcagggactcttcttcccgttcaacacttccccaacagtatcaacttatgcaaagaccagcctttcaactgacaatgtccaaatctctttctttgctgatgtcgactggggtagttgccaagacatcagacaatctatctctggatattgcgtttttattggttcctctctggtctcctggaagtcaaaaaaacatcagaccgtgtcccgttcctcagcagaagcatagtacagagcaatggccaacgtaacatgtgaagtcacttgaatccttgccctcctcaaagaccttggcatcaatcacataccacccacatgcctttactgccacaacaccactgcccttcacatcagcaagaatccggtgttccacgaacgaacaatacatgtcgagattgactgccatttcatccgggagaaagtcaagcaagggtctctcaagctcatacatgttcaatcaataaacaacctagctcatatcttcactgaagccttatttccatcttcctttactgaaattgtatcaaagatgggtgcgataaatttatacactccatcttttgggctgttagtcagttagttccttttaagttagttgcaactaaattagtcaacccctaactaacttcagtccactagcttacaattcgcctatatataaaacttgtactcttcttctcagattcaagctgagacagtatcaatatacaagaaacattcctttcttgctttatttctcacattttctattgccaattaaggaaaagagaatgacaaaaacaataaagggcttccctagattcaacaaaaccagtggatctaaacaaattaaatatctatcaatctaatgctatctggcataggagtgcagtagtgttgagaaatagcatagtgatagctgtagtaagctagtggactaaatatccaaaagaaaaacttattatctgattctcctagttatctagttataatggaatgaaaatatccaaaaataaagataactagataactaggagaatcagataataagttttcataaacgttttatatatatatatata

SEQ ID NO: 303360 - DNA, 2663 bp, Cannabis indica
cccagcaaacctttggtgcaccaattccctcctgccttgcttcaattagattaccatgagcatcaattcttttcttgactatattatgcctctgcaagtaaaaaaaaacgtaaagcaaaacacctaaccattagcatcacaaccaccaaaataaatagagaagatatgataaccagaacatactatatcaagatgttgctctccgctgatatcaagtgcatcgagactgagtaatgaacatgcgatgactggaaaagtaacatcaaactgcattgaaagatatgtggtatcaatacacctgagataccactgtctgaataaatcttatagccagataatttcacattgctattccataaataaacagcatattaaaggtaagacattttttacaaatctttgagcgcacaagggttcttcaaaaagttatgaccagtataagttgcaacaattacaagttcaatgggaatgtaattggataaattaagaattacattgatccgtagggtttcgcctcttgaagtatcaactaccagctttgtctctttgacagtgtgaaggaacaatgctgtaaagatagttaattaaaaattaggaaatgcaactgtcagaaacaaacagcaataaaggtgtcttaacaggcaataaaacaggaagaatcataaatgcaggttatgtgattaaatcagcagcaaaagagaacttgcaaaaatgtttttcttatattctttttctgacacacaagaattagttgtcatattcggcatacagatattacattaccaacccactccaaaagaaaacatcaaactaaaattgttggaagttgccaagcatggtttataatactataaggtcatttctggaaagtgacataagattgaataatttttagcatgtgttttggttttgcaagcagataaatattggaaattagtccacctagtttcggataatttggtctgttgagaaacataagataattttatcaaacctaatctccccatgagacaaaaatttgcaactatgcatccatcttcattttccataattcattgtttgcaaatgatgaactcaactcactaattctatttatgttttatcttaatccaacccatttctattatatcctaattctacgtaccacaagatatctagatcaaacaagggggccaacatgtgccaatacgaacaataggccaacagatgacaaggctttctactccagacatacaagctgaaactgatagttaaaaaataacaggaaactagagtaaaacattcaactatgcgttaagaaaacaaattgctagccatgcttctcaaagaatcattcacattgccagctcctgcctgattatactaacattacggcagaatctaaaagctaaatttctcaaataggtatgataggtagttagaatctatgccaatcacaattgaaaccatttcccaaattctctgcttctaaaattcacattttagggtaggggtgtaaaatagccgaatcaaagaccatattaaacacacatcattgggctgtagatcatttatagtagctgaaatgatcccaatcacagcatcagtttctaacgctgtaaatgcaatccaaacagagacttaaaaaagcttaaccaatgaacccttcgacagcttcaatcaataatgtcaagatcccaaatttctgctttgggttaggaaaggaaccacaattcggaaagggaaaaataattctctcaagagaaatgcctttggccataaggcttgagaaccaattgttcacacgcatataaatataaatatagcataaaaagaaccctaaaatcagcaggagaggaagagagagatagagagacatacaaaattcggagaaaaagaggatgagcataacgagggaggagacgatagtgattatgccaccggagaatgtacgattgtagaaatcctcattaactttagggtaagcatccaaattccggagcttaagcactaatttctccatggcagacgatcttcaaattgaaatacctcaaccccaatcctccaattccagttattcgtacatttacttatcagaaattcaaatagttagagactgaggtttgggttgactggaggcgaccgatgacaagcctatgttccgaccgaacgatgaaacaaatatgaaagcaattaccccaattattgacccaaacaacgcaactttgacataattaaaatatggaaatgagattatacttttcaaaaaatacctcctttttttttctatgttttcctattaaatttgtttcttttttcaaatgattttctttccttgttttctttttcaattttatttatattgttgagactgagttggtaaatttacagttttaaaaaaatattctctaaaaatatgacatgttgcttctaaaaaagtattttctaaaaatatagtctttaggtgtaatgataataataaattaataatgataatcttgccaaaattgttaattatctaattttttgattatttatgaacgagtctcggtagcacgagcatgacacgatataaaaaaataaaaattaacataaaatattagaatttaggataagatgaatgaggttctatctcaaaatcaattggtaatgataggagtagctcattcatcttatatatcaca

SEQ ID NO: 303361 - DNA, 3553 bp, Cannabis indica
aaaaaaaaaagaaaaaacatatcatatattgtcttgatcaatattctgaggagagatttttcactgaaataatatgtacgtactaccctcatcaacttgctaaataataataaaaatttttattttatatttgagaggatgaataatgaaattaaagatcgtagctagctgtgacatgtgttagttgctacagtgacaaaaagaccaataacatgcacagacaagtagcatgtatgagtttttggtcccccatgatatataatattatataaacataaaaaaataatagcaacaaaataatgataataaataataataaaggtttggttatattggtttttggtatagcttgagaaaacgatgaagtgggaaaactatatatatagaggaagacaaaattaaggagaaagaaagggaagaagcaatgctatcaaaacttgttcatttctggtagcacattttgtctatgtctcccaaatcttgcttcatgacatgttactaaattctcattgttatattatacccattatcttgcccaatggttcatatcgggccacataaacaaatatatacatgttacttattggaaatgatcgatagcttcaatatatcattttaatttatatttttttggaacttcacgaagagatttcaagaatggccggccacaatgttttaaagttcaaacacacatcacagttttggaccccatacccttaggggatctggggaccataatattcttcttatctaagctattttcactccttccatttttatatataataacaataatttgtttttgaatcctatggagtaatttttctgagtattaattaataagtatacggtaaaaataaataaatgaataatatatatatcaaatctaattttatatgtatgatcttgttagtttaatctggaaccaaaaataatacaattggataacaaaatattgactagcatatatatacagttgggaaaatctgatatatttcatgcaatttatagagtatataactaataaaagagatacaaagttgatccaacaaaagataattagaaaaaatagagtttggcagtgcaatattaacttaataagtcttccttccttataaatttataaaacattaaaatacaattgtgagacatgcaatatgtatttataaaattaaggggagagacctaacaacaaaatcctaaattaaaggtaatgcaacaattatttttatgtgattcaagcattaatgaatcttagtccacaaattaatattattaaactggaaaagctatagagtattcttatacaagagtgttctctctaaagttcaagaaccctaatttttagctcctgatttgtgaaataaatttctaaccctaggcatgaacggatcatgttctatttataggctaagtcggattgtgggtaaactcggatccattaaggtttaaatgtgtcaactaggccaaatggtagggtaaaatacaacttatattcattttgggttggttaggtaaggcccatattatgatgtaacggtcgtccgtacagagcacttgatggtgataggtgtcatgcgtcgcctattgtgtatagtaaatgtcagaggtacgcgcactcctcatgtctgacataagcgacaaactcttgatttggtgggatactgtgtcaaaaggataccacgtaggatgatttctaaatgtctccagatgtctcttcagttgtccctctccgaattaccccatgaaggtatccagatagcctttgttgggcttttcatcttctagaaaagttgctcttctaggttcattaaggtttgactttattttatttgtaaattagaccagtatccaaatccagagctatgaccaaggtccgttgttggctgacccactagtttaattggacttaagaatttaaaaatcttagttaattttacgccttggagatacatgtgtcaattatctagaaacacagataatatttactcccaaactttcgggactcgagagtcacagaggcttgcaacattgaatttgttgtggtatgcagagccatgaacaattcttgccctttggaattctaaggaaattgtttgcgaaagctctcgaacctttcactttcttgtgggggacacgtgtcatgagtcctttggtccatgcacatcacgcgtcttgagagagcgcgtgaggcctagggttgttaaacaacgactggctatgtcgatatgggaattcttgaggtgaattttattattaaagagcctctcgtgtatatcattcaatggcatctcttcatatttccagactgtaagatctcattgaatgtgttttcttagagatgatctaagttatttgatcatgagcacgcgaatcaccatttgtgtataaataaggcaaggatcgaataaacataacttttccattttcacttctgattccaaatttttgggagagaaaaccagaattgaaaacctaaaaaattattctggtgaatgtctgacgtacctacagagctttataactgtcttctccgactgcgttcaaggctgtttacggatgcacccctaattttagaatgttgatgacttccacttgtccatttactttgtcgcctggccactgtcgagaagctcttgatgataccatgctaagtatgaaatttagtgaggttatcactattgatatgcttcctaaagttggacaatcttgtgcgaaagaccgtagcaactttttactacaaaatctagggccttcttggaggtgactgtgttaataggttctgcctccacccatttagtgaagtaatcaacgacaagtattttactcctccttttccagtagaaagaaatcccaccaagtcaataacctaaactacaaacgatcatggactgttcatgagggtgattttgattgaagatgcccttgggaccttgacgtagctttgacactgctcacatttccgaacatagttaatacattagtttttcatgatgggtcagaagtacccttgccatataatcttttttgacaggcttggtgcaaaagtatggtatccgcaaaagcctttttgtatctcatgtaacaatgcactaatttcattcccagctattgttgggaatattttaccaggatctagatttactaacaagtatgttgattaacatcctaaatatgaatatctctaaaacaatgaaattaaacacataagagtttagaaaaccttacattagtttcaggggaatataatgactccttccgctcaaatctctaacccttgttcctttctgtcgtacagtattatcaagatctgagtctggatctctttctctccttcaggttcagttaccactgtcttactcactatgattgagtacttggcttgctatgtgtgggcatgacactctttcactaaggctcgaatatggtgaagaaaaatgaaggaggctgaaatcactatagaaagaactctctcatctactagttgtctgatagagaaaactaggtttgatttcgttgaaggcatcaagtggatgagtgagagcatcatgtt

SEQ ID NO: 303362 - DNA, 1232 bp, Cannabis indica
accaataacagtatgacaccgagtaataaggtactagacaccattgataccttttagcatttttaatttgaactatgtcattatttttgctctcattaataaaaatttaaatgttcaactcaatataacacctagcataaagctaaaaacttaaaatgtcacatattaatttaacgtcttcataatttccttattaattatttaacaaggaagtaatagttagtagataagctttatttcttaccccacatataaaagtcaaagcatcattggttagtttcatttctaaaactataattaattaacctacaaggaaaattatatcataattactttgatgtatgacaaaaaaattacttttatatataagaacaaattttatctgctattataaatttgtcatttctaacaatagtgagtcgcaaatccaagatttatagacaatccaaaatttataaatataaatataaataccaacccaatctttagtttccatgaccttctttcctttatattttgtaaaagtttcgttcattatcatgatatcatattttgcatccttatttatgtataaatcattttatttataaatataaatgtttgagaatattatatagaataaatacggttttttctttttgcttttgtctcagctacttacttctaaaaaaaaaattatttattaggaaatttctttctccaactatttcttcaaaccactatttttcttcttattttcttattccacattttttattttttaaatattaatatagtaaaatgattataattattaattttatttttagcatctttagattgacaaaaatattttataaattgattcgtaatttcagttgaattgtattttttatttttatactgtatgttgttaaataatttatataaggtatggaaagttaataaaatttctatatttagaaagtttatcataaaggtaagtttagtaaataaattaatttctgtctttccagctatgtaaataagatcatataggagtttcctatttggtttgatcggattaagagaagaaaaccgaaacaagactttccttttttatgaaaggaaagtcgcacttattgctcacgattttataggtacaggagttgaaatttcttggttgattgaagatcttttttaggaaagtctcttgtgagttgtggtcttgttaagaccgtgaatgagctgtcaataaagtgtatattgattat

SEQ ID NO: 303363 - DNA, 2361 bp, Cannabis indica
ataaaacttaataataattagatttaaagttgtcatgacaaaactgggtacattctctacatttgttcgtactaaaatttttcttcaagtttgttacattaaaaaaattatcaaaaattgagttcagggtactattttgtatcattttaaaaaaaatataaagttcaatttgtaattttataaaatagaggctccaatcgataactttaacaaaacacatgatccaaaataatactaatctattaaaatataaattatacaatcatttaaatgtgttaacaaaattcgatggattttttatataagtttaaatttgaacttgaattaaattttatatatttaaaaaatataaaaacgaagaatagtcaatttgtcattttacctctagataaaatttatagataggtaaatcaatgaaaattagttccctcaaaggtccatcatttgttagtctttgaatcctatcaaaacttatatgacatagtcttaaatgtcattaataagtgatgtgtcataattaatcttttgatgtttttcagccttaggttcttagctactttgaataacttagtgttgaccctcaaaagtggctaatgacagtgtcgtctgataagcgacatacataacaaaatatagcttaatgagacaataattaccagattttatagtagttcacccccaatatttgtagagttgatcgatatttttggcaactcaaataaaatgtaataaataaatattaaagagcttaataaaagaaagatgaagatttttacgtggttcatatattatcgaatcttaatccaatgactttatatattctttattaacttaacctcaatattaaaattctctctgtttgagagtgtttcgtcgctcttcttagagtgttttttgtgagaaagttttgtctgctttttgactttactatttcctgactgttgtgatttttcttgtgctctgtttttatcccatggcctctagcagtaagactgataggcaactgtccaataaatgggcggatatgtgcctggaagaagaagaagatgcaaaagttattcatgaagaggatgatgaaggggaaagagaacctgattttgatgatagatggtgtctgattaggcgacttttaacaggaaagatatcatattttctgatctttcaaaatataatggcggatctatggaaacatgggaaaggaatgtatgtcaagatcttagaacaaaaccgctttctcttctcattttatcacaagatcgatattcaaagggtgattaatggcagcccatatggagttatgatcgtaaataacttatcattaggcatctaaagccaggagaaaatcctaagaatcttactctgaattcccttgatatgtgggtgcaaatttacgatcttcaattcaggttccacacagagaaggttgttcgcgaagcacggcatttccttggcgagtatttagaagtaaacccgaataactttacgagagtttggcaggagtatttttgagttcgtgtgtgcatcaatgtcaccatactctcaaacgaagaatgaagttttgacgtacaggaggtgaatcagttctctatgctaatatcaaatatgagaaagtcccaacattctgctttatttgtgaagtattaggacactcgaaaggttttgtgataagctctacgacagccatgtggatcaaattgtaaagccttatggactgtggatgaaggctccaacaaaaagacaaaattttcttaccgcctcaccttggttacgatcggggaagatggtggctctggctatcaatggtgtgcctgaagttgacttaatgggcattaattctcctcctcatttcatggttgattctaagagaaatggcaatcctggagaatctgctccaataaacaacattaatgaagggtcaactgtggtctttaaagataatgccgccacttttatatgtgacaaggagtttgaaattttagaaggtaaaaggaagagattggacttagactcaaatgggcctctagattagtctatggaacctacaaattctaatgtctatattaataatctgaatttcacaaatgttgatggggtgccaaaaaatagaaagatggtgggtgctggtgtccaggcccactaaacattatgagcaccataagttagaattgatgtgggcttgggaacccacgggcccaacaattcgtagaagacatttgatgtcaaaagaagcccaagtttttgtttttgtgtgaaactttatgtaaaaaagaagttgtggattgggtcaagaatcggctgggctttgaagcttgctttgttgttgaggttcaaggtaggtctggagtgttgggttttatgccc

SEQ ID NO: 303364 - DNA, 2651 bp, Cannabis indica
tagttgtgtatgctctcttaagcttacagtgtgtcttgtttgtttattttatttatctatgtcaaattttttaatttaatttgcattcaatcgtgaaattagatgcgtttaaagccaaatttccaaaagggaaagactcctctaaatcccttctcaagatcaaaaaaatagtgcaaaccttgaaatgagatacgtttttagccaaatttcccaaagggaaaaactcgcctagtttcgttctcaaaatgtcagcatgtttcctaagtttaatctattggatttttggcaaggaataaacagggatgccttgtctgaactcctatgtgtttctagccctaccttaattaaagggtactacctaaaatccatagtgtgtgcagcctgccccccagtttatatacgaccctagtggaaaaagactctatttgatgaattttaggcaaggcaaagtcacctaaatgttaccacagtttcagcccatttcttaaacaaaggacaatccctgaaatcagtaataccctcagccacctttcccaaagcccagctttgtgtagagcagtcatcatgaaacacttagaacgcgaaagcctgaccacccacgagaaaaccatccctatcaaacatctgtcgtataccactctatttaaatagttaaatactttaggcaatcaaaaggcgcaacctttgccaccactcgatggtccgagaccgagttaacaatgcatttaagttgtcggggtatttaattaacttaaatttgtgaataccaaaagggttttaatagcctagaccagtagagcaattaaaagtttataaagtctaaggtttgaggatttggccgttagaaccgaaagcctttaaacagcctaaaacaaaagcccttaaaattgtataacaaataagtaaaatgaaataaaatcttatcatgcatgagaaaacaagcaaataaaatcaaagggcttatatctattgtagtgccccacagaccaggcatagtaaaatgtctttgtaaaaaccaaaggcttatgccttaaaccaattaaaatagtctcctacgctattacacactgccccgcagttaaggcactttaaattgttccccaactaacttaaattgttctccttcagtgttgaccaaggtctcctcttattttagaattttattgactaatttgttgagttcctctttcaatttcttggatcacgcctttgtcatcgggccaactagaacttgacttgtttctttagccttagtgttctcatcaatgactttgttccctgggagattttggggtttcattttctgatatcaagttatcttttgcattccacaatctgaaaccttctgatagaagatcaagcacgagaattaagctaagcgtttaaacatcttgaagattccccccaaaaaatacacttgggtggcttgccattaggctactaaggaattgttatctaaagtacacttataaccccgcagaacaactattgcgtgtagggtttactcgaaagacaagacacgcttcacaagaaggaaataagacaacaaaacactgttctgggagcacaagtataccttgggcggcacacacatgtgctctccccgaggtgattcgagcacaagtatatcatcggtggcatacacctatgctcccgctccacccccaagggcttctaagagcacaagtacaccctgggcagcatacacctgtgctcttcgccttcccaagatttgaagtccaaaccaagatcttcattttaatgttgaagatcccaaacatgtgatcttatccaaacccagaaattaaggatgttgattggggtgctgattgattcttttttcactataaatatgagccttcaacctccttagagagggttcaaaacttcatttgtaagtagaaaactatatagaaatatttttaattctctttgctctcacgaaactcaattgaacttttcttgtgatcttgattgtagaactaaaatacaactaaaaggagagtaagttattaacgtagaaattgaggttgaacctctataaaaaattttgttgatgttattatcgttgtcttcgttatcatctattattgtttcattatcatttacttgactctgtgttaattgactattttttaagtcaacacattactaatgaatcttacctttatgcgtcatctggtggactagtagcactttgcaaggattattaatacttcgtataaaaaatcttttgtgtttttatttttttgtacttcaattatttactagtttgttggtctgtaattacataatcttagtttgtagctacaaaatatttgtttcactttattattttgtatttaattaattgattatttggtattattaaaataaggaatttcaaaatttttaaaggaaaagaaaagacaagcctaacctaaaagattgtgtagtactttttatagaaaaagtgatttttgtgagaaactcttaaaagaaatccacttacaattatggagtaaatagacgttatttggttgagtttataggttgatactactttaaaaatatatgaaagaaaaaatcgcataagatcgttattctatcctatttttacgggaaatttgacattttatgcttaaaaaatacacatggtgtttaattatacc

SEQ ID NO: 303365 - DNA, 3183 bp, Cannabis indica
tatactcctaggattctcaccactcttcactcgttcaaagattaaaggtgcttgatcaaacgtccaaggactcccctcaataacccgttctatatcaacttcatggtaaaattgaaatagaaaaaggtttgagtcaagttctttcacatacagacctctccctggttgccaaagtgtagcaatcttgttctgcatcgcctgaaaatctatagcccgattagataaaaatcgtcctaccagaagctatcgatcgtcaatctctgccaatccatcagcccctgcttcaaaaataagcccctcctcatcatcatcatggattgagaaggccgcatattgttcctccatagatggccaagaaaatattccgctcccacacctcaggaaataatcaatcagcaaaataacaaaatccaaaaactaaacacccagaccgaagaacaaacaacaattatcatacatagcccaccatgtcatacgacaagaacttcgcctttcggttagttttttagggggtgcccttagtttgagggtaaagaaataaaaaaggaataaaatttattttaatcatttatttggttgcatattcaatgattgcaatgatatttttacttattttatatcatttttatgtcattcttaatcatacttctatttatatttttattttaatttttattctttgtgtataaaatatgaaaatagatattattattattattatgaagaagtgtataactattttatgaactatctaatcatcaaaataaaatatatattaatgttgacttagtccacacaatcatacctaaaaacaaccaaaaccttccatgaaatttctcaatcccccacccctaatacattctcctccattcattccaacaaacattcaagctcaaaatagaatcataattcaagtgtaattccacattctttaaatatttaataaaagctttacatccataccacaatcccacaaaaataaataataataattatactaaattggaagaaagatgtgggcttcaaccaagaacacttcaacagattttctcaaaattgtggtagtaactctcattctatggacgatacttgcatcagagaaagcaacaaccatggcgatggaggacccaacggaggcaccagctgaggcaccaacgcaaagtattaaagagaaagatgattacaaaaagtttgaaaaaaaatcaaagaaaaatgaatataaggtagcaatgcccctttatagggttaaagaaaagcccggtgtcctaattcctgggtctaaattccaagcatccactaccttcttttcaggagaacaaccataattttttaaaatataaaaatatgagaatgaaataataataataataaataataataataataatagtatagatgaacaaggttaatttttaaatgtaagaaagtttgagagttaattaatattggtgtggctttgtatgaatggatatatattgtgttttcttagataaataataatattcctactacattatggtaacatatattatttatatttatatttatattaaacatctatgagatatgtgttcttctcaccttgcaaactaagtccttacaattaatgtatacaaataattaagttgatagataatgttcaatccttatatgtataaaatattatcatcaaggccttaatttgtacatttagtgctaacataatatatattttatcttttatatatctatctatctaatattttacttttattatatgttaataatttttagtgtggtaacaaaatttcttgtgttttttaacgtaaaatattaactttagtaaaattataacatttgcatcattcttaaaaaaaaaaaaaaattagaaacaatcttcacaataaaaatgtatctatttatacataagtatcctcctataaaagatacatacattcacatatataaagagtaatagagttataagactaatattataaaccaaaagcatacaaaactcaaatataaaggctttcaattatgataaaaactatatgtatatatataaaaataaatattagacaaccattgtcgacctctattgggaaagtgagaaattgagaaactggtttgggtctatgccgtgcaaccatcaggataaattgttcacacgatcactgaagtttctagctttaatagctacccaagatgggttaataaatgcataatccttatccagtccactacgtttgagtaatcggctctgcaaatggctagtaaacaatatataagtaataacaaactctatttatacatattaagttaatttttaatcattatacctacaccaaagagatatcgatgaagccttgctcgtcttcaggtcgcaaaagtcaatgatgtttgacttcattatccaagtctcataatttttaactccgaacacattttttgaaattttgattttttcgtgatttctattttagccatccaaccgccatctatttaagtttccatgatagccttcttgttcaagtgggtgtattagtagagcattatgattgatgactttctcggtaaagacacaacaattggtgttttcataatcctctccatgtactatcaacctcttgagttttggttgtactagcacgtgcctcgttgcaactaagggatgttttttcatggagcgatcctccacgtacatcttgcaatttattttttacaagaaaaaaaatcaaaatattaattaaattcattgtagttattaataaataataaattaaattattaagtgaaatgctggtattggtggagtagattccctaacaggatgcgatgggggtggagcagatgcccccacagaagtcattgcgagtggagcagatgccccgacaaatagtgttggggtggtggtggagaataggccttgactattgttggttcgttggatgctcccccaacatctgtaccaagtgcatgagaagtaccaccggtggttctctgttgagaccttattgcttggaggacttcatttatctcttcttgttgttttctattttgtccttccactacaagaaatggaacatttgctagcacatttttcgtgctggcaaaagtttggtattgcacttgtaaaatggattttacttttgatgtgttggcaaaagaggttggcaaatcaacgttggtattagaactttt

SEQ ID NO: 303366 - DNA, 1368 bp, Cannabis indica
tccaccatccgatccgatccaattggatatgtaaaaataacatcgaatccgtttcgattacaattggatatccaatatttggcggtcggttctcattggattgaatcgatttatgcacacccctaattattaatgtaaataatatattttttttttttaataaagtaaggaaatatatattacattttttttttaattctttctttatagtctatacaaacacttcaatagtactcaattgaaagtcatatatataagagagacgcctttatagtctatacaagcactttcaatattatctttttatagaaaaatcaaaagaaactctaataactactcttgttaattattattaatatttatttcttagtgaaactatttctgttatgtttgcatgcatttataagatcggctaactatataatgaattaatgatgcatggggagtaggaacatgacttaaattatggagacagtgacttctgatcaaactctatcaatatcctatttaagataatattttatattcatatatataaattctttttacacatatatacttaacctgtacgcaaatgagtaactcagatcaaatatatatatatatatatatatgtcgtcttgtacgtattaattatatgcactgtactatatattatactacatcgacatcctatctactgattttttaaagtccaaatcatatccaaaatgaatttgtcgcacatagataattacgtagaaatataggatggatgtgtggctatgtcattatcatgtgatcacaacaaatagtatatattgtttaacgtggcaatcatggtataaatggtatttcatgagtgagcaattaataggagaaacacacaagtctatatctatattaataatacactgactaatcactatgacatgcattaatgattttgataattaaatgaccgaacacagttacgaagatgagatcaggaagatgaagcttgttgttgggtccatagtaataaattagcagtatatagctacgtgtatagggttccgctcagtgcctctgagaatatatagggcgaattaaattatattgaaaatgattgattcgaaccatgacattatatatataaccacttgaggctagctcaagtggccataggagggtgcgtgtgtgttggaggttctgggttcgagtctcaaattatgtaaggttgtaatatataaacgcttaaataaaaaaacaaaaaaataaaaaccatgacattatatactatatcatacacccaaatcaactaaactatgaatatttattgtttatagggtaaataccattttggatcctctgttttacaaaagttaccaattggaccctgtgttttgt

SEQ ID NO: 303367 - DNA, 4817 bp, Cannabis indica
tatttaatttcagcttttctcattatattggcaactattatattatgttaattgtaggacacagtaagagtgaccttaaatttatggattcccagctgctaattttgttattaatatatctcctttcccattataaatgtagagttgctttagctttgtgtgaagcatccattttctaacaagagttttaaatggttgcttttatgaatgttgcaactgttaaccctctttttaataccatctaatgtgacagggtgaatggtccagcatttaattggtgatgtcataaaatctatttgaatttaacattaaattgacaaattaaaacataaaatcaattgctacgtgggatggtattaaaagggtgggacaagaggtgagatctctagcataaattatagcaaaatgtacatttttctttaataattagtgatactatggatattttctcgttgatagtgctgtgtattaaaagatttctgtagccgctctttatttattccttttttcttcatttgaatagttacacattgtttcttcaacgttgccatggaaggagaagggcatgaacaatggatgagatattatcaatgtgatcaaataacccagttacagcagcttagatgaatttatgttttattttttaaataaatatttattttttcacagttttaatctccactttcaagtaaaatgtctacaattttacagatacaaatagtagtttaatacttattttttatgtacatgacatgagtgaaatctatatagtaatgcttgtgctcttatccacagaaacccttctatcaaagcttttgaagctattattcttagaagaagtcaagtcatcctactacaggaccgatgagaatcatctgagctactatctgagtgttctatcatgactctaggatgatcgatgtgaatgtcagttgctagtgctggaagattggcatgttgcaatagatactgaacaatccttctcatacttggcctgcaggcaggatggggatgagagcagagtaggccaagattgagcacaaggctaacttcttccgagttgtagttatccaatgtctgatcaacagccctggtaatgtctcctccacaatgttgttcccttacccaatccaccaatactatctcccctgcattcttataaggctcgattggcctccttccgcaagctacttccagcagcaatgtaccgtaactgtacacatctgtacttggggtggctctcccagttcttgttagttcaggagccatgtaccctagtgtgcccacaatgttggttgtatctggattgtgtccatgcgcatatgttcttgccaaaccaaaatctcctagctttgcattgaggccttcatcgatcagaatgttgctgggtttcagatctctgtgaaccaccatctcttggcactcttcatgcagatataacaatgcttgagctacatcattgaggattttgtatctttcctcccaggatagctttttctttggttttcattgtcgaacagaagcttgtcaaggcttccatttggtacatagtcatatacaaggaggagatcatcttgtcttcgacaccacccatgtaactgcacaagatttcgatgtctcagctttcccatgcttgttatttctgctacaaattctctaattccttgacgggaattgttagaaattcgctttacagctacttctcttcctgtactgggaaccacccccctatagacactcccaaatcctccagatcctataaagttcttctctctaaaacccctagtagcaaagtgaagctcagagtacttaaatctctgagctccatattcaatttcccaatcttctagaatctcatctgcactttttattctgcgtataatataagcaccagcaaagatgaccaaaataaaaagtgtaatgctagcaaaagttatgcctactttaaatccttttcgttggactacctcgttggaacttgatgacaaagttggcagctctgtcgggtccaaatcctgtgctctttccccgatcttaaagctccagccatggacattatgagcagcagagagtaaaccagtcgaagcagagaagccaatgtacatgtattcctccaacacctgtgaaagatcaatgggaaatgatataagaggccgtggtggcctccccataccaagaggagatattgaaacatttagcaactcctgcaggctgtcatagtcaatccaggcctgaagagagtcaccactcttgagaattattgtggtatatttgctgtcattaccatcatttgtattgtagtatgctgcaggcacagatatgttggacaccaaactggatatgtctatccccacatgattatcgttgatgtcctgtaaatcttgattctgaatggcatcaaattctatggcgatcatacgagtggaagattgagaattgctagtgacgttagggaggccaagatactggtttgcaaggcaacctttcatggggtatttagatgagagaacaaaagtgagaccgtggcctccgaaaccaggatacttgggaacaattgaaaagacaaaattggtgctgaagcttaaagcaacagatttgttgctgctgcctggtgtaaacttagtgaattgtaaaggagttgggtagaatgcatggccgaggagctttgacgtgtcatttgttatggccagtaacccgttagatctcacaacagaagctccatccaacttcagttttgcttgaaggaagccattgtacacaaaatttgtctcattttcaagtgatgctacaagtaggagacatgaaaagaagcttaatatttctaatgctatagcaggatttgtgaagctggccatggtttctattgctgatgaccataaccttcaaatggaaagttgggatatatatatatatatagatatttatatatagtattattggatttggaagcaactctcgcattgcctcaaagtacgtaataaataaatgaaaagaagcaaaaaggggaataccgatttacttgaagtatccagaagcaaattatagctgcattgtgcttacaaacgtgattgaaatcattgacaattggggtatattatactagcactaagggacatatgcaacaaaccaatgctttgagtttagcaatgaagagttttgcttattaaaaataatgccaattttgttaatgtaatggatttggaagaagagtattggagcatggcatcaatatcattttcatcttggagaagattaatgatgaatcagattatccaagacaatttaaagttataactttgaataatcagagcaagttgccaagtgtacctaaagatgagatgtaatgattgaatttgataatatttgttagtaattatattacaactatccaagctcaacgcttggttcgacaaataactatgaagtagaagtagcttccattccaatccctataaaacaattaacactgtatgtctatgtttttgactacagcttggctcttccatccaaaatggtatgagccaacttgtgtgtgtgatgtaagaaggtttgaaaagggtgcattcactgtcactgccttgtttatactactttgcgattttaaccatttgctataattggaaaaatgtggtgggacacttgtgctgcctcacaaggtatcacactatcaaatttgacaaaatgtatcatcgtgtcgtgtttgtgttatattttacgtgacttgtttttatattttgtataaggcgttttgatctgtttttaactggtgttcaattttctcaaccctaactcaactcgtaaaaaattgtgtcgtgttcatattgatccactttgacttattttgctattattgaagctgaagttgtagagaaaatgatagatttatattctattagaaaactcatatgtatttatgcatgtatagttttaatatatataaataaaattttaatatattttaatttttttaaaaaaattaaattaaattttttaacttaaaaattaaatcaataaatatatatttttacataaatatattattaaataataattttttattttgttttatttaaaaaattgtgtcaaattcgtgttaagttgattgtgtcgtgtttgatccgtttttattttgtgtcaaatcgtgttgacctgtttttaaattgcgtctaatttttctgatcctaactcgtaaaattcattttgtgttcatgtgtcgtgttaaaaattattttgctacccgtacctctaataaggggatgaaagtcaaaagtaaaatgcaaaagatctcctttcaaaaaataataaataataatggattattttacaaatttattattgcaatttattttttttttctaattttttttattagaatcaataacaattttaataaaatagttcaaatttttttagtgttttgtaaaatatataactgtatgataatatttaaaaatattatttataaattgcatttttttttgtaagggctcaattaagaattttttagtctattttttttttgtaattgtgtatgttgtaattatttaagacatcatgaagtttttaaaaattttaaaaaaaaaattaaacacgctaaaaataaacttcaacattctattaaacgcgcgactgttttatgagaaaattgtactctataccctttttatattgtcctattttatttttaccttcttttttaaaatctatcatttttacctcttttttaaacattgtaccaattttgcccctatcacttcaagatactctccatgtgattctcttatgtaaggatattttgggtacaatacatataaaaa

SEQ ID NO: 303368 - DNA, 1463 bp, Cannabis indica
ataaatactaatattttgaaccttataaaaactgggggctttaatagaaatctatgtttataaataaatttatttctaattctttattttgatgttcaaatgaattgtttatattgattcttatttaatgcttttcaagaattaattaactttaaattaaattagtaatttaggtggaacttggaaaaagaaaacctaaattagatctaattaatatgacttaaaatataggcaatgtgaatgaattgatatattttgatacttatgcgccaatagcacaaacaacttcaataaagaatttgttcattttgccttttatacataacctacatattgatcaaatggacgttaaaacaaaagttataaatggtgacctaaatggttgtcctacaaaataatgagcataatgtaaatatgtattagaacaagatcaaaagcaatgacgtgaaaagtttgatcatgtttttattttaaatgtctttagacataacaacaaagagaattgtttgagttcaaaaatattatccgcgtttttaaatatgtgacacgtggatattcaaatcaatccatttagtttaacgggctcattcactaggcccaaatggattgaccaccccactcatgagtagaactggacaaagtgtttgaatccgatagtggcttcctcgcgactaagtcggacagatggttttgtaaggattttgcacatttaatcagcaagaattcaaataggcgaaggtgaataccctcaggggtcatccaggaaaggtagtcgaagaggcgtatgggaatgaataagtgttcaagaaccatcctacatggcacactatagcaagaatcttgataaatctagcagcttgtcccttgtgtcagacctcggaaagacacacaacaaaaagaagatcacatttttaggccaacgcccactactctaacattctctcaacaaactgacgattcatgcccaactgtcgctattaatagtacattcacatacaaacgacaattgtctctacaccaggcctcaccaaatcgacccaaaagtcaatatttaccccaccagtgggcttattcaatatcactaaccctaatgggtcaggttagcccatcctattaaccaaaaatgcctataaataaggtattttccatgcatgtaaagagttacgaattttttgttacaaatgttggtcaaaaaacctgtatgataaaaagtagtaaatactcaatggataaaaatcttaataatattggctcatggactaaaattctttaacattccaaccacgtaaaatatctcatcttgtacatttataatcttattttcttcaacttaatcttcttttagtttggtttctaaaaaactcaataaatatcttggttgtgatagtcagtagtctcgtgatccgtagagagaaaatacgggtaagctatgcgatcccacatcacttgggggaggtcaagtg

SEQ ID NO: 303369 - DNA, 3251 bp, Cannabis indica
tagaaagtattcaaattatcttacattgaattccatatatgaagctcgctttgcaagccattgcgcatccatcatttggaaggctacacaaaaaaggtgatcaaatgccatttcatcttctttaagtagttccagaaaatgaattcccacttcagaagttggtgttcctatgacaacaaaaccacccagaagttatttgttagtcagactcattccctagcacattggcaagtccaatgagcccgttgaaacactactgtagttgaaagaaaaaaaaatccatatctttcaacagaaaatcgctttttcttttatacctgattgaagatctaacatctgtaccaacataaaacatatgttaattccagcaacagcaaagggatattcccactcagctctagttccatcctgtttatgcaacagcctttgaaatgattcctataatatgggagatcaaatgtcatattagattaattgaaccgttccaagctaacaacactacttaaaatagttttggtcctgaaaagatgcaattcttcctagttccaggatttgtcagttagaaatagacctggcctctgactttttatcattttgcaatccataatctgatagggatctctcaaaatctgagtcaagaacacccacatatacaccagaaatcttacttttattctcaaaccctagcctcaattagagaccaagtccaacataatacaagaatacaaagaaaaacagtagctaattcgagatagccaatctcccaaactcattattacagctactaatcacttatttatactgcttcactaactagcaactactgctattaacagaaacataataacctactaataaaactcctaacaaaacaaaaccaacaactactaacaataaaactaaaacaactaagtaaaataacttagtttagttcgtcatccctcttctcatataagtgaacctcattggagatctatcaatacttctccccaattttgaaccttgtcttcaaggttcaaatttggaaactgaacccttatggctgcaaaagactcacaagtggcttcagaatctggtaatccttgccatttgattaaaacttcaacttcctttgctgagttgttggttttgcttgcgtatcttacaccaataagtttgttgggctgaactattagctctcctaccggctggtccttaatcaatcctttcactttaatgtggttgggattagacaaacattccaaagagttgagggacaattacacactctctacatgtcacctcccccattgacacttcctctccgttctccaactcatcctcatgaacgatcataacattcagctccttctttttgcacacatgacaatagtggaacttctcatcacacctaaaacacagccctttatctttcttttcttggtattcaacagccgtcaactttttgtagccctcctttgggttagcccccaaaccttggcttgtgtttgtaacttcaatgactgctcaaccttggtattcaaactactcgcagcattcaaatccccaaaagaaccatgacttgaaatcttgaaagtcttggatgaagacattcctttgttccacaaggcaataccatttttctcttcaatcttttgtgctacttccataatattcagcaagcccaccggattaaacaactgtaattccccttcaatttcttctttcaatccattaacaaacacattaacaagagcatcgtctaaaattgtgttcaaaggtgctgcacatacctcaaattgtcgtctatattcagccactggcccctttgcataagagcaaacaatctttgttgtaaatttccctcctttaaaggacaaaaccactgtaaaagcaaagctttcaactccggccagctctgaataataactctatgatagagccaaagaaaccaagaaagggcttctccctcaaggcacaagacagcagcctctaatttttctttactagtgaggttatttagagaaaaatacctttcagccctcaaattccatgaatcagggtcaaaattgttgaacccgtgcatttctagccttctccaccgcttctctacaaaacccagccctctgactgccggtacgaccgtcgcgccaccatctgccagaaccctagccaccactgtacctcacgaaaaaaccctggagcgtttaaatttggtgcacaatggtgttctccacccatcgctggtagtgcgacgccgatcgtcgctctccctgctgcgttgccgctgcccgctaccgttgtcgttgtctgcgctgccaccctctgctagatctggttgagaacctccttcatagatctttgggattctctatactgcatttgcaaatccttgatagatttttccagatttggaatttttttggagttcttccctcatgaactccacttctttctccaaagactccactttcttaccagccattgtaggatctttgagatgctctgataccaatgatagcatctctcaaaatctcagtcaagaattcccacaaatacaccagaaatcttacatttatttctcaaaccctatcctcagttagagaccaagtccaacacaatacaagaatagaaagaataacagtaactaattcaagatagttaatctcccaagagtctaaaactcattaacacaactactaatcacttatttattctgctccactaactactgctacttacagaaacgtaacaacctacttgttagaatatatacattagtttccaatttcttcctagtttcatatttagtcaccgtagtcttgagtataaatacttgctattttattgaataaaatactatttatccaccattttctatgtggtatcagagccaccttagattagggttcgaaattcaaaattcaaaattttggctattaaaaacaattagggggtgattttagggtttcttttttggaaaccctatttggagtgtgtttaagttctcaccgcccacacaagaggactgcctagccgccagtcgacaaaaccccaaaatccaaccaccagaaaagccacgtgtgaggctcacgcgccgccactacccgcggagatcttccccacgcgtccacgagtgggggcgcgtgggaccatgaattcggctctgattcacttctattccttattcagcccatctctgtcctccttaaatctatctccggtggttcttctcattttgtggtttgatacttttgacttcttcgtatttg

SEQ ID NO: 303370 - DNA, 2261 bp, Cannabis indica
aaaaaaaatgtatagtttttttatagtgtaaatttttggtataataataaaattttttaattatttaagcatataaattcaaattaggcatcaatgatgtctagcatcatttataggcatcaataatatctagtgaattttctaaatataaaaaaaaacagagagaaaagcttgaatgcttgaattgttatttgaatttctgtaatgaaacaaggtacaagaggttacattatataaataattggaagaagtgagttagttaggaatgtaactaacttagctgactcaaaaatcaaccaactagtcgagcctagctttacacaacaattaactaacatatatatatatatatatgtaattaattgtaatattgtaatagcctctctcaaaatagagagtatatgttagatacacctattttggaaacaatgttgttaaaggatgagggtagtaaagccttttgtaaatatgttagctagattttgttgagattaaacatgaagaagtttgagggtgccttgttgaactttttctcggatgaagtggcagtctatctcaacgtgattggtgtgttcatggtagatagagttctcactgatgtgtattcctgcagtgtatcgcaaaatagatacgcaggattgttctgagagatgccaaagtctttgagaagagaaaggacacaagtgacttcagatgttgcgttagccatggctcgatattggcttcagttgaagagagtgaaacaacttgttgcattttttatttttaggaaacaagggattgtccaaggagtacataatagtcagagatggaatgtcttgtatcttaacaactctcccaatctgcatcaacaaagaaagacggttgcacattcgaaggagataagcttgtttctacataagctgacagacttggtgtggagtttgatgggaagaataagccttgtccaagagtgcgtttaaggtattgtagaatgcggtgagttgattgaagatgtggcactcgaggacaagtgagaagctggctgagatgattaacaacatatggtcaaatatatgagtttatcaatcaagcttctataagtttttgggtccgataatagtgtttctttgtccttatggagttttagattaggttccatgggagtggaggctggcttagctccaatgtaacttgtgtcactcactagttgcaaggtaaatgatctctgagaaacatagataccttgtttgataccaatttcaagaccacgatgaacctaagtgaaccaatatctttgaggtccattactctcattcaatctttcttgaagatcatgccacatatcaatggaaagatcgaaatacatgatgctttcagcaatttcaaaagaaacagaattgaattgacaagccaagacatgacgatattgttagaacaaattcaagaattgacatgaggattaccaactactggtcgaggaagggaaccatcgatgaatgtagatttgttctttactgcaagagccatgttgatctagcgcttccgtgattgatcattagcaccgttgaggacagtggaaaacaagaattaatccaggatggtttattgtgctgagaaaaaaaggacttgaaacatcttcatgagcaagacgatcaaggtcgtcgagtaggagcagcagattggggaacatcacctgctggtaaatctagagtaaagtgagcaggttcgaggataccattgtcgctctgagatctcaatcttcaactttgatgtcttcttatagcaacagatgaattgagaacaggagtggaagttgcatcaggattggactccgattgaggtttctcagttgtggataggagaacaccatcttgagagtgtgtaaatggtctcaccattgatgaagtggacaaggtttctgctaatatcatatgagaaaaactgagaagaagatagaaaagctttaatgcttgaattgttatttctgtaatgaaataaggtacaaggggtacaagtgaagtggttgacttagttaggaatgtaactaatttagctgactcaataaccaaccaactaaccgagcctataacgactttacaaagtaattgaatagcatatatatataactaaatgtaatattgtaatactaaaatttattaaactaaggtggcgtttggtaacactttttttaatcaattttctgtttttaaaagtgaaaaagtgaaaatattttttaaaaacatgttctataaaactgtttttacttttcaattttataa

SEQ ID NO: 303371 - DNA, 1807 bp, Cannabis indica
ttgtgtaagtacaatactaataatgaactttaataatcaatgttctgtggtacatattcactcctttcatgtgtatatccacagagagaggatgagaatgaagaagtcaattgagattggaaacaatcctaaaggagagcaacacaatgttgtgttttgttttcttatagcaagagagcattgcagctgtacttgtcataattgatcaatcttgatcaacatatataaatataaaaatatttatttaaatgactctctaattaattaattgggtatacatcaactaacaaaacttcaaaacccttatatactttccaaagaatttggtgaattaccacttttaaatactcaaaacagatcaccacaaatgagaagacctaccttccctacctaaaaaaaagcaaaaaatcatcttaagggtaccatcaaaaataccttttctactcagctttaagcaaattacatatttttatttttcaataataaaggagaagaaattgagaaagtaatttgggtaaaaactataaagctacttccctttgcaataaatataatcaaatatatgatcgtactactgatcagtaaaagcggttcctaaataatgttaccttttaaatggaccttgaccaaaaattatatatatcatctttaagtgtcatgatcagtactcagttcaaaaaaatatatatccaaaataatctgaaaatgaataatctagtgagccctttaagctttatgtaaaattaaaggtgacccgttcgtgaccatttgactattacaactgcaaaatcttcatctgaattatatatgagcatttttctatgtttttttaaagaaattttatcaaatattacaaggcacaaagctaaattaaatgagactagtcaagcaaacaaaataatcaattaattaaccctattacatcaaccaagaaaatgctagttgaacaagaacatgagtagttataacattattaatcctattacaatgtcagaaagatacataagaaaaagagttgatatttttctatgttttcaaataaaggttgacataagcatgtatttatagaaaatttcacaatatacttctttgaaataggtatgttgatgcacacccttatttgttttggtattttaaaaaatatttagtttatttttttatgattatacgctgtaattatttaagacatttagaaaaattttgaaaaatttaaaaaaatttcacaccgaaaacaagattcaaagagtttattgcacacataatttttttattttatatgcatatgaaatagacgatttaaacattaaaatttatattgtaaattattttgaatttttaagaattttgtaatatgttttaaataactataagaattataaaaataaaaaaattatagaccctgaaacaattagggttgcatcagtgcatttaatattttagtaggatgcattataaaagcatcctatatctatatatttattttaatttttcaacatattcaattctctttctcactaatacagacttgcattgcacacttaaattattgctaaccaattctttctttattaaaaataaatatatatatcaaaatttctaaccatttgaagtcagttgactttgaatagacatttcatgatatgtataaactagttagagcatcaccaaggaggcatcaaatttggtgatgcagtagaattagccctccaacgtaacatcaaattttacactaaattgctgtgtgtgctacagtgcacggcatatatgccgtgcactgttcacacggcatactttttttttttttttt

SEQ ID NO: 303372 - DNA, 1999 bp, Cannabis indica
agccattattccgtgggtataagggcccaatggaggcttgaagtggggacgttacaacctctaacctacaatccatagacattaaacatctaagagatccttcaaagtaaagttcttctatttccaatagtcgaacgaggaaagcactcctgacaatggtaagtttgtctttaatacattgtactaaattaaatagtgcacttaagttgatctcataaaatagtaaatgcaccatggcgcttatgtatttgacttatcaataagatattaaattttcactttacgtgtggcactcattactctccacatgtccattcaatttgttcactatatttgtcaatcaaaattatcaaagtgaacgaagcgacaaaatgaaaaaaagtgcctaatgatactgaatgaccacacaagagcaaaagaaaaaaaaataggaagaagaaaaaagtatgactatgatagggatgactctcttaaaggagcacaaatattttagcattcaaacacgctctaagctccatgaatgtagtagaaggggttgagtgacacttaagaagcaacaagatcccctaattaaatattatagcatgaaaggagttgagcgctacctaaggggcataagcttccctaataaaatcttaaatcctaaaaaaggtgagcactgcctaagcaactgaaatctcccttacatccaataagtaaccaagaagaggtcgagagagcttaagaggctaacactccccccacgtgatatgtacccaccatgaaaatgagtagacctagagccaaaactctctcataaagggtcatagcagaaaaacctcaaggcataagcgcctaaaggggcagacacagaaccgaacgatggcggaaagctcatcaaacttagtctacaagaacactcaaaagaattcttatagactaggaggaaagtattaaccacaaaaattaacaaggttaaccttcgagattactcaacgtgaattcaagagattagtgggactagcttccgaaggtagtcacgagtgacccactaggcatgcatgctcaagtagcctctcaacatgcacccactcgacatgcatctccagcagccacttggcatgcatctccagcagccactcggtatgcatgcctagcagtcactcgacatgcatgctgcaacatgcactcatcatgcacccattaggcatccaacaaccactcagaatgcatgctcaagcagccactcgacttgacatgtacaccatcaagccactcggcatgcatgctccaagagccactcaacatgtacaccatcatgcaacttggcatgcatgctctagcagtcactcaacatgctcaccatcaggccactgagtatgcacaccatcagactactcatcatgcattctccatcaagcttctcatcatgcattctccaacatgctacttgacatgcatgctctagcatacctattcgaaaaaaacaccatgcaaccaacgcatggagaatcttcccaagtgttggtaggaaatttgttggaagaagaaacaaaaggacaaggcaagcacacagatgagtacatattaaggtacgaccacaccacctataacacttgagcgcggggagagaacgagtagtagaggcgtctcgcctgcaagctctgatgtcttgacaagaggtacactatagccactactcctgcccctgggaccacttgacacccaataatagtacaagtcgcgaggccacctactacagcctgcaatgtccttctcctaatatttggggaccataattatttttttttctccattaaagctctaaacttattcttagttttgagttttactttcatttctctttaagtctttgattttttagtcatagttttgttgacgagttctaactgtcaatagtttggaagttggatttgttgggttttgtgccctaaataaaacccatttcaataaaatcagatttacttattaataaagatcagaaataacattttatgtt

SEQ ID NO: 303373 - DNA, 1474 bp, Cannabis indica
acatatattttcgttttttttttttttcattagaaacttacgtaattttttttacaaattaataacaacattactttttttttattcctttttttaattttacaaatgatcacaaaataaaatattacttattactgaaaaatgcatagataaacacatacagatatttgtcactatttaatttttattactaattaataacagtgacataattaagtatatatgatgatactgtttcagtaattttaatgataaaacttgttattatgtgagttagatattttgtagtgtgtataacattattataatttttgaatttaagaacagttacctaatatagattaattaataataataatgcagtgtgattggagggattataataacaatagggctatattcggtggtgtggggcaaaaacaaagattattccaagtcacagcagggaagagaggtattgatgatatcgccctcctcagtagtacaagtagtaactcataatgaacagaagctcccactgagtaataatgttgggacaacagttgacattgctgccaacaagagcgaccaacaaactcctacaactcatcatcaaccaaattagtatataatatatatttatagatattccaccaatattagtgcgcaatcttcatcataattatataatgtatatactaagtgctaccttagtcattatatatataaatatatatatatatatatatattctatgtaatccatggcccaccgatctatctctctccattttctttttccaacaaaataaatcggttatgtgataactttttctagctagagagcgacttgtgcaacatatactgctactgctagctagctagtatgatattatttgctagtttctgagttgtatcttcaatctccatattcaaccaattatagttttcatgaaatctagaaaaggaaaaacgttttttttaaatattttaattcagcaaaagaatcaatataattaaataatcttttttttaataaatagcattttgtgataaacttatttggaataatataaaataaataagaaaaaaaaaggaaaaaaaaaataaagaaaaactaaataagaatttatcattactttattttaatagaatgatcctctatttatacaaataagtgagtcattgattaggaaattaataaggagagcaatagtgattacataaaccttgccagaaaatttagtaggacaaaaattcggtcaaaagaaaaagagtgcattatgaattagctctctcttatttagatatttgtagagatcttcttattgacgaatttcaatattgtgaatcatcttcttgaatattgatgttagtaatgattttgtgaataagtctgcaaaattgacacttgattgaatatattggacaccaaaatacattctcttgaatattaagaagaatttggtgaaatgtgttttaattctatctgtttc

SEQ ID NO: 303374 - DNA, 1836 bp, Cannabis indica
gtggtggttggcggagagggtttagggtttctggttggttgatcgaatgaggaagacgaagggctgggctagggttataaatcctttttatgtcggttatttggaaataatcgacgttataagggcacactctatagcgtcagttatttcctaataaccggcgccataagtggcgtaaaattcccgtctaaaaaatttcaaccctatgtcgtcggttatttattattatgctgaaaaaatgcctctaaaggcttgttttgtagtagtgactccagaaaaacacaaaaatcatggctccaccttaactctagatgaacacaaaacccatggctccacctcgagtctagacgaatgaaacccacagctcatggctccaaaccccgacaatcgacgaaaccaccgctccacctcgactctagacgaacaaaacccacgactcatgactctagaccccgacgctcgacgaaaccacctcaggactctagacgaacaaaactaataaatggtttactcattttctttttcttttttttttattttattcttgccatcatctctttttttaatttattttttcctcttttacaggtttggatttgatataaattgtattttaacttttattttaagatctattgtgtttatatgttctttctaggttggttatgtagtttgtttcagatctgaatggtttgatgtggtggtggcagttgtggtggtgtagttgttcaatttttttaaatattccaattagcgtcagttcaaaaccaaagaaaaaaaatattactatttatgtctatggctatagcatcagttacaccaactaataccaaatatttatatgtcacttaaaaatcaaagcaaatagctttttttgtagtatatataaatgcttcttattttagggttgcacatcgggtagatttttcgtgtttttggtgtgtgatatatactgaacctgcccgttttgattgggttcgggtttagatgctttgggttaaggtgggacaggctcccgtagacttgaagtcgaattcgagttaggctgggcaaaccaaaaaatattttttcggcaatttcatgaaaataaaaatgcgtgagaggaacactgatcactcaatgcttgtataatttttgtttttttgaaaagtaaatgaaaaattttattaatataaaaattgaacatagttcattgagcatgaagacatgaattaatagaaattaactgccaaattgttttacaaatataagtagaaaaaccctcacaacacctttaattaaaagttcagtaagtcatagcaaagaagaatcaaaagaatgcaaaaagtgttagatttccaacccgaatgaacccatacgaatcaaacatgtcaatgactatctaccaaagatcttttcataaaaattgataacatcattattcaaattagaataaaagtaagaagactaattatcacaactacaaaaaaccttttttatgtctctttttgtagtccaacaaaaatagtgttggacattaaaattttttaagtaaatttcaagtccaacaataatggactagaaaaatttttgtaccatgtccatcaatattagactaaaaaaactagaaagacgttaaatgtctaaaaatttaattaaatatgtatttttaataatttttgggttaaattttgaataaatttttgtccaaccagttatgctggacgtgacttaacataaaaaagacatatagaaattaaatgcctatatctaactattgatttttttattttttaaaaaactagcaatagggtatgacaagtacccactaataaagtatcaactctctctctctct

SEQ ID NO: 303375 - DNA, 1403 bp, Cannabis indica
atttaagatacaaattgatcaaatgacacctagaagataattaattaagctaaattaaaagataaaacaaagaaaaagaaaccttcaaattggcgtttttttttttttatcagcggatcaaatgatcaaaaacacatagacgaaaaaggtcaaaaggcagcttgaataaaagtctagatatgtcaaagttatgcagttcgccatgcaagacttttaacaatatattgttacatacttaactttgacttgcttttatttcttggtctctgttaattgtgtgcttctcttaattattaatttctagtactgactatgaaaatttcaaaagaatgtttaaatatgaatccaaactatatacacatataatcatgcaaatagcatagacgacagtttcaattcacttttacaacttcgttacatattagtacatgtacctaattttcatatgacattttcaagatttaattcttttcctcaccatggtctctttaactaacttttttcttatccatctgtgtaagaaacttttgccaagaaaaatacattttcccactgcattgtacgtgcagaccgggaccacacaatttgtaaaagttagccatttaattgtatatgcattggtatatctttaacactacaatagaattcgatatatcatcaatatataattacaattaaacgagcacatgcaactactaattaatttgtaaaaaaatgatatattattattatgaaggaaaatattattatttggtgatgatttgaaaatcacaaacgatcgattactattattattagtatgttaattagctcatttgagaatttgtacaaaatttattaaattacttgttactacaagtatatattaatttcattaaagtttatttttggggccaattatttccatacctcgtgttttaaaaatataatgataatatgtccttatgaaaaccaaattaatataaaaaatgataatgacattttagtttagtcgtcgcaagcattcccatcagcttaatttactctctattcttcaaaatactagctactgcttgctaggaatctaatatcaaaacacaatgttaaaaccatcatgtataactatgtacaattaattttctcactaaccaacaaattactataacatcatgatatataatatattgaatataggttcacgtgcatggatttttcatacctccatatgtagattcgaggaggcaaggctggaccggcatttgaggaactctctaaaaagttgtttatatatattatgattttgggaccacatgtcctaattgattcattttggatggatataattcggaaccacctacaatgtgattggtaaatattattttaaactttgtgctttataaaaaaaagagtaatttgcgacaaaa

SEQ ID NO: 303376 - DNA, 2300 bp, Cannabis indica
ctaaactagtagggtgctacaatagatataaatctagatcctggtaaaataacttccaacaattataacaatcttcacgtgataaaaatcaaaatcatgccctaacatgaaagatgccatgagagcttaaacattgagtttgaaaactcaagcttgactctctcctcaacaacaattgcaaaactatcaaaagaacatccaaaatacttctattctatcctagaaagaaaaccaaaacccttcttacatcacagtagctatagaatgaaagtccaaccactaaaacctatagttttcatggaaaacaaagaagaaaagctagagattttaccttaagccttttccccttcaagattggattaaaaagaatttttaaggcttattgtggagagatgatcaaaggaagctcatattcttgttggtttttcttttgggtcgtgagaaagaaagggttttgctttttgtttgtttgacttttcttaccttatcatctaatttaaaacatctaacaccttctaaaatcaaaagaaggaaaaaaagagaaaaagaaataaaataaattatttaattaagaaaaattaattattttaccttttttagccctttggaaaattctaaccctaaggcattttagtcaaccctgaataccctaaaataccccagtaagtctaaaatcaatttatcttaataatctcactaagattactaactaaaaccattatgacatttttagcttccgatcgagtctctaaggttgccaaacttgaaaatatttttattacaaaaataacatatatatatccacgtattctaataaaatttctgtaattaataaattacacttatttatccacttatggtaaaatttcttaattcacactgaaagagattagtaggatcataatcctactcattgtaccctaattaacccataattatataataagtcgtaaggtttttcgggatattacaagtacttagcacccaagtagacgtatagcttggtgcgctgggttctgcttatgtgattttgactccgtctcgagcatctgactattttttcttagtaaacgagagctacaacttgtgacaagtcaaatccacactttgatattttaccttttcagaaaagtggaatatcgacaaattagctgcaaattggcaagtttcaagtctacccgattttgcagaaaagtgacatatctgagaactggtgaacgacttcaccagatttaagaaattaactaaattttctcaatatatcgataaggcataaaaataatacaagtttggcacgttttcccactcatacaatgtccatattgacattaaaatatcaacctgggcgcatcggttgttgaactacctttagtaaaacgatcataattcactcaatattgatccgattaacgcgattctagttgcctttgaaagctcctttcaagatatttaagacatgtctcacactcattctataattttgaagattttgagtagaaattttgtcctcaatacagtgcaaattattaccgcaaattgcccaaaaaccatccaacgaacacgattcgagctccgaaaaaacgattatcatctaaagtaaattttagctattagatcatcatcaatggtcaagattagcttagaataaattttttatatttttgtattattttattaatattttaatggacttccttgcctataaaaggagagctacactagctcttttttcacattcaaaaaagtttccataaggttagagcatctctctctagttttttttctatagaaatctgagctcttgccttaaccgattctcttgtaattgtcgtgagaaataaaactagaagtagatgtagctctattactattacgatacgggaagtgaattactataatttatatgtgtctctcttattaattacttaactaattatattttatttcgtcaatgtagcgagcgggtgttagcagttttctatgtcaacactatgttttaattttacactttatcattttgttttcaatttcattaagaagataaaatttttagtggtatttattttactattaaattgatcaactaccaacttacgtgtattaccacatcatattttaaatttaaagtaaaaatgaagtaaattgtaagaaaaaagactgcattactataaatgttatattttatgaaatattttaaatcagcagtatattttttaggagccatcatttggtgttgtaatctcatagttatacaacaaaaataataattattctaatttattatatatatatatggggtt

SEQ ID NO: 303377 - DNA, 2569 bp, Cannabis indica
catagtgtgtaagactgtgaagaattcaaacaactggaggagtgtcgagctcagatgttgattatactctgcgacagaaaggaacaaggataatagatctgagcggaaggagtcatttaattctgctgcaaccaatgtaaagtttctcatactttatatgtgtttaagtttcattattttagagattcatatttaggatgttaaaaacatactttttagtaaatctaggtcctggtaaaatttattccaacagggtgcatgtcgagtgacttttaaggggttcatgccaagtgatcacccgagaagttcttgatgagcgacttctcgagaagttctttttgggtgccttaaggatggtccaaggcttcttcgtcaagtgggtcttactcatcttgcaccccttgcatgtttagagcataactcccttaatattaacccaatttgggcaattcaagttgctatagaaagctgagaaatagatctacaaagttgagatgtccttggctgagtgacatttcattgcctttgctgagtgacctctcaatgcccttcccaagtgactttgtcactctcatggctaacttttttcgctctcaagggagagtgacattgagtcattcttgcgccgagtgatttttgcaatgtcatctctcatgccttggtcagctaatctcggaaattacaagcactaattttttaggttaacaggtcgcacggtaggtggagtggcaattggtttcaaaagattatgccatttagaattggcacctttagaactcgtcagacccttggaagactttgtaatttttgcctggacggttggaggtagatttttggaggacttcttggctagagagggagagtcaaaaacgtctatggctgcgaccacagagctcctttcagtatctaggtggggcatctgagagctcgacgcaattctcactagaagggtatcttccaacgtagcaggaaatttctaactaaagctatcactaaaattcctcttcaatacgcgcttcaacctctctgacatagctgtaaaaaataaaaacacttgttaaatatagacaagtaaaaatagaagcaaaattatgttaaataatggctaccctagacttcgaaaggggcaccatcccaaataagtagagatggggcatcctcatcagaagaatctctaccatcttccaccaccacgacctttccctttcctattactagggttgcaagacaagtagccaccctgaggtcatctctaatttggataggtcgttcaatcggctcctgatgctccacaagatccttcttcttcttcttcttcttcttcttcttcttcttcctcttcttcttcttctttggaatcttcaactcgatggaagtcttttggctgcttggtcagactcttgtacctctttggacgagtaaagcccatacttgaggaggtttatagttatagtcaagagggagatattctgagcacacgctgagagttgaagaatttcatgtgccctcgacctcaaccccaaagtaaaagggggtggaaataaggtggatccagctcaaaagaaagatggtcagcatccatatccttaacaatataataatcttcaaagaagcgtccaatctttaaaaccttcttgtgcgtggttcttcttagccattgatattcattctgggaaaattagaagtaccctgaccttttctacttcggatatgacttcaagtcaaaaagtcagttggtgttatgggtggaaggctgaccccatccctgtttggcgtacaacacgaacaatgtagccaaatatttgatgcccttaggattaaattgggtcgagcagatcttgtaatagtttgcgatcttcctaatgtacggatgcatgggcaagattgcaccttttatggcatggggtccagaccatgcacaaaatccttctccaaagttggtagccagctgcctaggggtaggtaagaaagcctcaaccccaccaaggacacccttgtcatagagatttttcagtctcttgtacatgaccgtagaaggaggggagacccactgaacacatttctgcactttagtactgaagggatgggcctcctcatacttttcttcaacatagtcttggtctgtaaccaagacatctttgagctcagaaacaggctcttcatcctcattgtatatatcaaaaggaataacctaaattccttccttttcttcttcttttcctttagcataaggagaattagcggggcggacctcgccctacacctcaatttctaagacttcaacatctccggcagtaacttcagtatcatccctaggtggtctagcttagtccacctcgaccatcatgaatagtcagggaaaatgagcatcagtatccaaagttttcctcgttgtttgtttagttttcaccatcagtccatgtttagatgataattttgactcaaaagtattcctcgcaacggtaacaacaattttctctagtgcagtgtgttttttgaaggctttggtcagccttcaagcagtatgtcaattgttgggttttttaccctaaataaaagccatttcaat

SEQ ID NO: 303378 - DNA, 1724 bp, Cannabis indica
acttaatggctgagtggaccttaggtgaaagtctaagttaagacgagccgaacgtatttttggccaaaacacaagccgtaacgaaatctgttacttacttgtaagtgccggctttaatatggatgcgaatccaagaattgttatcttctggtacagaatcaatggcttgttgcacagtggtgaagtctcctttgcctgacttgtcaactgttatggttttcattgtaacttctttagtagtactatagtgagctggtgatgaagtagtagtaccacttaagaagaagaagatgagtattaagaaaaatatgaagttgtcattattcaacttcatcttaattatcatatacacacctgtattttgtatttgataatagaaatatgaattattaatcttgatttaaaaaaactttgccagattattactgtttgtttgtatgtattgtttgattatatatataggcagaagtttttgtttttgtgataattaataaatataaattaaggaaaatatatgttagggccatataattaatgatttctttctttttaaagattattagtacttatcagcaaaaaatcctaaattcctaatttgtaatcttgaaaatttttgcattgatatttaaatgctaggctagctggattttatgtaatttataaggaagaatattaataacattttggtaattattgtattgaattggtaactatgtggatttcttacatttttttttcagaaaaatacatctgttttttttttattaaaggaaacttattaataataaatatataatatcactatttggatttataaatgcaattactaaatataaatgttgagtgttactaaacgggttaattattaatgaacatgttacggcttcatgtcaaaaattagtcgcgacttgtatctcgagatgtttattgtcgggtgataagtgttatattgtcaaacacgaaacataattgttaaatcaaaattatttaactaataccaaaactaattcataattagctaatataaaccatatttattaaaacataaaaacgtaataaaacataaccgatctaatagatacaaaaatatataaaataaccaacaatctaaaaactaaatattgagcataaatactttgtattccgattgaagccatttctcaaacaaaatgtgggactaatattgggaggactacaaactacttcttagtaatttacagtccttctgactagttccacaataaattgagagatggttcgttctcgaaatatagtattgtacactcgatattaaattaaatttgttgcatgctttaagttgggcggggttgctgttgtagccatccatcttgattaatgaatttatttatgtttatcaattgtttcctttcatgaagagataatttcttcaaccaatgcactcgtttggattgatttgatccaggtccaaaacatccctcctccacaaaagttatggttttcctatagatttttaattaatgtttagtatactatatattataaatttagaataatgatgtataagcatagataaatcacaaataaatataatatatgtttatataacaagtggtgagactcatctcacataaaatagggtactaattaattttacaataaacctctctaaaataagtacactgatgcatctctatttatttcagcatttagaaaaaaaaaattaatctaatttttttatagtc

SEQ ID NO: 303379 - DNA, 6315 bp, Cannabis indica
aaattttataatcttttaatcaaaataattttaacttctctaaaaattatgttttcttttactgtttaataaacatatttttatcacatgtttttttaaaaatcttttaatttttctaaaaaattgtgccaagtgccaactgccccttaaaagatatttctttatgtgattttttccttatattataggtatggtagtttgtttttcaaaattctttttctaaatctataaaatatctaattttaaattatacataaataaataaccgcacattaattttaaattcagttaaatgtttacattaattttatatttacattatattaattttaaaatattttttagatggaacgccattaatttttaaaaatttgttagttatctttttatttatttattaaacgatgaaaaaatatcagtagatattaatccctaatataggcttaagcaaaaacagaatatcatttatttaaaatattggaaaataaaattaaaatttggtaagactataaataataatatagacttacaaaacctaaataaaatttccaccgtaacttactttctattttttctccgtaactgtcaatcgctattgctcggaaaggaacacactcactctttctctctctcctaaaaccctaattctctcgcattctctctcctcgtcctcgcgactgagttgaaaccctcgccatgatcactggctactacttctacctctagctctattattgctctcaagatctttgattttgctggattgtgtcagtgactgatttggtgccaatacaacaatccgttatttcggttgagaagaaaagagaggattttcggttggttggttggtgagatcgtaggaggaatggtggtggcggagaatgacggtggggatgatggaagggacctcaatggtgggcccaagtccccgtggaagactccggcggcgcttgacgctaaggcggctgcggatatgcctgtgatggggcctgcggagtcttggcctactcttactgctgctcaactgactaagagcaatcctgatttggctaaaccgccctctataccggctgcagaggcaacgacaactggtcccccttctaatgcagtggcaccgccgccccaatctccagttactgtgcaggtttggatgctgataaccaatttgtttcgattttaatacgagtcattgtatttgtctcattttgtaaaacgttggatagtttgttatgattatatatgctgagaagtattaacttatacatttgtttttttaaaggaggaacttggatatcgatctaatttgtagggtttttgttttcaaagagcttcaccatatgggttgttgatctagtaataatacgttggaggaagatagtattttgttgatgtcgctatttaatgggcttagttgtgttgggtctttattatttaaatactttcgttgatttaaaagcttatccttgaatatttgtctcctaaagctaggaaattggtatctatgtagtgggattcaatatttttcagaattaatttcttgcgcagtatcactataacattctgtttcgctataagttacttttttatcattattgtcatttttaaaatttttcttaaatgaactttgagagaggtctggctatgatttttgagccgacagataacgtggttgatgtgaacttgtaatgcttaagctgtgtggtttgattttgtggagtttcaggatacactacattcttgctctttgtcttatgatgtgtattattttttaatttagtttaagtgttataatataggtgtcatgctgtatcattcttgtttttaacaaaacatcaaatggaaggtgagagatctttgtatctccaccattttatttgttgtaattaaatataatatatgatcttacgcctaggaaacattaacaaaactagctgttgtttacatttttgtttggtcatccagggatcagttgggcatcaaaagacttatggctcaggaaatgttaatccttcacacaagcatccatcacgacatctaagatcagggtctaagcgtaatccgcacggctctggttctgttcctgttcctgttccattctttcacccgcttcaacctgtagctccgcccgtaattcattctatgggacctccacctcctatggcagtttctgcgtatccataccagccattctctggacctgttcaaaatgttgaaactcatttgggaaaatctggatctgagacaccagttcaagcatttatgacaccagctcagcctctccctctcccgctcccacgaggggaccaaaatgtttaccctgcccacttttccaatagaagacccaatgcacaagaatctgtcagccattggaatcagaattggcatcatcaacgagcatttagggacccccccattcaaatgcaacagggtattgggcctagacctttcgctggacctcattattttcctgcgggtcctgggttcatggtaccaagtttccagggtaattacatcaattaattgtgtgactttttaggataatgttatttttcatcatccaactgagtttttttgtttgtgttctcactcaccagaattttcttgctacatatacaaaattaatatatgcatttgtatgccatattcatcgttttcgttagcttttaaatataataatctacaactggcttgcattttttgcgcaggacctggaccaatgtactatgtatcagctggacaccaaactgctactaggggtcctccatatatggttccataccctctcagccctggtgctccaatggtgtccccgaagacattggatttaaaaagtgatttagtgaaacaaattgaatactatttcaggtaagagagctaatgtgaatagaaaaatgcatcattctatttgttgctttgtgtgttcatgcgtgcgattgcagacatttacttttatttattctgtttcgtacaagagcattgatagccactgacttattaattttcatttggcagtgatgagaatttgcgaaatgaccgttatttaatttctgtaatggatgaccaaggactggttccaatatccctcatcgcagaattcaaacgtgtaagttcagacttaatagataaataattcatatggttgatgcttcaatgatttcatgattttctgtataattatttatttatctgagagcagtaatgttaagacttatttgggaaaatatttctgtttgatacaggttaagaaaatgaccacagatatctcatttattcttgatgcgctgcaaggctcagttactgtagaagtgcaggttattttccttaagctctatctgttatttcattgaactttattcctgctcaacttttcatattcaaaagcattagtgtttggtgcaatcttaaagttcagtgaaatttttgatatgaagccttcttagagttatcactaatttattttctagagtttcctgttttagcaagtccctagaggtctctttttctcctaactaatgtatattttaatttggagttttgtgttatgtacttttagggaaacaagatacggaggcgtgatgggtgggaaaaatggatcccagctcaggcagattccaatgtgacatcaaaacccgagactccctcaggccagctttcagagaagtctgtttttaacaatgatggacatggtgatggtaaaagggaggcttctgaagaaaatgtcgacccggcaaaaaatgatgataaattgactgaacagtttcctttaaacaacaaggctcaggaaagtaatagtttttccattaatggtgaatccccttcaggcggatgtggcgactcaattgggaaatcaaatgttccatccaacagcaagtgctcagatcttggcagcaatatttcaacttgcacagatcactcgcaaggtaccaaaccttctaaatgtgatgaaccttgtactgagggctctcaaatgtcatctgaggtggctattaagaatcatgatgacatatccaatgattttgccaatacgtttatgctcgacgaagaactggagcttgagcataaagtaacaaagaatgatggtctttcatcagctagaaggtacaggtagtttctctgcttgctgctgcacttgtttttatgttttggcaacacattatttagggatgaaagaaattggtaagggtagggaactggcagatccagttcttacttaggctgccctccttatttatttatttactttttttttttcgttttagccttttctgtataaaagttcactataatgcacctgttgaattttttttgttttattttacatgtaaatttttatactttggtcattatttgtaattttatagtttggcagttgccccacctgaatttttttaaaaaatgtgtaatttctttcttcattttagccatttctatataaaactttgctataatgcacatattgaaacttcttatatttatttttcatgtaatattttactttggtcattatttgtacattactacatttacaaatatattatatttctaataaaattttcatatataaattttgtaagtgcatataattgtacttaacatacatgttttttaaatctttttccggtgctcatttttttttgggtctgctactcttcaaaaagtaaaagagaaaaaatgtggacgaataatagaaagcattcttttctagagtttgatagagggagaaaaagttgatttaaagttactgttttccccatacagcattactttaaatctccctgatttttcaaaacccttatcaatttgagaagttttccattcccttttcttaatttttggaggatttaactttatgttgcatcattccctttttctccttttgatactaagattgtataaaagaggagaataattactagagattgcaaggtatttttcatctaaagatacacagaatcgtcttaaattgaaaaagaaaagggattttaattttttttttttttaaatcccaactggcgaccaatataatttttcccaaaatttgtgaacaatccaattttacgtaaatcctagtttccctaccaaagagccagtaagttgccttattagccatgatccctagtttctgtttgcttgcttacctacatctgtgacaaaacccattgcactccaaattctgtcagaaacaaagactacattttggttgataaagataatgtagaaatagagaatcccccattccaatttttccttccgcatttttgtatcttcttcacaatctcttccattttttttccctttctcttcctttctgacctttaacaaacattttagtattttgcatccaagcatttagtatttttttcctacttcatgtggaagtatttaaatgtgtacagttcctcatttaagggatagttcatctgtagtgtgcccttcctaatgcctccatccattttaattttgaatgaccttgttgaccagtagaattgacgatgaagatgaagaggtgatagttaatgatcaagatgtccaaagactagtcatcgtcactcaggtacgagctggcatcaagtaaaatagctataccttttttaaggttctgtaatgtatagcgagtacgatgccatgacatttacttattttgattttagaatctacagtaattatcgtttactatttagcttaagttcttggacagggttgtgtatgttttacaaaatgttcaattgtcctgtaatacattgtgttaataacttctttacctcctgaagcgtggagactattggttgtccttgcgtttcgctctcaaacaaaatataattattggctttttcttttttcctttggagtcactcaaactaccctttcatttagctttctctttttctttataaaacactaatttttgtagtgctttactacaatggtaatatgttttattagattaatcatgtgttttacaatgtatgattccaccccttgtatcttgtgattactgtccctgagtttggttgttgagcaagtcatgtttgtgtgagtttttctggaatttagattatcaatgctaattaacatgctctttgtctttaattgctttgtcaaatggattattgtggccaattttttttatttaactattttgacacttcaaatccaagaggtcattggttcaaattttccaaggaaaagaataagaaccctattctacttcaggagtaacgttactaaataattagtggctctattgtcactttttatttttgctttctttctctaacctgtcctttttttaaagggtaaataccattttggacc

SEQ ID NO: 303380 - DNA, 3810 bp, Cannabis indica
ttaataaaagtgatatttttcaattaccccaattttaattgtacattcttttaagatatgcttgaaatatatatataggataatttattattcatattacaaagaactatatatacatcattttcatatagttaggattggaatactcttgcatttaacataactaagaagtgacattattgtaataaaacatattattgagccaaatgtaatatacttgacatattgttggacaagcacttttgtgtaaaatgctaaaaacataaaattacatttacattttacaccataaatttggcactatgctttaaactaaaaacaattgttgaaaggaaatgcctcaaagttctttcttaatacaatttctccatttatttttgaccatttcattatgcttttaatgacaatttccatgcaccacaaataaagaaaaaaaaaggcccataatgctagactagtcacaataacaccacaagttttggtagttcaacctaaaatgtgtgctaaagaaagagcccttggaatggggaccatagagctttttaatttgacagttgaaacttgaaactattacaacacaagtaaatataacaaatggcttgaaataaaattatcaattgcataaacttcctgagaaattgacaatataaaaagccagcctcaacaataaattaacaaaacctattctcaagtgagcatggttgattgatctacaaaaatttccaataaacttgaattgatcatcaaggcttgaaggcagagaaagccaccacagagttgtggcccccgaacccgaatgaatttgagatggctgggaaaattcacagataaaataatttcagtgagtaaaaacttccaataccattgtcataaaagcgaaattcaggtaaattttaaggttaagtagagccataccaacattaacctcgtgttgttgctttgtgtttgcaacggtgtcaaaatcgaccgagggctccgggttctgcattttttttcaatatagagcatgttatccatagtaattggaataaagatttaagcttgtttcttttgagaactgattgaaaatatatgagcaggcaaactctaatcgaaaatgcatcacatacaaattggtttatactgggatgcaaccatccgctgttaatggctttcacggtagcgatagcttccaaacctccagcagcaccaagacagtgtcctatcatagactgcaacaaattgaagagaaaaaagtaaactttattcagaaaatcgaaaattacgtagacgtgaacataaatacatatgtcaatattgatataaatatatgtacagaacgagcaagagagattgccttagttgcattgattttgattcctgaagtatccttgaaaaccttcttgatagcatttatctcagccaagtcaccagcaagagtagaagtagcatgtgcattgatgtagttaacctaagaaggccatcaactagtttaattccacaaagcacaatccagatataacgaaaacgaacagctaagaggatattgtgtaattctagctacagaatatcatgtatagaagaaatagcaataacatcttcctcataaacatagtagcacacttgcaagcaatcgaaagaattattccatatacagaaaaatgaatccatactccaatggaaattaatgaattgtagcatttcgggacagcaacaagtaataataagtacagtaaatgaaacaaggtaaaattaaaatgcaaacaaatcacgaaatacactggatcaataaccattgaataaaatgaatggtaagacaaacatcgatgatgatgatgatgatacctcttcaggtgacacaccagcatcttctaggctactcaatatacatgaagacacacccaacccatcagctcttgggtcagtcatatgataagcatcacagttaacggcacctcccaagtactctgcaataattggtgcacctcgtttcattgcgtgctccaagctctccattacctaatcataatttgaaatggaacacacatattatcaacattatcagaccattgttataaataattttgatttaaaaccacaattcactaattatttaccaacactccagcgccctcgcccatgacaaagccatcacggtccctgtcccatgggcgagaagccgttttgggatcatcatttctctgagaaagagctctacaagcaacaaagcctccaagcccaataggtataatggcagcctcagttccaccagcaatcatcatatcagcctcacctcggcgaatgtgattcgcagcagcataaaaacaataattcgaggtagcacaagcagtggaaatcgaatagtttggacccatgaaaccaagatcgattgccaacaatgcagatcccatgtttgtaatagcataaggaataaaaaaaggtgtaattttcctgtgacctttctctatcagtgccttgacaccatcagagaaaacagtaagaccacccataccggtcccaacaagcacaccggctcgttccttatcaatctgtaaaccaaaagaaatacaagaatttcaaccagagtccaaccaaatcaaaggttgaatttacattacaatagctaataaaagaccccaaatgcaagaaaccaaaaaaccattcctgaaaaaaacagaaccccaaattacaatcaatacattattcacaagaatttttctagttcacttagaaaagaaaagaagtgtcattgtcaatctcaaaaattctactttcaatatcaaaatatatagagttcaaatgtatttatagaagggtcttagctcttacatattcatatcactacaaaaactaacaaataaatatttatgaattccattatcaaaagacccaaatgtgaaacaaaaatcaaataccattccataaaaaacataactttaacaattcatatatataaatgcataaaaagaaggattccccagatcgataatttcgagaaaaaaaattgtaccttggagagcttttcaccaccaagatcagcatcctcaagagctttcttcccagcaacaatgcaataacgaagacaatcatcaagccttcggtcattcttcccatcaatatacccttcagaattaaatccacggatctgaccaccaaatctagtaggaaacttagaagcatcaaaacgatcaataagaccaatcccactctcaccggaaagaagcttatcataataagcatcaacatcgttaccaaatacagagacaagtcccatgccagtaattacaactcgtttcttcgggtccttctctcgcttaggagccacagaagacgaagatgctgagatgaaagagactttggtgggtctggtgggtctgggccaagccttggtggtggcattgcggaggaattgggttccacggtggcgatgtgggtcgagtggtggagatggtctgagagtggaagcttgcagtgactgcatggtggagagagaagagagagagagagagagttggggacgatgataacaaggaagaagagagagaaagagaagtggtgagttttgggggttttaaagaataaaatagagagagagagaggagaagggggcttggagttctccgccaaagccaaaccaaacaccaaataggcaaatgctatttaatttcctttttacttatgtttcattatattggaagaggtttcaatggttacatttttattgtaaccatcatggttacattttttttagccattggattactattaaatggttgtgattattttggaaattaaataaaaataaataataaataacttgtaacctgaaag

SEQ ID NO: 303381 - DNA, 3358 bp, Cannabis indica
cttaattagaaaataatttccatatataaaatattctaatagaaataacttaaatagattgattgatactaactatactttgacaatggagtaattcaattgttctatttgttttgttctgttagaaagtttcacattgctaatgtgtagaaagataatagaatatataaaatgaataagctactcttttcattaacaattaattttaaaatggaacttcattcaccttatcatacacttatatatttatactttcttaaccatacacttttatattctaatatttacaaattaattttaaaatggaacttcatgcaccttaatatatagtcacatattccacttaagtattggagatggcttccaatgatagtgaaggactttaacttgttgaaacgatagtgtaaaaatagtataattcttttgctaaatcttaaactaatatgggttcgttttaataatgttctaatacagaaatggtggtcccccattgaaaagaactaaaactaaccaaaaaacatgtacacataaaaacaataaacacaacaacatgttatgtgaatggacccaactcaattaatggtcaatttcccaagtgtcttgagatgacaatttcgtttgtaatctttgcctactttacttatattctattaaataataaaaatgcattcctcaagagagtatcaatctttttttcaattaaattaaagttctattttttattccctatctattaatgattatataaactttacacaccaattaaaaattactaataaatcccaaataatatattcatggataaataccattttagatcctgtattttataaaaattactgattggattgtctattttgttaaaagataaaatagacactatatttctcaaaataatatcatgagctcaattttcgacaatctttttaatataaccaacttgaatacaatttttagcacgaacaaatacagaatataaagtcatatttatcataaaacaaaacagagggtccaatcgataatttttataaaatatatagtccaaaataatatttattttattttcataatttaaaataccttttttatttctttcttttctcacatactcacaaaacaaattcacaaccaatcattatctcacttaattcaacacaagatattatcttcctatctttagctcaactcacaaaccacaaagattcgatctttacactcaattcatctaaaagcttcaaactttcttcatctccaaccttaaatccaaaatgagttcttcccacttgtttattacaataatcttcacaagtcaatagtactaacaatggaccttcaactatggtaacaaaacacctctttttctcaaatttcaattccatcaaaaacctaagaatttttgaagacattaaatttctgggcagtgctaaattctcaaaaagttctcaacttcaaatcctagatgaatcacaagctttcgatctaaaacaccaagcaggaaaagccattttctcatcaccaattagactctacgaccctccaactcaaacctcaacttccttccaaacaaccttctctttaattgagttaatttgtgataattacagatgagtgaccaagacgagtatgtcattggttttagttatttgtgtacaggcccggccctgggcataggcgggctaggcctgctgcaacatattttttattgataaagaaaggaaaacacctaacatcacaacaaacatggggggttgtcccactatcaatgatccaaaaattgtaagggaatgaattcatgttaccatagaagttcgtcacagcaacatttgtctctagaggagttgaagtggatggttgtagttgttgagtcagtatggagatgatatgttgacattgttttgtgattaactggggtggatttggagctattggggcaggtaggtgatacccaagttaaaatgagttgccttttgtacatggttgtactattgacagtgacagttggggcatcagtcgttgttgggagcaaggaatgtctaatgtaatgggtgtccacccaaaaacacaatttctcttttgttgtgcgtctttccaagacctgacacaagggataggccgcttgatttctcaagatcatgttagagaatgccacatgggcaaatttcaggatactgtgtgatctatgatgccttttcatattatgtatccagatgacccttgaggatctcctccttgagttcatatttcttatttgcaaagtgtggaattagtatatgggacccattatttggaaccgcctaggaagtgatactagtgtcggactgttcgttcgaatttatccccttcataattgatagactaaataagttatctgcactgggcaagtgaatggatccagttcccgtaatgggtctctgtgagggtccacatgccatttatccaaaattactgataataattacgatcgttggatttttccatccaaatttactaatggatacttgatgtgaacgagagttcaagaaataaaatttgatacatatcaaagtttgggggcaaaattttgtatatatcaaagtttggggcacaatttggtacatggacaatcaccacgttagagagattgaacaaaaaattcttaaatctaacaatctcaatatattgtttgggagaaattttaatggtttaaaaagttgatgtaacatgatttagtacgtgtcaaagttcaaagagtgaaaatcctataagaaactgtcgaacgactaaccactcataacgtaacagtattggacacaatgcacaacgtcaagtacctaataacaacgctcataaaaaacacaacctatctcttaccaagctttaattctttgaagagttcaagccaaatcaaatggtatcaaaattaatggttgagattgattctcaaaactatagtgactagtgattatacaaacacacacatacatatcttttatctatatatgttgtaaacaacgttactaaaaataaaataggagcgatattatcgaatgaaatttttaagttgagtcgcagagtaggtcgctttcttttagacatggacaatcaccatgttaatgaaactgaacaaaaattcttgaatccaacaatctcaatatatagtttgggagaatttttaatggtttaaaaaattttgggagcatgatttggtacatgtcaaaattcaaaaagcgaaaattctataaagaactggtgaattgctatctctgagttgagttgcggaataggtcgctttctttaagacatttgtgacacaaggtcaccttgattggacaatgcgtgtgtggtgggtcaagctaaaatttgttagagattttataac

SEQ ID NO: 303382 - DNA, 2612 bp, Cannabis indica
ggattggatcggatgactttctgcacacccctatgcagcgctgtgttattttttaaatagaaatattatctcattttatatatagtatttttatttaatttgattgatattttacataaagtattttatatattaataaagtatatatatatttgagtaaaagctaatattttatactattatattaaattatctaaaatactaacatatactttaatatattctaaatataaaaattaatgtgaaattatcttatataatattttttttaattttttttttcaaatttaagatttgggttgcttctgtagtttttacggaagtttctatgtgggttgctatgtgtattttggttgcgatttagattggcccgttagttgctatagaagtttctgtgtggattctgtaaaaatgtacgtaaaaaaactatttgaaagtttaaaaataaaaaaacataaaattaatttatactataaaatgatttaaaaataattatataatttgaaataaattatttagaaaacaaaaatgtaattaaacatgataattgtagtaatatatttctttcagaaataatttgataccatttatttgttaaacgaaggtggcgtttgttaacacttttattttttaaatttctcaatcacaaaagtaaaagtaaaatttttgtttttaaaattttaattttaaaaataaaaatgtgttctgtaacaaattttgtttttcaattttaaaaacgtaaaaataaaaatgtgttctgtaaattttattttaatttttatttgttgattttatttaagacgggttcgaagccaagtttgaggttaggatcggggacgggtccaagtccaggactgggatcgggttcgatttccaggatctaagttggggttggattctaaaatattaatgaaaaagatgtttaaaaaaaaatgttgaaagtgttattttttaaaatttagattcttaattaaaaaatttaaaagtaaaaaccgttttatagaacatgattttggaaaatattttacttttctaattttaaaaataaaaaactgtggctgaaaataaaaagttgtgactaattatgaattataattcttacgttgtgactaaaaagtcaatgactaaaaatattactcataaaaattgtaatttgttgtgactaaatatgttgttagtcaaacttgttgtgactaaaactaatttagtgacaacatgtatttcaatactatattttagtccgaaataattttttattgtgactaaaatcacatttagtcaaaaaaaaattatgttgtaaaaaaaaacaaattatcactaaaggtaacttttttttagatacacgatctcaactctttacaactaaaaagccattaacaaaaaaaaatcatatttttttatcatctattattcaccaatttatataaccgatcattgttgggtgatttcaaattaaatatccaaactaattattttttctttctattaaaattaaagtcataattaataaataatccaaaaggctataaaattatttgaaaaattttacccacaaatttgcttgatgttgttttctcatctttggatggtactgaaaaaggattcttatcctatatttttaaatgtaaggcgaatgtctttcaagaatagatgctcttaattattatttcttgccttgaaaactcatcacaaaatattgaggcagcttataataaaaagatcatgcacgttgtttcaaagagataacaactcaaaaacctacgttgatgctttgtacaactaaaagatttggataatttgtttacccttatccctgatctctttgacattactgcaaaagataaccaagaaaaggataaacagaacaaagatcaagaacgaaagaaaagagagaaaagagggaagagaaagattgaatcagagaaaaagattgatttattgattagctctgaaaacaaagcaagaatttatacaatgctaagacaatgaaagattagttacaaaaaatgactgacagctcataaccagaacaactatacaacagaaaataacaaactagctgacagcaatacaaactaacatacctaacttttaactgtcataacatcctccctcaatctcatcattgaagagtcttcaatagtgagattgtttctgaagctagcaaatcgagcacttgagatagctttggtaagaccatctgccaattggtcaaaggaaggaacatgtttaacttcaatgagaccctgctaaaccttttctctaacaaagtagagatgtaactcaatgtgcgtgcggtttgggcatgcaaaacagggttttgagtgagcattatggtactcaaattgtcacaccagactacaggaggtcgtgtgagattaagatgaagcttagaaaatagagattggaaccaagatatctctgctacaacacttgcaagactcctatactcagcttcagtattagaccgtgagactgtatgctgctttttgctttgccaagtgatgagatttgatcccaaaaatattgcaaaaccagaggtacttcgcctgtcattacaatccgtagcccaatctgcatcgcagaaggctttgagacaaggcaagcagatt

SEQ ID NO: 303383 - DNA, 1646 bp, Cannabis indica
aataataataacaatataattgtatcacacttaatataccaaatactaatataggtatataaactggatattacattagtgtttatcaaggattaagcttctggtcttctatcccttgccgtttgaaattactttttgaattatttagataattgtttccacgaggtgttggaatgatttgtgaacttatcaaactaactactcgttgctcctgtcaatgatgtggggaataatttgcaatgtaagtcattaaaaatataacttgcttgtattattgtattaaagttattcaaatgaacgaccgaatctataattgtgtcatattgtgaaacatgagggttcttgaatcctttcgagaattgtgagttcaaaatatcaaggtgaaaaggttcttgatcttcatctgaatcataacctggaagttttccatattctcagtgatgatattttctaaaatgatcttccaactgaattatcctttgctagataaaattatctgtgtgctgattggtttgttcattttcccactgagcatttctattcagtctttccctaagatcgagtgcactcctatttatctgttcgtgtagatcagagcatcttcaatttatactatctcgcaagtcgggttgatcaagtatgttttggcatcgatcttgtctgtcatcgtaactgctcagtgatcgacttggggagatacactcggattggtaactttgaaagttactcatacttttttttctcctcaaaattcatatcgaggttttcgttgcccatgcagtgggtttttccacgcacgcgaccttgaagactgagtttgttcttgactctttgatctactttgggttatattagcttctggtacttatggtgattcacgagtaggtcttctcctttcgaacgaattagtgaacctacccctattcaggtatgtatatatactatctctttctcctctcatacgtccttgaggtggatgtgaaggatgaccagaccggttcgacggttgtttgcttacatttttatcatttttttgagacgtctagtgtccccttgctcgcgtttatcacaaagttgtggcaccctgattcttggggcttcgcccatcaataggaatgtccctcatctcctctagttgttgacccaggggtgagtgggattgtttggttcctggtcttcattgttgggtccctgtgcccttctagttcgtgaaccatggggtctcccttgtggacgtcatgcaagtttctcttcatgtataggtgttgcatcatttggagtcgctatggctacagctatggctcactccaacccttcattctttcggttggactctacgagccttcgatagagttgtcgattttctaattcaagaatgggaacatatcttgcgacatcatatgcatttgactcctttctctcaagaatttcttccttaggctcacatccctcggagttcctcacagtcggatcccttcctgtgttggtttaagtctgtgccccctggggctcttttcctagtcgtcgtgttgtttcttcttccataacaggctcatcatgctaagtgttttccatgatgtgatgaaacaacggggagatgttttgagtcttactttcacaaatgctctcaatgaaagcatcaaaat

SEQ ID NO: 303384 - DNA, 2650 bp, Cannabis indica
gaccaggtagagatagtttgttttgagatctaatttgtcatttctttgacacatgtactgatcagtagtcaatcaataagtattcttcaatgattgaatagggaaaagctgtcattacatttctcgattcaattttagacaagacacttcgaagcaccattgctttgctagctgctcgaggtcgtggaaaatcagctgctctgggcttggccattgctggagctattgccgcagggtaattgatgtcaagtagtttcctaatgtgcatgctctatgatttatttattttttcaagattgcaaatcctgaactctaatttgcgaaacttattgtgtaggtactcaaatatctttgttactgcaccaagccctgagaatttaagaactttgttcgactttgtttgcaaaggttttgaggcacttgactacaaggtaatttacttcttctatctcatggatgttaaaattagtttctgattttgtgtattgtttggttttttgatattcaaagtcaacagtgaagtgactactattgttagtagtaggttgtgtggttaaactatttcccttgccttgtatatccttatgtccaactgtcatttaagattaggcatttgtattttctagtcgctttaatatgccaatctagagtgcatgatcttaaatatggcaatctagcatacattccttaaaacttgagggatcaaatttcatcaattttatttagtatataatatattcacaatttgtgttttattttttctttaacatgaacccttgtatggtttaaattaacatttttaaatgagattcatacatcctaaaagtaccactatagatatcctgaacgtgtcatctttggctgtgatgatagactaggtgctgttagtgaactgggtccgctttagggtattactagttctccctttctcatttttcattgcttcacaggatttttatttccaaatgagactaattttcatatctatcattgaatgtggattttctttttttttgatggttttcctttagagttgtttcagatttaatgtttaatgcatgtgcagtttcacatttatttattctttgagcatgcatggttgtgcagggtcgcactgccacttccctactttgcaaggtttactgatatggaactatttttatacttacaggaacatatagattttgatgtggtgaaaagcaccaacattgagtttaagaaagcaactgtacggatcaacatttacaagcagcataggcaaacaattcaggttagctaatctgttttcttatataggtcaactgttctacatttttaaatatttcttgttttctgtgagaaataagtgacttatgatatgtttcatgcaccgattactaaacactactgattgtcttattagattatatttgcatattgctaagcactagagattggtcttatagattatatttaaggcttattaattcctgcttatttgattcagttagctttcttttactagcaaaaaataaatacttatataagtttctttcagaatagggaatgtcggtttggatttctttaagttgtttgcttgattatcaaaaagttatatttgttagatgcacactagcaaattcttctctctaggaatcagaccttaaggacttccttgttagttattttctttttccccttccaaagtgagaatgatggatattttcgtagacaacctatcgaggaaattcccacacttaaattttcacttccaacatagaaataaaaaaatgaaattattattgagagagcaatgttgtttgtctaatgaaattccatacactaaaataaactatttttatgaattcttgaacatcctctaacgggccaaattagggctatatcatagtgtagattacttattcaatcaaggatgtacttctctgaatatacattgtgcagtatatacaacctcatgaacatgaaaaactctcccaagtggagttattggtcatcgacgaggcagcagctattccattgcctgtagtaaagtcacttctgggtccttatctggtcttcctttcatctactgtaaatgggtatgaatttgatatattaagttgcagatttttgttagtcagaagtttcttttggtacatgaaacgactattatctttatgttatctaacggtttacctagaattaatttatatacttgtttgcttttgttttttcctctaaaagctatgagggtactggccgatctttgtccctaaaacttattcagcaattggaacagcaaagccagacatcagctcagggtgtagagggtgctctttctggtattgtatactgcccatgctttgtttataaagttctactgacaaaaataaacaacacgcttgagaacttcttggccggctgctgtgtatttcctatgtttttgtttgttttctgtgttgtggggggcaaaaatttggtgctaaaatgttactcaaagtaaataaagggcacacaatcaatttaagtcctgagttttgattaatcaaatatattaggaatctgtagttctaccttgtgtatcaatcattttatagttgtcatacatagtttttctagcctttcattttaagtcctgagttttgattaattaaatatattaggaaactgt

SEQ ID NO: 303385 - DNA, 1898 bp, Cannabis indica
cgtggctcggcacgtaactttctacctagtatatatatatatatatatatggtttcctcatttatatttcccaatttcctcattaaaaaaggaatgagatccatatattttttaaaaaattattaataatattagtggtggattgaaagtagcttctcattttaaattatttgagacaaagacaaataaaggggaacaaaattgggtcacttgcattaaacatgtcctttaattatgtccatatatcgatgtaaatttaagaagaagagaatttaatttattttctttgtatatataattatgttttttagaggtacataaaatcataaaagaaatgttattagtaataaataaataaattatattttgggattttattatttgatacaattatgaattaaattatgaatatataggaatttttttgccaattatgaactctctgatttttaatttatttgttgaaaaaattcctctaaattataaaaattgttgcaatatagttaatttaaaatacaagatctatttgacaactttaaactactcaaaattcaatttattagcattaagtgtgcaaatattagctctgaatacatgattcatcgttagattgttattgaaaattttgatgacttctcatgctcaaaagtcaaccaataatatatttcacaacttgacaacattaaaaacttatgctaatgttccgttatttctaaaaatatccctctcattacaacataccctatatatttttttctctttgtcacattctgtcatctttttcttccctttctcgcttctttctctcttattttatctacaaaaaacaaaaaatggtgttgtggtggaattttcaggccaaaaattttatatcaaattagttgcattagtttgagcatatttttggaagaaaaactcctactttcaagcttgtttagaataatatttttatgttttgtttttcattttaaaataatttagttttacttccactatttaataatcttgattattctttcatatttgcgaataagaaagtaaaaattatattttactccaaagttgttgtcaattattatgttcattctcatattagttcatgacttttaattttctaatttaatattcactacaacaaatagggcggcaaaagtcgttccttaaaccatacaaattcgtctcttatcattataagagatgataattcgcccttaaaagtcgcctctaatagtttacgcctaaaaatactattaagaacgacaaaaaagctacctctaattagtggcgacaaaatacgcctaaaagaaatgcatgaattttttacatttacttttaggggcgacaatattgtccctaatacccctaaaaaagcgtgtcaaaaatcaatttttgacttttaaaggtgactatgttgcccttaaaggcccccttgaaagttttcacattaaaaaaagaaagattttttataatattagaaatatttatatttaatttataaaaaaacaattataataataaataaaataaatattaatataaaatataactttcatcatattaacaaagtagcacaaataattatcataaaatgttattaaatagtacaataacataataaaagtaaatagtttaccaatataatattaaatactaagatactttaaataaaacaaaaataatactaatgaggtggttgtagttcttgattctataactaagacataaagtcatatgatctctcattctcatcgaactctagaggaagtagtggctggcgttgtgatgtttaacgtggctgtagcggttatgatgtatgtggtggttatatcgattatgatatcggtggccccatctattagaatattttatatatggaagttattttctaattaaggaaa

SEQ ID NO: 303386 - DNA, 1007 bp, Cannabis indica
atttaaattttattccattcctattcctattcctatttctattcctatatttttattcctcccaaccaaacgcctagattgtttgggagaattgttgtgcaatttctcaccttcattgctccggtccattggaaatcgaaggaggaaaatggtgacggaaaagtcaagagcaattagcaaaattgttgtgttggtttgcaatttgttagtttattattaggtattaatatgaatttgtatagaattaaagagctaaggtgatctttgtcaatttccttattattaagttgaagatgttgcataatcatgttctttcttcttatttaaaacaggtcccatttcaaagcaaagtagaaagacacttgttgagtagaaactataacaccaagtttaatgggattaatttggcactgaaactcatattctgtctgttacttttgcaatcttttgctgcactgagttgagttgaagctgtagttgaatggtaaacagacaaaagtttgtatattttatctcacatatctttttaagcagatacatgttgatatataatggttcattttggacaaactgcttcttttgtaatagtgtttgtgtattggacttataaatactcaaaaattaggtttaccaagtttaaaaccaaaatcaagtttgtaatagtgtacgggtagggatgcatatttatcctatggggatggggccccgtttagactcgcccctaatggggtagggattctcgggggacaagacggggatggtgattattttttgtctttgaatgttaaacgaggtaggaatttggacagggatggagatgaggacccgtctaatgttttagttatatttttaataatattttataatttatgtctgtatctttttataaaaatttatgttgcgttttgaatgataattagtaacttgatcaataaataatgtttaatattttttgtacatttaaatttttaatgtaaattttatttttttatgttaggagatataat

SEQ ID NO: 303387 - DNA, 3620 bp, Cannabis indica
gctcttctcctagaatacgtgtatcgaataggaggtctaacagaaattgccgtatctatcactaaatgatgatttagtaattacctgacagaaacaatacttatgcctgcttcatgaagatctcttattagtaagtacaaaatctgattcaaacatgtcctgaaaaaaaataagggattgtgtggttatgatgacatgttagttatgaaatttgaatatttgctagatcactaataatttagtatgaaagatcaggttaaagtttcttttttgtatgtgtggggttggtttgagattttcctcttctatttatttatttaagttgctgaaaacagttatgtttatcttgatacttaggtgattgaataactctgctttgtgttatgtttgattcatgagtagctgatttatgtatcagtttatgtattacatttatgactttgactcactcagctgtcatctttttcacgtttcagtggagaaaaggtttgaaacttagcggcgaaagtgcagttgacaatattacattagatggtgtaaggggattacgcgtgatgctgagtgcaactgtgcatgatgtattgtactacatgagccctgtctactgtcaggacattatcaactcggtactgtattcttaatttataagttactgcttcattattaagtgttaaaggtgtcctttaacgtatttgctatgttcgatttcctggtccatcattgtgatgtctttattgttgggttcttattgactaatgtgttaaaggattatgtatatcgtggcactcgttattttatgtttttttcttcctcacttctcacatttcaaccaaaaaataggcgtacagaattaagaaaataaaagatggtatgatatcatctatgggggcatcctgctcagattcttcttaaaaagagcaaaaactaacctagctgtattagatgaactatctgtcaagctcttgcccaattggatttatttaattactatgcctatagaaccaattgataattcccaaatgcgatttaataactatatttcaccacctcagaggccagctacttaatttttcttttattactgataatccattggcacttttcatccagccattattaggttttttctcagagctgttttagctatcttttttgctgattgcttagttgggctttttgcttgttgatatgacatataatgcgctttgtcagagttagtaagaggaagacttatcatgaactgatgaatagtttctttttccttaggtatccaatcagctaaatcgcttatatttgaagtttcttaagaggaatcctggctataacgggaaggtataggctaacaaattatgattattctaatgttcatgtatgactccttaaattttttattgcagctaatattctagtctcactcttaacaactgttcaggtttccatatacggtcattctttgggaagcgtcctctcttatgacattctttgccaccaggagaatctgacctccacatttcctatggattggatattcaaggaacatgctcaagatgaaaaatcttcaaatgatataaataataaatctggaattggtgaaatcaatgacatgatggggcatgaaaaatcttcaaatgatatgattaatcaatctggaattggtgaaatcaatgatacaggttcacaacaagcttttttgatacacgaggaagataaattggataaaaatattgaagattcttctactattatgagtcccattacatccgatcctgatgaggtcactgcaattacttttaactctaaacaaccaagtgataaggaaggtgtcaaagaatcaattgatagttatcatgacaaggtcccttatgaaagtgatatcttagagacaagcatcaattgtggagtccccagtgatgatttaggaacagtagctgaagaattatgcgaagatacaaatgatagagacaaaataattgaattattgcgtaaagaggttaaagaatatttttcgaacgtcattttatattctttgtaacctttaaaggcactttttatatttcatgtagaattaatatttacttgtttcagattgacactctaaaggtaaaaatagcagaattggaatcaccatgtggtggtgaagataagagtctagaattacagcaaggtggttactaacccttacattatttcttttatattctctctggttctagtttatataaaaaacttcattgtctaatagatcttcaatataatgttaacatgcacagagaacaaggagatgcttgagacttcagtaaatccagtatctgagaagctgccagctgagcatgatgatatacctgagagttataccccttatataaaatacacgaaactagaatttaaggtgttgtttttatgatcttacatgtctttttcccccttcttgagatgtgaaatctagtcttagatattcacttatataaccttttctggatcatgtgactcattaaacactaatattatatgtttcaggttgacacattttttgcagttgggtcacccctgggagtcttccttgctgtgcgtaatgttcgaatagggattggtaatctacatgctttcattttagggattgacaagtttagtttggtattatgtggtgtcatttgtggtgtactattcctgtaatcttatttctcctttaggagtcttttgaggcttctagcactttttatgatgtactaatactaagtagtaagtagtaattgaattatttcttgaacatgctaacttttatttttggtggaaaagaaaatgagcataactatttggaaaaaaaaaaaaaaagtgtaaccatctttgtcaaggattgtatggttatattcactttctttcatatccacacaagggttttaattcttcgacttgtgcttaccactgttctaaagcacacacattttcctttttttttttggttttctttcaataatccaccttgcttgatcaaattgattgggaggtaaaggctgtctattggaggtgttcttggtgcctatgtctatgatttgatttttacttttgaacttgctctttgatgttgtttaacccaaaaaagaattcactactatgataagagttttattaattgaaatgttttcttttctattccaggaaaagggcaagagtactgggcggaggagaatattaatgaagaaatgcctgcctgtcggcaaatgtttaacattttccacccttttgatcctgtggcatataggtttacttcacacctatctgatgacacataagaccagtttcgacttcattttgctaatcatgataacatagtaaaactcactttctctagaattcaatgcatgcagggcatacttgagtgagtgtttgagagagagagtggaaaacaattttttaatggcagtaagaggctttgatagtttttttgggtcagttttggagagtgatatttgtcaggcctttactgttttgtttggaattgtaatcatggttatcctccgacacaagtgaggcttttcaatttatatcgggaagggtcctgtctaagacaagaggatcctttctctctctctctctctctctttactttttttttttaaaaa

SEQ ID NO: 303388 - DNA, 1180 bp, Cannabis indica
agttttgatttttatgaatttttgttgttgtgatattgtatttgaatattggttatttgatataagagattgtttgttgattttattggcttgaatgtggtgaaagaagaacctttgaggagtaacaaaacactgaacttttagtctttaaatcctagtttttgacactgtaaattattcgaaattttccgaatggaatgcctaatataactatactgccatatgaaaaatgacttttgtatgtgcaaaagtgatatctgcacttaaggatttcacaatgcttgcttaccttgtggtttaagctactaaacttaaactcagaataatgtttggaaaacgagaaaaatgaaattgttgtatgaagacaaactcaagggaccttttacagttaaaatggttctgaagatgaagataattgagattgaattagtttatctttggtaaagttttgatttttatgaattttttgttatgatatgattatattttatgataagagaacctttgtttgatataagagatagttgttgattttattggtttgatattttcatttggtaggatcttgtatttgaatattggtttgtgtttttgatataagagattgttttgttgattttattggggatattggcagcaaacctaaatcaactttatgattaatcacataaactaattttttgacggtaaaattaattttttgacggtaaaatatactgcaaactctcattttattttgttatttactatttcgtctaaaattttatatttaatgttacggtatgtaacataggtatacataagtggcaaataataaatattagtaaagtcaattttttattttggttaaaataataaagaaaattagaaactagaactagagagaaaaaaggaaacaaaaaaaatttaagggtaaatattattttggatcttgtattttgtaaaatgtatgatcattttattatttaataaaacagagagtttaattgttaacttttgcaaaacacaccgtctaaaatggtatttatctaaatttaagagacaaaaatacaataaaaattataaaagaataacaaaaaatactgtcttattatgttgaacttatgttaatttgttattattttttttattatttgtatgttatttttgttattttgatgttatttaaatttatttttat

SEQ ID NO: 303389 - DNA, 2636 bp, Cannabis indica
tttccataaactttgttgattagcaacgagctgcacaagatgtttaaaaattacgtaatacgcctatgctagttagggtgttacaagtagagagaccaaccgaatagaacccccccaactggtcgatctgcttgcagtccaccacgaccaccatcactgttgtcacaccatcattacagctataattgaagaattcgatcagagaaacagagggttccgacggtcaaaacaacacaaccacaactttcaagcgacgccaaacgagaactctggccatacccatagccacaagagtcactacgaaataaatgaagagagagacgaatctgattagtaatcccttaaatatgtagatgcaatgaagaaaagaggaacaaaactccatcaaaagttgtcccaaatagcaacatccctccaaccatggccatacccaagcctagagataggctgatgaaccgtgtccaaaagaaaacaaggaaaatcagatggcgaatgcccaaaccctagagagaaaaccctaggcccatttatacgcaatatttaaataaggctaattaggatttttgtcccctaaactttgacatgtaccaaatcatgccccttgaatttttctgaccattaaaaatttcccttgaactattgagattgttagattttaagacttttgtctattttcattcaattttactaattctgtgtttgtttatgtactaaatcatgctcctcagactttgatatctaccaaatcatgtccctcaaattttgacatgtaccaaatcatgtcccttgaactttcacccatgttagactttccttactaaaattggacaaaagtccttaaatccaacaatctcaatagttcaggaggaattttaaaagatcttaaaagttcaggccgcatgatttggtacatgtcaaagttcagggggcaaaaatcttaattaacctttaaataattgttatgttaggtatagtattgatgtagaagaacattatatttcattgaaaaacaacttcttttagtgataattttttagtcacaacatacattttttgtgattaaatataacttttattcacaacaaaaaattacttctgactaaaatatagaatttagaaacaaggtaccactaatttaaatttagtcacaacaagtattgtgagtaaaattacatttagtcacaataaattataatttttgaaactaatacctttagtcacagaccttttagtcgcaacatagaattgatgctttataattagttacaacttttttacttttagttacaaattttattataacttaaagaaaaaaaaatttgtagtgttttaaataagatggcatcaataatattgcatatttaaaagaagaaaaaaagttaaaattcatacattatttgaatgtatatgtgtaaactttaaatataactttctttttacatgttttacttattacttatataattgtgtttggcctattcggatttaaggaatacccaattttcgctaaatattaattgtttacaacacggacaaaagattttgttggtttgaaatatttgatacatgttaatcatttaatcttttatatattattttctcctaccaaaatgactctttctagtctataatatctctatattattttcccttctttgccaaacatgatatgatatatagatatgattactttctttcctatcatctcaatttttattctaccaaacatataatgattaagctaataattaataaataatataaataaagatacttcaactgttcgaatcttctataaccacaattcgtatattaacttctagaatcttattatagttatatattagtttgagataatatatattattaatcatgtatattatataatacaactatacatagtaaagtcttatatggttgcattaaagtcctatagtaaagtcttaaatgacaatatgtacactagaatactgtaaagacatacccaattttttcacattatatgattaaagacgaaaaaatataaatttgaatacggtaaggaacaatgctataaattaacacgacatgatatgaaaaatattaaatacaacacgatataacaagcttgaaaaatagtaggatatgcataaaaaagataatatgaatagactaataaacttgaaaagtaggacagacaagcacaaaaagtacgatacaatacattaaaaaaagcttataataatcataataaatatatatttgtcaattttaaaataataatacttaaatacaacactaaatgtcataataattctataattaaaatggttagaaaatttaaactaaaattatatattaaaattttacacatttcataattaccaacgtattaattaattaattaattaattaaagaataataaaattgatattgaaatagatattttgtagctacatactaagattttgtagctctagactagaaaaccagtaaagaacaatagtgaaaaaaaaataaaaaatacacaaaaattttaggctaattaggatttttgcctcctgaactttgacatgtaccaaatcatgcccactgaacttttaaggtcgttaaaaatacccctgaactattgagattattggatttaatgactttt

SEQ ID NO: 303390 - DNA, 4305 bp, Cannabis indica
ttttgtatattaaaaattttattgtaactttatttttctattaggggatttcccactttgtccccgttcccattaggggattacctgccccattcccaataaagaataagcaaggatgagaattaaaatccttagaggggagcactccccgccaattccctgccctatgtgcattcctaatcattactcttacaaaaataactaataattgattaataaaaactgagtggttacaattgagcaaaagtttgtcattataaatagagtagtgataggttcacaaaatcccataaaattaataatttcttgattccattgagagtaattaataagatgaacatagaaattgaagcaatctccaatgagatgatcaagccatcttatccaaccccagaccatcttggccattaccaactctctctactcgatcaatcgtctcccaaattctacaaccctgtggtcttttatttcaccatgaaaggaactaaggctagagaagtacctacaagtaccatttccatcattctaaagagatccttatcagtcatcttaacccattactacccattagctggaagactcgaaaaacaagcacagttcatcagctgcaacgacgaaggggttcccttcgtcgaggcccaagtgaacgcacaactttctcaagtcataacgaatccagtagctcaagaactcgacatgttctgcccatttgtatcccgtcacgacgagagcgacgacgctcatcaaattcttcttggcatccaactcaacatgttcaactgtggaggaatcgccgtcggtatcagctgttcagataagatcgccgatgcattgtcgtggacaaggtttttcgggacttgggcttccgttgcacgaagccctaaaaccattttaccgaaagcccttcgacccgaattcgtttcagcaactatgttccctcccagaccccaacctatgatcaacgcagagacttgcgtcatgaaaaaggatatagtgaccaagatttttgttttcaatggcttcgcaatagaagccttaagagcaatgtattgcgacaccaaaagtggtccaaaccactttcggccttcgcgcgttgagactctatctactttcataataagtaggtatgaggctgcagtgtcatcctcagctaaaataaaaagaaatacaaaggaaagggtttataccattttgcacactgtgaatcttcacccgaggatggatccaccattggctttaaactctttcggaaactttttggtgtttgctgggacacaagttccggcctcgagcattaatggggaagcttccattagtagtgggattgtgaagaagataagagaagctgtgaagaaagtggacaaggagtatctgagaaaacttcaaatgggagaagaggatgaacagttgagaatgatcgaagaaggttcgaagagtatagagaagagaggaggtgaggtgattgagtttcaggttactagtttgagcaaatttcgttattatgagttacttgattttggttggggtaagcctgattggtctagcatagctgcttggaattttgataaaatcattgctttccttgacacgagtgatggtgatggaattgaagcttatgttagtttgaatgagaaagacatggccatatttgaatcagacaaggagcttctcaaatataccaatcctaattattttggacctgttaaatccaatctctgattaattattatctatatatatatatatataaatatttcatcttaattatgcgtactacaaataattaatgcaagtgatgatttggttataagtgttgctcttgctacgtgtgtgtgtaatatgtaatctcataataattcaacttatgtattttgagatttctcttgtatacgaagcgttttttttaataaaagagggtatttcgagttgcatcctattagaatatatggaattaaatgaaaacctaaactactagcacctaattttttgtagttaaatatataatactaaaaagaataatttatcgtgtaaatatttaattttaattttcggttgtagataaatatttaattttaattttttacggtaataatatttaagttatatttttttaacttatgtaataacttggttgtgaagtgattattaagtgtcattttcttattgatatatttaaattaatttttaaattaagcttttattcaaaaaaaaaaaagaagaagaaaaaacttgaagcttaaaactaacttcattaccgacaaaaaaaaagaagttaaaacatagaacatgtatattagagattaaattaaaataaaaatttatttatttattattattttttttttttggaataatgatgaaagtttattaaatcaaatcatccgaaattaaggatgcataaaccgtaggtaatacatccccagtaaaattacaatcagcctaaaaaagaaaagaccgcacaaaagcatgtgcaaccttattagcagatcgttttacaaaattaaaagaaacatcaccaataaccgaacacatagtcatacattccgagatgatatggccataaggagaagccatatatttaaacttttgtaaatctctaatgactctcaaacaatccgactccaccaccacatttatccaactattgtctttaatccaacttaaaacctccttgataccaatggcttccaccacatgtggcttcaaaacccccactttgatcaaactcttggcttgtaggactaccccagttgtcattcttgctaccaaaccaatgccaaaacgcctttcatttgtaaagattgcaccacaacattaactttaattatggaaaattggggaggagtccaatactctaaaactacatcaaccgaaccattaactccatgagtaggaacgacatttttttgagcattattccagtctataaagttcaacggcatttattttattttagtttgcttagaaaactaaattaggtaatattatataatatcaactaaacagaaaattatcataatgtaacatactaatttcttataactgtctaaaatttaagggtatatttaatgctcatataagtacataagacatgatttttagtaacaaagttcagtaggcaaaatagctttttattctaataaataatatgggaaccgtaaccgattacaatacgatattacaagagatattgtactgttattagtgtattttaatatcggtttttacacaatttaatttgataaataatatgaggatctcaagaaaaaataagagtataataataactcctatcggtacctcatttgagtataatattattactatatatatatatgtgtgtttatgatttcattctgtttttttttatagtttatttataattgatttatagttgtcgtgagattaatttttttgttatttttttagtttttattgagtaaagtgtatttttataataatacaatatatttttaatactatatttatttatacaattattagataaaaaaataaattataaatattagtatttatgtacaacctgttattaaatatttgatattttaggtattaaaaaaatttgtttggtaattaagtgctactattaacaaatatttaatattattgttaaaaaataaattcagtaattgagtgtaactattatataaaatgagaaatcacttcatataccactttttaaccattttttttctatttttacgatttttttatttttacaatttaggttactctgttagttgcgacatatatgggttgctccgtaagttgtttcgtagattgcaccgtatattctgtaaaaatatatataaaaaaaactttgaaatgtataaatgaaaaaacccttataaaagtggggaattaccccgtatactatttttttaacttctttttcaaatttatggtttgggtttctaaagtggttgcagcgctagttgcaataggggtttctatacgattttttactgcaatttaggttgcagcgctagttgcaataggagtttctatatagaattttcgtaaaaatgcaaagaaaattattttgaaggggaaaaaaagaaaaagcccctataaaatttagtatttttgccacaaataattattattttttatagagtaatttgcagcataaatacctaagcataactcccagttgtaaataaatacctcagtttaatttttggcggtaataatacctaagttatatttttagaaatctgttggtacctgaccattaaatatcaagtccgaatccacgtgtcattttcttattgatatatttaa

SEQ ID NO: 303391 - DNA, 3256 bp, Cannabis indica
aaaaaaaaaaaaaaaaaatcacctttatggggcgatcatgatttgggggaagtttcccggatgagattttggagttatgatcgtcgagaagcgcgtctactcggccatggagggtactccagaatcgcctgtctgaggagggactgaaattaggagaacccattaacaagtgaggtgattcctgcaaaaagcaaataaatttgtttagtgaaaaattatattgcgtggaagtttgataaaggagagagaaaagagataaagtagacaccttgtggagatgggaaggcgagggtatctccaaagacgctgccattagagtatgacagaggaaaagatggaggttttgagattggaggagagagtgaggatcagtaagtgtaacggctagtttgaaggaggtgtgtgataaatgaaagagattaatttaaatagatggggccaaaaattaaaggttaacgttcgaatatgtaatgtaatcttggaagaagggatctggtccactacttttaagatgagaaaggtgatgtggattttcaacgtctggggggacccactatccagttttactttaattacttgattggttcatcaaagcaataatagtgattacggagggaaccaagttttgattgttttaaactttatgcatcaagttggtcaaactgccaagtgccaagtattgtagcactcccttttattactgaccttgtttcaatactcgaccaataaactggataattgcttgaaatattgatggtccttttaaattattttcttggatgtttttttttttttttgataaaaattatcccctaactaacatataactctggatagagaaaatgaaaattcccctgtattatttattattcattttctaaaacatgtatggataatactaatgttatggtaatatagtctcaattgagagttcagtcacaaaatacatgacaaatttgaaggaaatatattcttagtgctaatgttgtaactttaatgccaacaaacttgatttggacaagttttagttagtttaatattgataatgtcgaaaattgactctacaacaaattgttaataagactttgaattctttgtatcaggttcgatctagtcgaattacattctcattcggtttacataatttttctcacaattctctcaattaggtctaggtcacttgcttcatgagttcaagtacaaatttgatggtgtattcctatagagtttcaaccaatctagtgtgatcaagaattcatttgcattttgaaggaggggatcttatatttataggtagaaaggaatccctgcttccttctctttttctattctaatttgtccatgtgttaaatcttgtttgctgctcatcgcgcctcctttctgccttcaaagctctttaaagtgtcattctattccttctcgagctctgctctgctccgcgtctctctttatctagagttatgctctttcgtctttaagcttattgctatgcttcctttctttaatggaatggtgcgtttctctttatgtcctcccatatttcaatatcagccttttctcctcattttaccttcctcgaattacttatttaccctcaagattatttttatctcttacaattgcccctcaattttatggtatatgagctcgtgactttgttagtttgagctttgaagccatggaacctatttgctaaaaaatttggcttgatgatattgacactatttttgacacatggcatgaaggaaacaatcccagggccttgcatcccaggatagggtagtgttacctgcacaatggggcacccgggtaagtaacaagatttagcgaagttgtttctgagttgtctttcaacaaataggtctccatgaccctaaaatgaagaaccatggagctgaggatgtcacgtggacatcccacggctcaactaggaccagcattagtgctaggcgcccatgttgacatcatgtgtgccaactcgcgtcagttttcattcctatcaacttcttatgagaaatctgattggctattgtcctaagatacatgacagacatgtcacaatcaagtttcaaactttggagacgagtatacatgaaacagcacatgggcacccggaagccttaatgggcacccagattgacatctagttgatctaggcatatagtggctagggtatagggtttaagttttcggggtcatacatggacccgaatcctcaaatccatcaaggaataatgcaaagacatgatgtttcatcaacgaaatcctaaaggagcccatacacagctataggcgcccaggttgacattttaacctaggcactgattttgtttcaccaagttccgtcggtgcaaatttgatgaaactgaaatttgtggagcacttttcatcataaagaatattgaacatcaacaggaccaatttcggagatgtggacccccacctaggctcccaatgcaggcctccatgccatattgggtgtccaggttggcaaatttaaacacggggcactctgagacgtcattctagagaagtctcccaggcatttcccttattttcacccacgagaaagatacaagtgcttttgggggacaaacaaagccatcaaggctcccgatgaagagttgggcgccaaggttaacgtagccacacttctggtggtctagttgatccaattctgattctgtctcaggcattcttcttgtttcactccaaaaataagatattagacttggaatcaggagaaaatatcattcaagagtgagttagtccccaggaatcactaagtgccagtgtaatgaccgtttgacttttatgagaattagcaaataattaatttatttatttattactttatgattatattaatattaaactaaacatattctacccttcttatattattctttttattctctcatatccgtagcttagcttcatttttttcttcttcctattttgcatgtgaattgcaattttttcctctcatgtaagttttatagtgcaattttctaaatttttttaagtcttttttctttatttttattttctaaattcaacaatgtatgacaactaaaatcaatatatataaagaaaaagtatgagacggtgacatgacactctaaaaaaatataaattattggagaacattgtcccacatagattaaatataaaagtattgagccatatataagaacatagactactccactcattaccaattggttttgagatggaacctcatgattctcatcat

SEQ ID NO: 303392 - DNA, 2805 bp, Cannabis indica
aaaataatttccaacaacctgtacagtcaagggcaaaggaaaagtggcagaaccatcatgaagagtcgttccaaagcctcactagaaatatgcgccaccagtcggatagccctcgagtacacaaaaggtcatcggtgccttcgagcctagacacctttctaaccttcaaaatagtgctacaccaaaaagaccaacgttagaggtgcccacacctaagagatgggtggaccccccaagtgatttcgttaatcagaatggaaggattgcagtcagtctttttgagtatagttggtctacgatggacttacgatggcggctagatgttaagtacaaaagatacaagagcaaaaaggtgaggccacgtgggtcttacctacaaaatcatttgcgtgataagctaaggaggcgtgacgtttcgagtagtgatgccaaaagactagaagagaaaatcgtttccctgatgaaattaggaaaaaagcaaagttgagcattatttaattctaaagatgaggaccctgatccttgtgttaagaggatcacagaaacccctcttcccaaaaacttcataatgtcgcttatcgaattgcatgagggaagaaccaatccccgaatacacttagccaaatacaataagaagattcaagtcccttgcgtctgtgatgacgctaagtgtgaatgtttttccccgagtttaaccaagtcagttgaacgctggtggaagcagctggctctgagatcaattgagtgttagaaagatttagagtatgcgttttgcaagaaatttattaccacgcccaagaaagacatagaagtagactccttaactaatgtcaagcagcaacccaatgagagtttaaaagcttttacacaaagaatgatggaggaaacaactcagatcaaggtcaccgacgaattcaagataatggccctcaagtcaagattggttgtaggttccttgttgtggggagagatgcaaaggaaatgggatgaaaccttaagcaagttcatgtcgtaggctaaacgaataattaatctggaagacgcttattgtaataccctaagattaaggaaatggattaggaaaccctaactagtaaattgtgtattattgtgtaattatattattatataatttattataagtaaaataatttgatagatgacatgttaagaccccgttggtgagccagggcattttagtaattttgaatcgagaagggtaaaactgagaaatttatattatgatgtgcttatgaactatattattatatagtatgcctgtttgtacttttttaggtgtgttctaacaagttggtgcagtatagtcacaaccgagtattttgggatttgtttcctggcattttattaatagtgtgaataatctgaatttatttgagtatgatgaggtgttaaatgacaaaattatccttgaatgcttatattgtgttataaggtcctatgggcattgtggtaatttggccttttggattatttgcgacaaaatagaactatttttaaaaataaagaaaagttagcttttgttcttagccctatgaacccaccccctccctctctcaaaattcatttttgtagatcttgaattttattagaaattgcttggattcaagcttggatttttaagggttttggtccttagctttgtgattgaacttgaggtagatcttcttacttacttttttctgaaattgttgctgagattttatggttgaaagcatgaaaataggttgtgttgttcttttatgcatgtggacagatttgatgttattcttgatgtgtttggcttgattttgtggcttagtggtggagtatatttttgatgagttatagataagattttagggtgtttttcatgtgtgaattcaaggtttacacttatattttgctgctgagttttaggttaaaagcatgctagaagttcaagttcttgagtataaatttttgatgagttatgctcaagtattgagctttattttggaatgttgattgaatctgaaattaaagtgtttgtatactaaattttaagccttagtgtatgtttcaaccctctgtataattatggataaatttatttatggtttgagagtttgatttggttaggcttgaaatggtgtgttttgccatgtttttcgttgctagttttggattttttctgggtttggaacccaagggttccggcccagctccttgggcgccgcagcctgcctcatgttggtggcctagggttcgaacccaagtattgcggccctatatggggagtgttgcggcccgccattcggttttgggcagattcgaacgcgttatttgaatcctcataactttgtgatccgaactccattttgggagttctatatattgttggaaagctcgttccgagctttatgtgaaagttgaattagagattaaccctatatttgtaaatcctggaatttgtgactaggattaccgacacttggtcaggagcacccagggatttggaatttccaaagttgcgggacatcaggtaggactgtagttgcatgtagagttatatgcggtggtgcttgtgctgaaaaatgttatatgtgagtaattggaaactgggattagggttattaccctaacatgagtggtttaatggcctagggttattaccctatagaattattgatgtgtaaacactatgccatgtttaatatatgtgtatatttagattaagggttatgcgttcaaggcataagcaggttggacttagtaacccaaactgagattaaccgttctaaggtcttattgtatatagacgtgtga

SEQ ID NO: 303393 - DNA, 6961 bp, Cannabis indica
aagtttaaaaacctattgagtgaaagtttgttatattaacgacaaaatttaaaaattgtggcagctacaagtgagtataaaaccacttttaaaagactataaaattttatttttagttacaatttaggtcatgcatgcatgatgttaatttttgttatgtgttataatgatctaacacataacacataaagtttgctatgtgttaatttttgttaattttttgttacaagtgagtataatgatctaattctcatttgttgatactctccattctctttgttcatcattattatttttttaactgcatatttataatcttgatctctcatgttcattattttctttttcaagttttcaagaatgtcattcaaaagagtttattaattgcatgatagtatctcacaattaaaattaatttttcttattacattttcatttattgattttctccatttttctattcgacatcattgtttttttttctctatagatttgtcattgttatgtttttaggatagtgacgattacaagtgagatacggtattgacaataattttaaaatttatgagtctcaaataaacttatcaattgttatatatatatatatattatatatatttagattttcgagaaggtcattcaaattttttttttctaattttatgatattgtctcataatttatatttattttacttattatattgtcatcattgatactcttcattctctgattctggtatcattatttctatagatttatcaattgttatcttttttttggatggtgacaattacaattgagataaggtgatgacaacagatttgaatgtagtgatgagtgagatacgatgatgatgaaaattttaaatagaattatcaattgatatattttttttatttaggataatgacaattttaagtgagatacggtgatgatcacgattttaaaattaataactgttttttcttatataaatttatcatttgttatatatattttttcataatttcaatttaatttattcaataataaatattttgaaaataaattttataataatataattaattaatttattagttatcattttttgaattcaaaataactaaaaaaaattaaagacttaaatattaatttactttttttctcttactaagagaaagaaaaaagtttatgagaataataattcatgctattaaaaaatttatataaaataggtcaaaatttcaattttgatataattttataagttaataatcaataaataaaacataaatacatgtgaagcgcaatttgtttcctattttttttcttgtatattagaatacatgtcgctattatctaatgtagtatattctttttttttttaaaggaattggtacttttattaatcaataaccatcaactattacaatagataaaagttcagtaagagcattctccaaactaaaactacgatcaggatgaaaataagagccacgaggaacacaatgagtgaccttgtttgcagaatgtttaacaaaagataatttaataaatagtaaagaagctagaaatattctacattcatgaagtaattgaccaaaaggagactgtatattcaacgaactacaaatggcctaaactcctacaaacgaatcattttcaagcttcacactcgcccaccctttagccttaatccaacacaatgcttcttttatccctaccacctctgccaaagctggatccatgtgaccaaaccaacacaacgaagctacttccaccaactgaccaacactatctcgagctacctttccagtgctgaatttcttttttgacatgaaaatcgctccatcgacactcaccttaatcatattattatagtttagtcccacgctcaaggtcttcacccaaatccgtagatgagaataaataacccctccctttcaattgagttgtcgtccattgattaagggacacacgagttgaaataaccacttcagttgctaaagtacttttatttcaccacacccaagtattttgaactagccatacagcccaagcaaccatggccacttcctcttgaacccaaaaactagcagtatattactgcactaaattaccaaactaggtgcaaaaatcaaaccccctgccaaacattactagcatccacaatcgatcgagtccaacatgcttttacaaagaacaaccaactagcacacagaaaatagattcatacgcttcattatctaatgtatattggattcaaataatttttttaacaaaaaaaaatagaaaacttgaatatttggataggtttcttattgatattaccacacaaaaatttcaaaaaccgaaacaccccaacttgaggcacccatctttgcctttgataatgtcatactcccccatgcaatttttttttgggtctgatatagcatcgtagatgcatcttattattatttttcaattaaaatattagtatgtctcctgtttttggaatttgaaaagaaaaaagaaaagtagatattccatgatcaactaagaatcaattgcaagtcttctaaaaaaataattgtaaatctcaatcttttttcttgtctagaattatagattggttagttttatcatatatatttatttaaaataatcattaagcataaagtaacaatttatttgaagtaatatttcgattaaaacatggaagattattacatttgttttgtttgaaatgatcttcagttctcacggtgtggaatagtcaaatttttgcaactgctgatgcataacttacgctgttgtctctcatacaattgcattggcttgactgctcatatcgaagaaacttgatcttcatctttgttgagcaacctctcagcatatgaagaaaaatactaatcggatgtcttccgcatatggtattgccatactccaacaaataattttgaaatgtatctggatcgcctgtttcaattatatccattcccattttgtccaaaacctcaatggatttgtatacaggcccatgttttttctcataatgagtgtaaccgaattgagagccccagtgacaaaaatctgaagatacagaaaagaaattttggggatcatccacatattttgcaagcaacgctccatacatagcttcattttctgctttaacagctcctacaagaattggtaccaccttgatagtgtgcccctcaaaaactttggcaagataaggcaaatgcatttccatgctatgctcagcctcatcagcatgaatactcattcgttcaaatttattagtagccttaagctcatgaataacttctaaatcaataggtaagtccccaattggcgtcttgtaaactgaagccattgaaagagcacatttcaaagtgtaatagtgatgagatggaccaagaaggaacacacgagtaatgtttgtcggatcaatatttccaaatgcgtagctagcagcacgacccgaataggaatacccagcatgtggtgcaataacaccccgtacttgaggagatttagttaccccacgattctctcagccaaccttctagttcttcccctaacttttttggatcatcgctgtaccaagaaccggcatgcgatgcccttctttccatttccatggaaggaatttgggattcaaaagacagaaacaaaccctaagattgaagcgtcaaaagcctgacaatttagatcctattcttctaaatgaggatcctctgtctctctttacctgtatatgcaataaaaaaattacccatcacaacttaattaactcttaaattattttagaaaagaaaaaaaaaacttaaatagaataattatctcgtttaatccatacatctcttctattgggattgtaaataaagaaagcatataatagaaatgacaaaataaccctaagaatttgtcaaacgatattcttcagctctcatctttccttattttggaatagaaagcaaaggagtattgaggaggatgaggttattggcattgatgaagtggtggtggtgaagggaagggttgagctattgagtttttatgccctaaataaaactcaattttaatgtaatcttaatttcatttatcaataaaataacataaattattttatttctatttttcatatgacttggttcacataataatttcatgataatatgtttaatatataaattttgttaaatccttatcatattgttatttataattatgtgttgtctacacagtggaaactagttatgagcacattagtctcgtgatttatcagttcactgaatttatattgatataataatcagttatgtaatttacctatacttgtggtgtgtgaccattttagcccttggtcttaagatagcttaagctttaagttaaggggcaaagtggatttttgtttatgaattataactgtctttagtgatttatggtaaaattaagtttttattttgattgttatttatcttaataaaattagtaattaaggtgttaatggataagttagaatagttaagactaaactcattcaagaagctctttctctttcttcattttgactcctaggaaaccggtgggaaatcagtggtgtttctttgattcttggcggatttgaaggtgaaaaaaaatcaaggtaaaccctagatctcttttatttgagtttctggaagttttttagtttgagtcaagcacgcaaattcctgatttggttatgtccgagctagggtttgttgtggggtgctttctaaagcttatttgagttttttgtagcttacttaatttgaatttgcgatctggttgagttgttgagcaagtttgagttcaagaactcaaacttggctcaataatggtaattttgattctatgagttttgcttgttgttattgatggatatatgtttattggggtactattaggtgttatagaccttagcttgaaatttggggtaaagttgaatgagattcaagctcttaagattttttgcaaaacaatagttcattgttttccagaaacggtaaaacattttccgaaagaggatcctaagaagtagtttaccattttgggaatctagtttatcaatttaggtagttttggaagtcttagttttcatgttttctcgatatttagggtattgccacgctatttaatgataacttatagttttgagtttaggtccccaaaaagattttagcaagttatttaattatttcatgtaaatatgacatagggccttagttcagtgcataatttccattcaggttgactgacacacttgaatctggaaatgcgataagattagtataaaatgtatacatgtatatgtgtatgtgtgttatatgcgtgttgtattatgtaatttgtatactacaaacagcagtacggttgcagttatagtgcattggtgcagtatataatgttaaagggtatgacacaacgttacaaacactagtaccggacgagtacggagtgcatgtggtacaacactcaattgtactcgaagtacgagcaaactctaccaaaaaaaattttagaaaaatacttagtgcatgtggtacagaggtcgtacttctgttaagaacattcttggtcatttcttaagccttgtaaatagatgcatgggtgtattatgttatatattttataattttcttacagagtttgtcgactcatagatactgtttacatgtgtaggtaagagaatggcaaaggctgagcactagtgagtccaaagctttaggatgattgtacatattaggacggttagaccaggagtgttcagtctcaggacaacatgggtcatcattttgtagtcgcagagcaacacttttgtaaaatatattagaatgatgttgtaaacttttttaaacaagatcccaaaatttatgtaaggttatatatttataaaggtttaaagtttaattaaaattttaaatatggcactattttcaaagaaaccctttgattagcaaaggtgtgtatagtaattataaaatcactgtagcgggcctaatcaagtacggtgttacaatggtaattgtattagatggttatttcacatttgagtggagagtagacatataacttttgctactcaaatagaacatatataaattagtaacctaacaagatccatgactataagtacgtgaacaatcgagtctcaagtctaggatcccctttgcataatggcaagaaaataatcatcgtgcaaagtatatcttgctgactttattcaatgaagagatcagagaaaaatatgagacttttatctacacttgtgatatctggaagacacttcacaatcattatggtgccactcatgaacaattagtataagagagaaatattcttcaaaacaacttaacattttgatagaattacaacatgatatgacaaggtaaatttaatttactctatatcccgattatatcagtggaataaattattctttgccactaacaatattttctattgcttacagatttcaaagcatacttgataattcaagaaagtgagttaacttaaaaaaccaacggtttgttttgtttgataagtgagaagcgatttttcaagagttgaagcaacgatcaataaaagcactggtgttaactttgccatcagatcaagaaaagtctgtcgtttattgtgatgcatccaaacagggtctgggatttgttctgatgcaagttgagagggttatattatgcctcccatcaacggaagtattatgagcagtgttttccaacgcatgatttagagcttgtcattgtagtttttgctcttaaaatattgtgacactacttttacggtgaaaatgtgagatttatactgatcataagggcctcaagtatttattcactccgaaagatttaaaatatatgaggcagagactgtggctgcaattagttaaggattattgtgacagtcattagtctcgtgatccgtaaggggaaataccgggtaagctgtgcaa

SEQ ID NO: 303394 - DNA, 2350 bp, Cannabis indica
gtggtattacagttatgggttagtataaaacttgaatttttttttctagttcatatatatgcatgaatgtattcttcggtagtttaggccttgagttaaggtggatccggactagcccctctaccttataaaatacaatttatattaattattttaagaatttatatatacatatattaacttatctatatataaaataaacctatagcatgcattaaaatttaggatacatattattgtaaatttatatttttcatgatctaatctatattaaatagatgacaatttcacatgaatatatcgtgagaggatattcacaaggctaaaaatggtataatatttttatttatttatggtgtatattcttaaccaaaaaaacaaagaaagaggtggagaaaattgttaattgcttaattttatttttattattaaaataaatgagaacgtgatgagctcaagtttccttatccaatattttggttgtttgctaaaacctactcaccaccactagagaattagctgacgtggcccattaataatgtgccacgtatgcataaaagagccttgaatcgtgtgctcctcccaaaaactaatccttttggtgttttatgagaaatagagacgctgaatgataaggttcgtaatgggccgtaaggctgagattctgccacaaagccgaagcctgtttttctgggcccactattcactatttctcttttctttctaaaatgacatctttctatattatttgtatttgaactttgaagttattccattcacatttaacaagacaaatttgattttttatgcttcctagtaagactagtatattccctctgaattatggttttgactcagataattgaaattttggaaaattttgagcaaaaatggtggttaatgatcttaaccataccaatgtcgaaacgatattgttatggtcctataaaaacttaattttagaagtaaaaacaatgttaaaatgatagttgatgatggcactaagaaaatttgagttaagtggtcaaaatgatgataaaaaatgattaacaattacaatagtatgatctcaattctcaagcaaacttaattttaaaggcgaaaacgatagtagaatgatgtttaataatggtgatgcgatgctaaacctttacaatttgaggctaaaggatccttgacgatgtgttacgatgataaaaacttgactttggaggccaaaataatactaaaactatatttaacgatattgttatctttttataaaatcatcgtcaaccattattttttttatgagacaatcgtgaactatagtttttgcctttaaaattaaaattttatgaaaccatcgcaacaccattgtcagccatcacttttagtatcgtttcgccctaaaccaaattttaatagggctattgttaaccgccattaaccatcatttagcaacaaaaatcaagtctttatgagagtatcgttttgaatactgttttttggccttcaaaatagtttttataaccatcatttttttctcaaaaattatgcagatttcagaatttgctatctaggaagaaaataaactgtgatcaaatccaaaaatccatgcacaaatgtgtttgaaaatatataaattagtgttttatgtaaacacttgggcagatttaagttttagattgaaattttcatcatttaaaatagatttttttttaatgatatggtggtggattaaagagtcaaacaatgttggtgttggtgttggtgttggtgtgagatgagtattatagtatcaattgaatgaggatgcatatttcacataattattaaacttaccaaaaaaattcattacaggcaaacgtaataatcataccaaatcagaacttggcaatggcaagttggcaaccagtgttatcagtcctggtcttttggcattgctttaggggcattttaaataagttttggatttaacgcaaatttcttttatttaatgctaagatattttcttaatattaatatattttcaaaataaaaagaaaacaaattaaacacatttctctattataatttggttgatctaccttacattttattggagatcaatgataaatttaagtgcaacctaccaaattaagaaaaaataaaatttcaaccctcctaataaattagtcggtttggatgggttgtactaatatttttttttatatttaattgttatattttaattaattgtgataataagacaaatatatagattgaattcaaagttcaaatctaccaccataaaagaaatatagtaattgtaactttttatttttttataaatatatataaattatattatatatagattatatataat

SEQ ID NO: 303395 - DNA, 2941 bp, Cannabis indica
attttaaattttttgttctttttggttgtgcaggtccgttgacaagagtagtgatcccacgacctaggccggacggtgaaccatcccctggagtaggcaaggtatcttagaatcataatttcattactttgcttccattttcaaacatgcttatgaactgaacttatccctattatttcggttaatggaatttgctgtttttttttctttccaggtatttcttgaatataccgaaatggaaggggcttcaaaggcccgtgcgggattaaatggaagaaaatttggcgggaatcaagtagtggcggtgttctatccagaaaacaagtttgctgagggggattacgatgcctaggttttttttttttctttttttatcattgtttagatagattgaacttaagacagttttattgttattatcaatagattggtgtctgtcttttgtagcttaatattaacacaatgaattggtgtcttttgtagctttaatattacttaatgaattggtgtctgttttctctgtctagttacttgcaagtaaatggtgaccatttagactgacaaaaacacagatagtttatttctcttgtgtaattttcttattgaatgcagcaaaatattgctgaagaatttcaattcataattttacttggtgcccttgtacatgttgataaaagcattcatttatttgaatggttcttttttttttcacttaatcaaacttcactaaaaagcaaaagccaagaggcaacagtagcaaccaatacagataaaggctataagcaaattggaagtagtctaggccaccaaaaccatagtattagctaaagagatggctaattgagctaatgagtgagctgtagaattactagttctattttacaatgggaaagcttaaaactgcttaaagattgtctcaggtgatgggcatcttcaatgagtttgccaaattcagaaaattcgaagctccactcattaatacacttggataccatttattttaaagctttatatatcaccattgatattataagaacgagtttcaagtgaattctgtacaatgaaatggctcttttcgaaaacatattttccaatttcaggtttgttatataaaaattaaacttgcttgtacatgtcccccaatcgagcactaggtgcataaatacttctgaaatggatgttaaatgtgggtaggctggaaactatttgagagtaaccattttgcaactactatactaaccaattgatggtaaattcctacttagttcaaaaactattgtgatgttatactttcaagaaaattggagctactcgtgtggctcttcttcagtggaataggactcaatacggtaaactggattgggtaattaaagatttagagcagaaacttgatagcctctagaagttacctgctggagtccgggactggaaggaggaatctgatattagacaattgttgaatgaatctttgactaggagggcgatttattggaaacaaagggtgagaattgattggatcaagaatggtgataaatgctctaaatttttcttccattctgctgctattagaggaagacgaaatgccattgaaagcattttggatagtaacaatgtctggattaatgaccgggaggccattgggcgtgagttcattgagtttttcaaaggcatcttctcggggtctagtcccgggcaacctatagactgcggacatctcttcccggctagaatctcccaggacgatcaagacgcgaccaccctttgcccttctcgagatgaaattagaaggacgttgtttgctatgaataaccacaaggctcctgggccggatggaatgtcagttctctttttcaaacactactgggagtctgtgggtgatgccttctgtgatgcggtagccgacttctttgagtctggtaagatgcataggggtataaactcgacaaatgtggttctcatacctaaaattcagaatccgaaaagacctaatcatttcagacctatatctttgtgtaacgtgctgtacaaggttatttccaagatagttgcaaacagactaaagcctatcctcccttctctgatttgccctactcaagcggcttttgtcccgggtaggaatatccaggataataacgtgatagtgcaggagattatccattcttttaacaggaagacaggcaaggagggatactttgcaataaagattgatcttgttaaagcttatgataggttaaactgggaattgattaatcaagcccttgagtggtatggttttccctagaagtttcgtaattgggtcacccagtgcttctccactacctctcttaatgtgtcccttaatggaggaatggtggacaagattatgccctcgtgtggaattcgccaaggggatcctctttctccctacctctttatctgtgcagcggaagttttatctagactcttggaagatgatcttgcgaaaggtgtatttaagggtattaagttaaggaggggtggtccggttctaacacacttattctttgccgatgatttaattctggtaggtcgggccaatgtgaatgaagctaaaggttactggaattgtctagagaagttttgctcctggtcgagtcaaaaagtgaacaagctcaaaacgtcaatattttttagcaagaatacttccaatgggttgagaagaagcattaaggaagccttgggtattggctctccggagggtatcatcaagtatctgggtctacctcttttcagatcaaaacaaaaggatgcggatttcaacttcatccttgaagggcttacatcaaaattacaaggatggaaagcgaagacgctatccaaagctgggcgggccactctaattaaatatgttggtctttctctacctctttatgccatgcaaaccaccaaactttctgacggaatggctaagaggatagatggg

SEQ ID NO: 303396 - DNA, 708 bp, Cannabis indica
aaaatactaatttttttaaattaaccatcgtacactacttgttttttcataaggaatcatttacgcaactggctacataaacattattgacataagtgattcttatatttactataccattcaaaaaaattcatttaatttgatgcaagtatttcatatatccacacacataaaaaatgttatttattgtcaataacacatgcaacctacctataatacgtataggcattgactaattaacttgaataaaaataacatgtaatcttgtcaacattaatccaaagagtccaaaattaaagtgaaaattgagaaagacattttagtataataatccaattagataattccattattattaatgatttaacaacatgtcattatacacattattatacatgtatatatatgtacaaaacagaaggcgacttcagctgtaactggtgtctttccttaactcttctgaccgaataatttatatagccccaaaacaatgtgtgtctgtatcatgagcccttcattttattattattataaggtcataagccttaattgtaagatagaagagataatatgatttatgtaaattattaaaagaaaataataataataataagataaagagggatactgtgttctgtgtagagcattgttattagacactaatggtgcttaacacattctcgacatgtcgcattgcgattgactagc

SEQ ID NO: 303397 - DNA, 5162 bp, Cannabis indica
ttaattttattaaaattacatacataaaaaaaatacatgtacaaaagggctttttttcttaatttactaaaaccttcttaggtccatttttttcagggccggccttgatgacgattctcggaaaaaaaaaaaagttttttgaggaccgacaagaataatgatttttgtagtagtggagatacgacgataatagttattttgaaattatatggtgagttttatatagatataattattttatttttgtttagatctctattttgtgtgaggattattcagttttttaattttctttattacaatgtatatttgaaattttttttttttgtgcgtgctgcttttttttttatatataaaaagttgtataatgaattttttaaaaaatttgttagagttctccatatagatttattatgctttaaaaaaatatatatttttaaatgattcaaaaataaatttaaaattatttcatatataatttataaatagcagtttgtttactagtttattttatgattattgttgctttacttaatttattcttatttgcttttataaaggcttagctaattattacattattgtagaacatttcttctcacttttgcaatctactttagcccctctttctctatgttcctttcttttgctctttgagttctatgttcgcataattatctgtctataaataataatatactaaaaaacaaggaaaaaagagttatagtttagaacctcagtgagttcaatttacataaatgaagttatggtttaggcaaaatcttataaaattatagtttccacaaaaagacaaaacaattaactaaactcaaaaaccttatctaaaagaaacataactaccacatggtgaaggagataaagttttctcctttttgtattataaccaataaaataaaacagatagaggtctgagtaaccatggtagccttgagctgccaatttcaaccaactatcattaacagttatctaagcactaaacgcagaccatctagctctatcttttgttcagctcaaccctctcaaagcaatatcaaggttttactaattttcttatgaaataatctgatgtttgtattgtgtaatattgaatattccatgtttctataggtcattataaatggtgcagctaaggaaatcggaagggctgcagtaattgcagtgaccaaagctagaggaatggaggtggctggtgctgttgattcttatctagttggagaagatattggcaaggttctgtctctctctatctacctaattaactaattagttagttagtttaatccaataatgcttatctacttttttttttaattttggtcaaactgatttatgttattgttttatcaaattaggtatgtgacatggaagagcctcttgaaattcccataatgaatgatctcacaatggtcttaggttccatctctcaggtaattcttgtatatgtaaatgtattaaatgaatgtgtttgcttttcttactgtttatatatatgtatatttattcgtgtagtttactgtttataatttttgagcagtccaaggcaacaggagtagttgtggattttactgaaccaacccaagtatatgacaatgtgaaacaggtaatttgtaatgatttctctttgtttgtacagacaccaaacaccaaagaaaattaataattaaaaatacaggacatcactaatttttatttcattcatttattaggctatagcatttggcatgaatagtgtggtttatgtgccaagaattaaaccagacacaatatcagcattgtctgctttctgtgagaaggccagcatggtgagcacagggtgagaaaactcaataatacaattcaacttgccagttccataattcattttaatatatatatatatacgtttatatatataacagactcaatgaaaaaaaaaaaccaattaagatgtgaaggaatcattttcttttccctccttttgcatttaatatgagcctgttgtttataataaattataatagggttgtcttgttgcaccaaccctgtccattggatccattctccttcaacaagctgcaatttcagcgtctttccactacaagaatgtagaaattgttgaatcaagggatactgcaatggtagactctcaacaccaaacattgaaaaataaacatttattaatgtcacaaatatttcacttgtatgtgaaaatatgatactgaaaagtactgtatttctctctcttgggaccaggattttccatctgcagatgcaacccagatagccaataatctctcgaaccttgggcagatatacaatagagaagatatctcaacagaagttttggtaatctggatttctagaaccatgatctacttcttatgattgtcgtttggtgacttaaatcttatagtgactttgtccccataaaggcaaggggtcaagttcttggcgaagatggagttcgtgtgcatagtttagttcttccagggcttccttccagtacaactgtatacttttccggcccaggagaggttagcttctgcatttattcttcttgctctggataatgatcttcattgaactttaccatagccgaaaatggctatctgatcaagaagcactgttgtccacacaggtttactctctcaagcacgatattactgatgtccagtgtttgatgccaggccttatcttagctattagaagagttgtgcgccttaaggtaaccagtccaatcatttccagaacttaatcataaattcatgatacttgccttatccatcaagtaaaactgctgttatatctttttttactgcagaacctggtgtacggcttggagaaatttttgtaaaactcggtatttttggctagacttcattcgaaaagtttcactcccagcaatatctaatccagggaccatttttatcctgcaaaaatacaatatgagagaagagcttcttttaaagaaatttaagggggggatgagaaataatatccataatgatttataatttattagtactcgagtcaattgttttgccacaatattcttcaatgttttgagcaaaagcataattatttttctttcgtagtctcaattggagctgaactccactatacattatacaataagagttttgagtcttttgactttgatttgattgtttagacaagaaactaaagcttcacaaatattatttggaaaaaatgtccttgcaacaaacatattgcttatttttttagtcagttctaattcctcaggtttgcctgcagaaatgattgcataatacttaatttttgatcataactggtatcagtgagcagctatatggaataaaaaatacagttccagaatgcatcaacagtataagctctttggtcattaaatgtggtgttagttagcaacttgttgaatatagaatctcgagcttttggaagtatgagaatttcacgggaaaaagaatatgctatatctcagattcagatgaattcagttcacaatatgagctttaccactagatagtgaactgaaagatctaaatcccttgaaaattattacatacgctcttacctccaacttttttcgcaagagctcctatccaggctctatctttttcactatatgcatagctaatggttgacgccaacaaaataaatccatcatttatctgcatcatttcgttactttggccaggaacttgagtcactggttgtacaaggagagatcgggttcccttcggtagcatctcccagagttctgactctgaaaatacaattaatagttaactccagaaactacaaaaagcaagtatgaaggccaagccaaagaatcaaaatgctataagagtttttagcagaagagtcagcttgaataaactattttcttgaaatccaaacaaatgtatcattcattggagaatgatagataaataacaacaaaagaggcccataacatagggcagacaaataactaactacagcctctattccctctagaatatacaaagaaccttaaggccttaatcctttctcccttgcatcaactatcaaatcttaaactaacaaaaaaaatgtcttgatgctgtccttataagaaagatggtatgctcaccaattgactgaatctcttgaaatgagaagaataatgcatgagaatatcttagtcctttctaagcatcttaaaagtttattgctttacactttggtactatggtcaatgagatttcgaataaagaaagaaaaagaagatgacattcgctagctgttaaatatgaataaatttaaacatattggtaattttcaaggtagtaaaaacatatataaaaaattccgataccaaattgtgataacagtatattttaaggccaaaagtgaaatgaatcttaacccaaaataaataaataaaagacaacaaaagattacgagataaaaaggctctcaaaaaaaaacagccaccatgatgatgaaacagcactctagctaatttaggaaacgttgtacaggacaatatctctcaaaatgacataaaaaaggattagtgtatcaaatgacaagttgaaaataagctatgacatgagaagacaacattatctaatagtaaagtaaaaaatgacactaggacaggttacaggaacttgaaaatgaggtgaaatttctatgggttgacaattgtcaaagaactgataagcttttgcgaccttgctgcataatctacactaccatctacttgttttccttcaaatttttaggttgagatgacgaaaatggttttgaagagggataggtgatggtgtcttataaaagagtgagtagatcaaaactgttgattatgggaagatagatggacgaaggtcatgattgctttcttcttctacttaacaatcctagggataatttcacatttccttgtacttattttcagttggaaagtaatagatccaatgagaaagataaaaaacataaggaaaggtaatagtaataaagaaaaagtttgtgactacgcaagtaataacaaagaaatgagagactaggatcattgagatttagttaaagagactaatataggtgccgtttggtaatacttttgttttttaattttttaatcacaaaatgaaagcaaaatttttgtttttaaaaaatttatttttgaaaaacgaaaa

SEQ ID NO: 303398 - DNA, 2566 bp, Cannabis indica
attttatttttaataataaacaattttatttttaatgtaaataaaaagtcacccttgaatttctcaaaaacaaagaattctgttatataggcacactttatatagaataaatatatttcattattcagaatacatacaaaataaatatgttaatttaacaattgctacaaataaaactaaccacattcatttaaatagtgtcaaattaaatatggattcctatatataataatacttaaccggttaaaaaatatacacaattactaaacacctagcatatatagtaaagaattaataaaaaaaatattcctaattaagaaagtaaaaactactaatcacaaaccggttctaactataacaaccataacaaaaaaaagttctagtaatcaagttacaataaccttacctttcatgtaaaatgtaagaaaaaaactatcatatgtgtgattaagtatgagggacaattaacaattacgaggactacacaataactaaaatattaattccaaccaattcttcacctaaacaatcagattgacttgataaaatcgagataaaatacaacgaaaacaacattaaaatatactaccagatatcgccaggattaaaactaataaagttgctaagtgacaattctctcatattctacattgagctcagaaaaagactcaaacaacagtaactaagtctctcctttccatcacaacaataaaagaaataactattcaaaccatagaaaatcctttctacaaccaagagaaatacaaaacaaaaatattgaagaactggttctacaactatacaaccaagcattcaacaaacaattagaatatgaaggagaaaattctaatgactacaattaggtacaaagctctccaaacatgttctaaatagctgaagatgttgctggttttattataaagaaaaaaaatgaagtaaaaaaaagggatgaagaaatggaaattatcacatatcagatcatacagtattcaacattgaatgacaaatatataatgataagaacgttctgaaaactgcaataagtttttatgctatggtccacaacttccaaatcaaaactaaaagatcaaaactaagaaaatatatagttacttgtgtagatgataattgtaactggttcttgtgtactattcaaaactgaaacaaatacaaattttcaaggtcataaaatatgtcaatgagcacaatactcattgaatgtaataatggaagatcataggcaagaaagtttcaatattacttcaaaaatagtaataaaaaagtacaacttaatataggtgaaacatgcaaaaaattacattatgaaggacttgcgacaagaatttagtgtctcaatggggtatcaaaggcttggagagcaagaaaaatctttagagttgtcaagaggcagttcaaaagactcataccaacaactaccaaaatactttcacatgctaaaagtggcaaatctaagaacagtaacaaaatttgttacatacaaaaaaaaattggttcaagtacatattcctagcatttacaaatttaataaagggatggcaacattgcagaccagccattgtcgttgacaacacattcttgaagacaacatacagaggaacattatttacaacctcaacgattgatgccaaaagtaacatattcatgttagcctttgaaataagagactcaaaaaatgattaatcaatggaatagattttcattaaactaagagaaacattcgaagaaaaagaaatttagaaactggctccaacaaaactctgaattgattactctatttacacgtttaaaatttattgttgaattataactaacattataaagaatttgctttcttatatttaaaataatttgtgaaaccagttacaacacaactaacaaaaaaatatttcaacttttcacacatagatataacaatcatttcaaactgacataaaaatacaaaaagagcagtagcataagtctacccaaatatttttcacggtgcatgcatattcatttgctcaaaaacatcaatgttaactttgaagtacatgaagaagaccttactattaactttgttaaaattgcaaaaatatacaatctaaaattatttgagcattacatgtctgaactagacacgatagacaaacgaataagaccttatctagaaagaataggtcactgacattggagtagatatcactacccaacaaaaaggtgcaccacgatgacatctaatatagttgagtcaataaattcaacaatactaacaacaagaagactgcccattactacaatgattgagagtcttcaaaattttgtacaaaaataggtatggaaaaatagaaatgaagcacataaaacattcacaaaaatttcaacggagactgaaagtatactcagagaaaactttgtttgtgcaatgaaatatgaggtgttaatgcatattttcgttaactaaaaatattagccattttgtaataaattaactacagaattgattatcccaataaattgataacatgaagtttttaacgtaattttgaagttaaatcttcatagtcca

SEQ ID NO: 303399 - DNA, 2475 bp, Cannabis indica
atcagattgtaatgggttttatttagggcataaaatccaacaagtagttcctccccaagttgtggaattatattgtccgagaaggtgtacctaacagtttcccactagatgggaaactcttacagttagagaactcccccagctgaggctactattaccatcgctaaacactcttagccatatcctaccatggctaggacgaagcaaacgtgtcgtagggcacctcctaaggaccctcatattgtcgagttaatgacaagaggaagggtttgacatgtccaggaggctcaacagtctcaacttgaatagcccgaggctaggtaagctgaggagcctttggctaggaaacctatggctggccaaggtgaggaaccttcggctagtcaggatggtgattctgaggctgagcgagctaaatctgcagttgggacaagtactgctaggaagcagtataagacttgtacagtgatctagcgtaatcccttgggtacttatgatgaggctcaacgacctttaaattccaagggtcaaccgtcaaaggaaggggttgagcatgttgaggaagaggctcccaagccatgggtcctcaagtacggtaactagtagcactgattatttcctttatcttccctgtcagctatcaagctcaaaaaaatcaaggaaaaaggacttttgggaagagtctaatgtgttaggcctgatagagcttgatttgcgcattatttattgtccaactagatgtcatggttaggtcctcatgctgagcaaggggcaatgtttcctttgcatccctattgtagggaaaaagccaacttcttcaggttgtgttcgattcaaattaccacgaaaggccttaagtacctttcaatgctctttattctctatgcaaagttaggctagcacaaccctcaccttacgaggtgagttactgatttgaactaaaaaccactctgaagtagggaaagtctagataattctattttagccagctaggctataagtggcttggaggtactaatgataaagccatgtctaaatttgggaagtaatctaggagctacttcatcgcttgggatgttagatatgtccttcatcactttcaaaaggtcccaacatacattcgctcaatccctactcttagattgagggaaagagctaacgatatcttgtctctctctacggaaaggcacaacatttgtaggttggcccgtgaggagaattttaggaagtatggcctctaccctcctacacaggacaccaagggtgttggaaaccctcttgaagatccagatgatactcccacggtgaaggaggttagtcaaaagaaaagacctgcgcctaaacaggaaaagggtgaatctaaggaggacatccctctagccaagattgccagaatagtagccaagagggaacgagcccttcgaaaacatttagcatggggaggcatggatgatgacattcctgtgctgatcaagcctgaaggataggaatctaccaagcctgcccagccaccatttggcgtctagagacaaaggcaaggccattgcttttgaggaaagctccgatgattcctcttttgaggatgataggctctcgaacaaccctctagatggtagtaacttttttacttttacttgcatttagtacttattacttgtattctaacttttttattttcctttttgtagatatgctctaggatgaaaaacttggtgagggaaccttcaggcagctcttcttctagttagcctcgggccaaggtggccaagtcctttaggtcttgtaatgtgacccaatctatcttgcctcccctcctttaggtcctccacaggccaaccaacctgtggttataaatattccttcaaggagcactcctcctcctcttcctcagagacatcaggcaaggcagcccagaagcacagtcgggcaaccttctcgactaagggtgagaaggaaaaagatgttgcccacaattatattggaaatttttttccaagtgttgatgatcaactccatgatttggatgctgacaccctagactacctgatagcgagcactctcaaagatgctacctccgtaagtggtttacttgtctaactttgtgtatgcaagcctttttgtacaacttttctaactttatttctttttggttttaggtcttgttgaatcttatccatgcccgtgccagggctaagggctctactacagctttcaagaagaaacatgagagaaaggatgtcgaactcaaggcaaaggaagttgatcttgcaaaggtgcaggctaatctggacttgacatcgactagtctaagggaggtccaggagcagtatgagagtgtgggtcaactacttggtctccgtaaataagaggtgacaaatctgactgctaataactccaagctgaaaaaaggaactagagaaggattgcaatgagaagtaggtagctctccaggaaaagcaggaagctctccaggaa

SEQ ID NO: 303400 - DNA, 1879 bp, Cannabis indica
gtagatgattagagccttctaaactaacagaaagtaagcttaaactagaaaccatcttacctagtgtttccttatttttggctaactgatgtaaactcttcactagctttctattcactgaactgaacttgttttttcttccaaaattttcactctccaaaccaatgtctcggttgtttttctttatttcagattgtatacttcgcgtcaaattctcttcctcttcaagacaatgtaataacaaatccaccttactagatatattttcctgtgaagtaagttgtttacactttcttaacttgtcctcacagaatatgcatttggagagtttgtcctcattacaagaatcaacttgttttgaaagagaaaaagcatctttcattgcttctataatgacaaactgatgtatttcttccttaaggagactttgtgtgttgtgtgagtctaattccaccttccattgcttgattgtttctctaataaaatccatacaaacatcttcctgtatagaactttcaacaagttttacctgttcaaatttatgtaaagctgaattgacactatcaaaaatacttttggtggtctcatcaaagacaatatcatatatctcttctctaataaggatttcagagtcatagcattctatggttttgttcatttcctttaacatttctctgaagatgagtgtctgtatatcatgatccaacttttcaataaatgatgattctttcaaacagatgttttcagacctcacattgttaaattcaactaactttaagttgaaggaagaaatacaatcctcaatcactttgttaaagatgatgaaatgcatttcttctctgatttgagaatcgacgttgttggtttcgattttcacattccaataatttgtcatttctgcaacaatatctttagataaatcctcccatatcaggctctgaaagtcatagatatataactttgtgttgaactccttcaacaagcctttaagaagaataatatatgtctcttcaattatgttggttttcaagctcaattcctctagttgtaactctcttctccccatctgatttggtagtttatcaatatcatttgtactaaagtttaaaaacctctttcttgaaagactcttttccccatttatgtctctatgatcattgaaatattttcccatgtcagcactccattctataaaattttctagcttctcaatgatttcttggactcttttgttgagggtaactggttcggtgcccttcttgcaagatgaatatgctttttctctcataagttctctcttcaatagattcaattcttctgcctctgcactcttttttcgtatgatggactcgtgattctttatcatcttagcaacatagtgatttccatcttcgtcaatagcctctcgaaaattctcgctcttcaccatgtcaaaattttcgaaaatggaggacttggaaggctttccatgttgaaccaagaaagactcaagttcatttctcaaacgtgtaacttcaatcaacataacagaccaatgttcacctccgaaattgaatttattggggagctgattctcttgactcaacaatgccaaatcagaggtctcctgaaaatcctgcatgatacctttaagtaagataaaaacagtgtctttttcaataccccatctccattgttgctctattggaacctcagataaggtaatagcattcctcatctttccgaaagccaaatctaaagtctccttcaacatgtctatgtcagaacccatctgctcaaccttctcattgtcaatagattcatcaagctcattgcattggtcaggctcaagtttttgtctgatattccaaacttgctgatcaacagaattctttaactc

SEQ ID NO: 303401 - DNA, 3861 bp, Cannabis indica
tgatgtgaagtcaagttcaagagtgactatgtcgatggtgacctcgcacttaatgacagttatctacgaatgacaacaaaagtttaactgaaggtatttttaccaccaaaaaaaaattctaggtattaatatgcaactagaagataaactcaagttattatcaaccgcaaattactctaaatttattgtagtgttcattatataaataaagaaatattattgacagtggcaatgaaacataaagaaataaagttctcaaacaatgttaattaatataatataggataaattatacaatggacccttttaaactcaagtagaagataaactcaagtattatcaccgcaaattactctaaatttattgtagtgttcattatataaataaagaaatattattgacagtggcaatgaaacataaagaaataaagttctcaaacaatgttaattaatataatataggataattatacaatggaccattttaaaagagatgtactattgcagtgtctacttattttggcatttagaataattttttagtctattttttttctttatatttatgtacgttatagctatttaagatatcttacaaaattttgagaaatttggaataatttacaataatatagaaaataatattcaaacagtctattttacacgcctatagaataaaatagttacgagtgtaacacactgtttgaatgaaattttcgatgtgttaaatttttctgaatttcttaaaattttgcagaatgccttaaataactataatttacatgacaatgagaaaaaaatttgactaaaaaattatttcgaatactaaaacggatagaattttatctgtgtttttccacctacaatattatcatctcactttcaatctatctaatgatatgagcaatgaaggaatcccattccatacgagtgacacctccttcttctgtagactttctaacttcaccacccaattcctcagccctttttctcatttcaccaccttcatttgaaaccattaatgtcctaacagctctgctaatcatggatgaactcacaacctcatctctctgctcccattccaaaacagccacacccactttgagcacttgtgtgattaacagagcattcaaaggttgatctgaatgcaatggccatgttgctaaaggcactcccatacttatactctccatacaagaattccatccacaatgactcataaacccacctattgatttgtgcctcaaaatctccacttgggacacccattccctcaccacaattcccattcccttcattctttcctcaaacccaattggaagttgggctccttcaccttcttcattagtacctaaaacatcaaatttatctccttctctcaatgcccatataaacttaaccccacttagctctaacccaattgaaatctccttaatctcttcctctgaaaaaacagatgtggttccaaaagagatatacataacactatttgactcttgtttatccaaccactccaataaccacttatcttgaacttggtctctccttagctcattattactcattgtcgtttggtgtaaaggcccaacagcccaaaccttgttcttctccccaccaatgtcgtttacaagactttcaagaatatttccttcaatagctctacaactattgtaaatctctccagcttgaaaattcaccaccccaagttgttgccttttcataaaatcaagtataaaattagagaaacacgatttcaaagggggcatattgttatacattggaacgatgtcgtttcgtcccaacgcttcacacattaacgaaaagccaacaaaaatagaaccgcaaattgaatgaataggcttctccgtttggaatacaaacgacatcttgaaccaccgaaaccataacaacatcataaattacgacaagtcgttttgtggatggagatagtgattttagaagatcacaaacaggttgacgaaggtgggtggaggcttcgaataaagggatagcatttttaacgaacttggattcaaaaaaacatggattttgttgggaaattggtgatgaaattggaagtgggtaatcatggaaatggattttggttaattggttaagtgggtttgaggctcgatatttgacttgtgagttgtgaagagttgagctaatgtagtggactgggatgtcgtatgaggatgaaacgacatgggcaaattgaaggagctgattcaaatggctttgagctaggaatggaaccattacaaccacaattgatgatgttgatgaatcttttgtagtctccattagtttttctttcttttctttggaaagagataaatatgatatgagttttgatttagcttttatttttcaagttttgatttgttataaatagtcaaagttctatttaatgataagcttttaaattgtataaccaacaactatcacatgctctaatatgatgggcatatttaaccaaagagaaatgttaaaagggtacccgacactatttttgtgaggtgtaattttattattggtatagtttaatatcaggtctcactttatcactaactaattataaggtgatacttcatctagtgcttcatagcaatgtttttaaggaaatggaatgtcaatgaccatttcactattttagtagaataattattacattttaaattagaaggaaagattattccaatacaaaataagaaaaaatttaataatttaataatttaaattgggtaaatactattttggatgttgtgtttttaaaaattaccaattgaaccttctattttgttaaataacgaattggatcttgtattttataaaataatactaaatagtacccttaaactgtatttttttaatacaaaataaaacttaataacaactcgatctagaagtgttacgacaaatttggttatgctttctacttctactcttgctaggaaatattttcgagttgattatattaaaaagaatatcgaaaatagggtactatttataccattttggaaaatatcatatcaaattttttatttaacaaaatagagagttcagttgataactgttgcgacatttaaggtccaaaatagtattaatccttttaaattttattcttattttcattacccattcctattttcattttttctcactaaataccagctaaatgtataatacaagacaaaattaatgggccaaaaaattaataaattattggaaatttacataatatacttagttttgccaactttttacatatatactgtgaggcggtaatgtttatatttttactgtttatataatttaaattttatacggcagactttttttttcttttgacagtatattaagctttttttaaaacttttatatatatatatatattatagtgacaaaagctgtcacttttaattgagttttattttactttttgataaaaatgagtcacactccatgaaagtgacaacacactagctcctatcacacttgttattatatgagccactcttattataccagctccaaccaatcaaaaagtcctaacccaacaactacctactttgcaatctcaacaagtagtctctctcttgtttaaataattttcaattgttcacgatatgcaatctatactttataatatttctttatatcatttataattctaacaactctagaataactattaaaaatacacctgtttttgttgagccgttaaatctaaacttgccttgtcacagcaacccaatcaagccagccagcataaacaatcgaccacccaaccacttaggtgtaagttaaaaaatactacaacatttaaaaaaaagaagtaaaaatgataaattttaaaaaa

SEQ ID NO: 303402 - DNA, 2258 bp, Cannabis indica
ttatctcactactcgaaagtgatgctgagtcaagcacttcaaatactgttaatgatacttgaagtatctacaaaataatataaataaatatataacttatgtacaaatattataaatactatgtaaaatatatttaaataatgagcttcttatataggacacgttatatatgtagttaaaatgcttagttttaattagcttgtaattattattgtataatataatatatatttacactttttatttcattttaaaatattaaatctcaattttacattttttattttatcacaattaattatacaaaatgaaaataaaaaaaaatcaaatgaagagtttgacacgtacaattgcacctaattttaaaaaaagtggcaagtcaacctatataaataaatttggaaaattgtacatgcgtccttttaaaaaggatgtatcgatatattttaatctatttcggcattcgagagaattttttaatccatttttttatattgtatatgttgtagttatttaagatatcttataaaattttgagacattcagataaatttaacacactaaaattagggtttaaacagtcagttgtacacgtaactcttttattttatacgcgcataaaatagattatttaaacaatactttctatattataaattatttcaaatttttaaaatttttgtaaaatatcttaagtaactataacatacgtgactatgtaaaaaattcaaactaaaaaatccttccaaatgctaaaataaaaaaacggtgtatcagtacaccctttttaaaagtatgcattgtaaaataaatttaacctaaaaataaccaaattaaataaattacaagtatcctattatatcaccataaaatatattggaaaactctttgatggagacccttagattggacacaccaatattcccagattctattatttttattgagaaatgttaaggtaagtaccaagtacataaaaagtgttatattctctcgtatattttgatttaataaataatataagaaaccattaattaattataagatattacattgatataattttgagtaccttaaaatgttaaataaaaatgctcatttttattgattgtaaacttttttggatgcttctacaatgcattgccataaaacagattcattgatgcactccctatctgttttgatatttagaagaaattttattctattttttttttataatcgtgtataatataattagtcaagatatcatgcaaaatttttaaaaattcataataatttataatcgagaaaataatatttaaatagtttatttcacacgcgtaaaaaataaaagagtcacgcgtgcaacatactctttgaaccgtatttttagtgtgttaaatttttttcgaatttctcaaaattttgcaaaatgtgttaaataactacaacaaatacgaccataaaaaaaattagactaaaaaattctctcaaatgccaaaatagataaggatagtgcacctattttaagagtgtgcattgtagaatttctcaaacttttttgtggggcaatttcaattgttgtttgtaggtgattgagaaatgctaaaaggcaccaatagtgcctagcatcctctaagtgtcaatatcgttattggttcaactaagtattgagtctcatataatttaatgtaataattttcaaagagtatcgctagccaatcataaaacaacacgtctagaagatgctattactccttaagaaattgggtacatgtaattcctttttctgttttttttttaaagaaattcaacacttatttcactatttctgtaatgtaaacccatatttctgtagtgtaaacccatttagtataataacacaaaccaataaaattaaatattgccgttgatttcatttgatttttctttttgtccagggtattatgttgtttcgaattttgttgaaaacattggtattttttttcccagttaataaaacttgcagtaagttaaaaaagttgtagctataaagtgtccacacaaaaataatacattggtcgattcacatcacctgataaaaatctttaataatgctatctctttaatacagtgagaaaaataagaaatacttctcattaaaactaacccacaccgcacattaaaagaaattgactaacatccttacatttttttttgaaagaagaaaatattattaagcgacactaggcacatctgctattaaaaaagcaacagcacaatttggtaacaaatca

SEQ ID NO: 303403 - DNA, 2827 bp, Cannabis indica
gacaaccatctaaagatgtgaaacacttgaaaaagttagatattgcatatcatgttcacgtgtaagcacttgaaaatcaaaaagttagatagtgagacagcaaaaaaggggggttggggaagaggatcaacacgttaatcaatataggcatagttaatcaacagcaaactaacaaagcaaaaatactcgtcaagtttttgaatggttgaatgacgcttaacaagtcaaagagcagactaaaaacttgaggccccctaggtctttactttagatagctcaaaagctcaattctacactatgccttatagacgctaggccctcattgttagcaccccagcccctcaccatgaattaggattaagcaatataaagaatcatagacctgaaatactaaaagttgagctctggcgaatacggtgaaaaatatttacagtgattaagaaaacctagtcaccaccaactgagggaaggaaaagctcctaaaaaggggaagaaagaaaggggaaaaaaattaactgtaaactatttactcttctgtactttttgtatcggttccgactgatgtttttcacggtgaaatcaatcatgttaactcatcatacatgtgagctaggattattgcttctacgaaagcatactctcaaaagaatgtcagcctcttgagatgtcattctcgctctgtttctgtgccatgaggcattctatagttccttatccggtgacgcaagggaagattttagcttatgaatcgtctatcggtatttcccgagcatattgaatcaaatgaaagagaatggtagcacgaaaatggtgcgtcgtttgggaaaaaaattatcttgggttaatggcacagtgtctctccatagtccacccaatgaacaaagctatcagaatactcctcgagaacattggatctgcgtccataaaccacatctgcttctgcttcagttcgttctctctcctacacataaaatggagatagtaagtaaaactattttgtgtgcgcattccagcacagttccaattataaagatgtaaacacaattaagaaatgaggtctgtacattataacaaatctaatctcgtagaactaccgaaaccttttgacgatgtactagttgtcataaccatacattattgggccaaactaataaataccactctactaaaggaaaactggaagtcctaagaaataataagcaataattcccatatcatggctcctaaaacaatttcaaaaacaaaacaatcaggagttttttatttgaactatacaaaacatgaatcttaacttacagccaccttgagccattaatttcaagagtagcctccaatcaataacacttttgaagaacaggatttcctatggtataaatatcattggctgatcattgtaatttatgagccaactggccctaatttaccatttaaccagttatctcaatacaaaatcacaacataattactctttttgttcaatacagcagattaagtactgacctttgaggtggatccacattcacttgtggatggggtagattctcccattattccattgatgacattctcagatgatagtccttctattggagagcttgtgagcattgatgacctatacatgttacatatccaattatagcacatttcagaatgacaagaaacaaccctcccaaaattaatccatccacgtgtattttttctgtcctccaaagcaaaattataatcagagaaaaaaaaaaatcgacctaatactcgtgtttgtaattgagctcaaatcttaacatttaggattatttgtttctcctaaatctacacacaccatcaataaatgatttccagaaactgaatagaagattacctctcataaggttcttcttcacatgaattcccagaagaagatagccagtccaggtcaagaaagtttgagaagtttgacatatcatgttcaacaaagtacacttgatcgttttcatggccgcgatctctttgaatatccccaaaaagttgtctgcgaggcattgagggagtatacctacattgatattatcatcagtgtaagttttcaacaagtgaataaatcaatttaggccaatttgacagcaatctgcaataggagtacagtggtggaaaccttgaatagttagtaatatcactctcacaggttgatatttcaggagatgattcacttagaaccttcttgtcttgtgattcctcaggtaaaactgagtcagaaaatttatcctgcttgccatttctagctgatgtgggtgagatgcactgatgaagaatgtttccatccgatagagatctttggaaaatagacctaggacaaaaataaacaggttataagaatttaatgtataaatgtgacaataagacaaaacaatcaagaaaataatctctagtgtccttgcatcatctcttcaagaatcaataatcatgttaaagcttgttttatctgaattctttgcatctcaatgtcaagcatgttaagataccttccatcatctctatccctcccagaatcgtaatgttggtctgaatctaattcccagagtgcaggtttaccctgctgtggttggaaatgcccaaggaatctgctcaagatataaaaaccaaagaattacttctaatagagcagaacatacatatatcaaataataaacccataaaaatgcataacaacatcaatcaacgaacactagaagagaaagccttttggataaaagagtaagtattgtaaatgatagaataacaaacagcatgcagcacactaattttttcacaaccaacaaaggcctttaccgatcatgaaaagaagagtaaa

SEQ ID NO: 303404 - DNA, 2332 bp, Cannabis indica
ttgatggtagcatgggggtatttgggaaagctcgagatgagcttctttggcagggtcgttcttctcaagctgcggatgtggttcgagtggcaaggtcgtgtcagtctagttggctattggctcaagagaacaggtttgaaccactgttgtttgatgctactgttgttggtagcagtgtttgttgggtgaagctgcctgctgggaagctgaagatcaacactgatggggcgatttttgaagcaacaactcaatatggtacgggcatggtcattatagattgtcatgggaagttaatcgaagctagttcctttttgcattctggagtatgtcagccagctgtggttgagatattgagcgtcaaggaggcccttagttggttgaagttgaagaatttctccaatgtcttagttgagacagattgtattgctgttgttcaagctcttaatagctcggttgctcttccatcggtttttggtttgtttgttcaggagtgtcaattgattctttcttctttacataatgtttctatttgtcatgttaaacgatctgctaacaaagccgcacattgtgttgctcgcggtgcttgtttttggtctgatcgtctttttactgagagcaatgttccttctgctcttcagtctattgtaatagcggatattgctatttaatgaatttacttttttttttaaaaaaaaaaacaaataataaatacttatagttagtttaaatttaaactgtaatgttttaaaaaaagaatactttctcttatataaccacaataattataatatagaatcaagatctcttgttaaattaaatatattaactatttttcttcattcaattagagttttaaaattagttatatgtcaaattttaattagtttaatagtatatgagacactatttttttaatatgattttgattcataaatatatatcactattcatacattttcaataatatattatacacaaattgctgaacaattatacagttgtatggacaaataaccatgctcaatcaccacacaagaaagcacaccgaaaaaaaactaaaagtaattacttatgtgggctgtgtagccagaaatgagaaagatatataagggtaaagcggataatatcaaatatcgatatttcccaacaacttacacaatgattgacaagatgagcatttaaaaggagggaactaataaagatggatgggaagtcgaggctccataaccgcaacaagtgggacctttcgaatagtggccaatccataaacctcctccatactcacatcttcaccatccatagtctcaggcaacttccacgtaaatccatgcaacatattcgccaagatactgcttatcatcttaatccccaagctgtaacccgggcacatccgccgacccgacccgaatggaagcagctcgaagctctgcccgttaatatccacgcccattttatcaggctccaagaatctctcgggccgaaactcgtcgggtttgtcccacaccgatgggtctctacccaaactccaggtgttaacgaagaccgtagtgccttggcgaatgtcgtagccgctgacgtggcaatcgcgtaaagcgaagtgtggggcgagcaaaacagcaactgggtgttttctcatggtctctttgattatggagtcaatgtaagggaggtttgggatgtctctctcttcgacccacctttgttgtcctatgactctgtccagttcttcctttgctctttctatgatgttcggttgtcttatcacctctgacattgcccattccaccgtcgttgctgaagtgtctgttcctcccgctactaattcctaattacatgttcaacaaatttattaggattttcaaatgttaattaattaacatgtataagtctatgcagagctaagagttctcacaattaaaaacaaacagaaaccaatatcataacatattgcaatttagtatttgattttacaaacataaaaaaactaataatgaccactcataagaattaagaagtgacctatgtgttgcaaaatatcttggtaaaattccgtaaaaaggcaacaaaaaaaaactaattttaaaatataaaaataaaaatatcctttaaaactttaaatttgatcaatttcacaaacttcaggatcaaattaatggtcatttttgacagtatattctagtaaatataaaaattaaattggtattttgaaaattgatttttataattacaaacttatgagtaataataaatatatgtgcactaaaagaaaaaagaaaaaaaaaagtatatacagtcaaattttacattcatcaatatgtcacaattttttaac

SEQ ID NO: 303405 - DNA, 2445 bp, Cannabis indica
aatatataatgttttagtataaattaaagtttaacatagtattatataaaaatatgatatataatccaatttaatataatacaatacaatacaatacggcctaatacgacgttccaaacgagccctaaaagtaatgtgatgctccttgacattatttgaataataattgtgagacattcaaatcctacactatttaaataattaaaagatgaaaaagttacatcaattaattaattattatttactattttattaagtacttcactatgtaaaagttatatttttaagagatattattaataataatataaaaaaaattcaagacaaaatactaattatgtttatttataaaattaaaatcggttgtagtctacttatatagttatctatgctaaaaaaaataattggtgtaatttcctaatttaaatgtgttagcatttacattgatttaataatatgtaccttagtaatgttaggaaccaaggagcgtagagcatagagcttttccttcatcctacctcgtctcctccgctcagagatcaaagttctcgaccgatcaacctttggccttttcgacgatgcatttggcgttgtcgtcgttgttgtcgtcgttcccgaggaatcatcgtcgtcatcatcatcctcatcaccattattattttcaatcatcatatccatattattattcatgatatccccatcaatattatattccggtactaacaaagtagtattaacaaacgacaatgaattggggtccaacgacaccattggagaattagcgttgaaaccaaagacttgattgctgctgttattatctaaaggattatgatgatgaagatgatgatgattaataatgttattgttgttgtgaatgaagttattagagccgttgataagatcgtcacacccaaaattcacaagcgggtcttcattttcgccacgaattaaatcgatgaattggtcgaaatttgagtcggcaatgaaatcgtgtagctccaagtcgacgtttaagttgtccatttttcattaatccttatcccaatatttttgatcgattgtgagaggtgtgttatgttatatccatcttgtatttataatgttattaatttattatacataaagtattagggaatattatgattaatatatagttttaccattatctaaagtgtgaacgggatcaaatgatgaagttggtgacgttttgtaatgctttcttctcatttttttaaactttcattcgaatagttgacaacgccagctatagcaaaaaaatattgtcttcaagtaatttgtcggtcgaatttaaatttattattgttcttttttttaataagtatatatttaattagttgttggaaatctaatcattggattttttttttcaccaccaactaattaatttttttttcttcattcgtttatgtgtgttgttcatgagttgaaagatattattctatataagttacataccaccaatgtgtattgtggttaattaaattttttttttttttaaaaaaaaaaaaacacaagagaaaagaagaggaggtcaattaataattaagtgtcaattccatcctatatatggaaaattatacagtagtaagtactaaaatctttttcattattaattcttatattgtaataattataagaattattgtctataattattacagaagaagttttcaataattatatataattatttttatacatatttatcacatacacatgaaaatatatgagtaatgttagataatataattacacgtattaaatattaatcatttatattttttaaatagaaactacaatgcttttaattatgtatggttaaaatttattagtgttgactggatttttagccaaccgacgcggagtcgtaataaatgagatttaaaccaaaatcacaataataaatgcaattaataacaccagaattcacaataaatgtaaataaaagacaccggaatttaaagaggttcaaccccggatgtcggtaatagcctactccccttgagttttattaatctgagttgcaaaagtcaagaacaggctcttgattgcaaagaatgagaagtgtttatttttctaagtgtttcagattgcggatcccccctcccaggtcatgggtgaccccttatataggggagggggtcggtgcttcttgcttcaggagacgcgaccaacgcggagctatctcaaccgtctccttgattttcggaggcggttggagtctgatttttaggataatatccccctattttcgtaggttgacaactgtctttgagcctttcgcgggatttgaacatttgaaggagccactgatgacgagggtcccttatgggtgtgacatggtcgtcaaccacctttgaggattaagcccatacttgggggtaacaccctcgggaccctcgtcgaggggggatgacaaccatc

SEQ ID NO: 303406 - DNA, 2231 bp, Cannabis indica
gatccaattggatttttaaaatttgcatccgatccgatccaattatgattggatatccgattctattggatcggttgggattggatcggtcggttggaattggattggatgactttctgcacacccctatccttaccttctaattatcgtcctttatagtttaattctattttaaaagattcacgtatcacaaaaaatattgtcagtgtgttaaaactaaccaaagataatcatgttttccatgaatttcacactacttcttgctaactcaaccatctgtttccaaaactccactacaacttgagtgtcatctagctacaaaagaattccaccccttgttactgttaattgtactacattttgtaatttgacatgaaacaaaaagattgtcactgcagtcttttctcaatgtagtgattcaactatgaataaaaattctcttcctattcacaatacaaattctatcaatgagttttttcaaataagtgtagcacaatatataaatatatggcattcaaaattaggacaccttgatcctagaacacttgccaaagttctatccaccattaatcacacaggcacattaaagagtctaaagttttgtgatgcgtgtaaattgataaaagtcacaagttaccatatcaaatatccaaaagtagggaatcccttcccttggaacttgtccacacagacctatatggtccctctcatgtgtcttctaagaaaggctggtaatacatccacttcatagatgactttagtggatttacttagatatttccactcactttaaaatctcgggcctgttctacatttctacaattcaaaaaacttgttgaaaaataattcaatctcctcatcaaaactatccaatcttattggggaggtgagtacaggtccattgcctccttcttagttaacaatggtgttcattttcaacacccatgtccccatgatcgtgagaaaaatggacggacagagcaaagcacatgcatattaatgaaactggcgtgacacttttggcccaatctagcctagatctctcttactggtggtgtgcatttcaacatgctacatttataatcagtagtttacccacaccagtgttagacaacttttctccatatcaatgcctctttcacaaacaacctaactatggttttttaaagacttttgggtgcacctattttccctatttgaggccatatcacactcacaaaataacagtgaagttagaaaggtgtatctttattggtactatatgcagcacaaagggtacctctgtgaaaaaagttctagccgtgcatatatgatcaccaggaatattgtcttcaatgaagaagagttcccagctgtcttgtccacaacatcacagcaggtattacaagtgtaccctccatcttttcctataactacatttcacacaactccattatttcataatactaatgcattgaacactggtggttctgagtctccccatattgttccatcccgtgagcaatgcaacacttgtcactctcatattgtcactcccacaacagatgttcatgtacctattccctctactactgcaactgcatcagtcactgctgctgtgattggtgttgatactactgtacaaacttcacaccctgcatctgttgactcttaagcatctcaggctcctaattctataccagattctaatcaacctcatcatataacaaacactcaagccaaccctctctactcccacaactgttgcacctcaaatcgtggtcactatatcctcctcaaatgacattcctactataaacaaacacccgatgagaacaagatcaaaagatggaatacaaaaattcaaaacctatattgccacaaagcacccattacatgaattccttctccaaactgagccaaaaacactgaaataggcctcaactaaccccaaatggaatgcctcaatgacagatgaattttgtgctctaaaaaaatggggcttggacactagtgccatacaacccttatatgaatctaatgggaaacaaattggttcatagggtgaaataaaatgttgatggaatctaggaaaagtgcaaatcgagacttgtggccaagggatatcaccaaacgcctagcattgatttctaagaaacatttagtcatgtggttcgacctgctacactgcgcattcttaacataagaagtttcctgtaattgggatatcaaacaacttgatgtctcaaatg

SEQ ID NO: 303407 - DNA, 2716 bp, Cannabis indica
ttttacgtttttacgtatttgagttgttaccaataattactacgagggtattgttattaatttagtagtttgggttgtaatataagttactctattagttggttcgtttattatttgtataatgcaaaaaaaaaataattaaaataataaaaaaaaaaaaaacaatatatttaataaacattagttgtttattggttttttttttttaatgatttgttttcatgcattggagcacaagtacaaaaattaggctaaatgtaactttggtgcatattttgagctatatttagcataaataatacatattgggttgaagatggtcttattagccattatggtgcaagcaccactatgagataatatcatataaataattttatattggtaactttttataattattattaaagtaaaacatatagaatcaattacactaatagcgatattacaataatgtgttgtcagaggaaaatatacaacctctctctatgtctcaattgtttcctcttttactatgcgaggcatagtgtgcgactagaccttgtctcggtcgcacgttattttctatcatgcaaggatacccagtcgcgattactttcttgacacgttatcttttttctattagggaatgggctccacttattgatcaaatacgagattgtactcgttattttacgtgaaaaattcatcctataacacatgctcttagttttcatgatgataattttgtcatatgaagaaactatcccgagatacaatcaatttgtcacactgcgagtgatgtttattaagattttctttaatggcagttggtaattatggttttatagttcagtggtgccacatcatcaaaatccttcagggtttgtgccttttgaagggacgcttaattttgctctttctgagttgtttgatgaggcgactcttaaccttcagatgtcacgtgttgtgatctcaacgagatattatgacacctataaaaaccccaaagttcaaaattgagaggctcatttccctctcttttcattttactcaaagaagtttagaaattttccttagtttgaaggcgaaaagttgctcaaggattcaaagttttaggattcttattcttgtcttcaagcttccaaaattggtgtgtgttcggataaaaaaggtaggttcttcttgaattttttttttcttttttgtaaagttttttgaatgtctgcatgtatgttgggtatttttcttagtataaagacatgaacattaggcttcactctaggcatttaaacgtatgaccttatatagaccgaatatgtattcttttgaaaaagaatccaccttatttatgtttgtgtgttgaataattgcatctttattttatgcctcactgaatagtcacaatattacaattagaacatcttgaataatcgagaaaaatgaagaataccttgaatgctcgcacatacatgtaggttttcacttagaactgtttaaatggtcttgtatttacccagaagctatattgaaaaacttgccacatttagtgacatcgcacaggtgaggatactcctttaaattttacgcacaacacactgaaaatatcttctatgtttcagatgagtgatctctcggacagctaggagtatcaatctcaagggggtgcattcgacgatgagcccaataatagtggcaactttcttttcggaatcgccttttgaggaggttgctcatgaaaacccagcctcaatgttcatggatgccatttctcccaagtttagggaattacaagggcccgtggtggttgaaacgcgaggaagtgaatcaactatatatgtgcaaggaagttatattaatgtggttgttctctttaacaacgatgttaaggaattggatcatgagattgagctacgtgcttgggagagaaacaacatggacattggggtagaaatcaacgaagaagcaaagtctttaagtgatgaagatgtacctttagaaaaaccaatttcccatgaggatctcctttctaaaacaagaaaacctgacttagtaaccttcaagaagttacaacttattttaactggttgcatgaagctatttacaaatcaacgaccctattgtccttttactaaccatgagatcatcaacacagacgttgtggttggcccaattcgatcctccagtgcatagttactattccattccaccacttcgtaaagccatcctgaaccactatgacattgcaccttttcaaattacctcgagcaactatagaatcatcggtgggattctttgcattatacaaaaagaatggctatgcagatcctatagttgaggattttagctatttttatgacataaaaaatattggaaactaaaacagtttttattgttttagaaaatgggcaaatgcaaaaataaatgggtttgagagtgcgctttccaatatggaagattggaaaacaaaattattttatgcaaccgatgtaccaggagtgagaatagattttaatcatcgtccaagtatgttactaattataatacctacatttacttttctataatgccttatctagccattcttttgaaactgcagggtgagcacctcgcacagctttgacaggagaacaatggcaaactgccaaagcacttagcaagttgtctgaagctcggtcttgattgaggtgcatcccttctgtaacgtccccgcttcaagccttcattgggcccttac

SEQ ID NO: 303408 - DNA, 2497 bp, Cannabis indica
ataagaaaattacatgaaagtgaaagtaatataaaaataatattaaaacaacaacaaaacaatatcaaaacaatataaaaaataatatataataaataacaaacggaggaagtttcaacggttacatcaaatgtgtaaccactaaggttacatttattttagttatcggatcattgttagacagctgtgattaatttaaaaattaaataaaaataatgaatgaattatttgtatttgatattaaccatattttatttatttctttataaataaaaaaaaatatatttataaacattaaaaattaatttatttaagtataattaattaaaattattttgaatctaaaaataaaaattttatctattacgaacttgttatagcagctcatataataatgtaatcatcgtggttatatttttaatgtaacaattgaatagtcatcaaataaaaaaaaaaaaataataattagagtactacataaaaatacattaaagaattgtatttactataaataaaattttaaaattataaaaatatttaaaattcaatatgatatttttgtgaatttgtgaaattattacaaagatttttactttacaacacttattttctgtttttattggtgacgctggtggagcttaatgtatactttgtctataatggttgcgaaaatattccaaaccaaaatatgcctgcaaatttatttatcaatggtatttaaatttgttaattaacccagttcactctttgtcagttgagacatcaatgaagtttaagaaaaaataatgcaacaaaaggtacccctcttattatttgactatctaagaaaattataaaattaaaataatcaaaattataataataacaatgatgctgcactaagtaatgggcatgttgttttgaaactataagtttattaatttgttttgcttctttaggaagataaaagttgaatatagttttttattcttttttaatttagaaagataaaataaattgttgaatactgttttgactaacacagcacttgattttgtgatcctctttgagcttttattaaccaatgtttatttatttttgtcttgactcaaaatcctttcatttcccaaaataggaaaagcaatattgtaaagaaactatatattattatccatgattgttcccataaatattttccaattagatgttagtcaaaagaatttccaagggtagaggatatatatttatggtttctatatagtattattataatgaattcaattaattatgcccaaacctctcctcccttctagtggttcagtcaaatcattagcaaatggtcacgggaacgaattagtgctgtaaatagtgaatgccgcattcatctacctcatatttcaattttgttctttttaaaatatgagttctattgtgtcatgggataaacataaaatgttattgtcgtgttatattcggattcctataatattttatttaagttggccaatttctttatgtagactcaaatttttgtttattttttcatattttgttttataattaatgagatgattacaaaattatatatattttcttaacttcaattctttttatataattttaataatattttataaataattatataaaaaaaattactaaattttaaataatattaaagtataaggttcttaacgtgttgtactgtcaggctagactattcgtgttatgtgtcgcatcaaagaaatagttagttagtagttagttggtcttagttgttctagctgtcatgtttgttacattggttatagttgttgttactgtaactattctttctgttgatcagctatgtaaagcttttctctctcgtaattttgtaaattgtattcatttttcaatctcaataataaagattcattattattcttcttcctctgttctttcttctttgttttatggtttatgctttactgataggtttcgagtaagccttctccttcgttgatttctcttcttcttgcttccgcttctgttttgtgttcatggctagaggaggaggagtgcgaactcgaagcaatcgtgatcttgaggataactcaaacaattctaatcgattctctgttcttggtgagaattggaagtcgacgagtttcaatgatctttctaatccgtattttctctccaatggagacaatccaggtgctgtcctggttccaaaaattctcacaggaagtgagaattataacacctggagaagatctatgttgatagcccttgttgctcgaaataagttgaagtttgttaatggaaagcttccacaaccagacaaggagcatgaggattacgacagctgatgtagatgcaacaacacagtcattttgtggattcttcatgctatttcaagggagatagctgacagtataatgtatcatgataatactgctgagatttgggaagaattacatgaaatattcaatgaaaaaaatgctccaaggatttttgaagctaagaagacgat

SEQ ID NO: 303409 - DNA, 2279 bp, Cannabis indica
ggtcacttgtctttagactgaccttcactgtggtggtttcacaacttaaatgagggaggacatgaatttgtctacttgcgaaactctattttatttaagggcaatttgaagtagttgtatgtaattcaatcacttaagtgaatctttgatacaaatagttggctttagttatataaaaagacatgtatatgatattgtattactttgtgcctgtagcattagtaaatttgaaatcatgtgaagtgagagaaggaaacttcttccgtggtctaggatttcgatggcgggagggtgggttaattaggctgatctttctctgagtacatctgtattgcatagctagggtatgtttaactcttcaggtgattcttgtagctggattttgcatgatgtggccttatatcattttaagaaagattggatgaatgcactaggtagcatagtagcacactgaattaatattctatctttgataaatctaatattgttgtgaattttgtttttaaatcagttttttattttctctctcaagttaatgtttgctggtactaatgcttccgtatctgtctaatgaatgtagtcacaggctcaacatatgatggttcctatgcatggctcagagtagataacagagattggttcttcttcaattattgccataattgagttcagtttgccatcgaagaagatatttatccgtccccacaacaaaattcgtaacaagttatttgtctaaagtgaatacactgagatattgggttggttctggttcccatgtctattatattgtggtaatacttgtatatttaggagagacatttggttgtgtagattgactatttaaagaatgtgcggtgtaaatcttggtcccatctagtaattaatcatctagtaataaattaatttgttctgtacaactgtttatttctaggactattgatgtgatacgtgtttggaaaacttcatactatattttcataatccgaaggccaaattgtaatagcttttactttttacatgaaagatatgccacagttttttgctgctcaataattgagttcaatcaaaagaggtactgatctcatgctgtttgaaaaggcttagtagttttcttcaaattgcagtaatctaaacgaaacaacccactcgactgagctgactttaaatcacgcagagtcgcatgaatgctatttggggtgtcgtttggctttttgaattcactttttatgtggagaaagttgattgaaagtttatggtccttaatatattctgcaagtctgggtcgatatggaaatgttatgcttatttgtatcatagttctttaaattattaaagttttagcaagttggtacttcaattttatttttaacaaattggtccacaaactacattctaacaagtttatttcaaaaatttattttttttagtaaattgattcccaaacttttattttattagcaacattaaattatcactcttaaatattgatattttttattatttttttatttattttactttaatttattttttgtggtaaattcaaataattttattttttttaattttaatactttgataaaataattatattaatatattttatttattgaataaacttaacaactttattaactagcaatcgttaataacaatagaaaacacttgttggaaaaattctcaattgaagcacgcgacctgtagagaaacaagaatccctggctaaaacatgagccagcttgtttgcagaatgtttgacaaaacacaactcaacattatttaaagataagagaagagtacgaacattatgaactaaaagaccaaaagaggatgacaaagtaatttggctttgcacgacttcaacacaaactaaactatcagtttccaaaatcacttgtccccacgaatgacggtcaatccagcttaaagcttcttttatgccaacaatttcagctatttcaggttgcacctgccctaactttcccatcgtgtaagcttctaccaaattaccgttggaatctcgatccacacaaccaaaaccaaactggccttctcgctcaaacaaagcgccatcaacattaaccttgatcttatttatagcagatgcagtccaacgctcaagcacatggtccccgtcaatcaacggagacaaagaaagaccctttcctttttgagcgaatttgtattgatcaagcagagttcttgctgaagcaaccacattcgcagcagtacgcctcctttgttgccaaacaaagtcgttacgggcacgccaaattgac

SEQ ID NO: 303410 - DNA, 1459 bp, Cannabis indica
cattgtttggtcattttttgtgtgagatttgtacatctatgttttcgtgtaaattgtaaaattttggctttttaaaacctttgaatgaatattcttatttatttaaaaaaaacaatatctctaataaaaaatggccccaatagtatggtaatatttacattttatagcaaaatttaacatacaatataatatattgataaaatttacatcacaataatataaatgctttacttttatatttacattgtcactttaactattttataattatatttagctataatattaaacaatatagaatttttgtatagtaaaattattattattttatattttcaaataaacattaaaggaacactaactaaatattaaactttgcattcagatacattttaatttatttttcattttattttgttttagacgttttctctctctcagtgaagttcgatggtgccatagtgaagggagaaaaactcgaaggggaacttaattgttagggcaacaagaagaaaaatgaattagataactagtgatcccactcaagttactgtaactttaaaaaatattcattgcaataaggtttaatctgcccaagacatttcttgtttcttcggcgctagagatcctaaggatgtaaatagagatcaaacagacgtatatgaagatccaacaaaagttcatcatatctaacaccaacaaatattttaaaactagatccaccattactgccaatctattattgtcaagaacaaagattcactagccaaatttcaagaataataaggttctaagacaaagttcaattagggtagtagccctacgatatttttacacatctatcatttatttttagtgttctccaagataaatgtatcaaattttgtacattttggggcatatatattaggagttagaatttaggtgttgtccaagatattgttctattagtattctgtgtcaagggctttccctatataaggagtttattctcttgtattcataacacataagtatcttatgatactcattcaataagatcattcttatagttactaatagcttcacatccttcatttttctttcctttcttttattatataacttatttatttacaaaaggagatcaaaatatatggcagaatatattgttatatcactactacaaaaagtactatttctatcagtcttcaaatcgattttattttagaactgttgctaataaaattaagtatttaaaactgacacctataattgagaatactcgttagtttaaaattgctatgagattggaatctccgacagtttataatcgtttgctaatgtaatgactgcttagttatttttaagaattagtagatcattgtagtctaaatttactagtggacttttaattattatttttatgatttcagagatatatttgaattctaggtgtattatttatattatatatgaa

SEQ ID NO: 303411 - DNA, 2976 bp, Cannabis indica
aggaatcaagggatagagatctgaatggaaggagtcattatattccgctgcacccaatgtaaggttcactaaactttatatgtctttatttcattgttttagaattcattttaggatgttaatgaaacatacttgatagtaaatctagatcctggtaaaataatttccaacaggaacctcttttgctttgagattggcttacattggactctagagcttctactttttggtcgtttgtccgggagcaacactgtattcagtttataccactccaaacctggaaaaattagcctgtgtagctagctatgcaaaaatacttggtccataaactgtgggagttgtgagggttgttatcggagggaaaattgatggagttttcatctgtgaagatggggcagttgttgctttggtggaaggtgcgggaagtacttcacaggcttaagtataagcatcttccatattgatgaatcgttgggctcttgatataaagttagatagagattttgctctccgtcgttggagttctccccacaacaaagatccagtggttaaacctgatgtcaaagccaccatcttcatatcatcagtaacctttttttttttgcagtgatatccatcatatgttagatgtactttttgaggctttctcttggttgttgtttgacgccagtcagggaactagcttctagatcgaagtccttcgctgctatgaattactttttgaacactacacgcagatttctccagttgtggattgatcctggagacaacctcttccaccagtcttcctcgaattttgtcatactcaatgaaaagtaaagatactttgcatcatcactagctttagcaactcgcatcatgcgattgtatttggataagtggtccctcgggcccattctcccttcatacaattccatctgaggcattctgaagaactccggtagtggtacgtctataattctcttcacacacggttttatatcttctccttttgaatcggagatagttccattctaccttctagaaatcttctccatgaacttcgttaactcttcaactttacgttccaagtgtttagttttatcatttaatgattcccttacacggacacgatcgttgatataatttctcaaatccttccaattcatccttttctttcttttcctttaattttcttcggaagatcatttgtggagagacttcaactgtcattgtctaaaattggatcactttgactgctagaatcactgcatcaattcttatccttctagatagtaggcttcttgactccatcatcagacttatccttctatgcagctctgccactagaattagcctggacacccttccctgaagcatagtttcttttctttttttgttgaggttggctgacagatttagatttcttctgttgttcagcctgagaaggctttttcgaggtttcgctcactttccctttccttttatccttatgtggatcataatttccaagattctgaggattagccttcccgatggcatcgtttgttggagtcgtttgtttagtttattttttccaatgatcagggttgtcgtcatagcttatattcttgtcttttctcaagaattagcaaagagccttagaaccaaagaataatttgaagagaaatagaacaacaagtttttttacgttgttggggcgttaaagagccttagttcaagagttgatattattatgtattttagctaaaaaattctttgggaatataatgaatatatgttctctatttttgcctaagaaaatattgtaagagagtttaattcttaattcaaaggatttgttgggtatttatagtgtttacatgaattatacttagtttctattttccctctaataaggagtttacatgaaaaatacatagggctgtattcgtgaggctcagcccatgagatgatagatgagctctctagccaggttgaacacgatcaattacgtgtcctataattttgggtaatgaattgtgaattaattgcttgatctttattttaggtaatttccccttttaacttgctatgatcttctagccgagatttaaggaaagttaattccttattttgtgcaatttgataaaaaagggaaactgtgctacgcttccaagaacacgttgtctggtcttctggaagtacggtactgaaactgctttcgggtacaggcggtccttggcagaagctctcatgagagagcaatgaagataccttcctagaaggtcttgctggacttgggcttggcccaaattatcttctttgggctcacaggtgggctttggatgctggcttggaattgacgtgtcccatgccagaaacgcggataacagatataatgaaaatcgctttaatcatatgttgatatagttaatggacaagattgcacatgcttacggttatgatgacaaagttacgagctcaataaaattaacacatttatatggatacatatgtgacccggtggaaattttttgagaatttatttatttgaggcacaattgtatatataaatatgtattgggtcattatataaataagttaaatttatgtggtctattttagaataaagattatgatttaatgacatgattgtcataatttttgtatgtgaatagaacaatttcaaattagatgagaaatcaaagtagaaatagttaataaatatttataactgttttagcagttagtaataaaacatgtaataatctataatttgcagtatcatatatatatatatatatctttccactcttaaatcccatcatcaagagacgggttccaaacgttttaacttcaaattcagaagattatacaattttaaaattgattttattgactccaatatgcttctaccaatctttaattatttattgtttcattcttttgatttttgttgacgtggtattttcctgaattaattaggactaaattcagatacagtatttctacaaa

SEQ ID NO: 303412 - DNA, 2113 bp, Cannabis indica
gagagagagagagtcggttgtattgtgtaagttaggttttatatattaggttttcatataaggttttctagatgggctcgaaccccataagtgtctgtgatgtgttgcaccgacacaaaatatcctataaatcgatgctaaatggtgcatttgagtaaaaccgtcgcaaaattcaacccctcattttttgcattagttgtgtaatttttttttaggaattttatctttagtgtcgaatttttattttagcgtcgaagtaataactgatgtaaactaattattatttgcatcagttaacaatttgcgtcggttaacaactgaagtaaaaaaaggagggttgacttttgtgtcaatcaacgagtttgaccagactcgttgactgacgcaaaaacccttttttgtagtagtttggtgttgttggtgatttttgctcatcaatttggtttttcttaatatgatctagggatgataattcatgtttacgggttatattcgtgttatatcgagactaatatattacagatatatgttggacctgcaaacataacctatttaattaatagtcatatgtgtcaacaaatgaaaatccatacatatactacccgtttataaataagatgatataatatgatttgtgcaactcctttataaatgaatgatgttcgagacttagagtgggattaaacacattaattatgtgtttataattggataatgttcgagacccttttattatacggaataaacggatcaatttaaaaataattcaaattcatttaaagttaaactcaaatttgttaattttgtatggatttcaaattgtattatcgtgtcttatttttcctgtcgtatgttcctaatctctacaatggccgtccatttcaagtattaaaaataaagtttatatacatataaacaaaaaattaacaaaatatacctttccatttaaaaaaaaaaccaaaatatacctttaaaaattcctaacacaactgcaataaaaagttttaatttcttaattcatgtctagattaatatatcaagtgagtaaaagttgatcattaatataattgtatatataagataaatgtgatactcttccctatcaattagttttgagacccaaattctaatatagtatcaaagtcacttgtgatccgttgtgagcccaaaataccaccggcccaaaaagtcatttgttcaaagtgctgtcggtccaaaaagatacttttgttgtctctcttttaatctctatttgggaccttgcggccaatgtgtgtcaatttttagtgttagggatttttgacttgtttcataatctacaaattttctaacgtgtacacccacaaatttttcgatatttaaccttgggcttgtaggattctttcaaatgtcacattcgaccctatagtctcttaaaggtcgttcgttatatacccatactttctagttcaaaaatgtaaggagagtgtattagagttagtcttacattatttatatagtgaaataaattattatatataaaatgaataaactactctttctattattaattaattaattttaagataaaatcacatttatctaatctcaaattctaacagataaagttgatcattaatatataattgtttcacacacatatataattatcttgctagcatgcatagcatgaatattcatgtaattgtgtgcttaattaacattggttattaaggtaactttttttttgaacattgtcataattcatatatatatatgatgtatatagagagagatgattgatgattggaatagttatagatataaatagcatcaatagtagcatacagataagcactaagtcaggctcaatggacacacaacacaacacaagatagaatactattctcgaatttcgaaaaccaattatggatcactttatatcttgctttgctttggaatttccttggacaaaacacaacaaatttgcatcgacttcggtaacatttaatcattacataagtcaatccacaacaacaaacatacatatgtactaatgtgttagccctaaccctagctttatcttagctaataaccactagtactactctttcgatctctctctctctctctc

SEQ ID NO: 303413 - DNA, 2984 bp, Cannabis indica
ataccacgtacaaatctcttgtgtcaagtgatttaattttctgcaactatttttatattctgtctgtcctattttgtctctggaaaattagtttctgcagtatcagaattactttaggctgctgcagacgtatacaattttaaatacagtatatttctgtaataattattggcatttgtaaaaactcggtttttcactcttgatgaggaagaagcagtaggacattcttttttagatgaaagtcttgcagcgtggaaatcatataagtaggagatagcaaaaaaaaaaaaagcaacacatcaaaaggttttggcatagatccatgtctttctttattacgttcagtccaaattctctaaagaatacatgcgaattgttcaagttggagagaagtccattcctcaaacacctaaaaaaagtcttgagactcatttgtttgtataagatatcatcaagagagaaggtagatgcttcctggactcgtttgggttgtctatagtaaaacaaggcgtgtacagtgatctccctttcacaaatgcatagtgtacacagagcaaagtcactaaggtgcctggtatgaaggatgtcagttactggtagatagtcgtggatagctcgccaaaaaaaaaatgcaaacctttgaaggaatagaaaggccccagaactttttccaccaccgtgtagtagacaacgtactcgaaggctgctgctcttcaagtataaaagccaaattatagcctgatttgactgagtaattgttagtagattcatgatgtcaaataagttgatcttgttgttgaaagatggttaatggaatactttgaattttctccatgtcggaatccaaaagtagagttcttagaagagggagatcccatttccgtttatcattaattaatttagaaactttcatatcaaaatctgtatttctaagtacaagcagttgtagataagtaatactaggtaatcacgagtctgaagcacaacaaagagaatcaccattgccaaccttccaacgcaaaccgtttgatattagttctttaccccaaacaatatctctctaagttaaagatggatatcaaccaagatcaacttctagaaaggagttatgtttgaagtatctctattcaagaatctgactgagaagagaggaaggattggagaagatatgccatgcttgcttagcaagcatttcctggttaaaatggacaaaacttttaaaatccatgcctccttccacctttgattgacaaagtgctttctaagttgtccaatttattctagaaccttttgagttagagccccaccaggacatgttcatcatctttttaatttgatttataagagactttgataggcaaaagtaactcatagcataagtgagaatcgattgggcaaccgctttgagtaggacttccttttcccctattgaaaacatttgtttcttccaagaggacataaaattcaataatttatctttgattttcacaaataagacctttttgtctctcccaaagtaagaagacagtcctaaatatctcttgtgacaaggttgaatcggtatttgcaagagttgctatagattagcttgagttgagggcaaggtgttcagagaaaaggagcgaactgacttctcggcattcactttttggccacatgcccgacagtaaatgtcaatcgaacgcttgatagcagttgttgaatgcttatttgcacgacaaagaactaggctaccatcaacaaaaaatagatgagaaactgaaggagcacctcgagaaacatataaaccatgtagatttctactgcgttcttcaaattgaaagagttttgaaagatcttcagcacaaattatgaatagataagcaaaccatttatcttattcctctagtaggcgtgacatggccttgaattgtaccattgactgaaggagaatgacacactagttaagcatctcataataagtcccataataacatgatcgaagaccatatcactcatcatgctttgaataaaatgtcattctactctgtcaaaagctttactcatatcaagcttgattgttgcatacccctctttacctcttttaaaatgtttaagggaatgtaataactcgaaagctaccagcacattatccgttatgagtctagactgaagaaaagtactttgggactctgatataacttgtgagagatatcattttaaatgaagcacaatagttttagacaccagtttatacaatacattgcaaaggctaatagggtgcagttgtgacattgaagtgggcttcttgacttcaaggattaaagtaatcaatgttttgttgaagattgaaagatcaccaccatcattaagaattttagagacaacacttgtaactaatttacccacaatgtgccagtaatttgtataaactattattgatatactatctaagcgagggctgccatcaacactcatggaagaaatagcattaaaaacttcatcagcagcgtatggacgtgtaaggactttgttcatttcatcagtgatcgtacaagggacctctgaagttacatactatatattatgggtgttcaaaaattttacaaaccgcccaaaccaaactgaataatttgacaaaaatacaacccgaaataatataatgataatctaaaccacccaatgaatatattgggtggtttacaaattattctagaccgcccaattaacccgaataaactgaattgaaccgatttatatatttttaataaaggtgtatataatatattacataaattacattcattagttaaactattttgtatttaaagtttgaactttatagtgtttaacttgaaatttaaactttatactcaatactttttattgtatttggatattaaaattgaaatttaaaatttacactatattattacttttatttttatttttatgatatttgtttaattattttatgttcattcaattatatttattttatgtta

SEQ ID NO: 303414 - DNA, 1839 bp, Cannabis indica
gaatcctactttttaaattaaaagtatggtgatgtaaatcccctccaacacttaagtttcatattccctccaactctattccctccaattttagtctctccaactcgaacttacataataaacaccccattagatggcatatggttggaagactgaaaacattgctagaataggaatgacattgttgaggtgttgtatggtgtggattagtcaaattatggtattgtcgccttatcagcacaaaagctatggccgatacctccttgaggggctatatggtgtggcagtctctgaagatgtctttgacctgacaattgaagagcctttggattacttgcaacatgtgcagatgtgtattgatgtacaatgcctgcttacttttgaaccaattcagcaaccagttaacgaagctgcttccaatctaaagcaaggaaaactatcaaagaaaacccagatcccgcgcctcgtgccaccccgatctgccattgaggatgttcagaaaagtttaaaagttaataagaaatagtttttgcaatgttgggaggttttgatctatatcttggccttagtcctgttgacaaatacaaggatgattttgtggcgataatttcaaatcgtgttagggaggatatacttggaaaagattctggcacaactgggaaacaagtgatttcggtggagagtgattatgatgaagagatgtcatttaccaagatttggtgacaacctagtgaggcagctaggacagttcaacttacagatgaaagtcaagcaaattaggaagagcagctccagaaattagtggatgagagaatgaaagagatcaagtaagtagcggagaaagtgtcttcccattgtgaatgagtactacttactaacaatgtgtcaaagccgcaatggtaggccctgtgtttgaaatgcatctttgggaattggcattttccatagacgactttgtatatcattgagtgtgctcgaataggagtcacattccaatattttaaaataaaatcaaacaaagaaatagaataaaagttccatttcattacctcattcatactaacagtaagttatacactatacttgatttggatatcaagacaatagattaattgaaatgcattttttgttttatattggtgcaagtggaagtttgttgggattttatgctctaaataaaacctatttcagtataatataaatatgatgaagacatggatttagaatgtattttgaaacaacatataggaatgtattttgaaaatcagcaaaaaagtatttctaatgaaacaacaacataacatgcaaaacgacaatatgatgaagggcatggatttaaaatgtattttgaaaatgtaggaaaagagaatcattaattactaggttgtaattatacatgagaataattacactattttaaatataatatgtgtttggatgtcaaataataattgtgtatatgaatatttatttttgtgtttagcaaataagttagtaattatattgtttaataatattaattgtctaaaataataatattgtgcaatttattatacctcattcttatagaatcaaaagaattggatggtgtaattaaaactcatgaattaccttctattacatatttactgtgtaattatctagttgacaaacacgtcaaacctcatcattcctataaattacacaatgactaatataattacaaggagagtttttcacaggtcgagcaactcattgcaatattaatttgggaatagtaattagggtcgtcttaaggtcataaaagccttggacaaaactaaaaatgagacttttttcttttacaaaaatttaaataaa

SEQ ID NO: 303415 - DNA, 2972 bp, Cannabis indica
aattgaagtaattgctatggagaattgaggtaattgctagggatcaatcaggtacgcatacctaattattatatattattattgtgttttatgttatatacaaattgatcttgggtttaatttatctaacacattttagatcacagtttttgtgtaataaaaagtaatgatgtggggactgtgatgttcaagccgtttagattctgtaaccattggctctactaccatggtttcaaggaagcagtttggaggagttggactaattccccaaaccaagctggtctcgttggcataatgcagaagcttgttcaagttaaacagactttgagaaggtttagcagagaaacagtgggagatgttattactgactttaaacaggctaaggaaatttacatcaaagctcaagagatgcttgccatgaacccaactaacaaattactgcagcaacaagagaaacaatcacgtgaactatctaactttgttgccatgctatactagctttcttaaacagcaaagtaaaatcacttgggtgaaatgcaatgatgagaactctagttactttcatgctagtatgaggaaaagaaaagttgaaaataggataacaacttttactattagagacaaagtagaagatgattatcaaaaagtgcttgaccatttccttgctcactttaatagatttatgcggagtaagagcactgctaaaatagattttgatactagctgtattgattaaggggaaactctaaatgtggaacaacaaattaaactaattaggccttttcagaagaaagatgtgagagaggctttgtttagcatccactcttctaagagtcctgggcttgatggatttggatcaggattcttcaaagtattatgggatcaggtgggtgatgacatatcactcgttgtgcttgaattcttccaaaagggctatctcctaagcttaatgaataaaactatcttctcgttgattccaaaaattgagaatcttaaggcgactagtgactacaaaccgatagcatgttgcaacactttgtacaaatgtatctcgaagatgctttgctccagattagccgaagttctcccttcattagtccacaacaactagggagcctttattaaaaacaggttacttgctgacaacattatgatatttcaagatcttttaaaaggctataataggaagcatatttcagctagatgtatcatgaagattgaccttagtaaagcttctgatactgttaattggttatttgtggaaaatctactcaaaagcctttgcttcccgactagattcatccattggatcatggtctgtcagataggtacaaactataatcttttgatgaatggtcgtatccaaggatcttttaaaggggaaaagggtcttcgacagggagaccctatatcacctttgctatttttgttgtcatggaatacctcaccagacttagctcagagttccaacaacaaggggttcagatttcacccgatgtgtaagaatctcagactgatgaacttatattttacagatgacctcctcatcttttgcaagggcaatatgacatcggtgaattgtatgtttaatggtttccaaatattttgtgatactatgagattgtctgcaaacatctcaaagtcccatatttactttggaggagtcaaggaagattgcaaagctaatattctcgagaaagtcaatatggctgaaggtaaattccctcttaaataccttggggtccttttgagaccaacaagatggaaatcttggactatggtgtgattcttgataaaatcaatagtaagcttaattgttgggcaagtagaaatttgtcttttgctggtagagcccaattgattcattcggtcctcttaggcatcataaacttttggatgagcctgcttatcgtacctcacaaagtgactgcaactattgataagagttgtcgtgacgttttatggggaaaagtaggcaataaaagcaaacttcacctcccttcttgggagaaagtttgtcttccaaaaaagcttggggggttggattttgcgaagggaggaaatgaaatatgactttaatggcttaatatctttgggcaatctctagcaaacaagatagtttatgggtgagatgggtcaattccatttacctcaaggatcgatgtctgtgggatataccaatcaagcaagatatgagctggtatttcaagaagctcttaaagctaaggaagcaaactgatgaatttggcattgctcaagctgttaggggaggtaaattttgatccaaacatttttactcttccttaattgatgcctcagaggttgattatgttaaagcagtatggcataaactagttgtccccaagcacaaatttaccttttggcaggtttgtaataacaatctacttactagggaccatttggttagatttttgccctcaatttcagagcttgtgctattgtgagctggacggagaaacacacagacacttattcatggattgtctgttcacaaagctgcttgttgctaaaatcaacagctgattttggagatttctgctggccgaagtccatccaggaattgctggtgcataaactgatgcattcctttgatcttaaacagcaggtgctcaatgttttaatggctgccaccttgtatttcatttggaaaaataggaacaattgtgtgtttaatgcttgttgtttgactactggtcatatcggtagagaaattaagagagtggttaagtaaagagttcttggttcaacaattaatagcctaaaaaaaggtgaccggtatgttgtaaacattgtagagagctggtgaggttggttgcggctgttgttggcaccttctttgtgtttgtactgtttttgaataaatttattcttttgttaaaaaaaaaagtaaaaaaaaaaagtaaaaattaaaataaataaaataaagtgggtataaaatatagggcattttt

SEQ ID NO: 303416 - DNA, 2288 bp, Cannabis indica
agctgtgctcacgtatgggaagatatcttaaggaccctgactggcatccttttcaagttaattgattgatgggaatcatcaggttttggtttttattgttgttttgtctagtttggttgcgtcgactttatgaactatcatagtcatagtgactttatgaactttcatagtcgtagttttcctatgcttttttctctgattatgcagaaacaatcacacagcatctatttgttatcattgacaaagcctaacaactacccggcacctctattttctctctttcttgaaaacaaaaatctattttcaaatttaaaatattaaattagttttgtttgtctattttccatttacattgagttggactgctcatctaataggtagatcaatttgcagatctggtagcaataactgtaatattagttttaaatatatttggcaattctttgtttttttggtgcttttgagaggattacccaaaatcagtgttcctcttgattcaggagctgatcaatgaggaggatgaaaaattgaaaggtctgaaaaaggaattgggtgacgaagttttcaaagctgtaaaatcagctttggttgagataaatgaatacaaccctagtgggaggtatataacctcagaactttggaactatagagaaggaaggcgggctactctgagggagggggttgaacaaatgcttaaaatgtggagatcaaagaaacgcctgaaagaagacgagtgaaggttaattcttaacaattttctatgagaacattatttctaagtttctatatctttcattgttttgtgcaatggcttatacttctttagcatcaccacaataaggttagtagttttgtcttgatacattcttttgctttattataaaatcacatatgtagaatttatcttggaaactacaccacttaaattacctcagttttctgtaatctactttgtagaaacaagagtactgtttacttagcattttcacgttgaaacatttcctgttttgcagatgacataattaatgttgttgaatgctggtggaagaagaaagacgtgtagccgggcagtcttcatgtcgtctgggggcacatatttttgtgttctggcatctattttctgtatagcatattaagtgcagatttttgaatctgtagaactgaatatgtgccaacattttctcaatcctgcctgtatgtgcaggaataaacgtggttggaaaacctgtttcaccatcaactcattagcgcaatctgaaattttagagtaattcgtgggattctttctattaacagggagctttataacaacctaggagataagttaattgtgcaattcactaacgagtctcatatttcaaagaaacttgatatgtatttacaccaatagtggtatgggtgataagatttagatccaaaattgctgtaaagaaggcagttgaatctttattactcatcaagaaagacaaatacagtaaaaatctaaactatttgagtcagtttggaaaccccatagaaagtagataggtttggcttttggtcctataaataaacttaagttgtactaactctctaactaactagcgacttattcttgcagttgatatatgttaggcatgtaagcatatttgaggcctaacatgtaagcatattctcctctaggtgagtgaatagaagaatccattcttaaatgtttctgcattgtctggtcttgtcccacctccaagaacaactttggaggttcatcgtacaagaaattctgattgcatcattctttttctcgcttaaataatctttataataatactcattgtaagaagaaatttcccataggacattttaatactctgtcataatccgtacgtggcttagtcttgcagtcacccttcgcttcttatatcatcattttttccctacaagtagaccagtcagttggattttcttaagtcgtcgccccatcattgttgagtttactccgttcttggttagctttgacagctccttttgaggtcattcacacccatggaatcttttattgaagacgaaatttaggttgtcacaatattggaagtctcagaccatctgcaatgtgttagatttagtcaaaaaaaaaaaaaaaattagagtaatattacactttttacaattgtgcaatgtgttgatttagtcaaaaaaaaaaaaaaacaaaaatgagtaatattatatttagcacacttttacaattgtgttccttaacaaataatagaaaaatgtaatattgtaattaaaaaattgtattaaaattagct

SEQ ID NO: 303417 - DNA, 1381 bp, Cannabis indica
tatatatatacatatatatatatatatatatataattacctcgagctagctgtataatcttgtttcaaaggggctattaattatttggtttttttttaatgatagctttgatgtgtttaatttttcctgacagtaatatgagaattgtaaaagggaatcactatattatggtacaattggcatgtatatatatataataatatggaattatacatattttataattttgtaagaccctatcttttgagcgcctttgctactactaaataagaaaaaaattgtagagactgatcataaataagatttaatatatgcttattagaatgtagaaacagatttaaaatgaaaaaagaaaaatagccgaagggaatgtcatatagtatagagtgagaaatttagtaaatatatggtcgttttcatttctatgccaaaatcattttacaatgagtagatcgaaaaactgataatttttttgggcaggtagatatatcttaattattacatgcatgccttatgtaatgaggtgcttagaacgaccttaatgtgatgacttatgataacgatatttcaggataattattaaattaaattgtatgaattaatacttaattagattaataataatataatactaagtcgtattggataacgttggtagtttaagcactttttatatatgtgcaacttgataccatagatatatttaagttgaaagattaaaatattttcatttttataaatgtgtacctaacccctgcctataaattgaatattaataacggttgaatggatgcatagcattatttgtttttaagaaagtacaaattaaatccaaagtgaaaaacgtctgtatatataataaatatatataattaccaggcgtatcaaccgagggatgggaagaataatccaatgaaaagctatactggacgaaaaggatagcaacccataagtagacaactattaataatgaacagtggtaatgagttgatttcatttggaatggggatgaaactatttattatatcttaatttatttgtgtgtatgctaattttgtagcatcagttgaaatttttcttagaaaagaaatggaacaacataattatagagctctgaattcttgtgataaacgagccgtagtagcatattcttttgtctgattattgtcatgacagctcgatatgtattgtactcttggtatcaacgttagccaggtgcttctgattgttgtatttgtatatgtactttgtataattaatttttggctaattagtaatttttttcccccgaactttaacatgtactaaatcatgttccctgaactttttttgccgttaaaaatttcccctgaactattaagattgttaaatttaaggactt

SEQ ID NO: 303418 - DNA, 1229 bp, Cannabis indica
actaagcgggctttacatgttgtatcaccaatatccttatgatacttacagaatttctttgagtctcttttattacgatttcctctaattagaggtgatttcttgaagacatctatgtgctcttcaatagcataaatgtggtcgcgagagatgaaaagctccatatagtaaacaaagtgcatacctcctttctaattcagggaagtgtccttcttatttggggacttagcacgctgcagacttcattgccttgtgggactacatctagggttacgtcccttgaaacttcttgatcgtggactataggattgtaatcttggtgctagagatcttcatttttatttacctttcttgaattctgccagtgagttctcaatccttttgtggggctttgccatggcaaaaaactcaactagggattcttgtcgtcgcgcctgcagctttttccaaaagtctatccttagcaacacacctgtgataagcattcaaacaagcaaagacttgggggccttctccactttggttactttaatgttaaaatgcttaaactaatcttgtaatgactcacctacatccatctcaatgtttgctatggttgtatatggcggcttgtatgtcatagtcgcctaaaaatgggttagaaacaaatctacaaatgtctcccatgttgaaatggacgcttcaggtagctggctaaaccaatcatttgcattttcatccagagttgcagcgagtatacgacatttagccaattagggcacttgattaacttcaaataaccgtattaaacttatcaagataatcaataggattagcggtacctttatacttgagagatttagagagtctaaagcatttagggagcctggcttgtcgcacttcttcgatgaaaggtgatatttcatgtagtttgtatatgggctttctctgctgctcaatcattctcagtgcttgtaagagattttcttgatcaatccctcgtggtattatgggattgttggtgagcctagtttgctttcttactggcaaagcagctattgctgctatgtttgcgagtaccaccacgtccttaggcacagctggtgcaattggctggttcactgcatttgtcgtgtcatttgcatttgcaggagggatacctttatcggccaaatagggatcacggggttcctcttcatccttgcgattccttggagtctgtgattgtaacaccctaactatcttaggcg

SEQ ID NO: 303419 - DNA, 2598 bp, Cannabis indica
aaatccatctaaagagagttgagagagcgaggaagcccgattacccacatcaaccagttttctttgcagatcaaagcttatgtgggtttgaagctcaagaatcaatggctggaggtatttcgatccttaattatagtgcatatatgatttattaattccgcactttatacataatcatgtatgtttcagtttatacaaataaatgttgaacaaaataagcatttaatcatttatcgtgttaagccaagctcgaagaaaatcatcgtttcacttctaatagttatagaagctgtagatttcatatctttaattggcgctcccactcaattgtactaccatgtttccaaggtgtaagtattgggaagatctacttagtcaactttaatgaacaagtcaaagaacatgaataatacatttaagccagaacctaaccatcttaggattaagatctattgacctaagatcaactaagtgatattgacttagaaatatataaccgtatgtttatgatatcttatccaatgtcaatatcggttagttcgatgtatactctatacatctaatattatcatactttgccaatgtccaggaaaagacatatcacttatccaaggtgtaagtaaactttatcgctgattatcatgtcaataaaaatccagtgtactgacaaatcatgagacttagaattttgaaacatataatcatgattattttttactgtgtagacaacactataatcatgaataactatatgttcaagatttaatagaatttatacattaaactataattataaaagtaataatgtgaacaatgcaatataaaatgatttctaatttttttttggatcaagaagaagaaaacttcattaatcaactcaacaagatacaccctcaataaactacaagagagttgttacgctactcaaatacctgtaaaaagattttgagagagatcaagttgttcttagttctcttctcacaagtgaaatacaattagaatgggagtaagctattaccaaataataggaccgaacctctatacaatctcatgctcttagtttatgcttgatattaaatatattattatttaatctaattgattttatatcactttcaagatttagtgtcgttggccaaaagcaaggtcaacatattctatctcaaatttcttcattaaataaaattttttcctgtgcaatgttgtatggagttgacttggggaccatggacctatactttaaagttccaataaatacttgattatattgatcacattgatagaataatcgactttattaattctattattactacgctataaatatggaataacgctcttcacaatatagaattatatttacataactattactaatagttcattgatataaacaatataagtagtccgccctctaattattagttcataactagagttagtcaaaattactgttttacccttctaattatctcttgaattcttatgtaccattaattcaatgtgaacaattaatcaataatgtaattatatatttggatccaactgttagcactcccaaaattaacactatatgaaactaatatttgatgctttcaaaaagtttagattctattattgtataacatgttcccgaccactcatgttagtttcacaacataagttgtaagaattattttctctaagaaactttcatgagtaaatcaaagaacttaatgaacacaaataggagttcatgcatactcagaattcaaattgatctattaatgatcattgttgtgatatgaataactcttttatgataaaagatgtacacatcgggttcagtcaggtataatcaaattatacatatcatctttactacatgtctatccacatgtgatccaaattaaaattacacacactagagtatagtgtggagtaaattgtacttagtagttctatatagagatccatttactttaatacactaccgactagttctatttgtattgtataatcttaattctcttgtacgaccttacaagactatacattctccatatcatcaataagaaattttttagatatttattaattatacttctataattaatatattaatttattttagaattgcattgcatatattttataatgtattattcatcaattccttgttttttgggcataaatccaaacaagtataccttttgaatcggagtgtgtcaatgtggttcgtgctctctctaatcatcatgtggataatttttactttggatgtattattagaaatattcttacttattgtaataattttactagtatcttttttaatttttgttctaggatagtgttgcacactttttggccaagccagctttatgtttcactgatgattatgtttggaggcttagctatcttggttgtttccattgatgttcttcacgataagatttattaattaatatatcttagataatcttttctctcttgtagttttttccattgagtttactcaagaagttttactgaggcctattttcttaaaaaaattaaaacaaaaattgaaagaatgataggagctaaacaataagaatgaaagtcgtacatcatcaa

SEQ ID NO: 303420 - DNA, 2371 bp, Cannabis indica
ttgtttggtaatatttttgttttttaattgtttaatcataaaataaaagtaaaattttttattttaaaattttatttttaaaaaataaaaatacgttctgtaaccacttttatttttcaatttttttttaaaaaataaaagtgtgttctgtaaagttcatttttatttttattttttaattttatttaagttgggtctaggtctggggtcgaatttgggttcgggtcagaagccgagttcaccgctagggttgtggggaggggatttgggtttgggtctggtcgaagtccaaaatattgattaaaaaaaaaaaaactgtttaaaaaaatattgaaagtgatttttttttttaaaaattttgatttctaattaaaaaattgaaaaagtgaaaacatttttataaaacatgtttttgaaaaatattttcacttttttaattttaaaaacaaaaaactgattaaaaaagtgttactaaacgtcactttaatttttaatgttttaaaatttattattataaaagtaatttttaaataattaattaactatttaacacgtgactaataatattttgtatgctgtaacaaaatagtaatcgaaagactattaattctacttttttatttatttttttattttattattaagtttatatatataactattttaaatattaccagaattatttatttatacattatattcttttttaatttatttttatttttttttattaaatatatatattgaactattgtaaatattaggagaattatatatttatacattacatattatcctatttgtgattgtgttcgttgttccaatttgtggtggtatatcttgtcctttctttttggaaattgcctcactacttttttacatagatgtaataaagggtttggtatactgggatgtgtgattataaaaattatcatctatttctacttttatgcggtattgcttcgtcaggcttaccactccttgttcaattcttttaaagtcgatcatttttcttgttcgagaacctcttcttttttccacttcgttcaccaattcaatcctatgaatcttgatttttctacttcatttttatttattttattttttaaattattttcccctcttttgttttttgtttttatttcaggcagcttggggattactaatgtgaaattgggctctcttttctttttaagattatttcacaaatattacaaaaaataacaaaaaattacaaaaatatggttgtataaaattttaaatatttttatgatttttataattttatttatagaaaatacggtcttttaatatatttttatcttgtacttttgtaatttattatatgttattttttgttgttgttttgatattattttcgagttattttatattttttttttgttgttatggtattgttttatagaatactataaaaatataaaaaaaaaaattaaaagaaggtaaaaaaataataattttgttttaaaaaaataatgtaagtaattatcccattatttttctgttttccttaagggagtgctttttcatttcaaatataaatgagagttattattttataataattcaatgaattgatgataaaagaaaagtcaccttaaaggtggcaactatgaccaaaacttaggtggcttcttggcccattgaatgttagtagtacatagaagtaagggtgagaagtttgagcccacaattgttaaataatagattaagctactttgcaccttagccgcagatatcaacatcgcatctacactatataacctcaacaatcttttctcttttgtcacatttgataagataccactgatttgaagcttagtaggctcacaaccataatgtcaccatactgatatcaccattatccaaatttaatggtacatgtaatatcataatactatgacataatataatataatataaatatatattattaagagttagtcccacattgctaatgtgtggaaataaattgtgatatataagatgaaagggctactcctcccattgccaattggttttgggatggaacctcattcatcttatcctcaaattctaacatggtatcagagccacttgtgatccgttgtgagcccaaattgccaccggtccaaaaagccgtttgtgatccgttgtgagccaaagtgccgccggtccaaacagatacttccgctctctccctttaacctccatttgggacctttcggccaatatgtgccaatttccagtgttgggtctttgacctttttcaaaatccacaaatttcccgacgtgtacacccataagtttcccgatatttggccttgtgggattctttcaaatgtcacgttcggtcctgtggtctcttaaa

SEQ ID NO: 303421 - DNA, 2467 bp, Cannabis indica
gacttgactggtgttttattaatgatatatggaaaacaaagtttgagcccttgatcactaatcacttagactactacagatcagatcattgtgctattgctgtcaatgtccacactatcaaccaaaggaccgcacaagtcaaacataaatctcgattcaggttcaaaaaaatgtggcttaatgatgttgaagttgctgctattataaagcaaacttggaactcctcaacttcaacaaatgccttggagcttttcgtgaataatttgcaaggttgttcttcatcgctacagtagtggcataccggaaagtatggcaacatgaagctagatattaaaaaaaaaatgcattagaaaatttttgcattaaacaatgacagcaacaggtcacatgattcaatggtggagctcgaaaattctaagacaatactcgacgatttattagcacaaaaagagacttattggcagcaaagatcaagagtggattggatgcagaatgtagaccaaaatacaaagttttttcatgctcatgctacatctagacgaaacaataatacaatcaaaacaataaaaatgcagctggtgttacagaatcatcacagcagggaatgactacaatcatttcatcttattttgaggaacttttcactgcatctcccatagactcctcggcaattcaacacacattaaacaccattcctacaacagtcactgctgcaatgaatggaaatctaacaaagcaatttacacctgatgaaatacttgcagctttgaaatctatgagtcttgataagagtttcggtagtgattgatgtcagctatgttttatcagaactattgggatattgtaggaccctcagtaactgatttggttttgggagttcttaacgatggacagaatatggatatgctaaataaatcgattatcactcttatcccaaaaattaatattccaattggcatgagtgactacaggccgattagtttgtgcaaagttatctacaaattgatttcaaaagtgttagtccttagataagatgttcttccatttgtcatcttagagactcaaagtgcttttttatcgaaccgtcttattacagacaacatcttggtggcttttgagttagtccatcatctaaagcataaaatccaaggaaggaaaggctattctgcactcaagtgagatatgagtaagggtttagatcgtgtcgaatggacctatcttgttgctgtgatggaaaaaatggagtttgatgacaaatgaatatacctcatcatgaaatgcctttctttaacaagcttttccttttccttaaacggagaaattgttggaaatgccattccaaggagagggctaaggcagggtgatccgttatcaccctacctatttttgatattttctgaaggattatttcgattgttgattcatgaggaggttgttggtaatcttgatggtcttcgtctcacacgacatgctccatcgatatcacaccttctatttgcagatgacagcctcttgttttgtcacgctacaaaaaaaatctagctttaactattcaaagagttcttcaaacttatcacaaagcatccggtcaacttctcaacacacataaatatgtcatgtccttctcgccgaatattgaagtaactattaaaatgtttttccatcaaacattgaacatgcccataagtgattgtcatgaacgatatcttggacttcctgcatactctagcagagacaaaaaagaaatgttcagtaacatcaaggaacgaatatggaaattgctcaatgcttggaaggaaaaactattttctataggagggaaagaagtgctcttgaaagttgttgtccagtcaataccaacatatgctatgagttgtttcaaacttccaaaaaaaaattgtaaccaacttgagtctatgatggctaacttctggtggggctctaacaaaaatggcaataaaattcattggaagaattggaatttattgtgcaattcaaaatttaaaggagttgtgggattcatatcttttattcatttcaaccaagcactattggcaaaataagcttggagaattttttaaatgcctaactccttactaagcaagttgctacagcacaagtatttctctcaaacttcatttttggaagcgaatctcggtcacttgccgtctccaacttggcaaggaatttgttagggacgtgagttactcatcaaaggcatgcgatacaaaataaagaatggattttatatttctacagctgttgatccatggattccagccatctcaaacttctgtccaatcaccttttctagatctcaaactcttccagtatcatatttcattactaacacgagagaatggaacctttccgtgttaaaaactcgttttggtgatattgatattgatagaattttatcaattccatggagttttttttcctagtcatgatcggctaatttggcact

SEQ ID NO: 303422 - DNA, 3183 bp, Cannabis indica
caggcttgttagagcagctcatgcaaagggtgcaaacatcattctcatacagtataatttgtatatatatatatatatatgtaattttcataagcttattttgctcaataaataaaaaatttcatgtattctattattttgcattgtgtatttaagaatgcttaatctacaacaccaataaaatcctgtaatgtataggatctttaactcttaaaattgactttctaggttgtctatggaaagctaattaacatgttcctggaagagaagtgagattacttttacttttaatgaatgtagagacacggttttatatagacaagaggctggatccacttctttgtggcttgaattggacattgagtgagagttaaatattataatatgtagtgtaaatgcattagatatattataccctattgatgtttcacacaaaaatcaactcctttctcttgtatgccatatgaaccacttttgggatggatttacaatgctattcagaatattggtgagcgaattccattagcatttgagggtcttactgatgaatgtattatgttgatttgttatgtaatggtttgatttcacatattgatgtaatattacttgcttaaattatgcatatagttctctgagaattgtcttttgctcggtctcgatgctatttattagatttatttctatgtttgctcagtaatttcattgattgtgttaggaactttttgagggatattacttctgtcaagcacaaagagaggacttctttacgcgtgctaagccttataagggacatccaacgattctcaggtagaaattactagtgatgactttccaagttttatatatttacttttctaaatgcttttgctgtgctatctgtcatactatgctgataccctacttattcattggcatgcttcataggatgcagaaacttgcgaaagagctgggtgtggtgattccagttagcttctttgaagaggcaaacaatgcccattacaattcaattgccataattgatgctgatggggaagatcttggactttatcgaaagtctcatattccagatggaccaggtacttaaaacggcgtggttcatccttatgcgtttgctattctgtttgcttacagccagtgattctctcttacaggttatcaagagaagttttacttcaatccaggtgacactggcttcaaggtgcgtgccaaatacaactgcagagtgcaataattctaattctaattgatatttttggtttttagcgatttatgctatcatctggaacttatagcatgttgtttgcaaacaggtattccaaacaaagtttgcaaaaattggagttggtaagatctaatgcttagctcttgacatttatttgttgtcattacacaatcttcttaaaaatcttacctcataacttccgaccttgaaggatggcatatctctatttcttattgcaatttcgacttaaaacttgcaatctactcatagctatcacaacatttgtggatggtatccattttggcggatttgcttgtttcattacgcttgcaaagccggtgatatgggaaactaataaatcttctgtatgttttgtcagctatatgctgggatcaatggtttccagagggagcccgagctatggttcttcaaggtgcagagatactgttttaccctactgctataggttcagaacctcaagatcatgaacttgattctcgtgatcactggaagagggttatgcaagggcatgcaggagctaatctggtaagtgtcatttagactggtaatcaaaccttggaatcaatttaaaattgaatttgtttcttttactcagctgacttctgctcttgttttcatgtgacttaattcggaagaagttttatttctttctaattgatgtaggagaatagttatattgtgtatcttctagaattagtataatttgttagactagttgtttgtttcttttatgttatttctattatgatgccatatttgtcggtgggcctatataagcttatgagtaggattgtaatggacacgctattgaatattgaaatagcgtcttgtgatagagtttggggttttctccatatgtttgctattgatttggcttgatctttgctcatcctttccagtcctctgcatcactagttgtgagaaattccttcaacaccgtattagctatccaatacttcaaaccataaaaactcaaagaaaatgagatatttaacccatttatattttatgctatgaatgaattgtcactaatttgtgaatattgtataattctaatattgaaaagggaaaactaagtcccatctattttttcaagataactctcaatatccctttcttaattttttttttccttttttgcttttgataagaatcagcatctcttacttatagccttacagtaagaatcagtatctctttctaatagccttacaaaaagaaaaaaaaaattcttgctaatagaaagaaaagtacagtaaggagacgagaagtcatccgaacagaaattaggtacatgaagaagcccaatcccttgccaattcagaaaacattaatgtccctaaatctgtatcaaccttaattagataccatatggtatcatccttcctatatcattaaaaaaaagatatttgttctttgtaattatgattcttgaagatccttgaattccagcattgcccaattatacaaattctatgtcttcttatgacattagcaacaccaaattgatcaagttgtatgagcaaatagtcaaaaatcagagtgtattcaaggtgtaaaagatcagctcaattgagtctgatgcaggccattctatttataaggttgcagagtacaaacagaggagaaatggctaaaatctgagccttacacgtggagctaatcaatacaaccaatcattacaatcattgcataacagaaatagaatctctaaaaaatctgtgctaacggtaaggaattgacagctgtgatatgcatagggattgccatttttccaacaacttgggagaccataaagactgaagtgcccctgcctattttatcctgtaacaccacccctcaaacgagagggtgatgaagtcactccgagtttgtcaaccaggaattggaatcttgaaatgtgcaagacctttagtgagactatcggcaatttgatcatg

SEQ ID NO: 303423 - DNA, 2260 bp, Cannabis indica
gtggcatttaactgccaaaaaaatatcgttgcaacaaatttgtaatgaaagggattattgccgctactttttttaatttatagagtcaaatctgtaacaatttagctcttttaagaaaaccacttgaatgtttttcccacaatgatgttagtcaaccaatcttcaaattatgctacactgtatttttcaaatgttatgttactttctcgtattagaacatacaaagagaggctctcttcaatcatattgtagctatttgtcaacattaactatgattctattgatataattcattctttgccatttgacagctctaaacgatagaattacttaagcaacaacaattgtggaatgaaagatgagctattattgattgtaaatgcaaaaagagactatagtcctacgaggagtgagagtgtatgagatattctcagagttatgaaaaccgtcaaaagaaaacttctttattgatgatgaaataaaagaataatttagctttcgaaatgttagtatctccaattataatttttcgagagggttgcgagtcttttcttttttattttcaacttcagtatttctctattatttataggcactgaataacataaatagtgtcagctaggagatactaaaaataagacaaaataatcctttaaaataaaagtcctctatccttatttagcgtatctttctgttatatctaaaatgtatgcgagcctatcaagatgctaagaaaacactcaattctagcatgccccaactaaccccttactgacattggacacttactatctccatattagtatgatattgtttgctttgggcctacgcccttctctttccaaaaagtctcataccaatagagatattgtctatctttatatatccatgatccttcttatttatagccaagactttggatacacaatcaacacaaacttatatatactaatcaattcattctcaatcactactccaaatccccaatacaaatgacttatattccctcctatatttttttaaaaaaaaaaattgaaagagtttcctctccatagaagattatattaaattgctaaaacaccatcaataacattacaactatcatagggagaagataaaattggtaaacaaattatatatacatatagtgtgttattttttttttttaggaaaatatatatagtgtgttatgaataaaccttttcaccaatgaaaggcaaaatttaccatatatgtaaatgtacacacattttggttgaagtctcgtcttaatgagcttcaaagttgaaacttgaaagtatagttagagtttctagtttctaccacattggtaatgtgttcaattattgtccattttagaccatttataacaagaaatgtgattagtttctactaagtttaaaaatatacaatataaataaagtcaatatttaatagagaggcatctttttttgtcttagggagccaccactttgtggcttatgcttccacgagatgtcatttaatagtctctccttgtcttgagtgttcttcttgcagtctctgatctctaacactttcgtaagagtgaaacaatacaaattttcactttttctgtgctaaatttgtcattcaccttttgaaagatggaggtataaatctgtaggaaagttggagaggaggatttgattttgggtttgtttggattcaataggttgtgttgtgttcgcaaccagccaaactaatcttacttaaaaataatgattaaaaaatcttgagcgaaaaaatttaaaaataaaataaaataataaaaattatttaaaaaaacataaaaaataatcaatccttctttcttgctcgataattaagataaagaaaattatttgggatatcctcaaattatacacaatgatgtgtaactaattttaactatataattaaaaagtaatatgctttactaaaagaatataaatagctaagtctatgcaatttgagggtgtatctaactcttttgtctttatagggattttaacacttggtatcttttttttgccattttttttttacatttttgtctttattcggttaataaacatttttagaaaaattatttttcaatattatattttaaaaagtttgataattacacaaatacctatacatgcttatgtcataggttttctccaatattacactccatctcttccaccttcttctctttcatctccaatattacactccatctcttccaccttcttctctttcattcattttttttttt

SEQ ID NO: 303424 - DNA, 1454 bp, Cannabis indica
aaaaaatttaagcaaaaataattttttattggttagagtttattttttaacttaaaaaaatatttaagaagcaatcaagagatacactttaacatttgctctatattttacataataacaaaaattatcatctttcaaaccagtaacaatagtttctctggcgtgtcaatttttttttttattatatttaatttatgttattcgactaatagggtttcgtcatcatatcatatacatgcataaatttttttgtctgaacggtgtatctaactgcctttagtgtattctacttattaaataacttcagcatttggttgtcataaaaaataaaatgaaaagaaaagatcaatagttcggtgatgcaaagttaattttcagagaaatagagtatgaaccatgaagaagaaagcagtgtatttcattgattgaagtaaatgagtacaatgattatttataccctaaagagagcttaactaactgtaagaaaatcattaactaacattctgacaattagttgaaaacaagaacataacaacctataatagccaagtctaactaaccaatttcatttatattatcaacatccctcctcaaacttgacagggaggttctcaaagagagtttgtgacataagaagttaaactttggcagagttaaaggtttggtgaacaaatcagctggttgttcctcattaggtatgtaacaaatagggagtttcccttgtgttacaagctctcgaacatagtgaacatcgacctcaataaattgatcccaatttcctccaagacagaaacagtccaaactacttcggtggcagtagtggatagggacctatactcacactctgtactagatcttgccactgatttttattttcttgatccccatgatgtaagattgccaccaagtttaacacaaaacccagttgttgacttttgatcatccaaattgtaggcctcatctgcatctaaaaaggcttctagactgaggtgtgttgctggtgtgaagacaatggcaagttgtaagagtacctttgatgtatctaaggactcttttacaggcattccggtgagcaacggtaggattgtgcataaattgactatgcatgtttattgagaaggctaagtcaagtctggtcatggtgaggtattgtagggagccaatggtgcttctgtaaagagttgggtcagaaaatagctcactgtctgaggtgtaaagtttgtagctagggcacatgggtgttgtaataccttagaattaagaaatagattagaaaaatcctaattagatcattatgaataattgaggaattatattattatataattcagtatatttgaattaatatgatttataacatggtaagaccccgttggtgagccaggggcattttagtaattatgacccgagaagggtaaaatgatgaaattaatttaattacgtgcttaatagaa

SEQ ID NO: 303425 - DNA, 2552 bp, Cannabis indica
cgtaaaaggtatactaaatttgacacattgctaaaaatttggtcaaattttgcacaaaatactatatggattaaatttacatcacatttaatgttaattacattttttatttactcatttgacactaattaaaagcttttttaatattttatttattcattttaataatttttatatacttttaataaaaaattaatgactatgttgactttggggttaaatacaccttgtgtattggagtataattgtaaaaattggatcaaatataatattgaaccatgttataagctaaatttgctataaaatttgtaccatgcattagagatggtcaaacataaagatattacattgagtgaaaaaactatttcgttaagggctataaaatatactattattattgttattattacgaaaaaacaaattccaaacgtctgtaaagaatgtttcttggattcagagatattggtacttgtggaacacttgtactattgacaagtatgtgtgggctattgccatgaaagaaaataagttgtaggtaaagaagtacataatgtatacttacgagaagatgattggtggagtttcaaagctccaacaagcagttggtattgaactaagatagttcaaaccaaggaagaattaaaggctccttattccaacaatgaccatcaatcgcaaaggtactgtattaacaaaatgtaagtatttgatgaagaataatgaaggaagctagaaatactcttaccatggctagctcttaaaaaacacttacaacttagaatagacatattcactttggtattaattctgaccctctttgcttgttatgtggtcaaattactgagcctcataaacacctattttttcaatgccaattcaataagatgtgtatgcatgcatattctgagttggttgggtattggttccagcttatgggtattgtttcagcttatgggtattgggaatcgggtgagaaagatgtaagaattctggatgccaaagtgttagaagttgggataagatgaatgaagttccattttaaaatcaattgacaataggaggagtagctcattcatcttatatataataatttatttccacacataagcaacgtggaacaaactctaatacactctcctcacgtttgagcttagaaagtgtgggtataacgaatgacctttaaaagaccacaaggcagaacgtgacatttaaaagaatcccacaaggccaaatatcaagaaattgtgggtgtacacattgaaaaatttgtgaattttgaaacaggtcaaagaccataatactgaaaattggcacatattggctgaaatgtcccaaatagaggttaaaggggagagagcggaagtatctttttggaccagcatcactttggttcacaatagatcacaaacgaatttttagaaaggtagcactttgggctcacaatggatcacaagtggctctggtaccatgttagaatttgggataagatgaatgaggttccatcttaaaatcaattggcaataagaagagttgttcattcatcttatatatatggcaatttatttccacacataagtaatgtaggactaactctaatacaatttatttgtgcgagtgtgtattatatttggaaagttaaaaatgagaattttttaaatgtaaagaaaccaatagtttctaatgttatagagaatatatatataaaaaaagatatttgtaataggataagtcttttgttgtcaaggaaggtctgtaggtctgtatgtcagagggatttagattggttgaaaaatttacaaatgtaattaataatgattagtgtttctaaatagtttggacataatacaaagaaagatttgatttaccaaaaaaaacatatatatcaacatttagttttaaaaatagttttaaaaattggttgtctcaaggtggggcggggagaaaatatatttgaggctacgccttagctactaccattaaggtgtatgtctcacactaatgaggcgaacttgaggcgcacacctttaaggcacacgcctcaccaatgaccttttttttctttcttgttttgtgtgttagggctatttttttaagctgatcttggccattttttattttcacacttttaaatgaaattagtttagaatattttaatttagcagatttttaatagaaatgataggaaaatatagccctaaaaattcaaatcctctcctatggaatctctcatctctctccttctcagcctaatccctcccttctcactcaatcctcatcaacctcgcgcatatatttctagcttctttatatatgttcagaaccatagccggtcataatggagttcaatgtggactactgtacagggccaaaaaaaaaaataaagggcacaatatatttatttttaatgcctaatattttttttaatgaacctaacttttgaggggactaataatttgtcattagtcacttccatcccaattcctaaagcccattttcaattctattaatgctttaagtaaaataaaaataaaaatttataactgttatttatt

SEQ ID NO: 303426 - DNA, 1407 bp, Cannabis indica
cccgaggtggtgaggttaagacaagtggtaattaacgaactgacaaaggaaatcggcggagcaagaagaagctacatgctagatataagaaaccttcctacagccgtaaaacatggtagcaaaagggaaccttgatgctgaaaacccactagtgggaaagtttaactatcttggagttggaccctttaatccagcaaatgacaagagaaaggccaaatcggctaaacccctgaagaagagctatccatcaagacccacgtaaaatgctcctaggaacaacataaatatggtcgaccccctcttgcggaaagagaggaccgctcaagccccagggctagaccatcctatttatctgttgagtagagttgatcagaacgataggcatcgtgctcaagtactgaagcctaacatttgtggaaggaaaaatttccccaataatttttctaaccaaaccatcgaagtagaagacttaaatctcgaagatagcatgtcaaaaatggacctcagggaccgtttgtatgcaaaaagggaaaaagtaagatgtgaaaaagtcaggtctcgtgaaggagatctcaaaaataatatcaatgacagaatacggggacgtgaaatcctcgatgataacaccagaaggttgaaggatcaaatttttgtcttaacaaagatcatggaccaactggtccgtaaggaaagtggcactgtgtttgactctgatgatgaggacctggagccatgcatcaaaaggattttagaagcgttgctgcctgcacgcttctgcatgccctaaatggacttatacaaaggcaagacagaccccagaggtcacttgtctcgataaaatagattgatgattgtaataaccgcatacttcgaataaggattagtaaggaaattagcactagatagttatattatatgactaaatgtgacaattttatatatatatatggtgggctctatttttaagaaataggtattagggttataattttttaattctgaagattttattaaatttatgtgtattatatctgatatatgtgtaatttagtatttttataatttttgcttagtaacgatggaaatgcgacagtttagtcattagagtcacacagatatggtttagaacctttctttttgctggatatatttatttgatattagaaggactaggtggagttatggtaatagactattttacccttaggccttaagcttacttaagtgagaagtgagggacaaattaatcattttgcctacaaggttgactttgattttagtggaagtggtagaactttctaatgttttaattcagtttattacctaaggtttaacaaaagaaattaacagtattttattagataaacataagtaaaaagatcaagttctatccttctctctctctct

SEQ ID NO: 303427 - DNA, 2258 bp, Cannabis indica
aaaagtccttaaattaaacaatctcaatagtttaaggagaatttttaacggtcaaaaaagttgaaaaagtataatttggtacatattaaaatttaggggtaaaaatctgcctattttatatatactaattggttttgattaaatttcatttccacataagcccattcatttgaattgtttattagggtgacattggtggggagggatcataggtttatgggcaatgaaaagggtaggctgtctctctctcattggtgcataaatcatgtatatatagtgtatatatattattctcctctaatattataaataaagatcaaaagtagctttcaagctttaaattttggtttccaatgcataacaaattgacatgaaatgatatataggattagatatatgttaccctactacttctactattagatcttctttattaatttacactctaacatgtttaagatttgtaaaactagttcacactcactcacacacaaaatctagctgtgaaagacaaatcttgatttgattaataacaagaaaaaaaaatgtgtgtaaaaagtgatttgtgtttttgttttaatccaaaaatgattgtgttcatcttgtaagaaacaaactgttggaagtataaaattagtaatagtgactataattaatttatcttagggcccgcttaagggtaggacagcagaggtccacgcctatagctcccactcaagtacaaaaaatcctttaacgaataaatctcaaatttaatatttaaaaatactttttattattatcttataaaatataattatttttataatttatttatttttataatttttaaatatttataataattttttaaaatttttattttatttttaattttttaaatatttataattattttttaaaactaatattacgtggactactaaaaacttgccacgtgtacaagtatgtacacgtggacagtctactgtgacacttaattgtgattttttgacggaagtgtgcagagcaaaacggaaccagggtttaggtagtttagccgccaaaaattcgatttttgtggttaagtattacgaaccataaagttcaggtagtttagccgccaatatcctttttatttataatacataaataatgaaatattatatatttgatcctgtattttttaattaaacactcaaaactaccctataaaataataaaaatattataactattatatttaaaatttggctagcacttcaggaaaggacacatgtcaactaaggaaaatatgaaccagcaaatataatcttaattatatttgtagatgttgaaatggaataactcattaaatactgaatcgatagagtatatttataactcgctgaacatcaagtcataagcgagacaaggatgtacgaactattaactcacgtattgatgagaaaccatgtgacatcagtaatgcaagacgaggcattaacctcgctatgcatggcgagacataagcgaggcatgatgactgttaaggcacttagcatataatacacattatacaaactaagtataacaatcgagcaattccaaataacgaatagtgaggcatctatctcgctattggaaggcacactcgtcttatttttactaattagctccagtcatctttcaatgagatccacaactccgtcgagtcagcttcttcagatagaagctgacattcaaatgatgttgactactgaagttcaccttgccactaagaactgcgattgtcaaatggagcgttatgtcttcaagcgcagaaacgttgagggttacattatcaatctcgaaaagacatgggaaaagttccagctcgctaccagggttattgttgctatatttccagcgagacatcccagaataatgtgttacaacgtatttaatacacgtttacattgacccagtaaaagcggaccaatcacagctgtgtgattttcaaattttaaccgcattttattttacgtgggatgcaatccaatcccacgatttcaggagattattgttgtaaaagatcagtcaaatctataatcaacttccctcgtatgtaattataaataggagcaggttacactaaaaaaaggggacgaaattcattagagaaaaattcctagaactgcatcagaaatctaataagattgactcgtagactatgcataattttgactgcaaaactacgtaaaaaaacctttgtgttcttatttttctttactgtttttatttctgtgcaaatctatcac

SEQ ID NO: 303428 - DNA, 1461 bp, Cannabis indica
aactttttatgagaatatgtatctatgagaaagagagagccaccaagttttgtcttgtgaatggtgatgagatgacgagttggttgttagaggtcaaagattcgaatcggattcaaagtccaaaaaagcgatgtgattcctaagttagttaacacgctcatataggcttagggttcgctctttcattcacccacaatgtaggagaatgttacatttgttctgcagttctcattgataataatataattacacaaaaaataaatatcttctctatccctaaaaatagttaagctttgaaagttttctagaactcaaagtaccaaaaaaaatggtgtatttcctaggtctagttaacacacttatataggccaagggtttgcactctcattgcccacaatccaagtgaatgttacatttgtactgtacttttcattgaataatagtaaaagaactacataaaaaataaatatcttctatatccccaaaagtggttaagctttgaaattcttccagaaacttcatcttcgagagataagttgagaatatgctagaggggatctcacccttggagaacaccattattggcgagtactgataccaaaaattttcaatacccatttaaggcacctttggggtgtgtgttgacgctatgtttatgtcagtagtcgtgtggcacttctctacttagacatcttgagttgtatttaacaagtccttcaaggttggttgacattccctaggattttgagcttcaaaacacccaagacttctccttgagttagcctacacgaatactgccgcaaagaaagtgttagtactcgtgtagagcacttctaaaccctttagggacttctcttatttgttatgcaatcattgatgttggaaagaaccatttggcaactagatcccttcattctcctcttgggcaagtactgacacaccctaagtgtcaatagtcgtgtgctatgtgagtactgctgccacttagggagtgtcaattctcatggagcaccattctctttcttttctggtacaactttgactttagggttcaagtttagtgcatgcatgtgatattttgctcgaagttccaattcaccttgagaatctctgggtatccaattactgacaccaaaaaagtgtcagcagttgtatataagtatctctcttagcatttggtgatgttatcttatcttttgtgctcttgtatttgttgactaaaagccagtcactcacttattttgatgataaaccaaatttgattattatttgttgataatctttttttgatcattttgcaagcaaatacacaaagtatcagtatttgctctgtaaataatcaaacataatcaaacaagtggattaaacaagtataccaattatttcatacttaataagagaaaaagtttcatcaagagatcgagaattcaagaccctatccaaaagaagacttcaaaagct

SEQ ID NO: 303429 - DNA, 1226 bp, Cannabis indica
tacacttaacccttttatttttttttagtggcaaaacccccttaagtttatttttcttaataaatttgacacgccagttaaatattaccgttaaatatcaactagatgactactgtatacacttgtgtatatgtaagagtacaactttgacgtcgatacaataataatgtagttactatgtaacggttatatttaactgaaactttaaatttacaaaaaaaaaaaattaagggagttttgccaaaaaaaataaataaataagttaagagtataaaaattaaaatataaagaaatttcattctaaattcctcaatttattatgatcattatttaaaacaaaaattccattcattaagagtgataatttgttaatagtaatagtatccttaaaatgtataattagaagaaagaaaagggtttaaattggaataaaaacaaacactatcatactaaaataattgtaataattgtgaaagtgagaaaacttacaatggagtgggggaaaggaacaattctccactaactgaatagaaagcatattttaacataaattcctatttatagcaaaatgaaaccatcaagtagcccagcccactcagacacccaccaaacacttcatttcttattattattttttaaaaaaaaaaataaaataaaaaatgaaaccttttctcttcttctacgtctcaataatttcttcttttacgtggcaacgaaaaatcctttttccacagttcctggatgtatgtctatcactttctgtactataccacacccatcacaaatatttatgtataactactaatcacatctaatttaggtatacttattgaaaaatgtttgattttagctcaatcacttttaattcctgtcacaattaattttacattataagacacacaaaatttatgagagtgctagggaatataaaaacatgacggagctagaatttcttctaggcattatatgggtctgccagtgtttgttctcttttttcttattagagtaatttacgacataaatacttaagtttaagtcctgattgtaaataaatacctaagttacatttttataattccgtaagtatctaaccattaaatgtcaagccattatctacgtgtcagttttttatttgtatatttagactattttcttaaaaaaaaaaattaaagacctagaccaactaaggattgtcacgtgacaatttacttaacacttaacatcta

SEQ ID NO: 303430 - DNA, 2134 bp, Cannabis indica
gctcagcaaagagaggcaaccaaagattttgttgtgtacttggttgatgcttccccgaaaatgttcaacactacttctccagacgtgagcttttattttattttatgtctttaaagggttatgtttcttctatcatacaagttctatcgattctgtgatggtgatttttttgccttttcaaaatgcattgtttagtggtatataatgcatatatggtatgctttttgcgaccaaaagtttatttatttatttatcaaaaaattgtgaattgaagtttatttattaatttatagttgtcacttgtcaaaaatagaattcataacatatgacgttttcttagcaaaagaaaagttaagaatttttcttcggtttaactatgtataacgtgttgttttagaagtttgaggatctcattatagctttagaaggtatgaccaagctcttttgtactgggatatttaatgatcatcttggttttcaagtcagtatatgaattgaactcgagtccagaaagcagagggagtaatggggagggatatagaaaaaaaaagtagatatgacactaaatatatcaccatattgatgatcaataaatattttatcttgattagattatacatgatagttagcttaatgtgattttgtattttgtcgttgccccccatgctcatttcactgtgtcaagatagaaaaatgatataagaaagtcaatgtgtacttgttaacttctgataagtgatgatttaattttgtctgtcattgggcaatggctaattgttacaaaaatgaaaagtaaataaaaaaactttctgcatgtcaattgatgtttcacttttatctgtcattagatgatggtcatgatttgtgcctttattcttatgtgctataataattattaatatattgattttactttcaattgtttcatatctaactgttttagccgcgagcctggtaattctccatatattgtaaagaatttaaaatttatttttcatattggcaggtgggcaacgtggatgaaaatcatttccatattgctctcagctgcatctcacagtcattgaaatcacaaatcatcaataattcgtatgatgaagttgctatatgcttctttaatacagtaagatgaatctgtttaagtcttacaatgtagaattcttggatcatcaccagagactgatttatattggactaaatataaatctgtctcagatgttgttcagggctattttttttttaaatttttgtaaacatgtgcagccaagtattagcttccatgaaaatagactgaatataaatctgtctcagatgatgtttggggctgtttctttctttctttcttttttcttcgggtagacttgttcagcccaagttctagcttccagaaaaaaaaactgtttggttttgttttaccattttctggttaaaatatttatttcataagtttatacttgcagagggaaaagaagaatttgcaggacttaaatggtgtctttgtttttaacgctgccgatcgagatcagttagacaggccaactgcaaggctaattaaagagtttgatcttttagagggtaagcatggagtagatagtatgtatggtgcatgtcctgtggaaccattggatcttctctttgtaattatgtctgttgaaatctcattttgtagttgaaataaaaaagaacagggatattcatgaattctgtgttttatttgccacatttctgtttccttgatgttttagaacaagaagttctgttctaaagatgaaacggaaacatgtggtaaatagtatacaacaatgttgttttgcatttataactcttggattcattgtttcattcttttattattgtttgaactttctgttccctctcaaaactaatcatgcataatactgaataagtatttgatgaagttaaaggatgcaaggctgttgatgatcaaactttaggttatggataaatgggcagttaactaggattataaaaattaaggtgataagacccgagatcttcggatcaagagctcaataaaacaagtagcaaaacaagtaggaattgtatattaaatgtattgagaaattcaattacaaaggataggagcccttaggctcctttggtgcaattagag

SEQ ID NO: 303431 - DNA, 1605 bp, Cannabis indica
aggtctcccatgtaaatttaaagtacatacttaacctaattattactatttaactactatatatatatatatatatatacgaaaacaaacattttatattaatatatattcaaatctgagagtgggctttagccctctctcaacacccctaggtctgcttatgctaccgatatctaataaaaataatatttttttttaaaaaaaaaatactaaaaaagcacatataatttaagaaaaaaatttttaaataatataactaatggttgaacatgtatagaaaatattaagcaccacccaactttttttcttttctcatacaaatatgaaataagcaaaaaataaatctatataataaaaagcacaataatatcgttaaaaaaaaattaaaatacttatccaatcaatggtcatctcagaaaacacttatctaatattattagatggttggtcatcgtcctcgtgttttcttacagatctgtctttagagtttttttgtaatgtatatatattaatttaaatttttgtatagtaataacctaataaaaaatttatacattatttgatgaaatgtggggtccttcattcttcaatcaaacaccctttataataatgtttcatttctattcatttaaaataattattacaacttcctggtctcaattgccttcttaattaagctttatttaacaaatggagaaaaaaccatggtacccacatctactagcctttcacacatcattttgaatggaaaaaaaaagtgtctgtttgactatatgatcacttatcatcagcttttgtatttttttttttttttctgtttaattacatcttttttatagctaaaaaaaagtaacaggtcttttcttttgacccaccatatacttttattatatgtgataatgacattcatcaaaggagctaatttataggtttatggtttgataatgtggtttagaaatgaacacatatctcttagtcttagctagagagagagagagctatatatattgatatatttttggaatgttgaagaagaaataacctaatcctctcaattaaaaaaaaaaagatttcttttaattggatatatttatagctagtttttttggggaggcaacgagaaaaattctttttgctttttggaactatttttttttcttttcttttttgagtatgaatctattttgtagcctcatttagttggcacttcgaaagtttaacgaactatattagtcaggcgattaattggtaaactgtgacaacgtggcatggcacaaaataaaaataaatcaacacataaaatctttttttttttcttttttgaaatcaaaacataaaatcttttgataaatagattactttcggctaattaaaattttaactaagcctttaactaatattatggagctaataaatatataactatgtatgtaccaaactatataataattaattgtatacatgttgtatgtggatatgatctttttgacaagattcacatatagttgaatacttgaatacttgaatgtgaactgcaatatatatatatatatatatatataagtaaagacgtgattttaacgtactgtgctagctcgttgctaa

SEQ ID NO: 303432 - DNA, 5242 bp, Cannabis indica
aaaaaagagagaaactgaaagccaagcaaagaaactgtacatacagaaaatacttacgaaaaaagtacatatacaatttttaatcagcaaaatgagcaattttatgtatcaaaaagtcttgacgtgtaaagcttcagtaggacttgaaactacaattctacattttcatcagctaaaaaaatacttgatcacactctatgcttagtttaacatgttcataatcataagtaccaaaggaagatgtttctagatctgtatttctaggttattatacaagagtgtgttccacaattcaccaaaatacaaagttagattaattaccttcctattatcttcaacataagatctaataaagtaacgacaatatttctccttgtcttcatcagaagataagtcattgatcatatcttgaccaacagcagcagcacaagatggatcagggcatcgcaacatcaaacatccgggaccatcattaatggatgtactaatataacctaaaagaagggggcaggatgagatggaaatgtcatatcgtaagaaaaacttccaaacattaaaaaaagttgaagtggtaagtaatggattagcagaccacttagtggaaaacaaaagataaatagaacaggagcaggtaaaataaccagatcataatcaacttcagcttcatgttaggtgctcagcactgaccaatgtttttttcaaatgtttttttcaaaaaaaaaaaatcatatattttcatttcatagtctgttccaatcaaatactagaacatttttttcttcttttctgaattgtattacatttttagagtaatgatagaaacactctcaatttgcacactcaaattaatatgtaattaatctaatatttttagagtaacaatagacattctcaagttgcttactcaaattaccactatgacgtgtaattgatcttatccatggatattttaagtgggtactacatatttaattgtatgactaagaataattacacatcatagtgtgtaatttgagtgttcaattggaagtgtatctatcattacacatatctttataaggaactcaacatcactgctgattgttgtagctaatcactaataaactagttagaggttaaacctgaaaggcaatggctgattttccaaggcaaatgggcaaattttgattctatgggaaaacttaatatgcaacaacaaaacagagctaatcttccatgataaatgtcccaaataagagaaaattaaattagatttaaactacaaaagaactattaaacaagtgacatgggctaggtaggactccagccataggattaagaataggcacaaaagtcacatcatcagccttgaataattaaattctacaaaccttacaataaatcatgacaagctcatgataagactaatcagaaattaaacttaggttggtaagttcaactgagaatattactgttaccaccaataagaagtaaagtttcactcaaaaaatgaactagattcaaatgtaaataacacattctgaagctgatctgtccagcactaagtagtaaatctgaaatctggtaagttcaactgaaatataatataccaacattaagaaggtttcagtcaaagaaatgaaacagattcaactatcggtaattcaggtagaattttcctttataacagcaaccttagaaatgtaaataacacattctgaagcaaacctgtccagcataaactacagaaaggatgaccacaagcagcagaatgaatcttatcacgaggatgggcttcaaaacaaatcccacaagtcaactgtcaaaaattaacaagcaataaatattgtatttcagtttgagagtgcacaaagtcaataagaagacatcagcataaccagcttaccaaaaaaaaaatactacttatccaacaaactaaatgtgacatgcttacttctttggcattaggatattcaatagctggtctctccagaaagccaacagccctccgaaccttgtcctcgtttgcaaaccactcatcatgtactttactaacgctcctgttgatgaaagaaacaacagtttagtaaaccaaacatacacaccaattcatcataacctcaactcaatcgaataagaacagaaatacaagttcgggcttaaaacaaatataactgaaaaataaattaattcttccatgtttacctgagattatagatgtagaatacatgtatacatatcaaaacaaaaagaaattaatatttagattatatactaataacagccacataaatttatcaattatagatgtagaatacatgtatacacatcaaaacaaaaagaaattaatatttagattatatactaataacagccacataaatttaccaattatagtagcggagtagtatgctagctgcaccctttggaatagaaagcacagtagaaatcctcattatatcttcctcctgacgttggcaaatatcttcttcagtcaaaacagtatagctttgctgtgacaaggcaacattaaattacatcagcaatggccagtggccgctattaataattatacagaaaagtagcaacactttgttgtcatcatgccaatacactttgccattctggagtaaacatgtggctagaagtcattatgtcattccatttttcaaagttgctaatttgctaacaaagtctgcaaaattcacaaataatgcttctaaaattgttaaaggtttggcctttagctgctgaactcaacatgctaatcaaatctggaaaccaaatatccatagagatgttactcttaaaccaaaaaaaaaaagaggttcatacagatgtacacatccataacagctgaacaagaattgaacacttcaacataaatattcttatcctcgacaccatgttccttttctttagagaaaaaaaaaacaaactttacaattctccaaacttgcttaaccccatgttttgaaattaagactgttgacatactacaaaatttgaatatcatgaaactatggcaatctctatgaaggtgtccaggagggacttcaaccactgtaagacctagtgggagcaatggttaagctaccctattgtgtgactactttgctaagtgaagatagtaaacaatgccataaaatcagcccaaaaattgtgaaacgaacaaagcagccagccaacacaaagatcaagctcaacaattactcacacaaacaatagtatagttaaatttccacaacatttttatataaattaaaaaatttcgactacagctgaaacatgcttttcaaagaattaggtagaaaatctaattaaaaaaagcaaatttgccaaattcatgtagaataagaagcacccaaccaacacaaaaatcaagctcaacaattactaccacaaacaggagaaatttaatttttcagaacaattttatataaattagaattttcccaaaacaactgaagcataacttttccaataattaggtagaaaatcaaattaaacagaagcaattgccatccattcttctaatgaatgcactttggtaggagtacaaaggtaaattgataccatatgaccttgacgtcactcaaaattatgtatctcaaagatgatacagacacaacaaaatcgacctaccacatagcaatcatatatgagcaacacttcctagttcaatccaaaacaaagtaaattactgtaatctggaagaaaaaaacgcaaaacaaaaaaaacaaaacaaaaaaaaggatcataaaaaagaaatctttccgtaaaattaaagcgaaaataagaagtaatctccacctgatatcgattagtgataacatcatccgaatcgtcagaatcgttgtcgatgaactcgtaatcgccgatgtcggcgtcgtcgctgtccatagcggcggcggcatcatcgtctccaccactgtaaaaatggtcgtcattgtcgtcgtcctcatcatcgttggcatcgtgcatgtcgaagtcatcctccgattccatctcaataattatctgataggatttcccaaaagcaatgggaaaaattaaaaccctaaatttgagaaaaatgatcggaattcgatcaggaattttttgcagagtgagaaaagtaaagggtagattttatatataggtatattgagagagagaagaagaataagaaaaaaagatgatctgttgagtttaagtttgggattcgttcacataatacggaaatgagggattctcaaagaaattttcttttggctttttcgggagagagaggtaaccacgcataaatactgttaataaagggataagtaaccaaaattttaagttattttctttagcaccataaatatggttaataaaagtaaccgaaattttaattcataaaattttgtaattttttctaattttattagtagagacacaattttaaatttaataaaaaaagctttagaagtaactaatttcagtatatttgtagtataaattcttaagttttgttctgtctctgagtagcgaataaatacttaaattgtatttttggcaataaaaatacttgttgttactataaaaatgtgctagatgatgtgccatattataaaaataaatatcacatcactcccaccattaacaataaatattgtcaaatcatatatcttaaaaataataataaaaagctaaaataaattaaccacatccctttctccctcgccctctgtgttgtgtctcatactctttctctctctctctctcaaaatatttagaatgtcgtttataaattaatttataataataaactaacggtttaaagtaaatgtgagttaattaaaactttagtgattatttcttaaaatataacctaaatctttttcaaaatattattgcgttgaggatcccttctgttataaattttaactaaaataccactgtattattttattacaaaatattagtacatattcaaaatactacaaaagttgaatactgtcaactgagcacaaaagacagtggggttgatatgtacattcgtcaagagacctctgactcatggttgatccatcttttattttcccttacttgcaccacagagcacttatgagtcacaaagactcagcaagaaaagcgagaaacaaaatataattttatgattaaataaaccaataatcaataacagttacgtacttaaaacatatattcacacaaaatgtaaagcccgcttagttaatttggaaattatcagttaattatgattatttatgaaattatt

SEQ ID NO: 303433 - DNA, 1583 bp, Cannabis indica
tttattttatttttaatttttctcataaaatatatattttatgcaatttcacacatatatattaaaaaaataattcattaataacaaacatatataaatatgttacctgtactccagcccatcctttttggacatcagattcacgagcatcagactcattagcccaaccccacaaaattctcctcttcttaacaggatcataaaatgtttttgaggcataaaagttaccataatcatatctcaatccatcccaactatcaatagatccattatcaggaacatacctatcttccttaacattatatgtcccaatagtgtaataatcaaatctagtaagatcaagactcactttaaaaacatgcttaataccatttccaacaacagaagtgtccaaaccattttgactactagacactgaaacagggaagaaatcagggcattcccacattccactatctgacttagaatgaattgggtgttttgccttaacccaatgaacaaaatctttgcttctatacaaatgagccattcctctcatatccctcttcccaccaactaacattctccaatgaccatctttccccaaccacgcagtggttgggtcccgaaaggcgctagcgttttcgcccttgtcggggaagactattggattgttgtctggcttgatccactctctaagataaggatcagatgtgtttttggggatggcatagttttggacttggttttggtttgggtcaattccagtgtacaacattactggcttgttgcctgggagtattgtggctgagcctgaccaacacccatttatgtcaaatggcttagatggtgatatggctggttctaaggcttcccaattaatcaaatcttttgatactgaatgtgcccatacaatgttcccccatactgctccttttggattgtattgatagaagaagtggtaaagtcctttaaaatacattggtcctgttattacataaattaatatatgtgtcacataaccatagattaaataatttaattaaatttttataattattaaagaaaaaaaagactcttattaccatttggatctgttgagataattgtattttgtttgttggagagatagttatgattcccacatgacaaataagagaagaaaaaaaaaagatgttagataagctagaacacatgatcattaaattattagtaacactttaaattaactatgtgttataagtatttgttaatgattaatcgagtaacattatttattttatttatctacataaacatagaaattaagcacatttgtgtgtggttatagttaatatagacatgagtctaataaatagcgtagtaatatagattaagctttagttatatattagagtttctttttgtagttaaattctttcaactatcactcaattggcacttaattctctaagctcaaattttgacaataaaactcttcaaactacgggaatttaaggtgtcaactattttttacagttaattattaatatagactacttatgtatacacttttgtacatgtatcaaatttatattagttatctaaatattattatttaaaaa

SEQ ID NO: 303434 - DNA, 2436 bp, Cannabis indica
cagagaaaaatttcaagctatgaattctcaactaaaattttgagggatttcagcattcgtatcttcggaaaaaatgcagcaaaacttgccaagattttgtctgatgctgcagcaactaaccagacaattgatattcaggtaagttaacttggtttgcataagtctatttttaaatcagattaatttcaatttcaaaaaattgccgatgattgatgaaggcaaagaagtaacacaggatctgtctatgaaagcaacccttgattcaatgttccaagttgcattcggagttgaattggatagcatgtgtggatcaagtgaagaaggcaagaaattcagcatagctttcgatgatgcaagtgcgatgaccctctttcgctatgttgacatcttgtggaagatcaagaagttcttaaacattggatcagaagcttccatgaagaaaaaaaccaaaatcattaatgattttgtgttcaagataatccacacaaaaatcgagctaatggagagctccaaggacaagtctcttgtaagtggaacaaactaatgagtttcttttttcaagtcttttaaccatgtcttgaaatcataattagtgacattgtttactggcacacagatgaagagagaagatattctatcaaggtttcttaaaggaactgagaatgatcctatttacttgagggatgtaattcttagcgttatcatagctgggaaagacacaacagcaaccacattttcttggttcatatacttgctttgcaaacatccttctgttcaggataaggttgtgaatgaactgagggaactggcaaatgctaaaaagatcgcaaactttgctgattttgctgagactttgagtgaagaagtagtggaaagaatgcaatatctccatgcggcaatcactgaaactcttagaatctaccctgcagttccagtggtaaagtgacaaaaaaataaacaaatattactataatcaaataataaatgttagagaaattgtggagacactgcataggcgcaccattcttgtttttgagcattcctcaaatttttaaaatttcaaataatttatgctttaaatagtattcaacagcattgaacatatttttagcataatacttatttagaatcttatgcaaaaataatgaaatattcatagttttgtgggtgaaccatagaaactctctatatcttatatttatttcataccaaatctcaactatatattcaacaggatggaaaaatttgctcatctgatgatactttgccagacggctactcagtgaggaaaggagatttggttgtgtaccaaccttatgcaatgggaaggatgaagtgtttgtggggtgatgatgcagatcagttcagaccagagagatggctggatgagaatggagtttttcaaccacaaagccctttcaagttcacagcttttcaggttttgcattatgtttctcttaggaactttttcaagtcagaaacttgagagttgagattgcaactttactttagtgacataaaaagtgaaagaatctatttcatccacaggcaggaccgcgcatttgtctgggaaaggagtttgcttataggcaattgaagatttttgcaaccgttctgttaaactactttgaattcaaattaagtgacgagaagagaattgcccattacaggacaatgatcactcttcatattgatggaggtcttcaagttcgcgtcctccacaggaatataaattagcttaggcatccttttcatttgaccaaaattgaagataaccttaactcaacttgtgtacgctaaattgaaatttggatttagcataaccaattaatcttggttcataacaccaagttgagatatcacttggcacttttttttcttcttcttttaattcattacatgttacatagaatgggtacatgttaacatcccactaggaataatcacgagagaagagttcatgatgatggggccagcaacacttcgataatcaaccaccacctgcaatatatagatagaatagaccaacaagtaagcacacttgatatgcaagtgagtatatataatctgatgtataattctaactaatttttcgcagctacaagtatttgtgttggtgaccggtgaaactaatcttttaaccacacttaaagttctttatttagcccgctgtttatttagtattttgtcaaaccatctccaatacaatatttaaaaaatgataattacaaaatgtacaattttttataaatttttaagttttaatttttttttttttatattttcatagtgttctaaaaaaataatactaaaataacgaaaaaattacataaataacatacaaataacagaaaatcaacaacaaattaacaagagtataatataaaaatacatccaaagattgtcagagtttacttgcatttggagaagtgctat

SEQ ID NO: 303435 - DNA, 2929 bp, Cannabis indica
gaactattttttgtcttaaatttttaactacttcataaacataaccagtttatttgtttctattctaacatccaaaaaaaaaagaataaaaaactccgacatctaattctagtgacaatgaaaattctgatgccttttttgacagtgataaaaactccaatgacttttataataatttttctgacgactgtaaaaaactgtggtgacttttttagcgaggatagttactttggtgactattctagtgataatggttgctccaacgatttttctgacaataataactgctacaacaattttttggcgatattttttcttaaaaatcttgttaaatttatttataatattttgttgggatattttatttatttatttattttttgaataaaaaaaatgtatgtaattataaattattttttattgcatataaataaaaaaaaatacacagcatgaattactctaacataagttagaataaactattgaaagtttcaaaaataaaaataataataaaaaaataaaataaaatagtgcggacatgatctgatacatcttattgaaaagattctatttacattttattttttctatattttgattggtttattttacttccctatggtatgaggacaaaagtataggtcataccttaaatcttcccattatatatattgtgggataaaaatttgaatttaggacttccattttgtgagaagaaagttaccaggctatgtttatgaacaccattattaagtaatttaatttcaccaaacaacaaattaattcattccaaaaccatttcatgatgaccaacatgtacgacaacatttattttctcatttacacgcaacccaccctctacgtgatctaaccaaaccaactaccttacctaaaatgcatatacatatgtttatgcttttcaaaatgtatatatttttgttaatgtttaatataacttagccatgttcattacttcattttttaagtcatacggactttccttaatcttggaaaaaaaaaaaacaaaatataaataataatgcaaagtaacgagtatttttactgtaaagtaatatttattaaaatttcattatttattggtgaacaaataaattttttattttttggttgttcaaactgataaagtgttagtcaaaatagttaattttctgaaaactcctcataaccgatatgaaagatcgttctataataaatcccacgatcatgattgattagatgtcttagtatatatctatatatatatacatatagataaacccatataatataagccatagataattggaacccaaccaattataagtgacaacataatattccccctgttataaatatacatataaattaatttttttgtagtgaaagatcgataaataattattatattatggagtttgaagaaggtatgagatcgagaaagcagcaagcagtaggtctaaaacaaattgagacaaaagttaaaaacagaggagatgatatgaaaatttcattagaggagccagtaagtccagcaggtcgtctttttaacgaaccaaattttaatgttcatatcttagccatcatgggtagcaagatcaaaattaatttggatttagccaaacaaaatttggttcatactctgctcaagcacccccgtttctctagtctccaggtactatatatattaattaatttacgatcatgattattattattatatataataaaaatataatgattaattaaaatttactacaggttgtggatgaagagagtggtagtggaaaaatgaagtgggtaagaacagaagttgatctagacaagcacataatagtaccgatcatcgacccaaacatggaggagtttataagtccagacaagttccttgaaaattacatttatagcctcacgaaaaacaatctcctcctggacaggtcaaaaccactgtgggatgtccacgtgttaaacctgaagacaagcaacgcagaaggagttgtcattttcagaatccaccactcactgggggacggcatatcactaatgtcccttctcttggcttgtacacgccaaatcgaaaagccagaggccgtaccaacacttcccaccaagaaaataataaacacttacgatcataacaatcgttttatctcaaagttatcgatctactactgctttcttgggctttggtggatcttgaagctgttttggaacacttttgttgatttcgtattgtttgtggccactgctctgttcttgaaagacactcacacaccacttagagggcttccggggtgtgagcataatcctcgccgaatcatttttcgggtcgttagtttcgatgatattaagctggtcaagaatgcaatggcttcggtacgtgatatattgttatatatataatattaaattattaatattaatagcttatttcttggcttagtataattaattagtgagctgattttgtgcagactgtaaatgatgttgccgtgggaattacacaggctggtttatcacgatacctcaatagaagatatggtacgtaaaaaaaaccaggattttactctcttctctgtttaattagttaagactacactgtaaaaagaactaaatattgctatacgtacgcaccatatgaacagaaggctaaaaatacatacatagagcatggatatatcatagagaaaatgctaaagatgccaataactttttgtgaggtataataagggcaatttaatatcgaatattatttattttattttaataaatattataaaaattagtaattaataataatacacacttcatatcgtgatgttactcataactctatcatattttggtatatttcttgtgttattttattttaagtagaattactccttatattaattttttcctaatttttttttaaatttatggtttgagt

SEQ ID NO: 303436 - DNA, 3167 bp, Cannabis indica
tttttttgctaagcaaatcctgtataattcatctgtttaatattctgttaactgcagtggtggtgatagaaaaagttgatgtaatattattgttgctgggaattaccgcatttcttagtttttagctcttatttctggctgagattgttttggtgtgattaatgtaaactggggactcctatggttgagtttacaatatacaataaaattatttttttcttataaattaataaaataatataaaatttgattcattaattaactattatatttggttgtgcattgtaatggcatctgttaggtaaataatgtcgatttacattctaacatggtagaatcctttaatttttttcgcaggcaaatattattggactgtaagttcttagaatctcaacagattattgattatagccttctggtgggattacattttagagctcctgaaaggttcaagtccttgcaacctcctgatccagcaaacactcaggagaatttaccctcccataatggtaggctccaatgcagacaattttctttcctaattatatcttttaattgttaaagaatttggtgattttggtgtagaagcgtttttgtttcaccatagctcaaatgaatggcattttttttataagaaaatatattttacaagtaaaatacatggcactgttaaaccaagatgtatggtctacatagaaccagacatgaaggtactggtcttgcttctaagaaacaccaagctaacacctttgtttaacttccttattgtcaactcatacttcaaagcctgtaatgctaccttttggtagttcatgtttaggtattagttatttggaattcgattgcacaaataacgtgggagtcagccacacgatttaatgttgaggagcatgagtgcatgttgtctaacatagaacattttaactattgttttgtttggtgacgaacaggaaattattgctgtattctaatttttttcttgattaatcaaatttgagtagtaggtgaacatttacaaggtgagttccagattcctccgaatgggctacgattagtaacccatgaacccagctctgttagtactgcaccaggtcctcacatcagagggaagacactaaaagcatactctataggtgacatggaagttgatgttttacttcctggaactgcaaggtataccaactcatctcaattttcatctattacctaatatttatttcttgctatttcttagtattttggagctgtgtaagagttggttcatatctcatctgttctcacatttagctctcatgtgatgcatagtgccccgctcttattaattaaggagattaagattttctttttcccataacatccacttgccgtacaataatttggcaatgttctggtgatgccgattcctctcctatatgttgtacgaattttgcattggcatcccaggtgaaggaacaatatcaaaatagttgattgctagacctccaatttggttttgcagaaaacacaacaatttggagaaatctatagaaatgtctctttacacttttctccatattagtcatcactttcaatattgagcataaagtttcccacaatctaattaagttgggaaagtttgtaatttttgcttcagcaaagaacaatataccatctataaactgtagttgcaagacttcaacgttcgaccttatccctaccattcactagcatttgaaagagaactttcaactttgctttatccacaaatcttcccaatccgtttgccacaaagataaaaaggaaatgtgatagagggtcatctattaccttaaatttccccttagtttaccattaaatcctgatcaaatatgttaccaaggattagcaccatgtcattcacaattgccattttagctttgtatcctctttgctccatctttatcatatgcttttttcgaaatcaatcattaacaggacacctttactaccattgaccctatattccttttccaaacttcaaagcaacaataaacacatctacctacatcctaagtgatagccataggatacatattcaagatactgccactttagtcaccgtgatcagcgagtcggtaagcaaaatgtagaatactattgctgaaaaagaaagaatattcggaggagataacccaggttcatcgatgtctttgcatctgaataattagaaaaatgactttggtcttttatctcgacttgttttccttattgcctggttggggcttcttattctagtagaaaaaaaaaaagtgttagtacattcttactacacattacaccttatgttaaagtagatgtatactcttaactacctctgaagacactatgggttataaaaattcttttatttgtttgtatattttttcttttctgtagctttgaagtgatctcacgtaaatccgtggtttcactttatttgatgtttaattaaagagaaattgttttgagctgtacaaaattctgcatagctttaacactaggatgcactttcaaggagatttatatcatagaattagctgggatgagcggtaaagtccaaaattatcaaagagtcatgattctttactccatttttttgtgctttgattaattagattgacgtttagggtgtatggggggagtgagagtgggtcagagcacatgaaatatgacctctgtgccacaatagtatctactagacgaaattcgagagcagattgtaacaagtttactgactaatttgcattgtactcaggctacgagtgcaactgggagtaaacatgcccgcacaagcacaacacaagcttcctgccaatgcacaacaagactctgctgaagttgaactcttcgaggtttatgatgttgttctttacatgggcataattgacatattgcaggagtacaatgtaaaaaagaaacttgagcacgcatacaagtcgatgaaattcgatcctttgtcaatttctgtttgtgagccacacatgtatgctaagcggttctctgaattcttggagaaagtttttccagttgttccttgaagctttctgtttactgcagttttcattcctattctttatttgaactataccgaaagcttcatatcggcaggcaattatacttctaagcaattctttcattaccatttattgtatagctgtacaatcatgtaa

SEQ ID NO: 303437 - DNA, 1729 bp, Cannabis indica
aaaaaagaaaaagaaaatgtgtttagatatttaaattattaaatttgactgatgtgtagggattacattatttttttcaattgaacgatagtttgtttttctgagaagaatagtatgatatatagttaattatacttatgtataaaaaattacgtttaaatctattaattatatattactaaaaggaaccacgatgttacataaatctattaattattatttactaaaaaaactgctggtatacctttatcttatccaattctgtactcctttgtacgtttgaaagaggttctattttaaaaaaataaataaataacttccattgaagagaagagagttgccttttcattattgtttctttaagtatttccaatggtaaattttagaagacgtttggtgaggtagatatattatgtagtaaaatattaaaatgttatatcattagagataaaaagatgtcattctaaaaacttgcaaggatgttatgttgtaatattaatgctattcattatttttaataaaaaattaaagttaaaaaattattatagttaaaaataattagaatatatattaaataataatgtgtgattataattatagtatttttaaaaagtattatatatttgagtatttgtagaaataagagtgtaaaaaataatgtggaaaatagataaaaaaaaatattatatttttaaataatctgtaaatttttaggatttttatgtgcaaattttcacttgattgattgagcgtgattcatgccttcaatttttgtcaacgaagattgaggccatagagaaataattattatttagtagagtttttcttggaatgtacgtaaatgaaaaacttctttatccctacaaaaacgctcacatagtaaataaacataaagaaaagaatatattgctaaactgtccactatatattaccattattattatttgagatttggtagagaaaagaaaaataattataggttgttgggagcagctgagctgagctgagtagtaaccaaaccaacaatatatcatgatctggtattccacttaataattttgattcatataggtaacgtctacccaaagtgttctgttcttaagaaccttcattttttttttataaattcaacaacataaagtgtacgttaattcgaaatatgtaatgtgtacgtactgttgtagtacatcaaatttagaaattcatgtactaccatagtacatcaaatttaaggacggacacaaacatacaagaaaatactatgtctgataacgtgtatgcaattctctctctttctttatctttttttttgggaaattttatttacaccccaaaaattcttaagtacaccccattttaataatttttattttatataaaatttatatttttaattgtactaagtatttttaacttttttctttcaatttatattcttaaaaaatatacctatcaaacaaaattaaattatattttaaaaattatgacaaaaaaattaaaataaaaaattatatgaaattttctcagaaaaaaataaataaatatttacatgagttagaaaaaattatgaaaatgaaatcaaaataagtattaaaattaacataaaataatgtaaggaaaaaattttaaaaaaatattaagaataatttttaaaaattatttaagtttatattttttttaataatggggtgtatttataattttatggggtgcaaatataactcccctt

SEQ ID NO: 303438 - DNA, 3787 bp, Cannabis indica
ttttttaaaaaaaaacataataacctgatagaagataaaaaataaatttatctcaaaatttgataactatatatatatatgatgcgaagagatcatagtattacttacacacttacactatatttagagagtttcttgataatactttgtaggtaataattaattttgattatgaaatatatactatatatatatatatagttaaaaataaaagaaaattatatatattaagatcgaatatgatgcagatagtattattctcgccctcactccattcccacttcgaatattaaaattgtccctcactattgctccattaatcgccaagttgagaaatctccaccccattagggtcaggtcactgcggttacccattctcgtagtatacattttcatctttacttgttgatgtaattagccagacttaacttgttttgtatttgctttgttaggaataaatgtttcataaaaaaactattgtttatatgaaaattataggtttaagtaataaattttattaaaattataattaattaagtaaaaaaaaaattaaatataaaattaattaaatttttttaaaaaattgccacgaaatacttaaattgcactaaaagttgccattaacttgtagtcaaccttatttttgatgaaaaaagtacctaaaatcaacttttatttataccgtatgtatttgtggttaacattgtcattaaatgccgtcaaatttttagttgtgctaatattcatttcttaaacatcacatggtacttaggtacttaactacaactttcattataacttaatatcgcaaatatccatttataaattactcggccacatgagtgtttaacaataaaatttaacaataaactttgtacttaagtgcaagtttcaatcaatacatcaaacttcatttcttaaatttaaatattattttgttatataagtattaaactgcaaataatatatatattttaggctaattaagatttttactctccgaactttaacaataccgaatcaatcatgttgctcgaactttttagaccgttaaaaatttcactcaaactattcagattattagattcaaaaatttgtctaattttaagaatggaagcctgacatgaatgcaaatttagggatacgtttagtacatgttaaaatttgaggacataatttggtagatatcaaagttcttacgatttagtacaagcataatcattgcattagtaaactaaacggaattggataaaaatcattgaatccaacaatctcaagagttcgaaagaaatttttaacggtatgaaaaattcaaagacatgatttactatattttaaaattaagaaggcacaaattctaattagcgattattattttttgtgtgtataactgtagtcactccatatattttaaattactaacgcttttattatacggtaccaagtttacatagattgaatagggtgtgcataaattgatctaatctaatgataattgatcgtcaaacattgaatgtctaaatataatcagatcagattagatattatttttgaatattcaattggatcggatcggatgttggaaggagtatccaaaaatccaatacgtctaacatccaatcgaactaattagtatttcatttagtttgaatgtgtaagtatattttatattgttatacgtaaaatatatatatatatatatatgaaaattaatattaaaatttaacttttttttttttttgaattggatggatccaatctaagaaaatacatattggacttaaaatattgaataaatccgatccgataaaaaaaaatactaaatttaaaagattagataaacccaagctaaactaataaatatatatgaaatatatctaacggatagaattgatcaaatccaacatctaatgaatgttggatcgattagaagaattaaaattaatttaattaaatcgaatgataaaatttaacatctaatctataattagatcggatttgaatataaaactaaaaacattatgtccaatatgaacacccttggatgtaaaagttctatctccattttttcatccgcatgggtatttattattgtagataatgtagacattcaacacattttaggaaaatttggaatattttgtgttgccaaacacaatataatgcgcgtgatagaaatggaagatgtacgacttcaactatattaaatatcacgtaagaaagttagagttataactccacatatatgtaaattggagtgtgcagttggataccatataaaaaacatatcatttcctatatataatttgatacatataatataatataaaataattttcttgtgcgcccctgagaagggggatacactagtgatcctcctattgttttgagcactttataaattataacgatggatattatagttacacagtaaatgtactgcaatttttttagatagtcaatacccaaacaatagaattcatgttcacattggaagacttagaaagtattagagcatgtttcgcatcataattaaaaattaatttttgattttaaaaacagaaaattattttctaataataattaaacacgtttaactataattttttttagttgagaacagtttcaaaaaataagaattttagtaacaacaaaatattgttttctcccattcatgcttactagagtcagttaatgatattgccaaaaaaagtgattaagaacatagaatctatctgcaaggtattcttatagaagggacaatcaatgtttcaagagtcgggatccatcgcctaggatacaatttgtcaatcaaaagctgattgaggcattggatttaaaaatgtggcagaatggaacaaggttgctatgtgcaagtatgtgtgggtagtagccaataaggaagaaagcctatagatgtgatggattcaatgtgtacattaagaaggaggagtggtggagctacaaagctccaagtcaggggagctggtattggaagagtcttgtctcccttaaagatcagttcaaatccttattgaatgtccaacatcttttatagagcaaatacacagtttctaatggctataaaatgttttgtccctcacaacacaaagctcattagagccatgaagtttggaggagattcaatactcctaaacgcatcttcattctctagatggctgttcaactcatattaaaaactaaggatcgactcctcaaatttgacatttctgttaaagagacatgtctgatgtgtaaccagcagaaagaaacaactttacacttgttctttgaatgtcagtcaaaagtgcttgcaggaggttaagaaatggttacaatggagagcagtttctaattctcttcctagtctaattcgatggattggaagaacaaagactagtaaattttaaaaacttgtattggcagtttccctggctagcttggtttacaacatttggaaagctcaaaatggtaagatatgaagggatgagttagatgaccctaccaagcttatatgtgtcgttaaagggaacttgaagcagaggctcgattttgtatgacctaaaaaggtccatgacaaagacaaagagtggtttcattcattgtaaatttaaaaaggaaaagatttgtatagatgatatattttaggtcctcctgtaagggtgctaatagtttgtaagttggtttttttggagcaatataatattacctaattcatcaaaaaaagtattttttcttttaaaatacaattgactttttgtcaatattttttctccactttatctca

SEQ ID NO: 303439 - DNA, 3374 bp, Cannabis indica
aaagtgatgaactttcttctttgataactaaagaggaacaaaaccatttctgttacagtgatctaagctcagatgaatcattaatggcagttaggaaagaagcagttcattggttttttactgtgaaagcacattatgggttctctgctttgactgttgttcttgctgttaattactttgataggttcacttcaggctttaagtttcagaaagataagccatggatgagtcaactcactgctgtggcttgtctctctttggctgctaaagtggaagagactgatgtccctcttcttttagacctgcaagtatgtatataaatgcattgacttttttctctttggctatctatctgtttgatgaaatgcctcatttgataatgcttgtcttattttattgtgatttaggtggaagagtcaaggtttttatttgaagctaagactattcaaagaatggagcttttggtgttatcaactcttaagtggaagatgcatccagtgaccccaatttcattcttcagtcacattgttaggaggcttggtttaaagacccatttgcattgggagtttttatggaggtgtgagcgtcttcttctctctgtcattcctggtaagtaaaccaaagatctaatcttttacctaatgccaaaatggttctatcctttactaatgttaaagttggtttcttttttactttgatattagattcaaggtttgtgggctatcttccttcagtattagctactgcaacaatgctgcacgtaatcaatgagattgaaccatttaatacagtggagtaccataaccagcttttgaatgtactaaaaatcaatgaggtacacaatctaatcacatgacttttatttgttatgtttgaactattactattcatgcttttgcttcttgtttcttaaacttaaatattgtgaatttgtaatgatacaggagagagtgaaccagtgctatgaactcatggtagaaacatcagtcagccttggattcaataaaaacaaagctacaaacgcaagcatggatcggtaccaggaagcccagttggagttattgatgcgtcgtttagctctgataactcgaatgaatcatgggctattggtgcattggttccccctcgatcacctgagcctcggtttaaaaggagcagaactcaagatcagcagatgagattgcctccattgaatcgtttttctgtggatgttcttagcactagcagccctcgttaagaaaaaagtcttttgtcccctattgtcttctatcaaatgtggtactatatactatctctcttttgcaaattttaaattgcactacttgtttctaatgtgcaaaagaaaaaaaacatattgtgctctgctctgctccatattctttcgattgtcgttgtgactatcctttatgaaagtatgaagcacaattgaattgaaaaatctcctactttttcatgattcaagtagggagataggatccagattctagaataattgcaagtgatctgatctgaggtttatgttacgaattcgtactagtgtttatgatttgaacactcttgcaatcaatgaaactgttgttaagtacagctactataattaaaccaaacaaagataagataaaatcatataactggttatagctcatagttttacttgttgatttagatttatgatcaattagtcttaatacaatccttgaattcatatcatgatatgttatatttcctattatgtatggacatagaaaatcatgcatttgagagtacttgaaatggcatattatcttcttgagtacttgaaaagtcttcaaaatttcaagttcaatgtaaaaaaagaagaattcaaattgtacttgaaagaaatcacaaaatttcagtgtttacaaaaaaagtcaacatcttcactttcatgtttgcatattttgattatttaccttaataccctttatagttttcttttttaacctttcatttcttcacaatgaaactagaaaagaaaccattttctagttgtttcttgcttattgaataaaacaagaatgttcaaagtttgaactgttcaaagtttgagtcttttttaactgtgtagatgaatagagaagagagcaatgtgaataagtagagacaaccttacttaccttcctttttttctctgtggtcctctgtgtatgaatagcttttgagtttttgttatgtcatatagtttggcaatatctcttttcttctttttatcatgatttgttttcatttcatttcaccccacgcgtgaatatataatttcaattcaaatataaaaacaccccaacactctaaaaatcaacccaattcaattcagcttcatatttcatattttttgaggagttttcttcttcctcatcctcacttctttttccaacttaataattacatatcttcttttgatatgagatgagaaaaaagccttgaaaaatagtgtcctaatatagccaaaggcatttcactatttaatggttccaaacctcatttcccaatgaaaaaacagtgctaaatctttagtgttagttactaacatttaattgttgtttcatcattgtaaatagttatataaatacaatgaacattgatatggttcaccaatagtccttaacatcttttatatagttgaagtcttacgattagttagcgatatttctttaaaattatttttttaagttatatgagatccgatacttaattatactggtaacaaatataacacagagaagagtgctaagtactagtggtgccttttaacaattctcaaatataatagcagtgctaattattactttttggttaatttttacgctcaaacattcttgtaaatttttgaaatatttcgaataaatttttttatattttagcgtgttcaaaaaactttaaatctattttgttaatgtaaactatttgaattttttaaaaaatttacacagataatattgtatctataaaagtgaccgtcatgccaaaaaaaattaaaaggaatattccaaaatatgtttttgaacacaaaaattaactcaaaaattataatagaagattcacactaatggaatacactacttagtcaataatacctgctgcccaaaagaaaagaaaatataaatttgagaaaaatgtttgtctttgtctctcttatatatttatagaattaattttgatggtaaaaaaaattaaattaaaattcccaattctcaattcccaatttcgagagtaagaaaaccaacaaaacaggaatgtacagcaggaagttagacaagaaatgaagcaaaaatagtacacatgtgagggaacagagttaggagagtggttgagaacagctaataatatcttctatacatacatacatacataca

SEQ ID NO: 303440 - DNA, 2033 bp, Cannabis indica
ccaaatcatgaaattgaaaagtccaccactattggaccacattttccacccctaaaaattccactaaagaattttccacttttaccctttcaaaaaaaccataaaaaaatatatatttatatatcaccggaaaagtgaccggccggaacttaaaagcttgctcttttcaaagaagtgatagtaatggcagctcccaatggcgaaacacccacatcacaatcaaacgaatcataacgaagaaataactcaacaacaaaaagcctagcaaacatcaccacaaaatctttcccggcacactgtttattccccaccgtcggcgactcagtttccggtccattagaccaaacaacatacttcaataacttctctccttcttctccgacgaaccggtcagcaacaaactcatcagctctatcaaatatcttcggatctttagtagcaaaaggttgaaacccaaataacatttcaccttctttaacctcaaaaaccccatcatggctttcgatcaaaagatctttttttgctttaccgtattgtaaaggcacaggtggttcgaacctaaaagcttcataaacaactgatttcattaaaggcatttgttccattccagccatggttacttttccaccgttggatctgaccacatttctgatctcttcagctaattgggtatggagtttgattccacaccgtccgattgatttcaacatatttgggaaaaggattttcattcctccaaatgtgttgaaacaagttgcgaagattaaattgtgacaagcttcatctcttgagattcccatttgttcagcttcatcaagaacgtaatttccagcttcatagaagtaatcgaagagtcttttgtaatcggatttgactaaaaaagagggtaatcgaaaagtatggattgctaattcttcaaccaattttggaagacccaaaactagaattgggtgaagatttaacaagacccatttttgaatcaatttaggaccgtctgatccgagtttggtgtcgtttggattaaccccataaagagctctacccaagaaattaaacgccgcttgatcattagcttctccgaaactgactttcccttttgcggcgagatcggtttctagggtttcgaagagttcagtgtaagttttgtggaattcaggaatcaccatgtctcgtcgagctttaagcatgaagaaaattagggttttgagtttggcgtgtttgggttccgatgggtctaaatacgataagatacggtggccgccggtgagttcagtggagggcatgtaagttccggtgaaaagatcctttttttcgactttgctgacgtcaaacagtaccggaaaactcttcccgtctaataaaacgatgacacgtggatttgaagcgatgaacggacccggtggcatgttggttctgaaaaccgtcgattggtatttctgaactcgtgatttgaaaaactcgtttcttccttgattgtaaaaatagtctaatcgatctaaaattggaccgatcagagggaatccgtagtttcccgggatttttttagtggggaggtttttggattctgttaccggtgccggagttgagattgaagaaggtggttcagaaactgaagcggtgatcggaaaattaactaaacggcggtgaagattgggggttttgattgggtttttgggtaatccgaattggggttgtaaagaagggaaagtaagagatgtagaagccattgatgagatttttaaggttggtcggaagagaaagattggatctttgatctgaaactgagatgggtttttgatggtttgaatctgaaaaagatgtatttataaagaacagagttgaacagagtggtctttatgttttcttggacgagtttgagcaccggccaaataagccaatggaaataatcaaatttaataatctcaattatgaaaatgaaatgccatggacggtgaaattcttttaaaattcaccactttttttggaaagggattaaagattttggtattttaaagactagcttgtaagtggta

SEQ ID NO: 303441 - DNA, 2106 bp, Cannabis indica
tttggtttgatcatttaattggtttggtttggttttgaatttttaaaaaactataatactggtttggtttgaaaaaaattaaaatctggaccaaactaatctgtgaacactacaccaggttgattttcaacctgagtgttgggcctaataccaagtcaacatgggtgttgggcttagttttctaccgatcaggattctcatttttctccttgattttacttgtatcttcaccatttttgatgatggaaaaaatgccagaacactttttttgaaaacttgattggaaacagcccaagttgacaaaatgtcaaccttggcactaagtccagtttcaggccactaaatggtttcgtttgatttccaaaaatacttgtatcttaaaatttgacaaaaactaagaaattcctggaagacttcttggaaaaaatatttggaatcggctcaggctgtcaaaatgtctacctgggcgctgggctccctttttggcctctaataagttggtctatttcttcccgaaaagcacttgttttctcatttttaatgaagacaaagaaaattctcaggatatttcttcagtttgatgcttggaagtgccccaagctgacaaaatatcaacctaggcactaggtgcctgggcacttggtgctctggatgctaaaaaatgaaagtgctcaaaatctaattttgatgccttaaatatgtttgtgacgtgtctaattcctgtcctagtataaattttgacccattttcactaagacagaccccaaaattgaaaccctagttgggttgtcaacgtaggcgctgggtgaaaccctaggtgtttgagttgattcctaaaggtttgtttcgtgtattttcacttatcgggccttggacttggaggtttcatgtctttatagtacataatactgaaagataatgagttggaaacaacttggtgggatccaaacacccattctagagttctcgaagtcaacttgagcacaaggctagggacccttcctaggtcagctactatgactccagactactcaactccgggatgttttctttctcgccatgtgtaaaacattgatgtccacgtcactaggataagttttcgggttaacgaactaaatgttacaaattcaacaacaatagaaaaaaaacttaaaatataattaaattatatatttttatttttaaatatattatattatatatttattatttttattttttattttttaaatatattttattatatatatatataattttttaatatataaatttaattggaatatatcaacttttaattagattttgagatatcaagagagacagacagaaaggggtgctgcatttatatcagaaaggttacttgtagaaagttcttgagacttttggaatgacatattacaaagttgttataataccccttgcaaaatattttagattgaatgtagctcacatgccaaagaatgaaaatgaagttgttgaaatgtcaaatgttccatatgctagtgtaagaaggtcgttgatgtatgcaatggtatgtaccagaccagatattgtatatgcactacgcgttgtaagtagatttatggtaaatccaagaagggatcattgagaagctatgaaattgatgttgaggtatctcaaggggaccactgaaaaagattagtgtttagaaaatacaagaagtagactgatcaaggcattatagtggtaacgtggattctgactatgctagttgcaaagataataaaaattccttagactactattagttagaaagaaaacttgtaaaaagtggttgctttgtctgcaagagagtttgagtatatggctctcattgaagttataaaggaagctttttagatgattggttttattgaagaaattaggattgaacagaagcttttcattgtgttttgtgacaaccaaggtgttaatgaattgagaaaaaaccaggtgcaccatgaaaggaaaaagtataacgtccccgtttcaagcctccattgggcccttacacccacagaatgaatgactcttatacacgagtacgtcactctggatgcttcatggactgacgactgaccctacaaaccaacacgagtgttt

SEQ ID NO: 303442 - DNA, 7174 bp, Cannabis indica
aaagagaaaaaaaaaaaaaaaagttaaaagaattataacaatatattccatgaaaaaaataatgtaataatacaaaaagataaatcaagttctcaaaagtaaaaagaaaattcgtaatacaaaacatattgagttgatattattttgcttcttgcaattaggtcaataatttgtagttatatttttgttattttatagttattgtcgtattgtttgttaagttattcttaattattagttattttttttaattttattaaaagacaatatttttataattttaaaactttaaatacaatttttttataaaattattacagtaaaaatattaaaaaaaaaattagtctcacagtatttttgtaaatttttcttcattttacaatatttttttttttggtaaatttctcaataaattttgctgaacttaaactactagtggtatatgtaaaggcaggtggagaaacataaagtcattatataaaataaatagggtttgaattattttttacatttaattaatatcatttggttgtatcttactacgagccaaaatgaaaatacaaattaatattcaaccttcccccattcaggataacaaattgatttacagcaaaaataaattaaaggaacgaaacaaattgtatggattaggtacatcaaataaaacacatccacaaagtaaaagtatatcttataaataaataatattatgtgatgcgagggatcttccgttgccaatttcaatttggtcattcaagtagctagggttagcaacaactccttttccattggctaaatcgacatttccaaaatgaacaacactacattaaaagccaaaaatgaatcttaattgagaaatttaatatataattaaatatgttggagattttaatagttatattaaatttgtaattataatagttatatttatttttagtcattaaatttgtgtaggccccgctagttttattaaaatttcattgtaattaactaaaaatcactatttaattaccacatatgattttttttttttaaagaacttcttgttcattaattagaaaaagtgatgggaactacagggggcattccctccccttgatacaaaatatcaagaaaactagtcaatctagcattctttgctacaccatccgcaacaacgtttaaactacggttaataaaaataaacttactaactaccaacctcctagataattaacaaaaaaaaaaaaaacaaacttagcacacttccagtcagggcacccctcatttgcaactaaagagttcacaacaatctttaaatccgagagaatgaagactttcatcttcttttctgcaattgcccactgcatatgaagcaaaagttttctttgccttcacaagccaattcccctctgtgatgttgataataattgctgcaagaccagcctctcccttgtcccatgaagcatcggtgaagataacatattcaactttctcatgacagatacaaggggaagcagcaagatgatttatcgactcagggttaagggtggagaccagagtttccttaactgaatccacttccaaaactttaaaatcaattaaggcctttccaacattcaaaagggctagagtaggattacctgtgaccgatcgaatgcaggacacattcctctggttccatatctcattgcataagcatccgaagcagttaacgaattcaatcctactggattcagggatgattgagataatgttttctagaaaactcaccattgaatcctctggaatgttgtcgatccgaagagggtacagacttcccatccacatagccttggtgaagctgcaatttcgaaataggtgaagagtcgattctccatcctttccacataagctacattctttgtttgggacaaaaggcagcttgttcttggttgggattgcttcatttaagattcgccaaaggaaaatcgatatccttggatgtatcctcccatcccaaatccatttccaaattctttgaacaggttcaaacctccaattttgatccataacataagcagacttaacagagaatttaccattacgatttttcttccaaaacatttggtcagggaaagggcttggaattctcggtatattaagaatccgttcacccaagtcttgaccgaatatctggataatcatttcctcattccacatgtttccaatagacacatctgctatagttttaattgtgaaccttctttctccaagctgctgcatcagatcatgaaactctctatactccatccaaggtatccatggttgcttccagaagtttattgaatcccccgaagcagcagttaccatagacccttggagaagcacttctcttgagcctaagacactattccataaaggggagtcattgtttttctggttcacacaccagaaaactctcatgcttgcaatactttttcaataaacatgttacccacggtctctccatcttgcttccaagacaccaagctaactttgtcatgagcgccctgttcatatcctcacaccttctcaaccccagccccccattgatttcggggtacatatcttatcccaagctctaaacgccatatatctatctttttctatacttcctttccaccaatacttcctcattagtgcatctagacctcggtaagtagatataggaaccttctgagtggacatagcatagatcggaatcaaagccgcaactgacttgatgagagttagcctcccagcataggatagtgatttcatcttcctgccctccagctttgacctcatgctttctttaagtctattataatcttccacttttcttcttttgaaaatgaatggatttcccaaatgtttctcttctccacttacttgattaatatttataatgttgaggatattgctttttaagccaacactggtattttttgaaaaaagtatcccagactttggtttgctacatgtctgacccgaccaagtctcataagcggttagatacttgagcaagttccttgcatttgcttcatttgctcgagcaaaaagtattgtgtcgtctgcaaacattagatgagaaatcgaggggcaagactgagcaatcttaattccatggatgaatcccttctcttccgcctgagtaataactttggataacacatcttgacataggagaaacaggaacggcgaaagcggacccccttgtctcaaacctcgttgagcatacaacttctttagaggacaaccgttcaagagaactgagtaagagacgctagtcacgcaagccataaggagccgaatactcttgccattaaacccattcttgcgaagcactttttctataaaactccattccatcttgtcataagctttgtgcatatccagctttattgccataagacctcccctggcccttttagttttgattttatgtataagttcttgggtaaggatagaggactcggcaatccatctaccaggaatgaaagccgattggaacggggataccaactcctccataaaaggcctcagcctatttgaaagaatctttgcaattaccttataagaaaagttacataagctaattgggcgatattgatcaacacccaatgcaaattcaacttttggaataaggcacacaaaggtattattaattctggggtcaataacccctgtttcaaaggcttcttgaaccgaggagcaaagacataggccgacaatgtcccaaaatttcctgaaaaaacatcccgaaaatccatccggtcaaagggctttgagagggtggagactaaatactgcatttttaatctcctcgacactaggaattctcgccatctcctcattatctaaaggggatatgctcttcacctctagattttccaagttatcatcgaatatcggtttcatagaagtatacagttccgtaaaatgagaattaataaccctaccaatattcttcttgtccttccaaactcttccctctttatctttaatagcccaaattctattccttcttcttctgttgtttgtcgcagtgtggaaaaattttgtattccgatctcccaaagctagccaagtttctcttgacctttgtctccacatgctttcttgtttagaccacgagattatcaattgctcttgaatgagagcttcttcttttttcagatcagccgtgatgggctgttgctggatccattctaaccttttttccattgctttaatgtctgtctctgttactccttgaagctttttcttccacccttggagcgctttcctcgtattactgacattccgaactagagccgttgtagcttcattgcttgggcaggaccaagcccttacaatttcttctctacacgagctttcccaagaccaagcttcataaaattgaaaggggataaaccctttggtagcaaacaaatgagtatccaagatgatagaggcatggtccgaaatagagataggcaagtttagaactcccgagtaatcataattattcatccaatctccagaacaaagaactctatccaacctttccctaattaaaccaccagaaaatctcttattttgccatgtgaatttcttaccgatgaaacgaagatccacgcatctcgtattgtcttgaaagttcctcaaccaacataagtcagccattgtaacttttgcccccccaattttttcttccttactcccaatacaattcaaatcatccaaaataacccacggcaaatgaaagtggttagcctcagtctccagataactccagaaattctctttgtctcgagcatatggagttccataaaccgccaccaacttccaaaggaactgggtattcatatcgcatactgtttcttcgaagtatccatcaaccgcataattcacatgaagattaatatttttattccatatcaaacaagaacctccagccaaacctcttgcacttatacaaaccgcacttgtaaaccccaaaaaccgagccaagtactccattctttccttactaactttcgtctccataagaaaaatacaatcgacattgtattttcttacccaaacctttaaggcatgggttgtggggtctcttgcgagtccccgacaattccaagataggcacttcatggggctggggggacttgataagggccgcctcctcgcccgatacaaaattctgtgtactctatacttgaacttctataaggttcagggactcaatcaaattcttttgtgcctcctccattgtaaaatccactttttgacttgttgttttagtagctgaagtcgatttcaacctagagctttttcttctccttttttcgttttttatcgatgaagaagtaccttctgatcccattttgaaaggtgtatctaaggattgggaaaaggtaggaagatttggaatctcttgagaaaactcaatagtattttcgggagtgtgttggatgtatggaactaaggtcaaacttgcttttctttttctttgttgaggacatgggtgaattaattcagagacatcaacaggatcgtggaataaagtaggggtgggttcaaacttgtcaactggggcagggcccattaatttctccactaacccaatttcttcagcataggtgggccaaggaaagtgtgtgggctcagggtgtttatggggctgtctagaattacacacttctacatggggcttatctatcatttggtcataagtgggccctatttgggccataatggtagtgagaatgccgttatcagctgggttgggtgggggtctggatgaaaaattctttataatatcattttctgaaattaaacttgagttaccttgtttgtgtaatctcagaacgctaggggatactggcctagcttgtctccctcttttccttcttcttatagcttggtgatcaggaggcatgcgtagcttatcaagaaccgatggacaattgcttttttcctcaactactttcaaattttttccaatagtggcacctgaggtattatccctaaccctgatgactttccttcttggtttgttattgacagtcgacttcacctctggctctctgcaagtttcatcgattggtgccttccctttgtccttgtttctcgtgacagttgccggagggcttttggccagaattggagtccggtttgcatcatccctgaaatactccagttggttgcgagtgttaaagcagctgaaaactgccaatttcgccttgatccatggtccataagcagggaccgcactaccttagggaggataagcaaggaaggtagatcggaaacacgcctttttatcatgtccgaggtagccgcaatcgtaacataccatcagaagtttgagatatcagaactgaatccactccttgcgtcccctcttgatatctaagaagaagccagaaattaattggtaggacgtatcgatttccacctgaaattttaggaaacccctccttatcacagttttgttattggcaaaatcgctttgaacaaatcttccagcttttgctgctattgttctgatgttgactgcattaaggtagggagtcaggagaccaaaggcaagtacccaaaaaatagccaacctcatattgacgttgtaccaatccacatcttctggccattcgcggatgatgagtagcttgccattgattatccaaggcctctgtcgtaatactgttgtgcaatcttcctgcttgtcgaaaaaaatcccccacatgcctggtttcatcgttttgaacttccagagacccttaagtttccaaatctggtttagaatctcctttagtctcgtcttggataaccccttaccatccatgaagcttactaaaacccctgtgcttactaactcagctgttaaatcaaaactccggttcctaggtctagagtcatggactctaggaagtttgatcttaggacttccaaatctgaagtttgtccattttcagcttcttctacctgcgtgcccaccaccttctctccctcagtaatgacttctgtggcttgattttccaccaacccctcccccctttcagcattattgaaatcattaatactgtcagagggttgttgttgttgtgaatcatcaatgttcattccatttttaggacccccatgaacatctgtctcatcattaacttgttcacgtgatacctccatattgtcgttgttggaaattattttacca

SEQ ID NO: 303443 - DNA, 2486 bp, Cannabis indica
aaaaagaaaaaaagtttaaaaaaaaattaagaaaagaagcaatttttcttacttttaatttatactaaagtactgtttttgaccatgagatggatatacagtccacaatttattttttaagaatttttttttattttttttatttttatactttaaaatagtttttatttttatttttatttttacaaatttaacataattattcctataataactaacggaacaacttaaatcgcaactaaaattcgtatagcaacctacatagaaactaccggataaatcactaaaaaaacctaaaccgtaaatttaaagaaaaaaaattaaaaaatagtatatgaggtaatttcgctttatttaatacaaatttataattttatatacattatataattttattatactatatcatataaaataacttatttatattaaattatacattttatattagatacataatataattttaatttatatacaatctatgtaataactttttcgtcatatataaataatcaatagataaacatattttctttataatactatacattaaatatattaaattaataatttataaacattatcaatataaaatataaatataatgtttacacataatatcacatttgattatagctttattatttctgaataacttataaagtttctaactaaacataaatatataagtattttacttttaaatttatttttgaatttttaataaacaaattatattgattctatcaaattattatcataataaacataaattaataataacattataaacattaataatagtcaaatatttaatgaatatatatatgttgtttttaaaatataaacaaattttttaaatgtttgtatatataaatttaattttgtattaaattttagtattatattagtaatatatcaaaatataaatagtaacttatgtatttttatatttagcttaatgcattattaattgaatatttatgtttatttctattatataatgtgaatatgatgattatttgtaaatatttataaaattgtatagaattgtgtaattatattttttttgtacatatttttgtaatataattaatttacttatatataattgaaaattaccctttatttaatggtatattatggagaaatgctaaaggcacaaatggtatttgcaaccctcttacgagtcaatatcctattagtttaaatatgtatcaagtttcatataatttaatgtaataactcttaaagagtatcactacctatcacaaaacaacacgtctaaaaagtattagacatcaatgctttgtattatgagaatgaagatataattacgttgagatgaaaatattgttccacattagtataatattgtcgctttggatttaaactctcacattatttttggacaccttatcaaaatgtctcatactaatgtagtaggtgaaacacttatatttaaaataacttttttttcttttaaagaatattcaaaccaactcttacttattcttctcatattacacttgagttgatacccatacaataaatattaatgcaatatttttgtattaatataagctctacatgctagttttgaataatacaatagtaacttatcactaaatgagatttgctggatttttccccaattagagcatcattataatccatacgcatataatactctcatgctattcaatttgtgcctcttttcccatacaatatatagtctttgccttatgtagattccatatatatatatatatattattaaatttattttttaacattaatatatataatcgctaagaaataataagcactactgagatttcgtcatgcttatactgttatagacacctacctctctatgtttaaaccacttacacaattattataatcaccgacttaatgggtgtatccttttttttctttcttctatcaatacttaatttactatactttgtatttttcattgtgttttctatcacttattatattttttacatgtgatttatatataaatataagatttttctaaagtgtagaatttaaaaaataccttatttataggacatttaatagtttgctttgattggacaattatattgtaataccatacaatatatttaaagatttaattaaatttttttttgtcttatttaaaaaaataattgaataagttgtgctaagactcttctacgtacactctctctctttatttttatgactaagtgttaattattaaataatttttttttagtatttagtcctaatattattatattattacacttatgtcattaactaaatcacttcactaatttataaataactttatatttatttttaaatgtcacatttatttcttttacattttaaaaaaatcactaccgtatacactacaagaaatgtcacttttaccagcacaattcgttactgcgctagtaaaagtaacttttaccagcgcatttcgc

SEQ ID NO: 303444 - DNA, 2066 bp, Cannabis indica
ctatcatataagcctgaattgataccttttttatagatcattattaatatatttttattttttacttatatgcggctatcttttaaaacaaacaactacaacgataggcaattttaatagggtttacaactattctatatttggtattaagctgactggatataaaccaactggattttctggtagttccttgggtttttttttgaataatttaaatcagttatctacatgtgagtatgttgtgttatttgctcaagcctaaggccttaaaacagattgttgagtattggataacatgaaattttacaggccatgatgaaagatccatttggaaactacgttgttcagaaagttctagagacctgcagtgacgagagtcttgagttgattctgtctcgcattaaggttcatttgaatggtctgaagaggtatacttatggaaaacacattgtttctcgtgttgagaagctcattgcaactggaggtactgacattaatttctatttccaaatatttatgaactgattctttaccagttttcctatgttttattcttactcatgagttttgctcttgtatctcttacagaaaggcgcataagtatgtcgtcgtctgcaatttgttcttcttgaactatatcccaatttggagcaaggcattttaatcttgccaccaccaaagagcatgcaccgttttgtacagctaacatggatggtgacttttttaagctcatttacagagatcatttgctgtaaataaacacctacctatagatcaacatgaataagatccctgtctacctatttattgtatattaggcttagtcgttatctgactatgagaattccacagaaaagggttgtttttaggctttccggcgagttctcattaactgcccttttgagagtaccaaagttaaatagtttgtaaagcaaatgtcaagtgtaaatggttaaactatatttccaagtgagagaaagggtagagtaaataattctgtggagttctctactttaagagtatatatttacttacgtgtacatatactgcaatcttcgtatggagatttgtaaatttttgccctctttccattatattttgtctcttggtttgttttgtagtcttttacaaacaacctccatttgcaatcccaagaagggttctctgtctatgttgcaatacataatgaaggttagacagatagtttaattgttgctaatcaatctgtcaccaccaaagacaatcaactttataactcctttgttttcttaaccaatcctaaaactaaccctacagcttcaaatgctattgtaatctgtattcctacaacttcattacctatgtcttttattccttcaaatgttgtggcaagtcttgtttgcagagtctcttaaccacactatttttatggggattataaatttgttcatttggtaacaaatttaatcatctcaacctccaatccaagtcttaccttcatagaggcacctcattctacatgtctcacttcttcatctaccacttttgtgccacttttaccataatttgtgttcatgttatgttaagaagtaagtattacaagcaaaatattatccaaactctccaaatttattaattgagtcgaaaattaaaatttaaacccaacttgtttataggctaaaatccaaactcaacatgtttatcaacctgtttatgataagtttatcatgttacaacatttttaagacacaattatgaattattaaacatgttatcatgaatttatttaggggtgttcataaaatactcaatctaatctgtttgcatagtgtggatatgaaattagattagatttggaaaatttaaaatctgcacgtgtgtagattaaattttgattgacatgtaaaagtaattgatgcaatccaattcatacatatttatatactaggtgaatatacgtgccgagccacgtattgctagtttcatttaagattttggtctttttaagattttgaatgtattttattttaaagattgcaaattttttgtgaaaaaattaaatatttatatttgaaatattatttaat

SEQ ID NO: 303445 - DNA, 4552 bp, Cannabis indica
ttatgtcatcatatattattcatttgttgtattactaattcacacaacaaagaaataaaacatacaaagatttagaacaaaaaaaattatgtacttactactattcagcatgaggaataacaaaaattgtttatgaacaaacttcttttctctactaaattatgtgaaacaactacatcttgtgatactaaagacaactattttctagtaatcaaacacaagaaaagacattattttgaagataaaaatgtggggtgaagctggaatattcagctatgttgttattagatcagattcagtaataaactaagacactaaagctaagttgttggttgattttttcattctcaatctgttgaatcttccccattttctgaatccaaatccaatgggacttgaccactgtattgttgcacaaccaaaactgatgctgctgtagagaaatctggtgaagtcaatagactaccaacaggccccagttcaggacactcactcctcttgttcaaagccaaggctacttcaccaactggatttcggccaaccaaatacagattacagttgccaatttcgcgaatggcagcaatgacttgttctgtgttttgaactagtttctcttcgtatttgattgagttgtcattggccaccttagtcttcttaaacttggccaagacatcgttgtccagtgaaatcaactcggtgtttgagttactttccacattaacaatggcaacatcccctgcaatgtttggttccactagaaagcggatgaccattagtctaatgcccgggtgttcggccattctgcagccataagcaagggcttccctgtcatcttggccaccaaagaagagaactgtgacgaaacatgacacattacttgcagccacatggctatttccaccgagccctcgatcaacaaagattccaaccgagcaaggtgcatgctcgagtacccttctgttaacccaacgaaaatcacttcttgtaacttctaatgagccatccaacctttggtgcttgtggaaaggaaggataacgattgcagcccttttcgcctcagcagttgaacaaacatcctcatgcatatttgacatggaagagattgatgtcattggcttaaccgacacccttcctagttgtcggtaagtctcaaatgccacaacaacattcccagagtctgaacgattgcccttgtgccaaaagggcaatccgtttcttcgtgctttgtgcaccatcagaatagctgatgacctctcggaaagctccatgaggtgaagtgcataaacagaaagttcttctctcttttcggttcctcttgaggcctcaagcaggttaagtaatgatgcaatgtttcttgtactatggaaacaagccaatatcctaagttgggtgtttggattttctctttcaactgttctatgcttgtaattagcaagtattgccctttttgctggcttatacactgcaatgacaacaggtgtggtgatgaatgtagtaaacacagccattagtaccataatggaaaatgtttgatcatttaaaacctgcaaagttaagaaacataatgtcaatatttagttacaaaaatagtatctatattcaaaaaggcaaagaatcaaaaacttacatttctgtctttaccaatgttaagaacaatgagttccaccaaccctttagtgttcattagaaacccgagtgttacagcttcacgaaaaggaactttgcaaagaagggacaccacaacagttccaactatcttcccaaaacaagctgtgaaggtgactagaccgaaaagaccccacgattggagcccccgaatggtggctatattggtcttcaaaccacttgaaacaaaatatagaggtagaaacagaccggacacaagatcctccactttctcaacgagagctcctgcgagtggactgtcattcgggacaagtattccaatgacaaaggcaccaaacatggcatgaattcctatagtatcggttataaatccagcagccaagacagcagctagtgttgcacatatgtacacctcatctactggctcgccttcatgacatctcaatgtcatccatttgaagattggaggggcaatgagaacacaacaaattacaaaaacgcatccagatagaaacacccataaggagataagaggcgattgaccagccccagatagagcaacagcaagagcaagtagaatccaagcagctacatcgttgactgctgcagctgacatagccatcctaccaatatcagtagttaagagtttcaactcagctagaatacgagctaagacagggaaggcggttattgaaagggctactcccatgaatactagaaatgcagcactgtttacatctttagatatggtttctttaagtacaaaagaggaaccgattcctaatccaaatgggaggctaattcctgccatggcaatcatcaaggcttttttcccagttcgacgaatggatttaggatctaattctaggcctgctaagaagagaaagaacaaaagaccaagatttgctagagtttctaacacagtaagactttttggtggaaaaatatagttaatatacttttcattccttcctagtgctgatggccccagtaaaattcctccctgaaatatgacaacatataaggtaaaacaactcaaaatacaatctttttactagaggtaagtgttcttagttttcataggcaataaaaacagctatattacattttaagcaagaacaagaacaagaacaagaacaagagcgcgaaacaacttacgatgatctcagcaatcacacgaggttgtcttaacggcttcataaggaatgctagaactcgagtgacaacaagtactaaacatatctgtaaaatagctagaggaagtgcaaaatgaagaggatcatctccttgaaatgcaccatttgatgtagctttcataggaccgggacaaaggtgtcctaccccattagtaatgttggtaaccattttaggaagatcaagttctttatgacaaaaccaacttcagttaagatcattcaacacaagggtggctatctgaaatagacttcagttctacaatatattcaacataacagaaaaatatatgattacttaacttatcaactgaaatcaaaggtttgaaagaaacacaatcaacaattccaataataaacaataaccaatggttgtaaaatcaggatccaaacaagtcattatacatgtttaatcttatccacacgagcaaaaaacatacaataatttgataggaacaaaatcaaaattcctcactcaaaacccaatttgaatctatctctttacacttaacacaaacactttccatacaagtttcattaagtggtacattttatactattacattagaatttacaacagtgaaagaatctttaactattcacaacaacaaagacgttaaagaaagaaaaatatgggaagtcaaccagagaagaaaagcaatagaacaaatccaacaaaaaccatagacaatggttgaaaaagcttacctttacaaatgggtctgtgttgttttgattgaaacaaacttaaatcgcttagaatcagagctatgaatataaaccgactgaaaaaacagagcaaaaataaataaaaatacaaacttgaagatgaagtgaatgacaggctttatataagtgtgagaaaaataaagattgtaattttaaccttaaaaagaaaaaaagattgaaactttggcaaattggctttactcctattccaaatgtagttagaaaattttggaaagaaaagtaaaaaagattgaaactttattcctaatgtagttagaaatttttgaaaagaataaaaataatacatttactatggatcactcttaattttatttactatttaaatttaaatttgaaaataataaatataataataatcttctacttctggtcaatgctgtcgacattaataataaatatactaacaaaagtcaaacaattccacttccaatttgtttgtatataattttggagacttttatttaaaattattttaggattttatttattgtttttaatttgtataaaagatatatttttaatttatattcgtattccctttatttttttagtaatgatatatgtaatgacatatcattaatctttttcttacttagcgttcttaaaaaatacaaatttagaataaaaatattttaaatatcaaaataaatatctatatgtgcaattttattaatgtaaaaataaatacctatattattttaaacacaaaaagaaatatatatatatgtataaaatatgaataaattataaaaatcaacttaatttttttttttttaatttttctaatattaggttgccaatataaattttttaaagtgtagtatattgactcatatatatttgggaaaaaaacaggaatattctaaaaagggaaaaatattacaacaatactgtgggccggcccaatgaacatttgtacagcccaaaaggaaaatattacaaaaataccacttgcccttaccttcagccgcacgtcacaaacg

SEQ ID NO: 303446 - DNA, 1409 bp, Cannabis indica
atgccgtggctacagtgcacggcatatatgccgtgcactgtagacaaaccttcaatttgcagtcacaattgctgcctccttggaccattaaccacggcatatatacatttatgccgggtcgttggaggtgctcttatgtcttatattatatatgttgatcgataataatctctttaataatgcattaattatgtgtgattagattaattctttttgctaataatgatgttggtcaattgattaatcacatactattcttaaatataaatctaattagtactttcctttaattataattatatgtcttatctttcattattcactaaactttttaatgaaagagctagatcttttttttttctttaattcatggtatcttttttgggtggcagaataaacatatccattaattcattatgttgaggaggttaagatttctttgtattaaccaatgaagaaaactagcttttaaggctttttttcaaaaatagtttttgtgttattgacaaacatatccatgtggacatgtccataaaatgcattaattaaaataagtacagaattaatatacagtattaatctttttgaacttatcataattattttggattgatgggattgcagtctttgagtttcgtcgagtcatttcttctttttgcaaaatttaatggcatgtttctcttatttattataaaagcaaatactgaaaatccaacttagatgttagataaggcaaggacatcaacttatagcctttaatttgattttcatattttttttcgtcttcactttcctgtcccacaaaaaccataaaaagatgttccccactaccccagaaataaagattacaagattagataagatagttttcatgtctagatctacataactctagtaataattaagactaagttttgatttgatagttgtgtacaaaaaaaataataataaataaaaatggtaagctagtctttcctttctttttagtttgtataagaaaaatgttataagaaaccggttcccctaaatatggtggatagtgctataaatatatgtcttcttatatatacgggtcatgtcgtgttaatttttttaaacaatacgagctgtgtcgtgttgtgttataaaaaatacagattgtattgtgtcatgccataaaaaaatacaggttatataaaaatacaggttggtcgagtcgtatcgtatcgtatcgtgtcctgttcgaattcgtatcgtactttactccggccgagttaggttattttcttatatgggctcaaatttataatctagtttttagcattttattttgggaaatttacatggtatactaatttttactatttttttacaaaaatactgtcaggcggtattttttactttttttactgtgttttttataagtttca

SEQ ID NO: 303447 - DNA, 1347 bp, Cannabis indica
caaggctatattatatattaatttggtttttttttttttttttttactaaaacaatggtaaattgtaagttttttcatttttacacttttaaaatagttttttttttttttacatttttacaaaaaaaattatatcaattaatggagcaatttaaattgtaatcaaaatttacataacaacctacataaaaactaatggagtacccaaattataaattaaaaaaaaaagtatatagaaaataattcctcaatttatatatacaaactattactaatatcaattttaaaaaaatatatatttaattgtaataaattataatttttattactaataattttaacctataaattttagtgggatgtcatatataggaaataatttagttgaaatttctttatttttaagtcataaatcttgttgttgaacaaaatatcagttcatgtagttgttaattaaggtattaaatagtgtacttgttaattaaatatttgaggggtttggaaaattaaataattaggttattaatcaaatgagcattgctattagccactagtggtgtctatcaccttctcgacatgttacgttgcgattggctagcgatactccttaaaagctattatatcaaattatatgggacccgatacttagttggaccaatagcgatattgacacataggagggtgctaggcaccactaatcaaataagtgtacttatttactagtggtcactatttaatttttggtttatattataaagtacaattattaatttccttttaaataaaaaagtacaattattactactgtcagtccaattatattatatggcatgtttttctgatgcaattattattgtatttatttaaaaagaagaaagaaaaaattggtacccataatttatagtaggggtgatatttcgtatacacacgagtcatgagtcacgagtcgtatatgtgtcgtattaagatttatatataataggtatatgttcgattcaaacacgacttacgatccgtgtaactcgtttataagtatattttgtttaaacatatcaacctaaacatgactcgtttattaaacaagttagatgagtcaacatgaacacgatctaaactcatttaaagctaatccaaacttactaactcgtacagatttcgaatcgtgttattgtgtctggccattttgagttgaaattattgtaaagtaaataaatctaattattcattattttataatatatatgattatctcatatcagggacgcagctactttagctccaaagggggccatcgcccctctcaaaattttggacaaaaaaaaaaattataaagcaatttaatgttaa

SEQ ID NO: 303448 - DNA, 1462 bp, Cannabis indica
gtattcatcgatcttggcctttttttatctttgagtattttttttttaatgtttgttctaccatttctgtgatgggattggtattgttgataaagtctggtttttagatttttatgcacatctatttaaaatttatttccattaaaattggtagatgaattttttttttggttgggcaatgaccattaatagtcaaccctcagtggatgtccgtgtaaatagggacattagtcatagtatgtattatgtaactaggctctttcatttctcatggttatttaattttattagtctttttttcttttatttttctctagtgaaaatgaaaatctaggaaatagacgtgttattatacactatttggtacgtgtgagatttttggtttgtagaaaagtttttcatgtatatatgaagagttaatccatagcccattaaagttctaggtcttgctattcaaaatcattgtggctgtgggacatagatgtcttaagagagaaaaggaaatatctctgacaaagaaaatttggactgcttaagtctttggatagaatcaaatctcttctctcttttacagtcatctctaccaaactttttttatctaatatatttatattttttttgtctgggtcaataaaagaaaaaaaaattagtgacaaagaagcaaatagttttactattgttattattgttttttttttttcaaacttttacttattattcccgtttaacccttagtacacgcaataatgaatagggtgggctaagagaagtatggagcttactattttaccttgaaatgaattttgtttggctataactatatggaccgttcgatgtattgatattatcaatgaaaaatgagtttatggttatgattgaaacttgaaagactttatcaaaatccatttttgatagtgccataatttgacactagtaattacttgcaattaattaaatagttaatttcaattattcaataagtgaatattaaatcgatagcgattcttttggactatttaatcttagaagtaacaatgacatcctaaaaatacgattggttttaggctattttaatttcagagttgttgagatcgttatctctatctatctatatatacttgcttatagctgacttgagatatattctatgtttaatgtctactcccaccaattggattaaatttacatgagtgctttggtaaattcatattcgatatatagacagatattttcatagaataatgttctgttactaaagctttattcccagatgtgctgtgtaattatgtatgttttattagaaaaattaataataaatccaagatttatttgtatataacatagaacacaataataatacataataattaggtatgcgtacctgattgatccatagcaattacttcaatttgatccatagcaattactctaattcgatagtgcaatactatcaactaagtct

SEQ ID NO: 303449 - DNA, 3690 bp, Cannabis indica
aacaaaacaaaacaaacaaagagtgtataaaaagcatgcttgtatgccggagggtatggaacgagctattatatgttgttatatgaaattagagtcttgaatacaagcatgcttattatactttaaagtcttgaatacaagcatgcttattatactttaaagtttataagcagcctgtgttgaggaaaaagaaagagataatgttttgaagatgatcagacagacttgatgggattagatgtctttttttctattttcttatttttgttcgttcttaactaacagtttaggtgaatatatatatagaagtagcttatcgtgcatccctaaagtaaaaccttatttttgtaaatcaagtgtcgaccgtctttttacattatacatttatacctaaattaaaatgtaaatctttgtgcgactactatttatactattacgtatttaaaggtatctactaaaaaatagtgctactaaaacatgcaagctatctatatatagattttacaaaaaaactaaagcaagtgcataaaaaaaggggacgtatagttcattctagtgtataagaaggccaattcattttttgtatggtcatgttacgtttacttaagatagtttgcaaaattttgagaaattaaaaaaaaataatacgccaaaaataaggttcaaacagtatgttgcatgtgttactcttttattttattgtgtgaatcatattgtttgaaccttaattttttatattgtaaattattttgaaatttgtaaaattttgtaaaatatcttaaataattataacatgtaagaatgtgaaaaaagttggactaattttttttttttctgaatttcgaaatagtggggtgcattagtgcactcttttttttggggtgtacattatagaataatcttataattttattggattagtaaaaaaaactatttacactctaaaaatttctaagaacatctttttttaataattttattttatataaaatttatatttttaattatactatgtttttttaacttttttctttcaatttaaattcttaaaaaaatatacctgacgaaaaaaaataaaataaaaaattatataatttttttttagaaaaaaaaaatataaggtgtttctacaatacaccctatcaaaatggatgtactgatgcaagcctaactgtttcggtatctataagaattttttagtttaaatttttttcatagtcgtgtacgttatagttatttaagacatcttacaaaattttgagaaatttgaaataattaacaatatagaaatcaatgtttaaaccgtctatttcacacgcgtataaaataaaaaagtcacgcgtgcaagagactctttgaacactattttcgacgtgttaaattttttccaatttatcaaaattttgtcagatgtcttaaataagtataatgtatatgatcataaaaaaaaaattgaacaaagtagttttttattacagaaatagataagggtgcatcgatacacccattgtaagagggtttattgtagaatttttcaaaaatatatgtacatgatatagagaaaaataagtaaattaaattaaagtgggtgattctacgcacacccttaaatgggatgtactgatacaaccttaacttgtttcggcatccagaaaaaaattttagtctaaacttttttcatattcatgtatgctatagctatttaagataacctacaaaattttgagaaattccgaataatttataatatagaaaataatgttcaaacaatctattttccatgcgtataatataaaatagtaacgcgtgcaatacactgtttgaacgtagttttcggcgtgttaaacttttccaaatttcttaaaattttacaggatgtcataaataactataacgtacatgaccatgagaaaaaatttgacttaaaaattatttcgggtgctaaaacatataagggtacatcaatgtgtccattttaagggggtgcattgtagaatttctcaattaaaataagtattcatattaatataaaatatggtgattcaacaatgcacccctttaaaagagatgtactgatgcaccctctacttatttcggcattcagaaaaaaaatttaagtcttttttttttcatattcatgtacgttatagctatttaagatattctacaaaatttagagaaattcagaaaaatttacaatatataaaaaaatattcaaatagtctattttacacgggtataaaataaaatagtcacgcgtataacacactgcttgaacttaatttttggcgtgttaaactttttcgaattttttaaaattttacaggatgtcttaaaataagtataatttacatgacatgagaaaaaatttgactaaaaaattattttgaatattaaaatagatagaaatgtatcgatttattcccattaaggtacattatagaatttctctataatttagaaaaaaaaattaaaaaaatattagaagtaattttttaaaaattatttattattattattttttaataatgaggtttacttattggtgaaaagccctaaatctcagtcctttgaactttgaagctctaagccctaaatctgcatcatcatcatcatcatcatcatcatcttcatccatgtaaggattaactaatcatcttttacttctttctttttgtatataatatacaatgtatatgctcaaatttaccaactatttaaaatcaagtattgtatgaaattaattgatatttatgttaattttggttctcttaatgttcacaatccaattttgatcgatttcagcttataatggatgataatggctggaagaaaagggctaaaagtacatcaatggtgggtggtgaagacagaatttcgaaacttactgattcagtgatcttacacattctatcgtttctcccaactgatcaagtggttaaaacatgcattctttcgaaacgttggaagctcatctggtatgcagtccccacactctttttctccaatgatattgccagtgaactcgaatggaaacagagtcgacaaaagttttatagttatgtggataagtatttgaaacaccgaaagaaagctatgtattatattgttgattcagtcataactagttttgatcttgacatgtatgatttctatcaaagaagtaaagctggtatattagataaatggttagcttttgcaattgagaataaggtcaaggaattacatcttaggataggcctagagagaaagaataataggttctatcctgagtactactgcttacccaaagttgtagagaatggaacatatttgactgttttggagttgaagtgtttagaattggattcttctcattcatttagttttccatttttaaaagctttgtcattggaagaaattcagcaatcagataaagcaaaagatgatgttgtgtttaagtttttgttgggttgtcgttgtcttgagaaattgcggttacataagtatgaattcttgcgcagtggtgataagattccgctgcaaagtttaagccttaagttcttggaactgacatatacaacaaatctagatggcttgcaagttgaagccataaatcttgaatctttggtaataacatgtcaattcccgagtaatatagatttctctgcttgcaagaaaattagaaatctctcatttgatggtactgtt

SEQ ID NO: 303450 - DNA, 1138 bp, Cannabis indica
tataaggatattatctagacctaagaaagaggaccatgacataattccacttttatcattcgcctcttgacctagtaagatccatatttgagaatggctgcaaacttctttagagttttcccaaaaaccttagccattactcacttgaacagagagtattttttgacaatcttcattgaacaattacagagaccgaccaaagagatcttcattaagagatctcgatgttgtaattacttaaacacattcttgaaaacataactctggtatatttgagcactgatataataaaacaagtggactagtccactaccgacaaatcaatgggggttaattactatcaattttgcatgtaattttcttacagttattaaattagtttatttctgccaactattaaagtcttagtttaatcttctcatttacgatcttcttagaccagttgacgaaaaaagtaacaatttagtactttcattgagagcattagactggttgtcagtaatctaaagatcacggctgaactcactattctgtccaacaatggtgagtaccagacgaggaagttatgaaggggatgttgaaaccccaccaaggcgaagttaatcaacaccctgttgcagaaggtgttgtgcgtccccaaccctttggggaggaaatttcatgtcgccctggcgagagtccaatgcctgatgatgagggacaagcccaggacactgacagttcatcaacctaatataggggtgagcgacgtacaatgactgtgttagaggttatgccctaaaaagcatgtaaatacattttgattattgaataaacataacaattttattatatttcatgagtaaattatttattaataatttatatcttaatatcgaaagtttcttattcatatataagggtgtgactttatattgtacgaagaattaagatcatgagctatgaataaatagttagcaacacattaaaattatggtattttagtcaacggtggttagtacggtttactgatgtcccttactcggtgcaatcaatcttgattcagatagctgtagatggacatctcggtgaaggtgctgtatacaatagagattatatatgacatgataaatatgtaattaagttgtttttatcaaac

SEQ ID NO: 303451 - DNA, 1309 bp, Cannabis indica
aaattaaaaacaaaactagttctacatcgtaacacataatacctcataaaaccgattataatttttttaaaaggtgaggatcaatttgaaaaaatactaaagcataaatataaaaagaaccagctccgtaacaaaataaataacacaaataataacacaaagtaaaaattgatcaaacattttcacataataagcttaacttattgaaaaaattaataatgagaggtacaatatattctagaagactatatgaaacactaagagaaatttgattttaataaccagaggtatctaaatgtgatatctcaaagcggaataataattcagtccgggcatcatgtcatctagtccataactaaaaagaactattgagaatgagctgatggtatgtggcactacaaaaaattgtataaattttattgtgactaaaagtaaaaaaaatttgtagtgtggtatcggagtaggcgacatatcaccgcacttcataaaccaattttaaggattttgcaattttataggaaactatgcaacttataattggttattttttccatacttattctttttattttattttattttttaatacctgagctgaacctgaatttatcaaacctaatttttctttgcactacgtgtgattttgaatttgattctattactattcagatcattattattaaaatgagactaaattaatataacatttcacactgactaatccaattatgtatagtgtagaccaagaagaaccatattaaaacctttttctttctgaataagaaaaccatataaaaaccttgatctatataaatatacatataaccatttcaatacattaattggactaaggttatgatctatccatgcatgcatgcaactagtgtacgtacgtgtgtgaatgtgctcatcccaaaaaagttgtcgtatttttattattcaaaaaagatttttttgaccaatctcttaaatcttaattaatagatcaattaataagactaggcaaaattgaccaattttggctaatcttcactgttttgtttttgggtatatttataaaaagaaaatctcatataaatagaaggtaatccttttccagactcttcttcttctccctctcaacatgcacaatatgaacaagctttctccttcctctccactgcgttcacattctgctccttcatgttcccactctgtggaacctttgccaagccccagatctctcgatctaggtggctccgatccatcttccaatgatacccaaggcagctcgacgcgcccaagccgtgttagcagctccaaaacgtcc

SEQ ID NO: 303452 - DNA, 1582 bp, Cannabis indica
aaaaaaaaatatatttatatatagcaaattagctgtttgtaataaattaatgggacagttttgacaggaagtatggtttgttctttcattacatgttttcatttttatacaacgctgaagatacggcatcacatatttcacatgttttttttttttgttgatttaatggtgccaaaagagcaaaccagagtaaaaaccatacaacgacaggaaatagaaaaggccgaagccctggaaaccaacagggcaaacagaacaaaggagaccataacaagtaaaaaacactaaaacaggaaactaaaaaacggaaagacaaagtatccgaaccaaatcaggcatccacttccaagtggagtgggaaactgtcaaaattggacaagtcgattcttccaaactgctttgatcgacatgcccattgggccacatcatgggtcacaccgttgtgaattcttgggatccaactgatctcctagagatcaagtttcttcatgagaacatggaacttttttatgaggtcctgaatgttatgattgaagcctgagatatctgtctttttgcaaccgattgcgttgattgaacccgttgagtcgctttggaagatgacatactcgtgattaccccattttcatttctgaaaatggctgcaccagcccctcgattttgcccaatgacgacatcagtattgcacaggctccacccctcagggggagggagccacttgagcatagtagaatcagggtgggagtgatccttagagttttccagcagacgactattgacttgagaaattatcaccttgattggagtggatttcctttggtgaataatagagtttcttttcttccaaactttttcaaagataatggccgcacatcctaagaacgcgtgaaagctaagatcttttggtcttctattgcccgctttgaaccacatcaaccaattatcccaatcctcgatatttatctcgctggtttgaatttgccaagaacaaccaaaccacacagctctagcgaagtgacactcccaaaacatgtgaaaggaattttcgatggtcatagagtagaaaggacatcccgggtctctaatatcaaagaaggttagaagtttaccccttgtgagtaggctattggataaaatcttccaccatagcatctttaatctgctgtgaattcttgctccccatatgcttctccatttttcattggcccctgcattggtcttcagattttttatggttttgtaggccgatttgatggtgaattttccactcggttccgggagccaaagccaagagtcctcaacatgtcgatcgaacattgtgatattaaggatttgtctcgcatccttgtggtggaaccattgttggacaaggctcacgttccattgattatcttgaatgaagtttttaaccaacatatttcacatgttggcggggttaaacttgttacattttttttagtacccaacacgccgctacaccactacgaggttgacatcctacattttgtggcgatgtttaatgggtaatagtagaaaaaattaagtttttatgtttaatttttttatttaattaaaaaaatct

SEQ ID NO: 303453 - DNA, 3156 bp, Cannabis indica
tatgcttgatagttacagtcaagtttagtgtcatgtatgtcaaccaaagttgtgaattgtctttagaatgctttttccatatggatttgcaaattatcattttgttcacggagttactttcttggtaccatgcaatatgggtttttattgaccgagaaaaaggagtggaaatgatatatgatttatatagttgactaatctttaagaaattattcatgattttactgaaaacatacagttttcctgaaggtggattatggaaagcaatgtgcacaattctttagtattaacctcatttttaactagttttaggatttagtgctgaattgtcaatctctgtttatcgttgttcatgtatattgaggcaaatgcatcattgattttttcccctccgaactgattatcactttttgctatgttttccgcagggcaatattgcttatgtatcagcaacaaactggcaacggtatgcctagctttagcatggcaatatttcttgtggttttttgttgatctttggtagtactcatttgtatacttttgtggttgctatagttagctagctgttgatacctgtgactttattgtaacaatggttatgaagttcaatttcttttctttaagtaaaaatttcatataaattatgtttagttagaaactgaaattcaatatcctttctgccatatcattaatcttttaacatcagaagttattataaagctgtcaatatttactttgccagttgtaatgcttgaatgttaagtagcataataggttggagatgatgttgaattaggtaaagttagacatttcattgtgttacttaaactctatagacactaagacagaattttatatttcatgggaatataggatcatccaactcttgtcttcatttgcagaggatgctcaactacacctcttttacgacttggggctggagcatgtgctggaattattgccatgtccgcaacttaccctatggacatggtacgggggaggataactgtgcaggtactttactgaagatgtaactctgtaaggataatttgctgcagatgcttctctaaaagttttagtcataagacgtgcaaatcaaattaacaatcatgtttgagtcaaatgattcatagggagttgcattgtctgtcaacacttccatttaactttattttcttcctaaatatacagacagacaaatctccatatcagtacaggggaatgtttcatgctctctcaactgtactcagagaggagggcgcaagggctttgtacaaaggatggcttccatcagttattggagtggtaagcaatttttgaactttgtctcctccactgtgtgcttgtaagtaagaagaagcaaacaaacaaaaagaagtttataccgctagatgattgttaatgcatgtagatttttccttctttacactaaattatgtcttcgagtgaagcctctgatgttctttttgtgtaatgcttttgcatctcgtttcattttacttggttattaatgttattatggactggcatagttatattacatcatagcaatacccggatccttaggttcatttgttgtcaacatgccaatggggtcaataaacattaattggattcagcccccaaggccaagagtacccacccaatcttacacatgaaacccctttacttttccccagcgtctacagaggaaaattcactcgtctgcctgttcccatcttattgaaattgaaaaccagtcagaaacttcatctattccaatgcaacctgaagctgcttcagcttgtgctagatcagatgcacttatagaggctctgcaactgttcaacaaaccacctggtctgagtgtggtatctgccactgccattattggccaatttattcggcggagtcgccataaagaggctgttcatccctttcaagaatgcttgcatcaaatatcagacccaatgagtacacctttggcactctgtttccttcattaactgctttgagagacattcgtataggtaagcaacttcatgcgtgtgctacgaagatgggtttgcataaaaatgtgtttgtaggaagtgcacttttggatttttatgcaaaattgagtactatagatgatgcccagagatcttttgaagatactcaatctccaaatgttgtttcatatacgacattaatttgtggttacttaaagaaggataaaattgtagatgcttgtcgcctttttcaatcaatgccagagagaaacattgtttcatggaatgcaatgattggtgggtacagccaaacaggccacaatgaagaggctctgaatttttttgttcagctccttagagaaggttatgtacctattcaatctactttcccttgtgcaatcactgctgcagccaatgtcgcatcacttggcattggcagaagtgttcatgcctgtgctgtaaagttcttgggtaagcctgatgtgtttgttggcaattcacttgtgagcttttatgcaaaatgtggaagcctggaggatagcctcttggttttcaaaaacttggggaaaaaaatattgtatcttggaatgctgtgatatgtggttatgcacaaaatggcagaggatacgaagctataagcctttatgaaagaatgcaagtatcaggctgtcgacctaatggtgtcacacttcttggcctgttatgggcttgtaatcacgctggccttgttagtgatgggtattcttattttaacaaggcaagacttgaaaaccctagcatgctaaaaccagagcactatgcttgtatggttgatttactctcccgctccgggtgtttcagacaagctgaggagttcatatatgatttgtcatttgatccaggaattgggttttggaaagcattactcagtggctgcctgatccactctaatgtggacttgggagaattggcagcacacaaaatcctggctttggatcctgaagatgtgtcgtcttatgtgatgatgtgtaatgcacattctgcagctggtagatggcagagtgcttcgaaaataaggagaactatgaaagaaaagggaatgaagagggttcctggttgtagttggattgagatcagaagcaaggttcatgtttttgttacaggggacaagaatcatcagcagaaggatgagatctatacggtgttg

SEQ ID NO: 303454 - DNA, 3220 bp, Cannabis indica
aaaagggtaaaattctttaaaaaggatatataaacaagtttgaaattttgacatgcatggaatgattagttggcactatagagaaaaagtatagtgatagcaatgtatgcaactttgcaagttggtactcaatcctactctatgcatgttaagatgggccaacacatagtccatattcaaaattaatttcacaattttcctattttctttaaccaaaagaaaaaaaaaaattgagaaccaaaaagaaagttcatgaatttcactactatatactattgttattccctatgagatgaagaatatgacataggtatataaacacaacattaaatttaatggattataaaattctattcaagtttattataaatatatatatatatatacatactcggtacaatcataaccattcatctaaggtatatgactaaaataaatggtcatgaatatgaaatatctattaagagatattagagaatattattttacatgaattaaatgtaaaagtattaagttatatataagaacatagattactctatttattactaattggttttaagatctcatatttttttatcatagtatcaaagttatatctctaacggacttttaatctatacctattcaaatataattagtcagccgcacaaaattaaatgtaaaagtatcaagtcatatgtaagaatataaccatttgtttaaaagtatataatataaatgatcaaagtgtatcaatgcatacgggcacaaggagtgttccttacgttgttcttatttctgttaagaattttaatctctatcctaaaaaattttttttaaaaataattacataaaatatatatatttttttttataaattttttttacatttttacgttcaaatattttttttatttatatttttacggccatctataaaaatatataatacgaaaacaataaaaaaactatataaaagtatcagaaaaataacatctaaataatatcaaaataacaataaaacatcaacatcaaaacaagagtacaacataaaaatacgtcaaaaatcatattttctataaataaaatcgtaaaaatattgaaaattctatacaactgtattttttataatctttttattatttttatgtatttgtaaaataatccatattttctattgggatttatttggctaaacccatttatattgaaaaagtttataataaacatttaattgtataaaaataaattacataaaatttaaaatatttattattaaatatctaattatggaaatttttgtaataaattcttatagagtcgttccgatagatttcatatttgtttcagcatttaaaagagcttttttatgatcgcatatatgttgtagctatttaatattatttgtaaattttaaaaaaattctgaataatttacaataccaaaaatatgatttatatattttgctgcatgcatttgcagacttatcctataattattattcaaaatacaacttaaaaaatttgtaaaaaaaaattactaatatactaaaacaaaaaatataaagcactactaaaaaaatgaatgaaataatatatgggtttttgctagagcagtgagtgtcattctcattcctactctgtttaacattttgaaacaaaaataatctttgtttgttcccaatttaaacagagaattgtcatttcattaagagcaggtttccatggaaaaaaattacatcaccaattatatcttatttataaagtgcaaaaatgatcatgatcattcattgaagtatatgattaaattaaatggtcgggattgtaatgtagatgattagaattgtatcttacttattgtgtaaaatgatatcttagtaatacacatatatacatatgttgaatatgaaatatatattgggagataagataaccatatatataatatgaaataataatttaactaagctaaaaacaaataggagtgggaagaaaaaaagagagtacatatagagttgtatataagtcaatgcatataagaaagatgtaagaataagtaagttgcatatagcaagaattgggaagctattaccaagttagggtattacccaatctatggtattttgagctataacctttcctattcttgatatgatcattactaatataattgacaaagatatgagaagatataacattattaattacatcaaaagggtgatcatcatataatattatatattacatgtatatttatggatgagatatttcattataaagaataggtgtggtggtcatagctagagagaagagcattattaactattcaaattttaatttttattttaatgtcattaggtccacccaatacttggttgtactatgtgggatgaccctattagagatattcatcacatagtgtccatctcatttaaatcaaaaggaaagtagggattcccaacctaacatgggaccatactagatgtttcatttttttagtatcttccataaatttcacattacttcaaattttccttcactcattctttcttacactacattaatttgttttttatttattgtattgtactcatgtgtgtgtggtaaagtttcattcatatgagttaataataaattgggaataatataaattattgttatttataataaatatatagtcaataagttggggccttttgtaatcttatgaatgtccatagatagtataatgtggttcatatatattaaaaaaaaatcatttgatttattatttttttttgaattaataaatcaaagttgttgttgttctttcacttcataaagatttttatggcagaaattgctccacacacatatagagtttcccacaatcattgaattttagcttccaaatggtatggggtgtgtgctttaaaatattacatattacatatcattatcatttatataataattctcttgtatagttttctctttttcttttgagaaatgtcaatatcacttgtatattttcatatcagataatatcatagttcattgtttgattttgataatagtataaatttcagagaatcattatcactatgcatacatatcttagtacaccaaattataaatgcacaaaacaatccaaccaaattacattaggataattagtttaagggttttttttctttcattattaatattataaattgttggataaattttctttcttttttttttttttgttaaagtag

SEQ ID NO: 303455 - DNA, 5964 bp, Cannabis indica
ttaaaaatcatgctaacacgcctttaatatttagggtggttcaccattagcaaccatctaaaattgtgaaacaccgacagtagtgtacaaggttgaaaaatagtcggagatgacattttctagccttaaatcccagtccttcatgaccttatggctgtcttgtaaagtatgaatttggttagtacgtttccaagtgctagcatacgcatggaagtacttgctattttatctcctccatgaagccaattttcttagacctctgtttcaaatatagctcttgttgggcaagaatttcaaagtaattagtctgctcagtaataaaatcttgcatattagtagcatcagtactaaatcttaactgagataacttttgtttgccatgagacagacattttttgaaattacctgtaagtgtgaggccccaagtatctaaattgatgctataggctttgatcttgtcaataagaagaagatggttttgctttccaagcaatctttaacaatctaatggcaaaggggctcatggcttcagcagttctcatattggagatgatatatcttacttgacagccatggaggttttagttctaggatgataggagtgtcatcagaggaggaaaaattgccattagtaagagtagcttggggaaaagactcgagccaaaggtgagagacaagagctttatccaactgaatttcaacacaatttggcgtacctattctatgttcccagataatggggtagccccaaagctccaagtcgactaactagaaactgaataggacttcttggaaaccagtaatgagggacgaggggtagggccgacctcctttcttctcagtttgactgctaatgttattaagatctccaattaaacaccaaggtaactgggaagcaagagcaaggtcatgaatgagctgccatgttttgtattgcatgcttctatttggttcgccatagatgcctattaaatgccaaaccaaagtgttgggcaccaaaatttcagcatcaatataattttgtgaatagcttaataatcagaccttttcttgggctttccataacaaagcaatgcatcctttgtggccttgcgcctcaacacaaaaactaccttcaaaacttaattagactcttaacctatccaccacatctttcttgcataaagtttcacataaaaagataaaattaggtttcttttgaaaaacaatatcctttaggaatttacaagcccgtaagttcccaagcgcacggcaattccacctgatgaaactcataatgtttggtgggcatgagcaccaggacccaccatattcacatttttttgcccctcatttattcggcccatgatattagtagtagcagtattaccatgatcaatagcaaaatgtttcctttttagttcaacatttaccagctcttcatcctcttcatggctttcataaatcacaatccctttatttttgggatgtgattgtgctaaatcacgagaggattcgtccatgaaagcagtagatgattaattggcagaattggctccacgattggtgggatttgctgcaggaggtgagctgttggaagatcggtcggagcgaatgaaaggtgaaacagagacctggcggtgtcgacgaggtatggccttcatccctatgccatacggcttaaccaaagagcttggcggtgtgtcaaataattgtggacaaaacctttctgaatgtcctattattccataaataaagcaaaaaactgggacatattcatatttggacgtagcataaaaactatcaccgtcgcacttacgaaacttcatccttcttttcaatggcttcttgagagatagagatacacacaatcgaagatatttacgccaaactccaacaaaactatttgggtcggattcaaaaaagtgcctaagtaattaccagcatgacgaacaaccttcatagataagaatcctgattgcaaatcatgtatttgcacccacaaattaatagaatttaggcttagaatcctgagattgtctccatctttcagtcggacaataataatttacttctgatcataagtccatgggctacccgtaataacccgctgaacatcaacctcatgataaaattgaaacaggaatcgattctgatcaagttgtttgatatacatgccttgtataggcttcaacaaatcgacccttatatttagccaaaagtccgagatctttcctgtgagcagtcggccgacgaggcaccatctggtgtcaatggcttgttcatcgtcatcaccaccggtattctcatcatagtaaacttcctcattctcttcttcttcaagttgtatatccttccagcgatcttcaagatcctttacctgactactagacgtcatggcacacaacaagctggtttgacagtcgaagggtggaaaagtacaaggatatgattcgtacaaaagaatggcatagaatagagcacacaatcacacactcacacatacacactcaaaagagagagacaatttaagaacagagagacattagtataagcttttcgttctagatgtaatttaattaagtattgttcatatgtgcacctaaaagatgaatatgaacaaaggggtgacaaaaaatattcaattaatcaaaattattaaggattagattatttactaaataatttttattaatatatttctgtgtaatatttttgtgtatgtattcgattcgaattcttagataaattttataaaatacggatacgctcaaccttacttcatgtaaattgacttgccatggaatagtatgtggtgaaaattatttgtgtattaaaagtgacgtagagtgaattttttattttattaaagctaattaggattgttgtcccttaaattttgacatgtaccaaatcatgttccttgagcttttctagctattaaaattttctcttgaactattaagatggttggatttaaggacttttgtccagatttattcaatattactaactcggttattgtttatgtaccaaataattttgttatgctttcaatagtgataagaaatttagtctcttaaatacaaatcttactagatgttgagaaaaaataaataagttacaaaaatatgtgaatcaggtatattgttttatttattttagaagaggagacttataaacttgaatacacttatcagacatcagtgggtgcagtgaaaataggatcatcgtccttggcatggttttcatttttcacatttttcaatttgatcctaaaattggatacattcacaccatactgaaggtatcccttttctatggtagtgcatcctcttcataactcctaattacaaagttctagcttactcaaaaatggctttcattcttcaatatgggtagctctattccaacaagggacctgtgaggaaactaaaagaaaaattgctcaactatttattattaatatagtttatcccaatcacacatatgtaagtaacttgaatattttaatcaaccttaaaagtatgaagagtacacgacactaagctaattatcaaccaaaagcataagaatattttgtctaccaagaatgaaagaaaaatagatgaaagaaaaggactactcgaaaattttttacaaaatagagaaccaaataaaaagaattaaacaatgaaaacccctaaagattttttgagggagtcaaacagactagaatctagggcctttgtaaaaatatcagccaattcctttttagtatcaatagattccaactgtaatgtttgagtgtcaacaagttccctaataaaatgatgtcttatgtcaatgtgtcttgtataagaatattgaacaagattttcaaaaatatttatagccctagtattattccaaatagaataataagtaagaataaaagtgagagtataacaattatcaacagatctaaagccttataaaatacattgtttatcactgttaagaacaaaacaatgatcattgtcaaaattaatagtatatccttgatcataaatctgactaatgctaagtaaattagcttttactcccttaacaagcataacattttcaagcatggtaacctttcaaaattgagagttcccgaaccaagacatttcctgctaaacctttgccaaacatgacttcaccacattgtattagtctgatatttatcaaaacatcattgtcaccaatcatatatctagaacaatcactgtcaaaataccacatttgtgaagcaacacttttatcataaaaaacagctaaaacattttttgcttttcaatccatttttatttccaagcactaagtttcttttaaagatttttcaaattacccaaataatatgttttgtacatattttcatggtgaaaatttttggcctaatatgccccttaataccacaaaatgaaaataggaataaacctacttacttgaaatcttacgctttttgtacttactacacatttgtagcagcagaccttgaatttacagtagcatgtaaatttactggaacactaaatttgacaaatttaatttttccaaaactttcagtaccatttaaacctattccagcatagcctctttaacctgcactaaacttcttaaaaaaatagaagaaacatggttaagcatttgaacatttttcttgaaatgttcaagttccttctaataaattcatttcttcatctaacaaacaacagtcttatatttttttaatttttaattttttttaaacaaataacctgtattcgcttttcatacataaccttgtaagactcaaccaaagattcttcacagatttcaatttcatcaaaatcagaatcttcttttttaataacataccaatctctcctcacttgtgaatcataaaacaaactcgaagaaatagatgttagtgcaatattattagaaatttcttcattactatcgatttcatcatcactccatgttacattgaagcttttcttactcttttttagagtatttgcacattcagattgaatatgtccaaaacattcacactctctgcattgaattccctttttattgttagttactgaaggtttaaaagaagtattttcttttgaaatttttggagaattcttttcgtaacttatcttttttatgtatttttgaaagattctagttaaaacatccattttatcatcttcttcattatttgaacattcttttttaagcaacattaaaagtaatacttttacctctatcaatagtggacttgagtttgtctttttggttgctatttttgatttagttcaaaggtacgcaaggaacccattaactcctccaccttcatcttactaaaatcttttccttctttcgtatttacgagtttagtgcctaacctgtttgcaagaactcctacaatatttctgatatgaacatattcatcaagcttttcaccaaaagtaaatattcattatctacattaaacaatttttcatgaaattcagatatggtttcatttcaagacattctatgtaacaccctaactaatataggtgtgttagcatgatttttaacgtactgtgcagctcattgctaatcaacgaggtgattaaaaatcgtgattaatttaaatttgcttatttgaataaaactataaagtaatacatttataaaatcctaggatcctgtttacaaaatacaattacaaaagtttactattcatatacaaaagatttagcacctagtgactaaacaacaaaagccctgatgtctcaaagatcgtacgctccaggcctaactgccccgacatgtacaatcttcacccgctcgtactcacggctcctcagctttagccttgcccttagctacacataaagatagcagtgtgagtcgacagactcagtaagaaaagcataacataaacatacaaataacccggggtataacctggcacccatacacccgatcataaccttaatccccgtgtcccacacggta

SEQ ID NO: 303456 - DNA, 1721 bp, Cannabis indica
ctcaatataccaactaatatcaagattagttaagttcgttattttcagtattgtctggttgtacagtgattacaatattaccaaaccaagtcttttagactattactatacaactatatagtctcctccatcttccatataattaaccatacacattatatatatactctttcctgactcccatcaaacaaatcaagttcctatatatataatatcatgatcatcatatactatacctatacactatccataatatacttctacacattataaaataaaccaaatacataacatatataaccatatatttttgtcacaaattatatacctttattgttattatttaattggcagtggcaccggcccttagtatatattgcacccattacatgcaatttacaagaaagtaaagtacaaattaattaccaaacagaacaagagtgaagagcgtggagagcttagattcgagacctagctatttctcatgcgcccattattatacacacacacacatatatatatatatatatgcaaattatatatataaaagtgatatcttgtcatatatttatcatatgacttaaaaacacacacacacacgatcacgatagaaactggacaatgaaaagtgtttcatagaaatgaatacatataattagcgacggaagcttctgacttgacgtgctgctaactcagcgctagtttctgggagttttacggctgtgtaggttccagccccaacaagtgcccctagagtgggtgccacaaagtatatccacaaagccttgtaatttccagctgcaactgccggaccaagtgttctcactggattcatcgatgcaccactcgatggcctataccatatatatatatatatatgtacgtatatgtaaattattaataagtcatgacacatatataattgttaatattaattatagtatttagctaggtaccctgctataagaatgttgagcatgacagtggcaccaactgctatcccagccaactctcccacggcacgagtgtcagtagccacagcagtgaccacaaacaagagattgaaagtgatgataaactcgagagcgaaggcctggccgtggctgacagaaggaacagtgactccaccgctcataaaggggtggaaagctcctttgagagcgtaggaggcacagatggaagcggagacctgggctgcgacgtaggcagggacctgagtccatgggaaatgacgcagtgcagcgaatgcaatggtgagagatggattgaggtgtgcccctgagatgtgtcctgtcgagagaatgactatcatcacagccagccccgcacatgcggcgttccctatcagtgtctctgctccgttgtacttctcattcactatcggccctgctgttgccccgaatatcagtatgaaagttcccacgaactctgctcctatctgcccttaattattattaatttctttattataatcaatatccattatttctatatataaattcaataataatatcatctaaacttccagctgatcaactacgtacctactggttaagtatatatattccaaatttcaacctatatatgcaaacaagttagctatggattatattgttaaaatattatttaaaaattcataacttaatataatataatagtttccgaatttgacacattttgattgtattagttaatcacaatttttttaattaaaaatataa

SEQ ID NO: 303457 - DNA, 1813 bp, Cannabis indica
tgatgtatgtcttgagctataaatgcgttttaacctaggggtcaaagggaagtaccgcatcactttttgtggaacttttttcccttttgactttttgtcaatccatcgactttcaccgcaaataggacaactatgttttgatgcattctctttccaatacaaacaacagtcgtacttgcaaacatgaatcggttgatatcctagccccaacttcctcattctcttcttggcttcatagtgtgatgaaggaatcttattttccttcggaaaagcaaatttcaaaaacttcaaaagttgatcaaatgaactatttgtccatttattaatgaccttcatgtgcaacatttttaccaaaaaattcaaggaagacagccaagtacaaccagggtataactcagcttcgacctccttaaacaattcatcaaaatcttcacccacaccacatccaccaccctctggaattccttcatcaagctcttcattagtattttgctccccaattatgtcattaatgacatcaatcatctcatctgttgttggactttcatcttctattactggaggtggatccacttcaccatgataaatccatttttgatatccaatgtgaaacccaaatctatgtacgtgaacctgaacaatatctagtttttgactcaacatatttaaacacttggtgcaaggacatttcacggctccatcgctattgacatgatccttagcaatatttaaaaatgcttgaaggccattccaaaactcatcagagttacgacgtctacatgtaatccaactcttatcaatcatcataattgcttcttccttgaaatgagaggagaactcattacaaataaaatagtgaaaacattgaaagttttttttatgaatttagtacttttatgattttacaagacaatctttatgatttatttgtagaaacccaatgattgtggatataattatttaaaattattatctagttatgaaattattgtaacatttatttattagtttatttataaaattattactttttaaattatttaatatatgaaaaatatttttttaaaacatgtaaattaattttttttattaacatgtttgcacatagatgttgatataaattacataaaacacaaattaatcatatttatatcacatgttcattaaacttgtaactaacaacagtaaaataaataataatagtaaatacatgcattttaaaaaagtaaatacatactgtgaaagcctcctccaactaattaagccctttcactatcgaagcttcctcctatgatccacaatcaagcttttcaatttagaaaagaaggaaagaaaaaagagccacacaaaaattaaagaaacaaattaattatattaactaactatattctaaggatctctttctttcttgttattccaaaaagtcttataatttgctaaaagctaaagccgattattttagttttggaactctgtacccaaaatttgtgcaagtcaattcaatgccaaatataatgtctttgttatcattgactaattataatttggtggacatcttccaaatttaagataaatgaattatgatccttcttattactataaaataatagtaaaataatttgcaactataatcacctcaattaaggctccaacagttcaagcctccaataagccaacgtacaagcctatttagtgaaacaactaaatcacacagcaaaaccagtaatatatattaacaaacttgttaatgaatatatattgaagtttaaatcactctgaacttcttttgttttcaatttactgcattttgata

SEQ ID NO: 303458 - DNA, 4490 bp, Cannabis indica
aaaaaaaatcagtatatgaagtaattccccttttaattttttatgttttaataattttaattgtagaattataatatacagtattatatttacgttttattattattttaatttatttataattgataaattcatatcttattattattaataataaattataaaattttttaatatgtcgtgttatgtttttcgagccaatctattcatgcttacgtattgtgtctttcgtatttctcatgtcgtatcgtgcttaaggacacatattttttgtgctgtgtcgtaccaatttataacatcgtatcgtgtcgtgtcgtacccaagcccgtattttttttttgtacctaatcatgctcgtaccttccggattctagccgatttcgtgtcatgttaaaaaacccgacccatatttacaacactagttttcattactctattttttatgtaattttggattgtacaaaccgtgagaattcttttcttcatctttgttttgctccctcttttatactggataaaaaaaatgctttatttaaagaagagatctagcataacatgaaatattcacaaagaaattgtccatacattttaatccaggacctaaaaactccatcttcatttatcaacaaagatgataatttaattatttgtttacgaaaccaaatagataactatatgcagacaatggtagattatttttatttggataaaagaattttcagccatccctctttcattcttagaaacggcctagcttttcgactaagcggttctctatttcaattctcttcttcatgaacgaggcatacttggaagccagttgttggtctccagcagtagcagaaagtttgcagctgagagatgtattttccgacttgtctttgtacatgagtgtgatgggcacaaaagtacctttattgttgcatagccaaccatgagcggctcttaatgcagctcctaatgaagctgaatctgttcaagtaaaacaaatgactcaataaccaaaataatttggacacttgatgcattacttgctaatcacaagtaattcaatatgaaaactatatatgttttgctaaccgggtctttgaactgtgtggacatcacaaccaaaaatggaagcaattgagttgaggatgctatgatttgccgatgcacccccagttgctattattcgtttaggagaaggcataccgaatctttctgcatgagcacgcattgacaggaactgaccctcaattaatgccctcacctgaaaatatgttgaatgtttcacatagaactcgggtcttaatctgtgtttagttaaatgacgattagttctttaagaataaaattaggaacctcggaaggaggatcaaattcctcaacttcgcgttcaaccaaaccttccagagtgtcaccattgaagttttcaagtatgtatcgatgaaagccaactgaaggataataaaaaatggcaaacaattgagatacatacatcactttagagaaaaagaaatgtaacatatgcatgatcatattacattgtataaaagagaacaatacacttaaaccattttccttctccaattacaattgagtggaagctgtttcataatgatatattcagtgccttgcacttttatttggaatgaatgcattaaaccaaaccaaaacaaacctgggagtggtggaaggatttcatgctccttatagtagaaaccaatctttccacctggatgcataaaaccactaatcagaaaaagtacaaattttaatagttttaacttgcattaaaagattgcttttcacaaaccattcagtggtggtgtctgctgcaggaatgaattgaaagtatcccaagatttttccgcatagcaatttcgaacatctaaaattaagatatggatcaaagcagagtgtcactaaacaaaacccaagaaccaattggaatatgcaggagggatcaattgatactgaagcaataccttcacgagttaaagatccattcttgtagaccaacattaccatgtatccttttgtgtcaacgggattagggaacacgtggccttctaatctaggttgaggatcatccgtaatcccaaagacctgaaaaacaaagatgacaaagttcacaatgtctgatttctactaactcaagttgcaactacactcgacactactgagcaaaactccatataaaggtcttttatttattatgaactatgctctgagagatgacacatatttcaaccaaaattctaatgtcgaattagaatacacatacagaaagaagtctttccattttaacttacagtgtcacttgtgccaagactgattgccagatcccctggggtatttatggtcaaacctgcatggttaaaatgcatttaagaaatgaattcaatgcatactatcatgtcatacaatgacatgactaaaaaaaataatgtataaaagcaggtgggatatgaagaagaaacatcatgcaccagcaaggctgttagggttgtctcctgaccactgaatgaccaggcaattcttgttgaaggagaacctgaaaacagatcattttaattcaggatgatcatataagagcagcgtataaagttaatagctgacaagatagagggagtatgctcatataagagcagagtataaagttaatagcaggcaagtaaagggagcatggctcatataaaagcagagtataagtggtctgctaggggagaatcctttattaagatagatagtacatccttcctgtcatatgtaatataaaaatttgatatttacatatataaacaaacatttacatagaacatatgaacgatgacctacaattcgaggttttaatgcatcccaaatcatgtaattccccaatatcagagtaattagagaacttcatatactgtctgttgagccaatcagaaatccaaaatagcaaatgaagagaaaagacaactagaaaattgaaaattaagcaaaacaaaggaagttctagaccttccatctaaaaagataagtgaaataactaagtacctctctacaaaatagggagcaatgttaccagctgttgcatgggcaggggccagctttccaagtttttgctccaaaccaggagcagtggcctgtaattacaccaccaaaaaggagttaaaatagagaaggagaggatccattataaaacatatagataaatgaaaagacgagaaaacaaaacaaaacaaacctccaaagctatggaagaccacttcctttgttttaaatccatcaggttcatccctgcaccatcagtttcatcaatacaagcatattctccaatgagaagagatgccatgaaagagctaacaagggagatcctttcagtgttgtgataaatttctggctgagtctcaaatatcttcctaatctgggggccagtaaatctctcatatgcccgcgaaccggtaagttgagatagctccaaagctcctccaacagctttctctatatttctacattgtactgtggtactgctgtccatccatataggtgattccttaatagaaaatgcatcaccaagctgttccaccaatggcttcgttggatccaatgatgataaaattgaagagcttccattcttccaatacacactaccatgttgctgcccacttccagagacagcaacaattttcttaagatctaaactcgatttcgaaagtttattgagtatgatatcaagagcttccacccacatcaaagtgggtgaaacgattcttccattgatggatgagtctctataaacaccatctttagttttgtaatgggtcaaatcagaatcaaaatgtaccagctctgaagccactatattaagattggaatctagcacggttgccttcaaagacctgatcaaattatacaattttttcaattaattaattcagatcactgtattgactacaaacccatattggaaatttttaatcctaatatgaagatcacatatttcaaaccctcattggaaaaatcatggcaaaactacatgaattgaactgggctattaatcaaaaaagaggaaaaattcaaacttactgagtggagctatcaaatcccagaaagtaagagtcattggggagagagaaatccgccattggattgatcaataccaaagcttgataataatcacgctaatctctgccaatagaaactgaactaatttcacttgtcaattggaatgttcttaagtatatataaataaaaaaataattaaaattaaaaatatcccgtgaataaaggatttgtagctttgaatttcggtttataaatggttggataaggattagaattaattttaaaatatagaaaagatttgtttgaattgaggaaataaaaatacgtataaataaatggatagaaaagctggaaacctcgactgcttcgaatatcaagatacggatggagcaaaattacctctccccagttcttgtcccactcctgtcccaaccagtaatattttgccacctcaa

SEQ ID NO: 303459 - DNA, 2038 bp, Cannabis indica
aaaaaaagaaagaaaaacaatagatctcaccgtttgtttaaactttgaaactcctcctccgtcacttgacctacaaaaaccaccttgctgatcccatccgaaggctaacattatccccaaatcaaatgaattaatctctaaaatcaaacattgaaatagaaagattaaaataacaaacatatctatttttttttcaacctggtgagaacgagcgccggaacgagatgcagcggaggcgacggcgggagattcagccggtggagtttcagaccaagtaagcagatctgcggtggatgtgtggggcttcctaaccggagtgctcctctccatctctttcctttttggcttaagtttgttgctacttcccttctttattcttcttctacttcgcaagtatggagtcttagagtgagcttaggatttggacaaaaatggcggagaaacgcacagccgttgtatctactaatataagtagtatagatttaagagattaaagaaagatttgcagaaggagaaaaaaaaaaggggaaagaggagggaggctttggggagagatgttagttggaaaatgacgaaaataacctcggtggccttcaactttattggcttttttcctttttttaattaatctgaattctgggtttgttggtgttttcgtattttaaatatatatttctatttatatattgggagtggatttgaagggagagcaagagaccatattgagtgtagtagtagctacttctcttctgtttcaaaacaaagaaatcattttccttttttttttttaattattaatatttttgttaaaggctaaatttgaattttgtaccgccccgaaccatgtgcttataccgccacgtgtcggttgttttaagtggaacaacccgaatattctttgctgaattactaaattgccctgtatcgtatatgtagatgaagtattgtatttgtatgttaccctttttatgttttattgattattattttagtaaacaaacatacaaatcttgattgaggaattatcggggttcacatggatttgtttgagtattttaatcaaaacttttgattttaattcgatgtatataaacatattcttcctaattattgcaaaacatctcacaagaaagagacaaacaaaaaagaagtttacctactctgcaaatattgagtaaacatattaagtgtttttataatgtactctaaaaataaatgcatctaattttttatatttaaaataattattattttgtaattacagtttagtcataatgaagagatgtactaaatttgaatattatgtattttatactttaaataaaactcaatttaatttattttttttcattatcaataaaagattatttggttcacatatttattttattattatatgtatgatataaaaattctattaaatccttatcattattgataattatagtattttctgcacagtagaaattaagtataactttatgatataaattattttagtctcgtaatttatctgtacactgaatttatattgacatgataattagcgatgtaatttacttacacttatataagtaaaatatttttccagtcattagcaaagtaagcctgtatcggatatattagttatacatcagactggatcgatattaacaatgaaaaagatatcataaacttatcgtaatatcttttctaactcaatgtcacttagtaactcaatgtcacttagttgatcttagatcaatgatctcaatctggaaatagttaggttcttgcctaattgtactattcgggttctttgatgtgttcgttacccgcttacctgtaggactagctcatacttacatcttagaaataccatactgcaattgagtgggagcgctaatcatagatatggaatctataacttctataaactcttaggagtaaaacgatagtttcattagagcttgactaaacgagtttaaatagtgaaatggtggagtacccatttcagtaattatattagtttattgaaatatcatttacaagtggctaa

SEQ ID NO: 303460 - DNA, 2028 bp, Cannabis indica
tttggttcaaatggttggtaccatactttttgtaagaccgattaatgagaagattttaatttttaaagtaaattatacacacctaagatatactatatagtaaataatatacgctatctaaataataaatataattaattgttcaaaaaaaaatatatgattaatgactccaaagttcaaactatatacaaatgtgtaactataattgtttatgaattgaattcaacgacaaatatttttacaatccttctctctttgtaaatcccttattaaatgactatatatgaacatattcaactatatatattatatgcttaaattatgttgtattaaattttatgtattgaatttttatgtgggatcacattatttttgtggttgacattatatataattttcatatttgaaatgtaaggttttcaaagttggccaatctttactaaagtgagatgacaagtactcttttattttattttactgagaaaattaggttagacaagtatgactattatattaggaattttaggctgcaataacagtactattatatttatatatacatatcttgttgaaagaaaactattattattatttttaaaatgagattgtttcaaacacaagaaaccatttacatatatatagttgtgtatagtacgcagtctattatattttaccaatctagctagactagtctaaataaaaatgaagaacgatctttagaaatagtaattcaatccaattaacttggaattcgaagcattttgttctgtttagagaaaaattaaataattgaaactagctatagagctatagtacaaacttttgaacacgctatacctatatctactatactagttaattagggaaatatatttggaataattacataagacaccattttttataaaatatttacatttttacgtttaaagatattttttttatattttatttttatttaacggttttccaaaaaataacacgaaaaataatataaaatcaataaaaaaacaacataaatgtaacatcaaaataacaacaaaaaataacatacatataacaaaaaattaacaacaaatgaacaaaatttcaacataaaagaccgtattttatgtaaataaaataaaaaaaatcgttaaaatgtttaaaattctataaaaccatatttttgttgtttttttgttgttttgtgcatttatgaaattaacccaatatattttcaatataagttaggggagtacttggtgtatatatatatatcattcgtttggaatgtcgcattaggttgtattttattatattattattaaaatgaattatatatcatatttttatataatactatattaaattttaatttatcctagaatagttttacatacaaatattttaagaactcaattaataaagatacgctgtatggttgttgttaaatgaatcctttaaggaccaccactatgtttctaaaactccaagaactattttaagaacatgcatttaaatgagtgttctttaaaaagtgttctaaaaaaggcatatttagtagtagtgacactactgttacaacaaacttaaatttaattttttttataggaatattatacgattttcaaaattgcccttttctttaataagttaactgtatacaagtatgaccaaataaggaatttttggcagctacataacattactatattatgatatttaaattaggagaaatgaatagtgctatatgaccattgattaaaaaaaaaacaattgtttttctcaaaagaagaatactaattcaaactccattatatacagtctactcaactgcatgttttacgtagactagtctacagaaaaccaaataatatcatgatcactttaattttcgatttcaaagcaaattattatatcctaattgcaaatagcacagaaaataataatatgttagaattattataagaagacttatatataagataggagtaggggtgttgataaaatagccgatccaattcaatccgcacaatccaatccaat

SEQ ID NO: 303461 - DNA, 2477 bp, Cannabis indica
tttctaagtatagaaaatcaaatttcccatttgaaattcataaattatttaattaaattaaaattattaattaaatttgtaaaactataattttttttaaaagtaaaacaaaaaataaaaagaatggaagtgcatcttcggccatcgtccttggcagcttcttattggtaaattgtcttgtgcacgtagggacaattcgaaattgctcacttttatggcacaattgaacaaggtgttattctcctctacttaacttactcatttatttttctttagattttcttttttaagtttgggaagaagattacgaagaagggcccgaagatgaggatattggaaaagttgatttagtccacaattgtttttttgaattaaaaaaagaagtggattttagtcctacatttgttttgtagtaaatttgataaacctgaaagggctataaatagagatataagcctagtttatttttaacaaattttatattaattgtattgtgaataccatactcaaaataaggtgtatattaattgtattaggaatgtggtattcgtttgttagattgtattactaagggaaaaataaatttataaattgtgaaacgagtgcatgtcacgatcacaggggaagacagtaatttaagagagcaatttgttcattaatgaatgtaccaaaaaagaatttagattagaattggggaaagatgatatacattatgtaatcccaaatcttattcgaatgacgaggtgtatcttttgagcgacacatggtgtacttccatgtacttttaagatttgggtgaaagaaatacttttcagtatatctgctcaagatgaataacttgtcaaatgcaacaataaaagaacaagataaaagttgtcgtacgtagcaaacgaagttaacctggacgacaagaaacagtcagcacctcacgcgatctgactagggtaaaacatgaaaaataaatctatataagttagtttcttgttctatatttccatgtgtaattatcataatttgggaaagttagtaattttctattttatgccttaataacttttgagaaagtattttcattataattattccctacaaatagtaaaatcactcagaacacttcgagagatcctctaacaaattcaagagattctctaacaaattcaagagatcctctaacaaatatctgaagaacacttctcgtgaaattggtaccactccaatcactcagaacactagaacaaccaatactcatggggaaactaggtcgggcattggagagccattaattagcgagcctcgggtgaccattgataatgataccgagttacataatttgagggtggcaatgtctcttattcaaaatcacacgaacacttttcatcacggccagacagatacttgagcagccatgaacgaagcattcacacaacaaaagaagcgttttcaagaatacatggatagagagactgaaagtttaagggccagcaagaagcaattgacaatcgatcacatgagactattgagctgataagataatttaatcaaccattaaatatagataatcaaaaataataataaaacaatactataattaatttaggaaaattctatgttccaatttttaaaattaagtgtaccaaacaactcctttcgtattttcaatgtttagatagttttaatcttaattttttatgtgacaatgtatattgtagttttttaaaatatcttgcaaatttttaataaattcagaataatttaacatgtcagaaataagattcaaaaaatttgtttacttatgcccatttttatcattttttaaaaaaattaattttgtattaattattatttgttattagtaatattgaaaatccaaaaacatttataagaacatttaattttttcctaaaattttttgtttacttaaacaagagagattcaaacttcttcatatttacaaactcatatgatatctatgtatttcttaccgaatttcttcaagtataaaaaaaaaatgcaagtttctcatctaaatcaataataatatatttattgatcaaaaatatactttaggtaagagttttttcaacaacaaaaaatatgaaaaattatttaatttttaatttcttttttaagaggaggcaagctttagaagtagataatgttcatgagaaaaaaaatactaattaataatgtgacatccaattttagatgataaaaaagaaaagctaacaaaaatattatctctctaaatagaagagttgacgaaattttttcaacatggtgtacattttaaaggatacaattttatagtgttgtaagttcaaaagacaaaatattaattatttctttaaatagctatacatattttttttgtaggagccactcacgtgcacctcactagttgattaaatataattagatattaattgatctatatattcctaagagataatttcaaaaaatataaaattacaaaaata

SEQ ID NO: 303462 - DNA, 2490 bp, Cannabis indica
acatcgacattaagtcgctatgggactttaaaaactgctgtctagcctccatatctgcagattgtagcatctggtttctcgagtttgcttgtaatttggcctggcagtcggctaaatcatccttagctctggcttctgcagcatgtaagtgagaaaaaccactcttgttgatctccttgaggacccctttcaatgctttgagctttgaggtaatctggtacatctttgttcctttaatttgttgcgcccacacctctctaatcttcctatcataatccgggtggttactccacaccctaaactacttgaagggtttcctcccattaggtatttcaggatgtattgtaagcagccccggagaatgatcaaagattccttcgtttagaaaaagtgcttcagtcgtcggaaacttagtgatccaacttggattagcaaggattctatcaatttttgaatagatcctatcctctccatgttctttgatgttccatgtgaaaaaattaccacttgctttaacatcttctagctgacatttttcaatacactctataaattcagcagccttatgaaactttactctatctcccactctttcttctctaaagagaatctcattgaaatcccccaggactaaccagggatcttgtgctgccaactccattaattccttccacaattctttccttccatctttatcattcacagcatatataaaagtaacaaagaatttgttcttcccatctaccgttgtcaccaagctatgaatgaattgaattccacatttaagaatattaaccatgaagctattaggattccatgctaacactatcctttcccccgcatgccatgctatatttgacgtaaaacaccatccacaaaaaacactagtatacaaagcccccaatttgggagccttgattctcgtctcaaggagaccaactaaaccaatttgttgttgagcaataaattgcttaactagtaattgtttttgttggttgttgatcccccggacgttccaactcaatactttatccattaggaagaggaggacctccccctcctccagtgttctgcaattcaatctcgatgttctcccctattccatctctctacagtggcataccaacatcagttaattcatcttcaacctggtagcagctagtcgatgttgtagacaacacctgaaaagtgttagccgtatctatcttcaaactagggggtttttctttgacttttcaaactttcccagctggtaaaaagccatctgagtcttctaatggttgcttccctttctttttgtctgctgcatattgcccaggagtcgtgtccctagtatctttgagtacccattcctacttctgccctgttttcttcttacattctattgtgttgtgtcccagcccatagcaatgaccacactttgttggattccattcatactatactgagacctccacattgttcccatattcatcttcaaattcgactacagcagggaaatcttgatacaaagaaacttcaataagaactctaggatacagtagcttatccctttctttagttactgaatccaccatcaccgaattgcctacttgccctatgatcttgaaaagtgacttctcaccctaatacttcagttctaggtcttccatttgaacccaaattggaactaagcttacatcttgcttcttaaaattcacattagggtcccaagccttcatgataacaggcattctattaaaaaggatgtatccccctgctaaaatttcatccctaactatggtagactcgaatcggattaagaaaattccataggctatcatcccaaccttatccactttaccaggccacattcttctagcaaatccatctaagattgacaaaggtggatttgcccctaacacataacaaacaattgaaggggtccagaatgagacctcatcctctatatcttccatctgtattttcactcttttcttttattcatttgacttaaaagtgctagccaaattttttctaacagatttagatcgcaggacagggggtacagattcgttaccttccgaaattttcgtggagaagagttgattcgcctgcagaaaaaggcaaactccgagcgaacttcctcttgctgttgaattgctttcagagatgatttgggggatagtggtgcttgaaacacatctgtaatctccgggtcttctaagttttcgccaccatcctcctcctcttccaaaaacacaataggctccacacctaaaatttcgtccattgatttcaccttccgagcaccagaactcgaatccagccctttcttcttcttctttccagattcttgtttcccaaatttgttcgacccctacgatgccttccggggacgcccacgacctaccatagccactgattcaaagatcggagtcggagagccctagcagagcacttcaagagtcaactcagtttttttttcaagagtcaactcagttttttttt

SEQ ID NO: 303463 - DNA, 2371 bp, Cannabis indica
tgttgttgttgttggtggtggtagtggtggggatgatgatggcaaaggtaaagataatcaagaagagttattaccaacctcttcatatgttgttgagcaagaaaatgtgtcaaatgatgatgacacaaatgataatcatatacatgaatgttcccctgatatcatagtcttacctgatgaggaggacaacacaattagggttaatcaaatgtttcaagacaaaaggactcttgtgaatacaatgagtatgtattcaattcgaaataatcatcaacatagagtaaagaggtcgtcttcagaagattatgtgttggtatgcttacatcatgattgtccttggtactttcgtgcttcgaaatgtaggaagactgaaatgtacaaggttagaaaattcaacaaggctcgtacatgtttgtcgaacaatgttgtagttgggagccatcgccaggcaactagtacggtagttggggattgcatcaaaacaaagttgttggattcggaaaatgtatacacaccgagcgacatcgttgatgatatgaatgaagattatagtgtatcgatttcgtatcaaaaagcttggagagcaaagcaaaaggcattggagcttactagggaaaatcaaaaagagtcgtatcacaaactacctggcattttatacatgcttcagaaatgcaatccaggtagcacttttttttatttgtcacaatataattttttaatttttgattatttttcattgtgcattacctctaaatgactcttaatggaatattaattcatttacaggaacaaaaacagacatagtaatggacagtgaaaacaaattcaagtatttgttttttgcaatgggatcatccataaaaggttggcatcactgcacaccaattatttttgttgactggacattttcacaatgtacatatggcgaaattttgttaacagcgagtgcacaaaacgcaaacagaggaatttttccgttggcgtttgcagtagttgactctgaaaatgctaattcatggaattggttcctaacaaaagtgaaagaaacatatggagaaagagatgggcagtgtgtcatttcaaatagacatgagagtatcgaaaaagcaaccaaggagatcttccctaatttgatgcatggtgtatgctcatatcatttactacaaaatatcaaaaagaaattcaaaaaaagtggtgatgaggtcaaagatgctttcaatggtgcatgcagggcttacaatgcggatgattttgaaaaatatatgaatgatttggatggaattgatgatcgcattcgagcttatttgcgtgatgaagttggttacgaaaactggacaagagtattcatcaacaacacacgatattcaacaatgacctccaacattgtcgagtttatagatgcttccattgaagaagtacaagagttgacaattgccacattgctagagtgtctaagatgtttggttcaaaattggtattcagaaaacaagaacaagtctttatcaacacatacacacctagctaagaaggctgaagatgtcttgtgctataaaagggaaaaatcattaaaaatgaaggtaatattattcaacaattatcagtattttttttaattgacaatatattagtacatattaattttttttaatcccaaatgcaggttgaaacattaagtgaactcacttttatagtgaaagacgggaatagatcatatacagtggatttggagaaaagaacatgtacttgtaagtgctttcagtacgatgaaatgccttgttcacatgcaatgactgctatatcaaacaaatccttgaattgttatgatttttgctcatactactacacgaaagaagcttacgtggcaacatacgaagaatctatttccccgttaggtgatccacttgtttgggatattccggaacaaatccaaagaacagtagttttgcctccccaaactaaacgtccgattggtcgaccaccgaagaaacgatataagggttgtcatggaaaaaactaccaaaaataaatgtctacgatgccacgaaagggggcacaacgtaagaacttgtaagaatgagcaaatagaaaaggcctcaaacgacctttaaatgccaactttatcagttttgtaattgacactctttttttcgttaatgtgttagaaatattttatactctgtagtctgtacattacttttaggttgccattttcttaaaatagagattgttttatatgtaaaccatctcaaaataaaactacctaatgacaaataaatcaatattaataatgataataaaagagtactcttatcgactatagattagttttggttttacaaactagcttcatgcaatgaaaattgggaaaatt

SEQ ID NO: 303464 - DNA, 2085 bp, Cannabis indica
actctcccttctttaaattccaagcctttacaacttcaatctgttttacatgttccatctattaccaaaaatttggttagtgtttccaaattaactaaagataataatgtcttccttgaatttcacaaatcttgttgttttgtcaaggacaaacaatcaggtgttgtcctactcaaagggatactcaagaatgacctgtacctattaggtgatggtcactctaaccactctcttcaatgtaatcttgctacatctatcttaggttcatgtaatacaatctgtaataaaacaataccttgtaatacatgttgtaactctactgttactgcagtctcagattgtaatcaattgtcctataaataaagatgatatttcttcttcattccctactgtctataacacaactttggatactgatataaatctatggcattctaaattaggacatccaacacctgccactttaagtaaaattctgtccacatcaaatataccacactctcttaagaacctcaaattttgtaactgctgtcaacttgggaaaagccacaaacttccttttttttatcttcaaagagagcctctcaaccactagaacttatccacactgatctttggggacattcacatattgtgtccaaagacaactataaatattacattttatttcttgatgattacagtagattttcttagatttttccactaacatcaaaatctcaagcctttgaagttttcattagatttaaaagtttagttgagaaacaatttaacctaccaataaagggagtgcaagcaaatgaagatggtgaatatagaccttctgaaaagtttttgacagatcaaggaatcaaatttcagctatcttgtccacacactcatgagcagaatggaagagtggaaagaaaacacaaacatgtgatagaaactggattaactttacttgctcattcagatcttgacatgagctattggtggcatgcctttcaatgtgttgtctactccataaatagaatgccaactcccataattggcaatatcagcccttatgaatgtttgtttcagcgacaacctgattacaagattcaaaagccctttggttgtacttgtttccctcatttgtggccctactctcatcacaagatggaatataaatctgaggaatgtatatttcttggttattcacccaaacacaagggctatttgtgtgaaaatcatgctggcaggatctttatggcttgaaatgtggtgttcaatgaattacattctcaagatcctattcctattccaacatcacaattttttacttagtatgatcaacaatatgctaatactaatgtacatcctcatgttgttcttgagtttgttgatcctgcacctgctgaatctttaaattccaactcaaacaacagccatcatgctgcaccgtctcagtctctacactcttcagatccctccaataccagacccacactatctccagcacttttatcttctcatgatagtgctacatcagcatctctccatactgccaacaacaatcctactgctactttagcatctgagattgttgcagctgctgttttagcacctataattcctcctcttgctacaccacccatgacacatattatgatcacaagatctcaacatggtatatacaaacaaaaggcctacattgccacaaaatatagacatcataaatctcttcttcgtagagagcccaaatctgtaaagggtgcccttagtgaccctgcctggaacgcagcaatgaataaagaatttataactctcaaaacaaatggaacatgatcattggtaccctatcagcctaatatgcatctcatagacaataaatgggttcatagaattaaactcaactttgatggcagtattgatcgattcaaatcaagacttattgccaagggctatcttcaagctcccggtattgattatgcagagacatttagccctattgtaatatcccgataagcctaatggtaaataatagggtttatatttatattatgggttaatcaggtaataagtaggattacgatcctactaatttattacagcataaaa

SEQ ID NO: 303465 - DNA, 1863 bp, Cannabis indica
aaaaaaaaaaaatcacattaaactcacatctgagtaaaaattatcttgaatcgatgtttttatcaaattttagcgtagaccatcgcaaatgcattgttacatgttaagcatcactctagcatcgtttttgcgtcaaaagtcaaatgttaagcatcaaggcatcagtaaaattgtagcgttcaatatcatttaatgtttcgtggaatatcacaatgcatcgttatgtaaatgcatcattttggcattatttttagtatcacaaatgcatcatttacagcattaattttctaatttttcaaactcattgtcatcaacacaaaatgtaatcgttgaatcaatcttaattgaacctagatactaaaaaaaaaatcaaatccttattctaaatactcattgtcatagattcttcacatttacactaaacatatagattcaaaattttgctttaagagattgagaagttatagaaagagtagtttgaatgggaggggtcgcttggtcaattttttagagaatagcaatagcatatttctaagtggagttttattttcaacctcacaaattaataaaaaaacttaaattaattttagaaataaaccttaaattaatattttataatttttttacatattattttgtgttaatttcaatgcttattttaattttgtcatcatatttttttttaagaaaataatgtatatttgtcattttttataagaaaatttttatataagttttcatttgtttttttttttttttttgtttttattttaaaatatatgtttttttgtatatttattttatataagtatatttttaagtaaaatgtgagaatgaaaaaattaattaaaaaaaatagagtataaattatgaatatatattttatataaaataaaaataataaaacaaacatatcttataagttttgtccagtgtaaataaaacttcgcattttcgagaagaactaaatgtaacactatttaaaacactaaatgtaatttattagattaaaattacaaaaaaaaaatccattatttaaaaaaaataattgaatttaacactaaatgtaaaagaaaaaataagaaaagaatattgaaagtaaattattagattcaatatatgttaattgtttttatataaattcttaaagagtgtaaatataatacctctttaaagagtgcttatttttttattagagaattgttaaaaaaatactattgatgcttagcactttctttggtgtcatattgttattagtgtaaataactatcgagtcccatataaattatgaaaatagcttgtagagaatatcactaactaattgtagggtgccaactatagaaggtgatgggcaccaatggtacctagcacttctagacatatcaccttacaattcgctagcgatactccctaaaatttattatattaaattattttgtattcaatacttaattaaattaatagcagcattaacatataagagtgtactaagcaccactaagcaccagtggtgcccttttaatatttcacatttattaaggtgcatatcgaataaatatggtacacgtatcaagtttttcaaaagtggtgtgtattttttggaaaaaaaaatgaaaaaaaaaaaacaaacaaaacaaaaggtgtgatttatcttaaaagttagttttttgttttcttttcttttatttttgggcctgggtggtccttcactgattgttttgggatttggtgggcttgttagaaatgtattttgggcttttttctatgcagttaggcctgataatgatagggaaacttaccaaaatactggaatttgggttaacttttacaaaaatactgtcacacggaaattttttcaaaaat

SEQ ID NO: 303466 - DNA, 2406 bp, Cannabis indica
gtggctgcctccccactgcttataataccatgaatcctaaaattcaagtcaattgactatacgagattacaaccatttcactttctttagcattcttaggtgtgatgtatgtacatgactataccatatcacaccttttattgatatatgaccatgcaaaataaagcaagagatatatagttcaaaaaataaatgaaaaacaaaacttgtgacgtgcataagttgatagagaacccatatgaaaacaaaatacaaattatctaatttgaccttttctttaactgtatgtatatataggtggatcaatttcagttatatatatattttctcaaagtgaatatataattatttttgcttcaaatgatcacctcaaaattgagtacaaatacagtacacatcattttgctgaactggcatgttgaagaaatatggttcacaagaaaggaattagctaccaaatgggacacttccaaatattgattgtgtgacaggtaataatgtgtatgtatgtgtatatacataggagaaatgctaaaggatactactggtgcctagcactattttatgtatcagtattggtattggtccaattaaacatcggttttaatagtttttagggagtatcgttacctaatcgcaacgcaacatgttaaaaagatactaggtaccaataataccaaataacaatgcctatatatatcgctatagatatgaatgacccgaaagtgccactcagaaaatgacttttaaatgtggaccatttttaaattgttaagatgcaaagccatatgtacccgttacctaactagctagcatttagtgtggcccatcttttttgttttaatttatacagtgcttcattattgtaccaataaacaaaagaaatgaaaccatatagcttcatatattgaatgaatattatatgaaatcgttattttcctcgtctatttaagaccataatttatttattagttataactactataaataataataatggaaaagatatacaagtccaacattgtatgattaacttatgatttaattccatatacaaagagaaaattgtgtactcaataataaagagctctcatcgaattaatgaaaaaacacatgaatgcgcagaatattttattcaatatatttttacacattttacataaatcccaattattattctttctatcttctttacagaaaaattaaaaaagaaaatacaaataaagtgttgttcactattttacttttcgtgaaaaatgattaaacttttgttgagttagcacgtgttgaattgaataatatttcacatcttcaaccttttcatcttccaagataacgatggtgtaaccctaaaatctaacacaaatacacaaaatggaatttaaagctttctcaatctgtcataagcttgttattacttatttagtgaaatgaactttagttcaatcttttttattagatttatgaaattagatctacttagttagttagccttcacttgaaagttttgtttttaatagattacttatgaaattagatctataaacaatactatcaaaagactacttagtcagccttcacttgaaagttgtgttcgcttttgtgcatttcagaattgcattggacataatttcatttaactttttaaatatgagaaatgttaaaaggtacctatagtgttgattgcttaaacatgtgtaatatcgttattagtataatttaatatcgaattttatttattttattttaataaataatataagaagttattaaccaattacttcatcatgatgttaagtaccatgagtgcttcatagcaatgttcgaattattctatttttcctaaaaaaaatatttataataaaaaaatgaattgtgtccaaaataaactaaaattacataacatgaaaatactttaaataaagatcgataccatttattttaattaactattatatttaatttaagtttcaaacaccattttttgttatcttagtaaaatatatatagaaaaagaaaaatattctttcaaataaatgtgtacaaagaaaaatgttaagggatatcttaaagtatcaagcactacaagagttatcatatttttattggtgcattttaatatcgagatccacatattttgattttataaataatataaggaaccattaactaattacaaagtgtcacgtcggtgtagtgttaaacacattaagatatcaaataaatactcatgtacaaaatataaataaaaaactcatttgaattttaagagtagctccttcaaataatttagtgaaactaagagggaaatttgacaatacatgcttaaaaataattggtacactaaaaatatgctaggatattttgcatcatgcaaaatatacttaaaccattttttccttacaa

SEQ ID NO: 303467 - DNA, 1220 bp, Cannabis indica
atcgccatctttgagccatagttgtttacacctttgtctctaatagatctctttctgatggaaaatagtattcaacttcttcttttcctcctcaaataaagagcaagatattgggtcatgtttgtccttcaactgcgtaaatgactttttagactgagctattctgcttttaaagttccccaagtagaaaggatttcaccacaataggccaccttctcaatcacagagacattagtttttgtttcccacccttctttaataatatggagacacataggatcagtaaaccaggcgttttcaaacttgaaagaattcttttgaagaagagataaatgtgtgataggatccaagaacaaagcactatggtgggagaaagtgatatcaatatgaaaaagcttagctattgagaagacattaagccaagccaaagagaccaaaccttgatccaaacgaacctcaacctaccagttagaccccttccatcgttcccaagtaaattagtacccacctaaatctaaattgacaatatctaaatcagaaattaccttttaaaatccttcaatgagccaattcggatacgactttccaccacgcttatcggcttgagaagttacattgttaaaatctcccaagagacaccaaggaagattagattcagctttcaaacttctcaacaaattccatgtattagcacgaagactccatttcggctccccataaactcatgttaacctccattctatcataccaggaactcgaataacaacatcaatatgattaatagagaaactaaccacgttttcctcctcacaaactctctagagaaaaagtaactcccccctctaacctgagcttccacaataaatgtaccatcaaactgcaaagcagttcagaccctctctacctgatctttgccacacaaggtttcactaagaaacataaacttaggcttctattgagatatcatctctttaaggaattttagagttaattggttcccaaacccatgaaaattctaacttaagcaactcataatgattggcggaccccattcaaaaggtccgcctaagaaaagtttttgtaagcccaactccattttgtatttcctcagtattacccattttcccaataaaactgttgggttttgtgccctaaataaaacccatttcaataaaatcagatttacttattaataaagatcagaaataacattttatgtt

SEQ ID NO: 303468 - DNA, 1906 bp, Cannabis indica
taattaattttttttcttgttacattggaatggtcattccttcctttttaaaatggaatagccattccaccaaaatggtgaaaagaacattccattggaatgccattccaatactttaaaatgcaaccaaacaaaggaatggaatgaaaattgtttcttttccattccattccatttcattacctccaaccaaacgccacctaataacctacttgatggaagtggtattctttacacacaaatgtcaagtttgtttgtaccatacacaaacacaagtttttttattttttatttttcaaaggaaatcctttatatactaaaggaaattaaatagttcaattcttgatatgaaataaaagaagctgttacaaggctagttctacaatttcctccccgctcttccatgttgcaagaaagagaagagagttcaaattaaaaatgtaaaataactaatggaatacatattatattaagctgtgtgcacccaaccaattatgaagaaaaaagcagaaacaaaggaacctaattgggaaaacaggaacataactacccactgtcaacaacatcaacctagttaatactacctcttatgatgctttctaatcaatcttcttttctttcaatggaccttttgggattttactcaataccttggcgtcaaaaactgcatattgcttcttaaactcgattaatgccttctctccaaacgagtccacatggtcttcatacttctcgtagagcactggcaccgtgtgcagcaagacaaatactgttttttggatgacaaaatggtatcatagactgataaaattctagtaggaagataacagaaagtggtaagaaaattcttacatatgtagaacagagtcatgaaattgcaccaagtcccaacaactgagagaacccacaagccggcaacgacctattaataaagggaaaaagaatacaaaggatattttcaagatacaaaatggtcactgaattcagaaagagcgatgagaacttcggcaattgtgtctggcttaagagtcgatactaatatatgtcataatgtaggaaaaggttaagaatcaacatacaccaagaaacgttttgaagtctttcccagatgcaatatccctcaagatagacaatccataatttagctcagctctcagccctgaagcaacctcaaggacacatttctcaggaattcgaacttctgggatttgtggtgaagacctagtttagaaaggaaaaaagaggttaggtcttggtttttatttgtattatttagagaaaaaaactttaaatatttaaatgataactttacttgttgatgaaggtagaggcattggaccacaggaaaagaagagccacagaaagtatcattatatggcaaaccaaagtgattaaatgatattcaagaacctcaaagaggacccacaatgcggtggcaccaccaaggacacctgcagacaatttcttgttcctccataggaagacatcagcagctgcaaccaacaatttaacacaagtcaatgacaaacattgagggccacacagagagaaaacactgtgcaggtcgaacttctgctactgcttgaagcattgaaattttcggaagttcaatgagaaaaacaaatcaatgaatttaaacatagaaggattacgaaaaaaacttctcaaattttttaatagcatattcaaataaatagctcttaaataccacaaaacttacaacaggaaacaatgaataggccttgcccattagtgcatcttccctaaataaaaatgaatgcttagtacaataattcaaaggactaccaaacaaatacttctattcccttcgtgttgtattgtattgtattatattgaattggattatgtatcatatttttatataatactatgttaaactttaatt

SEQ ID NO: 303469 - DNA, 1658 bp, Cannabis indica
aaatacagggtccaattggtaacttttgcaaaacagagggtccaaatttctcttgtgaaaataagatctttgatcttcagttagttggagaaaataaggcttgataaatttaaagaccaagagtgtcccttagagtgcaaagaaaatagggacaaatatgcttttgaacaaattaatgaaataaataaaataaaaatgaatccatgtgattctattttagtaaaatgacttttctattttaaaattgaaaggtagaaatttctagtgcaagttgagaaaaaatttaataattatttttatgtattttaaattttattttatcacatttttattcatatttttagtctcaattatattttcattaatcccaaaaagtatccttaagattatagaatcttgttcaagttagtaatcctcgagtgttttaattctttgttcttaattcatattattttatttgtaatatttagatttgagtaatttatgttcattttatccctctcttctttctctatgtagttgtatttttaatatttgtatgttttaattgtttttagtgaaatcacttactgattgaaaaagttgaaagtagtcattatataatactatacaggaaatatttttcgtgtcagttgggcaccatcacaaaaacatcttttgtgtcagaatctttttgacgcaaatacacgtgacgctaagtgaggagctgatataatctgtgtcacctcctacctaacaattaacaaacgcaaatggtgtcacttgcgtcggttagtagttgatacggttacactaacacaaacgtgcctggccttttgtgtcatctgctaactaacccaagtgtttttttatatatataaaaaggcaaatgaaactaattagacaaatgtacaccaaaataaaaataaaaaagatattgctataattaatgagataattatttttgatgaataaaaaatatactaaaaggaaaaagactcttccattttgctaaattacgtacatatattgttcgtttggtacgccgtattacactgtattgtattgtatagtattatattaaattatattctatgcaatatttttatataaaattatatgtggtattgaattgtatggacacataaatatataatattttagtataaatcaaagtttaacataatattatataaaaatatgatatataatccaatttaatataatacaatacaatacaatacggcctaatacagcgtaccaaacgagcccataataaattaaaacatggaagcacacccacctatatccattactgccaccacgaacaaacctgccaaataattaacatgattaactgaaaaatcttcttgaaagtgaagaaacgaaaattatgattcacttgcagagaccacaaagatatagttgtaaattaatgtggtatttgatcctctaaaccaacctgaaactaactcacctacacttaactaactttttctgttatgttagttagttagttgttgccggttttgcacctattttctagctgtgagttttacctatatataggctactcttttcacatttgtaaggagagaattaagagagagtatagagagtgagtgcttagttttctaagctgcgtaaccatattcttgaataaaactcatttcaatata

SEQ ID NO: 303470 - DNA, 2078 bp, Cannabis indica
aagggtttgatacaaaagaagtaccctttgtttgctgatgctttcattcttagacactttcgaccacgaaggtctaagaaatagatttcaaagaaagaaagagagaagaagaaaaatgtttgttacctttgaatttgacctagacgaagaagcttttcactaccatggtcacaaaaacaactcatgatatctcagaaaagctcacccttttttccttttttttaacaagacatgatctgagttagagagttactagtactacatggcttttgatcaaaaccacttccattgttgaaggaaagccatttatttttgggtttcaaattacttctttttttcttgtggtggtaatgaaggttttccacttttgagatcagcaatatgtttagacttgattggagagtatatttgaatcctaaattgtactgcttttgtttagttttcatgcaagtacaattttcattctgataaaaattcaaacttgcaaatgctttcacaacaacaatcattttgcattttcagaagttcatgtttctttatcacctttctcttcttttatataatgtagccacaaataaaatttaagttcttatgttaaatcatttcaatttttgtacaagacttctatgtttaaaagatgagttttgaggatcagttaatggatgtatcatgtagtaaaaaattaatcacaccaaacatttatacaacttatcaaaacaaaacttaggcagaaataataagctttagaaattaaagttttaatgttttataattagcttaacaagtgacgataggatgacttgactgaaattaaacaaatattaaataatcaataactttttatttagggagtgaaaccttcaaattttattaattatccattttggcccatttcatcattataattttatgaacactttttttttaataatgtaacaataatttttaaatagtcatatatctgtaagagaaaatatatttatagtggctcatgactttattaaaagtgctatattatatcgtgattgtatgtttatttagagtttgttctaattcagttgttacaatatttcattacagaagttgatggctaaataaaattaattttccatttcaactatagtgtttaaatacattttttagctaaaataagtagtaaatcttattgcacacaaaaagtaattctctttaatagaaaatagatatggagttctttaaatgtaaagagctttttacatattttttgttttttaaataatattttcattattttattagattaatatatttattaaatttaaattataagaatatattaaaataataattttttaagtttaaaaataattaataatggggctatctttgtctcagtttgcttctgcggttgccctatgttgggtgttgctccatgtggattttgtcaacgtcaatgttgatggcttttgtagtatgagtatggtgatccacgacaatcatgtagcacatggtcggccgttttcaacttgaagtggttaaagtgcttgtcttgtataataatgcaggaattcaatgtcgtttatttggattgaataatgttcgtgtgaggcttgctgtcttaatgtagtaaataagattaataataatatttttttggacttttctttaggcttaattcttgaagatgttggttgtaattttactctatttaatagtgtaagtcttttgtattgtcctaaatttataaactttattgcccacacctttgttaagtttgctttatttgttgctactagtgagatttggtgattgtgctattcatattgtatttggaactttgttatagttgagacctttgatcaataaatgatcttctcctctccaacttttttagagtggttgctctttagggtggtgttagggttttctaaagtagaaagtatgattggaatgagattaaaatataaactttttatttattttagctaaaatttaattaaaatataaagagtgctctcgaacgtgtcgtcactagtgaacaattcactctaagaaaagaatattgctataaaataatataatttagagaacaaaataaa

SEQ ID NO: 303471 - DNA, 2622 bp, Cannabis indica
attatattatctttctacacattagcaatgtgggactctctaacaaatataatgaaagtagtagaattaatagtttagctgctattaaacaaataaggtatataaagatagaatatggtttgagatcattgtaattgtatagggagggaagtgatctgttgaactagtggaacattgatctacagttttagtttatggaatataaatggcttatttactccgaaaagaaattaaattaaataatatgaagctatttatattatatatgttcgatgatataatgatcagggttctggtcaaaacctaagttataattaacaaaacataagatgtaatgtaaccaattataagcacagaagcaatatacaataaaagagtaaataaaaaaattcatatgattaatataaattaaattacctgttgcaaatgcttgttttcttcagaaagcagaactcccttcatattagaataacatttataaataaatcagtcttgcgttatggtaattaaacattaaaaaaaaatccattaattttcacacaatagaaaatttatataatgttttaaagaaattgtaaagagtgaggtataacaaacaatacataattctatattataattaaagtcataaaagttcaaaacaatcaacacttaatttcatatcaaagtcatgaaaaattactagttataaatctcaaaagcataataattaataaactcattaaatttccaaatagttatcatttattatcaccattgttgggactttttgaaaagtattcaaattatatagctaggtagagcatcatcattttcattttcccctccttcaatttagggtttcattcatcttatctatattttattcaataaaatctgctttaaaaaaaaaaagtccaaactaaagttctcaaattatttaaaattactcaagttagcaaacaagaaatataatctaacacacaaataagttgaggcgtgcgccttagtacgcctctcaccaaaggcgcgcataaggtgtatgcctcaatggcaacaaaactgtatcgccttgtggtgtgcgcctcgaccgattttgaaaaccatagctagcatataattactattatttatcatattctccaaaactcacaaaatattgacaaagcatatatttgtttgtttggcgcatttctttgttcacaagcttataacaaaaccaatttatatagcttcttattatcaccagtaatatccatattatctatgtctataataataagtatatatacacataagaattttttagttgggtatcacttttgtccctaacatagaagtattttttgttttcggcacctagaaaaattgtattttaatgctttttttttattatataacgatgtacactatagttatattatgcatttggcatattttcgagaaattttgaataatttaccgcatcaaaaattaagtttaaaataattagttgcatgcatacaactaactatttaaatcgtatttttgatatcataaattattcaaaatttattgaaaatagacaaaaacaaaacaaaacaaaaaaatctaccataactataatatactcctttctattgaagaaaattgttgttattaatttccctatattctaaaaataggtatgccctacggtaaaagtaatgttcttacctcaaaaatttcaaatacatataaatacacatgcaaagaatgaactatattaaaagtgataataatgaactataaaatcaaatcatatatggtagtcaagcaaatcaaattacaatatatattaatatatatatatagatatatagatatatataatacatttttttggtaacaatagatatatataattaatacaatgataatatcttttttgttccaaagtttagcacctgaccttcctcttaagagaatcaatttcatgaataaacttattatcctgaagcaaaaataatgttaagaaaaaaataatgtcagtcaaaaattattatatataataaagacaattattagtattaaaaaggaattagaaaaatggaataaaaccttagtttctataacacgttccaagcctgtctcaatcattttctctagtctctttaactcttcaaggcttaggttttccagtttttcacccttcaaatgcctgcattaatacattataataaattatatatatatattgaattaagcatttaataataacagtataaataattaataataatataccttatttccattgtcttctctgcaatttccctagtcaacagggcgtgtctctttttctcgcaccaaaaaagaacaatgctaattatttataaaattaattaaatcttttactgattcatttaattatataatttgtgagattaattctccaaattatataaatatatatatatttataccatcagcagttaatcttaactgactaattcaagatctttcctctattattggaaattagttatatatacagttatgtatagttatgttggttagagagatttaaagtagtaagagacgttcttttgagtgaggggttttggagtacattctaaattgttgtgtgttgttataagagagtctatatatatatatatatat

SEQ ID NO: 303472 - DNA, 2849 bp, Cannabis indica
ttcacttcattacctccaaccaaacgccacctaaattttaaaatgtaaactaaacaaaagaatgaaataaaaattcttttccatctattacctccaaccaacattctactacttccaaccaaaagcaacctaaaagtaaggagaagataaaactttgaagggaagaagatctgtggttgaaccatggactaggagccaaattgaaagaataagagaactaactaaccctccccaactcgtatgttctttgatttctttctttcaactgcaagtttagattttggctgtcccaaagatttaaataagtttcacttcttcacacttgattataatgagggcaactcaaatttagcatttttaaatctataacgttactccaaaagtaaatcatgagcaatgagaatatataagagcaaattcctaaaaataggtatagttatgttttattattgcatggtaacattgcttttcttgtccttgacaacatcaaacatgttttgccaccaatttcaagagcaaggcttcacaagtacagccgtaagatgcttcacgaaacacgtaaacagacctacatgtccactgtaatcttcgaatccatgtgagcaaactcttggaaataagctttgaaatgctgataagaatgcttcacgtcgtctgtagcacacatttctcgaatgctatgcatcgaaagttgtggagcaccaacatcaactgtccttattcccacgccactcgcaagaatggggccgatggttgaaccgcaacccatgtcattacgaacaacaaaatcctgcatttcaagtaatatagaatcaagaaacatgcttacagatccattctcataaacactccagtatcccaacttgagaattctaatcactttcttgccaacttccttttgtctgggttttctctcgagcacatttggaaagtgaagtacgaactactacattaatagaacttgtaacatgcaatttttcacaattccaatatccaccagaaagaaataaagctgacctgggtaggaattttatgcttggatgctatctccctgaataaaaaggaagtgattgaattggttgcatatcgttgattggcattggtttttattacaagcccgccgtgcaacttgggttgatgattctcttcatgtttttcctataaagatagccttattatatgaacattggccaaatttacagcttggagtaaaaatgaaaacaagaacataccatataattagggtgcagggcatgtgccatgtcagcagatacgagaaaactcttttgaatggccttctctaccacctggaaggaaaacaccaaatgggcggaaaggaaatgtttagatgaaaaacttagttatgtgtgaagatattatggctattcaaggctctaacattaccagccattagtcatggtggcaagccttatctgtggacggcaaacgttttatcccacaacaccattaattcaaaatgaaataataacaatactggataactagaactttaaaatgaaaatattaaaaaagaaataatgaaagatgaaatgacaccatgtggatgctacctttaaatctgaggtgaaggaatttgtaatccgtgataaggcagttagcatagctggagagcctgctccttgggctgaattggatcccacctcctcgtgatcaaacaaagctaccattctaacaccagcctcatcctcaaggctgttatcagaagaagtggcatctattaatgcctggagtagaaaggcattattagttaatactgtttacaatatgaaaagacaacgagaagtgagaatgtctatcgagcagttcaagtaggaggcagaaatacaatcccaagttacgttcaaggttacaattagtcaaccacgtggctttagaccatgaccattgaatgatattttctcagtaaaccatcagatcacatatcaaatatgacaattgacattaataccctgcttacagcaaagtcacctacagaccattcagatcaagaatgagattgagaacctatatgcattgcatgactccaaaatggtgtacttggcagagaggtgcatcttttttatttatttttctattagaagcttagctatgagcttgttatatgcattttgaagtaaatataaaataacagttacaaacttgttaccttaagagaacaaaatgacatgcacagattatcaagccgccctgaaaatataaattcctttgtggcaccggctattatgcttggttgagtatcacaggcttgcaactcaaaatcacaaatatcatcgggcttacatccaagctgacttgcaagaagctacaaggggaaaatattaacatcacaataaatctatcatacaaataataataataaagaatatctattattcaccacctctttcctttagtttgtaatctaaacaaacatgaaacttcaattttctctatacacctcccccctgattaacaaccccatcctcatatatatatatatatataaatatatatttaatacacacacataaagagagaggagtcaaatagaagcaaagaaagagctgtgttttcagatgttaacctgaagtaaaagtgagtggtgcttcgcatcttccaaggttgttttctcattagatttctttccatcagtctgagaatcactttcgaccggaccattactagcaacaactttattgagctctgcctgcgaatagaagcaaaaaaataattgatgtaagctgctgcagtaagccacggagtgaaaaaagttttaaggaatactaatttacagttaaagagcaaactacaacaaaaacttcacgggggaactaaattatgtttttcga

SEQ ID NO: 303473 - DNA, 2012 bp, Cannabis indica
tatttttgtgggcctccttcacctataaaaagataactcccttagcttatttttcacatttaaaaaactacacacaaggtcaaagcttctctctctagagtttagagtttctaatacttagtctatttttgtaattaccatctcatgagaaataaaaactcaaaatagacgtagtcccattactatcgcgatataaggggtgaactactataaattctgtgtgtctctctaaattatttacataaacttattaatcatctcgacaatctattgagctgatgttggtcacttttcagcgtcaacaatgtgattaggggtgatgtattttttaagagtctaattatcaaaggcttttaatgaaaatactaaactgttaactcagaatttcgttaatattaaatgaggctcgagtaatcaatactttgaatgtttaatgaatataaataatatatacaaaaaataaagatagggaattttttaatgtggttttgcaattaattctacatactcaagatataagattggcagtattttttttagtaaggaatttttgttgtcccttttacattggttttccctctatttataggctcaacaaatggtagttatttaattctatccttataacggttagtgaaacgtgagcaactcccacacttcatttatcttgtcttataggcagaaaaatttatgcataactgcatatattcaaattataagataatttcagttatatttgatcttatcgggaacgtgctacgtctgacctgttctttaggtgatggctttttagttcttgggttgaactattctatctgtgacttccttcgaaggatggctgggctcgaaaaatgaactatcctttatccttacaatgaggtttggataattttatacaatcttactcaaattgtatcccatgtgttttatgaatgttgaagcccttcaatctcgcaactagcttagctttcctctcctcatcaattatatacttattcaatagtacgagttggatcatattgccaaactttaatatacatgtcgaatattggcatcccatattaactgctcaaaatatgggggatgattttaaaattttacaagtagtcctaaataactataacttacacgatcatgaaaaaataattaaaaaactttactcgacgttgaaacagataagggggtctacgagaacacctattttggtctacaatggtcttaaattaatgcagtgtactcgatcaatagataaatataataattataaaaaattctatatttaaataatataataataaagaatatttattttgtgtaacttttaatgttttagtgttgtggttggaatggaagagtctacgacatcatatttagtgttaatttagtatggaaggttggagatggctaaggtcttctatttcacttttattaaataggcataaaatagataaatgtatataggatattctatgggaaatttaaaaaaatatgcataaaatactctaatattttatgcttaaactaatacttttcaacattgaaaatatatgaccacttttccaaaactccaaaaatacccctctcaaaaaccccaaaccctttctctctccttccttcaaactcgaacccacatcgcacaaccccccgcacaacccacttcgactgaccactccgaccgagacccacacccaccattccgaccctcatcactgcgtcacggaggagacccacttcggcacggagacccaaacggtgccctacaatgtccaaggttcagatctgcgatttggggaaatcgcagtttgggaaagacgatggcccgatggggaccccgatagggtccgatggatgtgcgaaagaattctatttttgggtctgacgggtccgatgggaccccgattggggttcgatgcatgtgatgaaaaaacttttgggtccgatggggaccccgattggggtccgatacatgtgctgggtaaaaaaaaaaaattgggtctgacaggtccgatggg

SEQ ID NO: 303474 - DNA, 2387 bp, Cannabis indica
agtgacatttcttgtagtgaaactaactcacttagactctagtcgtactcgcctcacaagtatgtagggagtacccttacaaaaccatttgctcttaagcttgaaagaaacaattactctctatcgaagaatgtacatacaaccatagttcgcgttcatcatcttgacaaatatctgactggtgccaagaccagaccagatgagttccccctgctgataatgttaaaggagatcaaactcctatgatacaagaccagttattacttggttggttatatggttcaatgacaaagggtattgctacaaaggtaatgtgatgtgactcttttgcagcattatggcatgccttcaaaacgttgtctagatctcattccaaagctaagatggatgagtatcgaacaaaaatccaaaacgaaaaggaagcatgaacatgacagagtatctcaaacaaaaacaccaatgggcaaatgtctgaccctggctggcgatccatatcccaaaaaacttattgtttctaatgttcattcaggattggatatcgtatacttacctattgttcttcaaggttgaagctcgtggggatctatatcctgggaagaattacaagatattctacttagctttggcagcaagttcaaaagacttagtgccatttatggaaccaacaaaactaatgaagctcgaccattgccctctactaatcttgctgcaacatgttcatttgattttcaaggaggaagaggcgcaaattataactctcccgaggacgtggtaaatttggaaattataaaagtagtacaagatctcatggaagaggtcgttgttgctttatttttataatctatgcaagtatatgtaatctattgttgttttaaactcacacaggtgaggttgatccatagaaaattgttattgagcaccactaaattagatttatgttcttatttggtaagatcgataaaaaggttgaataattgaataactggaattgaaaataggaaaataacaatgaaaaaaaaagtgtaattaactatggatgaaggtttaggaatatgaatcttgttagttcacttttctaatcgttaatgttaattattaatttctctctttaggcgatgacaaactatcaaaataatcttaactcttctcagattattaaggtcctaaatcttatactatctacttacatttttgaagtaaattaacatataacttgcattaaatgtagaatctaaaaatcacataaattgtgtaaatactcttattttacataaaaacttatggttgtcctattaaagcattgttaatattcacttctcagatttcatattaagatcataaatcacattaaagatgaccagtctaaaatatgtaattaaaataaaaagaacaaatcacaccatatacattcatcatatccctaaactggaattctagttcatgttcatatccataataaaactaaaatagaattaaacataaaagaaataaaaggagaagaaagaaactgatggtggaatgaatccgggttgccacttcactctcactgccatcctttactgcttttagggtttaaattctgagcgtccctgcttccttactcgaagtccatttaaatagagtcaatttaaacttcaaatattgcaaaaatacaaagtttccctcgagtagtatggacattctcactgcagctataaaatgtctcgtcgcgatgaggtcacctcaagaaaaactttgatcctctctgcccatatctcgccacgaccatgaataaatctgcttaagcccgagttgggtcttttattctcgtctggccactctcgctgtggcgagcattggcctcactgcggctaaattgggaaaataaattcctggtatttttgcgtgtttttcaccgcgaccacaaataaatccactgcggccagatggatcttcaccacgaccattgtacgaccccaaaaatattttttttttgacttttcacgctttgcacagtttaaaaaaatgtctagttctacaaattaaaagaacaaaaattataaaaactaaaaagtaagcaaaacaaattgtaaatgtcttaacataaataaaggaattaaaaacttgagttgcctcctatgagcattgtctttattgtcatatagtcggacgctgaatttttttcttcaaagaggtgccaatatgatggcggaattggcttggtcaatttgacctcccaattagagcttcaatctttgtccattgactttgaaagtttccagtatcttgcctttcagttcttccgctccataggggaatactttgaccattataaatggtccagaccatctcgacttcaatttgccaagaaaaaatttcaaccttgagttgaaaagtagaacttgttg

SEQ ID NO: 303475 - DNA, 1539 bp, Cannabis indica
aacctgctattataggtaaaaaaaaaaatgtaaccatgatggttacaataaaaatataaccattgagtagtcacccatataaatatttatatttataagcttcttctgaatcgtggttaactatactttgccttatacaataaaaagatctatttgttacaaatttttatataaatatatcacataataatatttctatacattttcttttccatttttatttcccaactaattagggaatcactctatatactatttttttaatatatttttttattttttatttttatggtttgaattgctctggtgattactatgtggatttgaattgcaatttaagttgctccgttagttgctatgtaaatttgtataaaaatactaaaaaattgctttaaaatgtaaaaatgagaaaactttatttatttattttttaatattttgtctctcaattttaactcaattaccaaaagtaattaaggagcctcgcgacatcataatttgatacgccatctaatgtacataaatgataccattatcttttgtaaggataatacgaaggaggtaagtgtagttcagaggtgtcttgaaacatactctaattaagtggttaggacaacaacttaattcaaacaagtccatcctttatgttttccaagattatcggtcaatgggcataaagtaagattgtggaattgttgaattacagagatttctcagaaggacatgttctttaggtaatcctttgctctctcctcgagttaatgacttccaatttgtgaaaagattttatcctttctcgcctagagggttggaaaagtaattgttatctcaagtgtgtagaatagttgttaggttacttttagcctaaatttcgggtcaatgtttagagtcgttttcagtctttgctattacttttaagacgaaatatacttgtttttctttattttcaggttcgtgtgattttgatatgtcaaatgcatcatgattcaaaaggagcgaggcatgacgaatgagaaaaatcaacaaaggaaaatattgcatcttgtcgcgacgatgatgacttatgactgcggtgagatcgaggtaaaatggcatgaattccaacttattaagtcgtcgcggcgaggggacttagggccaacgagcccttcatcaccacgaagaggattgaattatggctgcggctagttcattaacagaatgccccaattctattttgttaagtcgctgcagcgaggccattggtggccacggcgacaacgtccgtacagactcgagagtcaattttgtatttttgatattttgagttgtaaattggttcaatttagggagatttcaaattttgaaggtcgttcattcagaaatagaaccctagaagcaaaaaggaagacgactagagcgagtgtggcgacccagatcaatttccccaccaatttctttcttcacctttttattttgagattttttctattataaacttaaaatgtaataaatttacatttatgaccctaaaaaaggaaataaacaaaaatagaaact

SEQ ID NO: 303476 - DNA, 2959 bp, Cannabis indica
tagaatattattttcttagtcccaagtgcattcttggatagaggttctactgtatatagctctattataatatttatatatttatttatatatatgtgtgtgtgtaagaaagaagagctggaatctgggtggggggttttatttgaaatgtagtctttataattttagtttgttttcagagaggacaatgaacaggacaaagttcccaattgagatatatatttgaggaaaagggtgtgagtgatcaacactcgagatgaggaggggtaatattgtaataataaatatgttttatatttaatatttatctgggtcttcttcaagttccaagtaaaaaaaaatcacatacccacctggtaaacccaatctgtaagacaagacttaccttaccaccccactaaagtccaccactctcttttagcattcattatttatttattcctattattaattatcagtaaaataaaaacatttgttataccaaattaatagactgttataggtttaaaaacattaaataatgcaaattttaataaggctaggagcaatgtacaaatccaacggttgatacgaatctgaataaatgagcttatttaattaatataaatggcacacacacacaatcatgatgatgcgtccaactctgaattattatgtacgtatctcaatatatattattaatcattaaacgaatttcgaccaagacatgcatcttcgtattataattggaagtagatgaatattaagttaagattaagaatctaaaatcagatgaaatatatttatacagaaatggtgacatgacaatagttttttttttcttcttctaatgggaataattatttttgtaaaatgatcttgtgtatagtgagaattttcagcagggtgtcgacgcgaagactgagattgaaaaactgcctaattagttaattaatgataagagacattttctccttcaaaggatctaattctaatgtggggacctgtaccttttacaaagggaatattttataaatatctgtaattatatatacgtgttgaatgggaccatatatatagatacagtgttatacaagtttacaaacctgccaaaattatatcatgtagccgaatttttagactcaattttttccactgaggctgaaatgaatggaacagtggtattctaatttatttggactcttaggtaatccgtgattgattatcattaaaatatctatcaaccctttaaacttgggttcgtaattaattaattaattaactcgaaaactataataaacatactataattaactactatatgttatgtttggataaggagaaagtggacgaaactaagtttagagtatatattaagttatacatacatataataatatagttagttaagtcatgccagatggcaaacaaatatatgtgtacaccataaaattcaatggatgagtcaaaggaccctggaaattctgctgcaattaggctgacgccctaattaacaattctggaatgtatgtattaattaattgtatatatccccagatgttattttcatccataattattatagtttggcatatatatttctggtatttgtgtctgttgcgttttattattattatttttcatcatatatcatgtattgtttcaaataataatatatatgggtgtacttgtataattgttaccattccattgagagtattaataatttattagtacttggttcaaaatttgatcataaatcttgtgtagttaaatatatatatatagacatatacctgactttaatgtatctgtattttttttgtattgtttttaaaggattatatttttttcctcaaaaaagaaaaagaaaaaggagtgctcatatatatcttcattaatagttgtatatttttatttataatggtgagtagatttagcggtttcagatatgatgaatataataatatatatttagggttcttctcagtaatcttttaattaataatgacaattgactaagatgtatgaaagtgaaatttgttttctataaataaaaacatatatacctgttatttaaattaattaaaaaaattaattaagtagtatgttaacgttttctgaaaacaaaaataaaatattcatcctttctaaaaaaaacaataatattcatatatctttctggaaatattcatggacaaaattgaatcttaattaatttaaaataagtatatgactaatcagtaaaatgacttttattaatggaaataattaacaaaaacgttatattctgtgattctagttattatgatattcttgaattgataattacttgtaatttttcagggcattgataattaagataattcttatggaaattaaactccataatattattactatataattcttcattctctcaagctcatatgtagtgtagaaattaaaacaataatacatcgcaattgaatcaaagggtttttttttatattataacagcttcaaaaaagtatgaattgaattaatttcatcaacttgaatattaaaaattacaaatatacaataataaaaaaaatcggcgaaaaaatctgccacacaagacaaaaatgagatgcccaagaaatttaattataatttgccttgcagactatgataaaaaatttaagataaatgttaaaagcatttggtgctcaggctaatttgagtctcatataatttaaagtgataatttttaaaaaatattgttaactattgtaagacattacgtaaatggtacttgacctcactgatatttaataacaacatttaaaatttaataatcttttaaggtgcctaacaccatactgtgtggctccctgttagttaacgatttctcatattatgtattaaattaaaatgggtgtgatttgatattaaattgtaccaatagcggtatatcacctcttgtaatgcttgacaccttaagggctcgtttggaacg

SEQ ID NO: 303477 - DNA, 1124 bp, Cannabis indica
gttttttttttttttgaaataacaaaataattaaagaatttaccaaaataatgttttaaagaatctactacatgcatttctaaacctatataataatagcaatggtagtaatagttttaggtacttatattataactagaagcctagtgcaaaaagctttaagtcataagcaatgcataagtgtcggcagaataattttgcacatttttaaaattacaatagtttttctttaataataataatataataagcttcctaattatccaattattatttttaattgatgagagttttttgactaagtacctaataataatattcggagtttagtgttttgtttctttttagaatggtccacccactgttatttgattgtgatttttattttcttttgatgctaaatgacaaatacagttcattctttattcaaatttgctttaataagtttcttcttttttattttaatttaattttttaaggtgggataggttaagcatattttaatacaactttctttaaagatgtggatgtaaagaaaataaaattaattatttatgaaaaaggaaaataaaatctatttttacttaaaatgaaaggacaaagatcacttcacacattgtgttagaatattttgcattgatctaaaagcaaaagcaaagtaaattttcttagtgtaactacaaattatttaatgttaaatacagtttatatagtgaataattatcaaattgagctaaaaggatgttgtttttttttcatcatcatcatcatcttctcctagaaagagatatgtccccattgctaatttcaataatgtaaaacaaccaaaaatatgtttaacactgtttttattttataatttattttaaaaatagatttggtaagttttatttttgttttaaaattaaaaaaaaaaatagagaaattaagaaagtgatgaaagagaaaatataatgaatattaataaaagaaaacatgaaatagactataactaaaatacttttacacctcgtgctggtgttgagcactggattaaaccgtctttggaagagttgaaggttaattgtgatgctgctcttttttctagagaaatgagtcacagattgggatggattgccagagat

SEQ ID NO: 303478 - DNA, 1989 bp, Cannabis indica
cacctatgtgaatgtggaagtggagccacttcctataaaatttggggcaaaatttctagaacgttcactatactgggatagacgtgcatgtccattgacgcacgggcttgtttgaataaattcttaaaagattggtgcatggtacaatgttagagatagagttcaagacttcgggtcattctagtaaaatctaaatcgtattcactacacaagattcaaatcgaaagatatctttatttaagcattgtcttatagttgtctgatattgctcgagaaaatatttttaaaaatttcaagttggggattgttggaactttgcgaaattgtgtaaaaaaagataaaaagtgaagtgtgtgagtgattggagtcccacatgggatagaaacattttattagaagtgtatgtatagtggaagtttgagatttgggtataggccccaaggggtacctagttttgtgcgcatgggtgaggactcacatactggaccaccacacgcgcatccctgtccgaccgacccgagtcggccggcgggtgaggtgtcacttgttttttaaaataaaaaattattcaataaatatttatttattaattaattattttatacattgaatgaagtagtaaaaagcaattagtcaatccacttttcactaccatgatccaactcctccacaattatattaccgttttcttaccgtttaattttggatcgacttctctatataagtcgtatcagaacaatgaaagaacaaatcctttcaactaaaaaaataaatttcttcttccttatggtttttcttagagcaataattttgggtataatcgaacgatattgttcagtgcagaacatatcgtatacgagaggctgttttatcctgaaaataccgtggttgctagactgtcgtgcacacttcgagcagagctgcgaaacgtcttgaagaaagcgatattgttcgcgactcagccagaatcttctatcgacaattcgttctagttttattattttaaattcgatataacaattttaaatctacacatggatcatctgcaatcattcatttgaacctttatatagttaactgtaaaatctcgttgagaaaaactctaaagaaacaaccaaaggatggttggttatggttatgacattgacttattaagtgtcaaaacacctgcaagcaagtaaaaacatgctcagtgagttttttttatatatataaacaaaaatttgaatagggattaataataagcttttgtaaaaacaaataaatttattctattatatttggtaaaagatgggaacaatagtgttaaaaagtcaagaattaggtagagttggtcattttttgaaaatgatcttcaataacttatgacagcggcataggactttttgcgacaccctatatatccttcctggaggattttctatttttaattgaatccccttgaggatgttgacaacgtacgtactattggtctcttccaacaatgtgaatggtttagttttgaaatagcaattatatacacattaatcaattattccaatattttatattatttgctacgagattgtgtctgttattggaagtcttgctgatgaaaattggaattggccatgcccttgtgtcactactgctggaaaatatatatctatatttattggaacaagaaatcgggattagggtttaccctagtgattttcaatgtgtaaatgctatgccagtatgtattgagattaaggattatgcgttcaaggcataatcgggttggactcggtaactagaaccaagatgaatcgttgtaaagccttattgtatttaaacatgttagtataacacgtgggtctatgccacatagacataaatagacgtgtaagcgtaacacgcaagtctatattaaatagacaaatatgaatggcattattgtatatgtgatatgttggttatgattattgatattttactgtcttgctgggcttggctcacgggtgctct

SEQ ID NO: 303479 - DNA, 1378 bp, Cannabis indica
gaaaacttacatagccaatcacccaagtgaaaggtctgttgagaagaccaatgggagaagttgatgtgggacgcccaattactcttcctcctccaacgtaatgtaattcagctttccgcacccaaatgtagttattaataatatcatcaccatcatcaaaatcatacaccctttattctccattactattctatattctatatatcacagtttatatatagacagaaaaggaatctatatatatatatatatataaaaacagataaagggtatatgaatggagatttgagagagtcgtaattaagttttgggaagaaaagttggcaccacttcacaacttaatgcatgtttatatatgtgtatgttctactcgctcaccgttacttttgcttcttcttccacgtgtctagatgggtcccactacgtttgtctttctttattattattattattaccaataaaggaaggttgtttttgttagctaaaacctcaggctattacgtttatttggattaaagattatgatggattatggatggaattgtggaattagtgagtttgcatatacatgttctgggattttcgaggtgcggattcactatgagtttatgttatatattgactgggcatgatggactatggacgtcttggtatttccaagtttttgataggatttgagatttcaaaaacgcttgttcgaacatgcatcaggatttttggtattgttttgcttagttagtggtttctcttggttgcatacctttgtttgtaagaagtgatgtacatgttggagaaacgacttttggaaatgtcttctgagaaacttgcttttggacaaactttggtttacttatgcccaactattaagttgctgaaaagtttaataaatatactttttgaaatggggtttaaatttttgctgcattttttaggttatattttgttgggtctttacaagcggtatatcagtatttctattaggatagggaaaaaaaatactctatcactattggttttgcacaaaagtaacaaaatcactaaatagcaaaccttaaactcaaggtttgttgttttcaaaaaacaagaaaaccctccatttcgtattttgttcattcagaaaattgtaagaactgcataaaccaaatcagttcaagtaaaatgagtagatctacagtgaattcaatttatataagatgaatagaagctagtaaattcgtaacaaagatcaatgaatgaaaatatatgaaaatagactgttgaattgaaatgtaaccaaaacaaaattagactttcaaaactcttatttcatttttcacaatgtctaaactacaagtttaatttgtttttttgttttgtttttcgtttttatatttttttt

SEQ ID NO: 303480 - DNA, 1496 bp, Cannabis indica
tgtttttgttggctattaatccctcgaacattccagctcatgattttatctatttccaagaaagggtgctccccatcctatttttttccttctcaagatactgtttttgatagtttccaacttgctctccttctttatgagttgtgttcaaaggatcagccaaggcttgagaagacttacttgtagtttcaaccatttccagggcctttccttttggtttccagcccttagcaactgattgaaaaccatcagagccaaccttaacttctttattagtctcagcaacatatttctttttcacttcttctttaatgatccacccttgttttctttctcctttttcccgcactcagctgtaaggtggcccgttccaaataaatgatcacacacaataggtttccattcgtatgtgatcaacatcgaggtgttgaatccattctaattttcaaagtatatgatttttgggaagtattgtttcaaagatacctcaattagcactctgggaaaactaagtttatctctacatttagttgcatcatcaagcattataagcttccctacttgtctaatgatcttgaacaacgatttctcaccccaatacttcaagtcaagatcatcaagatgagcccaaattggaatcaccctgatacctcctttttaaagttaatcgcagggtcccaagctttcataacaaccgaccttttgttaaagaaaatatatctccttttaagcaccttatttctatcttcaatggagttgaatcaaatcaagaaaacaccataagataacattccaactctttcaatcttatcttttcacattttccatgaaaatccttctaagattgaaagaggaggatttgcccccaacacataacacaatagaaggcttccaaaagtctacttcatattgtatatcatttactgtaatcttaagcatactctttgaaccagtgctcgagaaggttttttcaggacatcgttgaacatttccagaccttaatatagggggattagaggaattaccttgagcaatatcctcagagcagcgattagtggcttccaagaaatgagcaaagtcctctcttatctcttttaatattatctaagaatagtgttatatttaactaattagtatagttttatctaataaaactaaatagttaaaaaaatttaattataattaatcaaaataataatttcacaaaatactattttacccttaagaatttattttacaaagaaattaattctcactcgaaattcaatcatcaaataaaacttttctctgtatagtgttgtatagaggtgagtcagggaccatggacctatattttgaagctccgataaacccatgattatttttgatctcatcaatagaataatccagtttattaattccattattactccactataaatatgaaattacactctttgacaagatagaattatatttatagaatttttacttgtagtctattaatataatcaata

SEQ ID NO: 303481 - DNA, 5674 bp, Cannabis indica
ttcattcaattgcaaaatcccgcccttaatttggatatgctttttccttcttttttttttacttttatgcatgagggttagggcacaacgacaattgctcatattggaagtattttatgttagtgattggaattgtgttctggattatatacctctttgaaattttacacttagatgcaaatctgttattcagttttgtgcattagtaattggcattgttatgggaactttgattttgaattgttctttgtgtctggacatggtaaatgatgttcttccattgtttagcttgaatctcttgaattctcttttaacagtaccaaaaagaaaaagagaggtcaacgagctgttgggggtgataagagtggaagagggctccgccaattcagcatgaaaggtttgtgaattgatccattttatgttatttagttcagtattgaatactttctgtgtatatgagtattggtcttttatcaataaatgaaaaaaacttattgtgggtgatggatagtagttatatgtatatacatattagttagtgtctgcattactgattccatgttgctcttttgctggttgcgtccagtgtgcgagaaggtagaaagcaagggaaggactacttataatgaggtaaggagatgtctgaagttgtttatcatttttgtctcaacttataatttttaatttacaagctattctttcttcaatatcggtgtgcattcttttcgttgaatataatgttctacattgtacccaagacgggttgctcctccttggtacctacatagtaattgctatggtttagtgtttttcaataattgtaaggttaagctacaagtagttaaaaaagtgaactttagatagtaatatgaaccccttgcacatgattaaggtatatagctttcgaatttttatgaattatcgttaaagattaattgcattgaatgtagtgagtgtcgaacaggattcatagggccgtaaggttgtatgcacttcgagccataaaaaatgctaatggcaaactttacatttatactgtctaatttttagacagtataaattagacactacctagggttttatgattttttagttttatgtgtgtgtgggttttgtgcaaatatcttaaggttgatccactatatttcttggttcaattagtgttaattgttgacctcatattaaattgtgttttatgttattttgttcattaagttatctttaaattttgatatacacaaaattgaaggttttatgggaatctgtcagttgaaacagggaaaatactggttgttctagtaaacaaaacaaataagtaaatttctgctgtgaggatggtactagaataatttctttataacggtaaggggcaaacagtcgaatgaagaggactacctgatttttatgctcatttatggaacaggttgtttaaagaatttaaggtgcaatgggtgtttcagcaacattgttctgaatttttgttttattctgttgtaaagataaagtgaatcaaatgttatggagtgtaactacaatggctttattgtgtgatctggttggagtggaatagaagactctgaggatgttgatgaactataggacatctatgggataaagttagatattgggcagctaatcttgttattcaatattaaagagtttaaacgagttacatgtccattaaaaacgagttttttcttttaacttcattgaattttttcattatatcgtacaactaaaaaaatgatacaaccctaagaaaatgaggatatcatctttctaaacgagttctctatatcgattattatttgttgatttagagagtggagattttttgtttcaattcactaaaagacaaattgatgcgtagatattgatgtcaattttctaaagattgtgattggaagctagtttctgcgtttgggtttaggcagctaaaagtgttaaattttttataaatgttattgaaccatgcaagcattgactgatggtatatgcttgttgtgctttcttttaatttttcagaaagctctgtggccatgcaaaggtttcaattttcaatattatgttattatttaagagttttgaacaccttccaggttgctgatgaactagtagcagagtttgctgatcctggcagtagtgttacgacaccagatcaggttttgcctttatttactaacaccaatgtatctattctagtttgtgttttttattctgcgtgtatgaaagtcaaaattacttttgtgctggaaaaggatcataggacacctacttatcagtgaatttctttttggtacattttattggcagcaacaatatgatgagaaaaacatccggcgaagggtatatgatgccttaaatgttcttatggcaatggatattatatcaaaggataaaaaggaaatacaatggaaaggcctcccacgtacaagcgtcagtgatattgaagaattaaaggtctaagtgcatcttctatctgcatctcttgcaatgtgtggattgtgataatgtaacagttctatgttgagttttgagctaatctgactcttcaacatatttgatgcagacagaacgtcttggtctgagaaatcgcattgagaaaaaaactgcatatttgcaagaactagaggaacaagtatgcttacctttgacttgagttgatagcattggaaaactgcaccttgtgatcatttttactgtattctaactttttttgtcttctcccatcaagtacgtaggtcttcagaacctaatacaacgtaatgagcaattatacagctctggaaatgcccccagtgggggtgtagctttaccttttattcttgtgcaagtatgtttccttaacattctgagaaatagatatctacaaggctgttgagcctttcacgggtatcccatttctttatctgacctcttttctttattcatgactcattgaaattccagactcgtcctcatgcaactgttgaggtggaaatatcagaagatatgcaactggtgcattttgattttaataggtaagaaatcctgatcctgtgagcatgtttattataaattatatgctagcattgatgttttggtcagatatatttgcgttgttctttatgttattgtgctgtgagaatgctaggatcggctatgtcaaatgtaattccagtcaaaagttatgtttagtgggatatagactaggtagtgtaaaataaaagcagttttccaactatggtgttttcctaatagaactattgttttaagaaaacaaaaacaatagctgaatgataattctctatttgtttggttttctctatgcagcacaccttttgagctccatgatgataattatgtcctgaaagcaatgaaattctgtgaaacatcttcccatggggatgatgatgaaatggcacacaattttatcacagatggaggtgaaggttctagccggtcgagcatgtatcaaacgcaagttccccctcttccttcaatttcaaacacaacagtaaggaatccaacctcaccccctctacctggaattctaaaagcacgcattaaacatgagcactaaaaaattacaagcttgatcatcctgcccgtggccgataatattagatttctgtatattgtgtagagtaatttaccaagaagtaaattggccagctcatagaattttgatataggtttaggtgacaagcagattcctcttgaattaatttggactttgcagttgtaggtgtggcagattccttgcttcattcaccatgttgttatattgctgtttttaagtcatttttacaaggccccctctcttgtgccttttgtagtagaaaatggtataatgttagtcactttcttaaagatggtccagttataaatagaattacagaattgatcaaagttgattctgtatcatatattatcttgatacacatttgtcaaatggtattagaaataccatcttatgttcttcattcttgctcagatattctataatacttgtttttgttcgtgctaaccacgcaaatagacaaattattgttattaattaaaaaagaatttttgatgtatataaatatgtattaattatgttaatctttgccttaacttataagtgttttttccttcatctggttgtgaggtgaatcatattatggtcaagttttggtagaagtcttctacctctcaagggtggggtatgagttgggataaaatcaaggcataaacatgtaggtggtgtggggtttcctagaatcctagattacatattgtaatctggcatatcttctttttaagaactctaaaattaagcgtgcgtgtttgatcttaagtaattttaggatgtgtgattttttagaaagttttctcaagttacgtgcaagtgaagacaaagtatgttggaaagatttgtgttaatttgcagtgccagtcatcattttaggaaacaatcaaaatgaagtactcatgtatactgtagaggtatgttacatgtgaagtgaatgcgttacacttatgatgagaacaaattcgtaagtgagtaaagtatataaagaatgatattttactcatgagtattttttttttttactgtagatcagagtgaattctagttttatttggcatatcattttggagactagagggattcttagggaaaggattaagtaaagggtggggctcaattgattctatcttgattatgtcttatccttggttgtccgtgaatgtttctcctttcccttctcccattgtttctcgtctggataattttaaggtgaggtgagtagtttatttcagataagtgtgtgagcttaggatgaagaggtggtgagtttttcatgaaatttcttcgagttcttcggcccatgaggattcgtagtattggtttatgagaagcatgagagattttcggtagtagtgcttataaattgttgcaaaagttgaagagtgactataatttactaatgcaaatattggtttatggaaaaatttgtggcaactaaagttgcctactaaagccaaggacctggtttggcgcatggtttcaaaatgtcttccaactcgaacgcgattgacgacaaagaaggtggtagtggatccaacttgtgtgtttttgtggtgttttaaatgagaatgagtatcactatttggtctcttctgattatgcttgggcatgatggtgttcaaccattgtaggatgggatttggtttctatccgaggtttgcttgaggagatgtttagggttatgaattctcatggtataagccaagtggcaatgcttcattgggcaatttagaaagctcacaatgagttgttatggcagcaatagcaaagaaaggtggaggaagtagttgcttttgctgagttgagtcttgatcaatatttaaagttaaggtcgtgagaatattcctttgttaagtccattacgtgtgagtgatggtagagagttttggtctaaactagctagagggcatcaagttaaatgtagatgctgctatttttgaggtgaagatttagtttgggtttagaattgtagttcgcgatattgcaagatgtttggttgctgaatggctcgaaatcaagtaggaaaagaggctctgagttggttgaagacaacaattttcatatgccgagctggagtttatagtttggtggttgttgaggccatccaaaattctattc

SEQ ID NO: 303482 - DNA, 1643 bp, Cannabis indica
gaatcttttgagagtgtttgcttcttggctttggtcttctagtggagcttttctcttaagtcaccttggactgctttagactcaatttttttgggtcgtgatgagggttctggattttttcaggttgaagctcttcctagggaggattcaggggtgttatttgtcaagtactttgatactcccccatcttccagcccacttactcctctttttcttgcttttggtcttcttcgcccaattatgggtgcctcaaaatggcctctcaagagctcccctaacgccctttgcatgtttgcgactgtttcttccagttgcaagttgcttatcctaagctaattcatctcctcattgtgtagccgagttcaagagctagaattcacgagtaaactcgcttttcctttcccagttggtggtgcgagctggttctggggtcttccggtctcaatggctggtgtgatggagatagtcactccatcttgctggttattcactgggttgcccttgggtcgctattcccttctcccactgagggttcataaccattcgtgcctcctccattcttaggcaccttgccacctgtacctccccttgcggcgggcattggcgagttaggccttgaggcaatcagttgaaggccatcaagtcacactttcacctcttggcggtggcgagaacgtctcgacatcttctcaacgatcccaggtaaagaaacaacgttgcttttgcgtgtcatttcccacagacgacgctaaaatgttgacagtaagaactcatcaacaaaataacaggaactcaaagtggtatttaaagatcttaatataagaatactcaaagtaaaaatcttacaatcttcactcttcagaaaaattactgtttcattaatatcttttttttacctccaagaggtcctcattacaatgagttcaagggctctatttatagtgagatcttcacactttacaaccttatcagatccctaaatcataggatgtcaagtcactttcatgcttgataacacaatatctcaagtagcgtgatgtatcagacatcctaagttacactaaaactttctcttttatttgtacctcaaataaaataaactttgtctcctataccagtattcattgcatagtcgctatcttgtctgcgatccctggcttaaacatctctagcctcgatatcttctccttacttccatttgtatgagtagaccatgtcgtaatcgaagattgtaggtgtgcgagttgaggaggttgctcgctgctgggaggagcagcttgcacgaggagctgcccttagctgctcctaccctcagctgcgtcgagcagcttgtgcaaggagctacccttaattgcgttggatcagcttgtttgaagagctgccctcaaatgggtggagcaacttgttcgaggagcctgctcctgctgcatggagcagcttacgcgtaggggctatcctcagcttctactcaaagagggtaggtgcatattgtgtggaactgcccatcgttgtgcgtggagttgtcatggagggaagaatgtaataagatgtgggggatgtgatgaggataaaaaggacaaaggaggtgggggacctcctcttgtcctttttgttgtttcaagaatcttgcaatatccctccct

SEQ ID NO: 303483 - DNA, 2046 bp, Cannabis indica
cttcagtatcaagataacttaagaatcaagacattttaaagttttcttaagaagactcatcaaaatttaaacaccaattttttttttccacaattaataattatctaaaaagataattataacttaacaaataaaaaataaataatttgaatcaaacaagaacaaactcttttttttctttacataatctagaacacaattcactgtattaactattaagtgacttaaatttgatcttaatagtaaagagacaatgaaatagggtgacataatagggggcctcaaaacaactcacaactttctttctttctttccttgactaattattattaagaaataaacttaaaaaaaagaaaaaaaaaaaccaaagggacagaagaatcataaagaaaccaaacaaagaaaaggaaaacacaataaccaattgtcacctccactctctctctctcttctttataatagtattaataaggatgaggtgccatgtgagtttattatcttcatttcctcttttttcttttcttcctttacaaatccacaaacaaatataatcatctatagtgagtgaaaagaccaaattgcccctaccataaaataaaattgcttccctgtaaagaaaataacagatcatagtataagcaaaaatggaggaagagaagaagaagatgacgatgatgatgatggctacaacaaccaatccaactatcccagaaagccaaagttggaaactttatgacaacccattttacgattctcatcaaaatcataatcatcatcatcaccatagccaaaagcttcaaaaacagagcaagaaccttcagtgtcttcacattcctatctcagccagaaaattagctgcttctttttgggatctgacctttttcagaccagtaatggaatcagagctcgatcaggttaaaacccaaatggccgatttgaaaacagagctggaatgcgaacgcagagcaagaaggaagcttgaagctatgaacaagaggctggtcaaagagttgaccgaggagagaaagggaaaagaagaaatggagaaaaatgtgtgaagaaatggctaaagagatttcttttgataaaggtgagatttttaggatgaagaaaaaatttgatgaagagagaaagatgatgagagtttctgaggttttgagagaagaaagagttcagatgaagttagctgaagctaagatttttcttgaagagaagcttttggagtttgaaaactcttcttcttctaaagcttctaaagtaatagtaataatgattctgtttgtttctcgggaaaatttagaaacttggtattgggtaataataataataatagtgataattcaattgtctcatcaaagtcatatcttggtcatcatattgatcaaaatgattttggtaattcaactggtttttcttcttcttcttcatctttacagattttcccgagaaaatcagcttcatcagaaagtgaaaatcctcatataaagagaggaattaaagggtttgtagaatttccaagagtggttagagcaattggatcgaaacatcataggcattattggggtacaaaattggagtgtcaaaaagctcagttaaggatttttcttaaccaaaaaaatcccatttcttcatctaataataatcttgttattagttaaagataacatttttattgttgtttttattttacttttccttcttttttgattaaagttgtaatcttttttgtttttaggacacaaatgtatgtgtgataaatctggattattgttgttcttgataaattaattactagaattatggtgtagtagatacatatgttatatgttgtttaagtttgtattattattgtatatgattttgttagatcatgttgctgtggatctgggctatagtgtgttcttttttaaaaggtttgaattttaataaatattttctatattgagaccaaaattattaaagttttgtagtgtaaatttcactaaacatgaacatgtgtgtgcatatatatatatgaagggaaatttgattttctatacttagaaa

SEQ ID NO: 303484 - DNA, 2961 bp, Cannabis indica
tttgatatttcagttcagtttgttaaacgatctgggaaccaagcggctaactggttagctcgttcttctggttcatgtcctgatcgtatttccagtagggggtctgtcccttctggtttggaagctattttgttagctgatttgctttaatgaaagttgcaatctttgtttcaaaaaaaataatataatgtcttttaacaattcgtgaattagtatggccgccttattatatagcagcctataaatagggtatcactttaatccaaattttggtttccaagccatatattacactctcgaaattctaagaatctccattgctataaattcactaaaaactctaatgtaataattgatggtcttttttttcttttatctccaatattatttaatttattcttcaatctctataatcatataattaattggaattcgatcacctaacatcaatagttaaataataaaaagttcaaaaaaaaaatatctatttatttaattatgaaacaccatcttcaatttaaattaaattaaattaatcaaacactcaaatgcttcatatgtgaatgaggaactcagtagatcatagatccaaagttcaacatttgccacaatattggttttcaatgtctttgtctgtaattagttaaagctttgttaagaaaagaatcttaaatgataattttgaggttctatgtaaaggagtgagattttcaatttgtcattattattggactattccacttggttgaaagaagtagccaatgtgcttacaatttcaatccatttgaaaaagatctcgtcattcccaatctctcccatttacactagttgtatatcttaagtaaagaatctaaatttggcccctaaatggaaaataagagcttcaatttcgtagttttacaaaatactgtcacatttacacgtttcattactctaatatatagcctcaggcacatcatatgtcaacaaagctgctcttttcataatcaggaccagttgttgattagactttccaaagagatctctctattcgttgaaagtaacagacaagacaaagcttgtggaatggcatctatttgtttttccatcttatttttcctctgttatagttttttctagtccaaaaataaatgggagaaagtgttttctgtacctcattaaattaaaaattgttttgttaaagttgttgatatcatggtgttaatgatattgtcttttttcattattatcattaaaaattgagttttataaacatatataaataaataaataataatggtgattttaacaaataataggggaaaaaaaagcaagatagaaataaatagagttgtccacaaaatccagaacattgggtaagagttagctagagaaatatatttttttagaaaaatgattattcatattaatgaaatataagaggagcatcatcacatgggaatgccaatcatgaaaagatgtgaatgagacaatggcagaggatttggtggagccacataaatgcataactcatttgtctatcccacaacaaccccttctctcttctctttttaaaatcttatataaacaaaaaggcctagctcccaccagatacatacatacaccattcttttaatatcttctctttgcatttctgtctaccaaaatgtagaatttggccttcatttttatatacaatatatatatatttatcttttttctcattagaatattctgagctaaagaatgacagtctggaactttcttgcgttttttagtgtcttacacccacctgtgtattatcaattaccccattataagaagaagagagcatgtggaatttatatttattgatttgttagaatcatatgtaatctaatatgatctcttgtaaacacatgcttatttataagcctagctggttgctcaacttgttttccaataaaattggttaaacaaaggaagcaatcctataatatcattgaaagcccaactttttttaagctacatatccaataaccctactggacttgggtttccattttagaggcctaaatatttaacatgtccattaaagggtttgacctacaaagcaagggggaagaaaaggaaaagatgatgaaaaaatttagaactgctgattgttaatattatttttgctgattctcctattatttcgtcaccttaaaaagtcaactttttgtttaggcagtgatgccagataaggttgataacagccaccgaagttggtcctttacaaattaacatggcaaaaacgtttatgtactgtcttttaaacatgtgaattcttccaagttccaactgatgaatagaataccatctagtttatttgaattaagttttaattcgccatatcaattgggaataatgattattcttatcattattttatatgtccgtgtatatttactcgagttatgtgtgaattgtacatgtaagtgtaggtagtgcttcatgtgaacattgtttcacatgaaataaatagtaaagtcatatataagaacattacctactccactaatcaccaattaattttgagatagaatctcataattctcaacatgtatcagagtcatatctcttgcggacatatgaatactactccagtcatcatttaacattggttttttttaagttgaaagattgctcaggaagaaagttttacacattcttcattacaagttacagtctctgaggttccatttctatccaaaaaggctagctcaaaatgttagtagttctgtatttttagattattgtagagttaagagatacttatgattttgaaaggaaaaaattattagttcttgggcaacaacctttgaccttcaattattctgaatttcataggtaaaccagtagatgattgtattagactatagaaatgtaatagaacccctacaaatgaagggcactaagaatgcaaaagattttttttactctacatgtacatataatttg

SEQ ID NO: 303485 - DNA, 2073 bp, Cannabis indica
ataaaataaaatagatatacaagtaattttctcttaaaagaaatctaattagatctttaggcccaataatcccaatcggcttgaaaggattcttccacatcaccaaacattttgtccaaatatcaccatcctctttaatataatctacattcattcttgtccactaattcacacaaaattatatgtatcatcacatcatataaaactactatgtttcatatttatataaaactactcgcaaatattttagaattataatttcataccactcgacctcgacgcacacgtggcacatcattctaggcaaacaagaaactaaactactcaaaatggtattagctgctacgtaattaaaaatgttaatgtttttttaatacaaagcttagataacatttttaatccctatgaactctaataattaaattatactagaatctgatttcctatatccttccaacgcggaaagtgtggccttggaataataaaacctatctcaaattagaaaacaaaatatattgattgagactaagggagctaggtggcacccaaggcaagccaactaaggttttttgttttgatcattaaagtgttctttttgttcccactactgagttttccattccctttaaaacaactaaccaattttgtgaaaagggaaaggaacaaaaaaaaattgttaatataacgtgtgaaattaattaattgattcccttcaacttttttctttgatattcattcaagtttcataaatacaatttactgtactaaattattcataaatgttaacacattgttgttattgaaaaatacatgtccaaatcatgatttttctccatgaaattcaataatgttcagattccacctcataacttttgacacatatacagcttattagggagtagtgtgcaagaaaagctagtgaattagggtgggactaggatccacaagggtatggaaaacacactaatcaattactcttttttttaatttccactttgacaagtgcttttaccagacagaaaaacacacgcacacactacaaaacgttgcaaaatcttcaaccatgagtgatgtgtcactttaaaattgacaaaaaacaaataataattaaattaaaaattcttcataataaatgataccaatggcaatttagtcattatatagctttgaagaagtctcaaattaaggaaaacacagttaacattacaatggcctaccaatcacatgtggcatagtgattggggcttccttgaaaacaaagaggtcaagttccgactcctatataacatacttgtatatatgtaatttaggttattgttcctttctcttttgatggtgttccttttaattagtagaagttgtgtcacaaattgttttcccatattgtgcaagcagttacaaattcatatttttttttttaagaaagtgtctcaactaccaaacattaagagcaaaacatactcaaaaacggtagagtgagaattcatttaaaaataacgtatctgctagcatctactattaagagatttggaatataattatgactcacttgaacaacatctttataagatctcttacaatgaacaaaactaataattttaagtctattacaaaaatcaagaatatcatataataataaatttatagaagtgataacagaaattgtttttttaattttcagtaccacactcaaacaattagattcaataataatatttttatacccaaaggaaagatattgatgcaaagctttttgaattgccaacgcttcaaccacctcaagtacgaaacgacaatccaaacactaactcgttgagatacaaaataatgcctatatcatctttaatatattagaatatttctaattaaggaaataaaataatattattgattctgataaatgaatattttatattcattgaatctggacagaatcaattacgtaatattctatatatggtcagatttctatattcattacctgatttgatttcctgaattaattgtcaaaatattctgacaattaatgtggtacagatactgatggagtatctcacctataaatatagggtc

SEQ ID NO: 303486 - DNA, 1061 bp, Cannabis indica
ctccacaacagattcttagttttcagtgattttctcattcattggacagcataaaactaatgcccaaaacaaagaaagacacctatgttttgaccaaagtggcgaccaaggcaatatattaaatagtcaattatttgttgaacaaggaattgagttcactaattaagtccatttcaattcatcataatctattattattggttgctgttttcatattattaaattacgagaaaagagtagtgcatgttctctttcagtgttttttggattattattattggccaagtagagaagtacatctcagaaataacatagaagcactcaatccagataaaagtttcattcttatgtttaacaaaatgaaaaatgtaatattaaacgtatataacgcgacacataatcttactgggaatcttttgaaatgaacttttgcctttttcttagttttaaaatggattaaaaaaatgaatagaaaaaaatattatcaaaattatgaaaagtagatatctatgagtgacagtgtgacacgagtattattattagagctcttgattttctgtggcaaattattagagctcttgattaattaaactttaaattcatttgaattataataagaacctctctacaaaaaaaaaaaaagtaaaaaaaatttaggaaaataattttaagagtattactgttagagatcataaaatgagttgagcagttgagagaaaatgagttgagcctaaaatggtataaagacacatattctatgaattacaatagaacgagcacaaccacactacccgaggcaggataatgcaaaataatttagcatgaaaaataaagtgaaatgttaaaagacatcattcaaggtgtcatattgctattaacacacttaattattaaattctataatttaataattaatttttattgaatatagctagttaatcttgcacaacttttaaataatattgaagatctaataccttataatcatgctcaaaataaaagtacttatttatagaaggaattatttcacaaatacacacaaaaaaaaaaaaaaattacaa

SEQ ID NO: 303487 - DNA, 573 bp, Cannabis indica
attttttaatttttagtttttatattataacgtatattgaagattattttgtactatgaatttagtggtttgttttttgaaagttgtgacctgttttgtagtatatttatgtgttcaatgtgtcttgtttcatatcatatatgttattatttacctgctacatttgattatttgagaagcatgaattaagttatatttgcagtatgctatgattatattaatagtaaagcatgataggaagtgtatgtttatttattgaggaaatgcttattagcattattgttttggtcaaaagttttgatcgatgtaagttatggattataaaaggtatctagtgatgtctttgagatagtttgatagacttaattaagaatccttaagcttggaaatggctaggaaaatgagaaatccttcattaccatagaataaggaagtgaggtatgctaccactaaaaaaatatttggcaatacagtgagcatataagagaattgagagaacagtaagctcgtctcatcaatgaagttaggcgtttggttgggaggaatgaaaatataggaatatgaataggaatg

SEQ ID NO: 303488 - DNA, 3071 bp, Cannabis indica
aaaaaaaaaaaaggaaaaataactacacgagtaacctggtgtctaaaggttaaacatctacagaattttggggaatactagacgagtaaatcctactctagaagattttacttatgtagtagtggaatagcaaaaagatgcccaaaccataggaaacttgactggtgacataatagcaggtgaaggggacaaacgccttgcgatgatcgtattgaacctctgttgtgggaaaccgctaactgcgattagatattagctttctcagacatgttgcctcccgtaacaccctgaacaaaggagacatcgtccgtttgaaattggtatatttgctgtggctgattatggttctccatatctgtgggaactggcaagttcccaggatttggtgtttcgtttctttgctgcataaacgtgtcataaaaagacagaagatcagagacttttttctttccatcttctgggatatcaaggttactatcatcgtaatgagatgcctggttcatttgttgagaagtcgttggtatctcattgttaatctgaaggtttggcaatccaaacgcttgggaaggattggaaccatgtgtacaattcatctggtgattatttctagaagtcttgttgagaaagccaaagtaatcatgatacatgaagcactcagagtactcacagttgtataatccctgatccagcacaatttgtgcccttgacatctttttcctccatgctttcttctgggtttgacactgcttttcacattcaactccttgcttcgactctcttttctctttcagccgcttaaattgcatcttatccctccacatcttcctctcaagctcctccacacccatctctttgttgctaaagtcgtctctcagccgcctcatcaagatcctatccctccaaatcctcttctcaagcttgtctacgtccatctcttcatcgctatcatcctctttcaaccgcttcaatagcatcccatctgtccatatcctcttctcaagcttgtcgatatccattttaccgcaaccataatcccctttcagctgtttcaatagcatcctatcactaaacatcctcctctcaatcttttcgacatccatcttttctttgtttttacccgcttccatactaagctctggttcatatgctctagtatagggcctgaaataaagacactaccacagcaccataactcttacaaaattgtcattcacaaccttgttaaggaaaactagtctcgaccactctctatactgtattctctttcaattgaacttccaaaggttgctcaatgatatcctttatttttgtagtttccttcttaagaatactctgtcctgaaacactgcttggatctgagctcacaaacaacacatcagattcattgaataatgatgtctcttataccataaaaacaaacaaccaatacaacacacaaaccctaattactagactgacacagatacaacaagtaatcaaatgaataaataacaatccatacacaatagaaaggggcagaagtagagaaacgcataaagggttaaccactccaacctttatataaatatatatagatatagctcctgaaaaaagaaattcggcaaaacagaaaaattaaatatttctcaacaaacaattcatcctcgatccatattcactcgatcgttaaaagaaaactggagacagcaaaacctaccattgaagtaccaaattttgaagtgtaaagtatatgctcaaatatttatcacccaaacaataaactttaacaaaattgtgtcttttgtaaagaaaagaaaaagattcttcaatttcttcttttctttttattttttaaccaaccttttaactcaaattcgtatagcaaaaagataattatttttttagcttaaagttatagccacaacatcaacaaaaatatgaaattcaccaaaagaaaacaaaacaaagaaaccataacaacattttttttttttttgagaataacttcataacaatacttaagtacccaagaattcaggcagaataaagatgataaaaatgattaacctaaacacatatgaaaacacttaatatgatgaaaatgataccactaaaagattacctagaatctctgaaagttcctgcagaaagctctgaaaaataacccaagttgatgatttaacaagaagaaagaaagataaataaaaaagaaatacagaacgaggtaaaaggaagaagagagagagacagagaataggaagaagaagattgaaaggggcgagcagggcagggcagtcagaaacaacagcaactttcctctctatctttttctttttctttttcaattttatacttttgggtaataataatgggtaatacgttgtccctgcttaggtggtgtttataactgaacacgtgttacaatacttccactccactgtttttttgccaatcaggcccccacaactacttactcttatattctctttattactttagcacgtgacaacacacctttttccagtatcgtgaaaatttactaaaacacaatctcacattcaaattggagtaacaaagtctgtgtttccactcaactgtttatgtgttttggttcatccaactttgagaatgaagataacatctaatatacacaataattaaccgagtaattttcagataaagggggcaatttaaggttttctgaacaaaaactatttaatatttatattttttattttttttatctgaaataattattgaagttgagaccaaccaaaacaacctttaaaagctttctgtggtactatttctgcttttattttctttattccctagaggtagagttggattttattttattttgtaagaacatgaaatatttttgtcaaataaaactagcttataaacgcgattattttagttgcatgagtaataaaaaaagagtagctcttattttttttttttgtaaacataagtagcgtttcttaatagttatgggttttcatttgttaaaaattaatatatatttgcggttattttataaaaattatagttttagagtactattatgaaatattagtattatgtaatat

SEQ ID NO: 303489 - DNA, 591 bp, Cannabis indica
cacccagaaataactaataagtgtgtaaagacatatagtggagaaagaaagaaagaaagaaaaagagagaaaaaaaaatcatatgaaccaatccaacaggtgcttggagatccacctttgcttcattacgttgcacttggctttttgtttttgcttttttgctctttaattctcaccctcccacttcttcaacaccaattttagatttattatatatttttaataaagatatttatattctccaatctccatttctcgagaatataaatgaactatttaatataaatagaatattgattttattttttgttttttctttatttcctctttgtttatttgaatcaataaaacccatgtctcaatttccaaagaaagaaattgaaatccccagttatataataggtatttctaagaatagattatagccaatactaatggagattagagagagagagctatatttgtggtcccattattattgctatacctgtaaatgacagttatctttgtttgacctttgattagatttagcagcgtaaactgattttggggcctttcatataaagatatattttttattttatatatata

SEQ ID NO: 303490 - DNA, 1364 bp, Cannabis indica
attttatctcaaaattaattagttgaataacttatatttattttatagtattttttccacactgtattaggttaactccaataattatgtaccacataataattaattactaatagaacaaaagaacaaattgattataacattcagatttaagatatatatatgtatttacatatatataaaacacattaatatacttattgactatgattcactctcaattcattgcaaaataatgtcatatagagtatatttatttacaacttgttaataataggttaaatatgtgtattgttttgtataaattataaatttttcgaaacattcgatacataattaaaaaatattttaatttcactacttatgaaagagaaaaagctaaaattttgtttaagattatttatggaaaataacatatctaacatttattattttttgtttaagagagtactaagactaataataatcacgagtcatgatcactcggcgcatatacaaaaattgttaattaatttgagttttaacaataaaataatccgattggtgagaattgaagcaatgtgatgtgaatgtgatacgtaaacattatttatatataattggtattaatagattagaatatttgtgatatatatgttcacatgacacacacttatgataatatatcttatcttaaataaagagattggttaaaattatatcacataagtgtgttaaatttttgtgtgaatattattactcatgtatatttaatattgcattattatagtaatatttgtatacctctccctcatggaggccagattcggtgtgacgccacatgatgtgcccagcatgctgttcaaatatgcaaaaagcattagaaatctgaacagggttgccattttcatcagcataataggcatccatgaaaatggcattgtgtgggcaatcagccagtggctccaacgacactgcggattggccaaaaccatcttctccacaatcaaaataggttctgaagtaaacttcctcagttggatccatataaggcacaaacatttctgatacatatcctctgtacaatactcttcgatacttgtgcttctctatgtcgtagattgaagctagtgatattactggcccaacacgtgaatcgaatcccacgtggaaaccccaattagcccacctgtatttgttaattgttaatagtaaaaatatgattttttaaattttagaaaaaaataatataaaatacttaattacccttttatagtaatttattaccctcttgttagtgtaaggtagtttgttattcttatctgattttctcttatttttgttcaatttttttttcataaaataacctttttgaaaaaaaaaaa

SEQ ID NO: 303491 - DNA, 2418 bp, Cannabis indica
ttttaatagtgcagaattggaagaagagaaatgaacggtggcagagatcgaagcagaagatggaggaggattaagcaacggctaggatttgtgggctgctgtggtgccacgtggagcccaacatcttctactttaactattatggaaactcttcaagaagatgaagaagaagaagaagaagaacaccacggctaccaccatcatcataatcatgatgaggacgagccagtttcggtggtggtggggtcggtgccagctggcatgaacctggcgatggcattagcggctgagcgcaattctcgggctgcaggaggaggaggagaggaagtggtgggtcccagaagcgtggctgggcaggtgaaatcgctgatgacgttgattgaagaaacggacggtgtggattggagcagcaggaggaagaaagagagggaccacagcaacaacaacaagcgtggaaatggaaatggaaatggaaatgggactggtgaagatattgattgggtgtgctgcgtgtgcatggaaagaagtaaaggcgcggcttttattccctgtggacacacgttttgtagagtttgctcccgggagatgttgatcaaccgtggatcttgccccatttgtaaccgtacgatccttgaggtccttgacatcttttgaaatgatcagaacattcttgtataatctttgcttgagattaaattagttttgttttgagctaatcaaatttaaatgttagctcgtgcgcatttgttcacaaattaattcttatgagtagagacaaattaccatttctttttgtttcattattaacatgtcccattatttagattgtgatactcgaattttcaatagtgttaaagggattttttcataaatatagaaaaaaaataataaagtagaaataaataataaaaaaaatatgaaaacaaaaaataataaaaatttaaaatatgagaattaataaaaaaaaagatattaattaatttgataaagaaacttgttatttatcaactagttaaaaattcaagacaaaaaaactaatttcataaagtaactaagataaaaaattacacgtaacaaccacttaaacaaaatcaataaataaataattagttccttgaattaattaaattaaaaatctattctccaattaactaaatcacaaaactaattctttgaattaattaaatcaaaaatcaatttttaaaattaataattcaagaactgttttatgaaataattaaataaaaaatcagctgagacataaattaaattaaagtagaactagttctacaataaaataactaaaattaaataacacacaataactcaaaaaatgattataagtaaaaaaaaaataaaccaaatagaatcagttccaattctgctataacaacggacatgctttcatctggtgcattctattatgagtttggtacttcaactgctacaaacatggtttcatcttgtgcactatttttagaattcggtgcttcagcttccatgctattgggcaatgatatcaaattttgatgttcattctgcttttcaaaaacccttattgttaaagcagcttgttgtctaggataagttgcaaactttgcttaaaatgagaagaaaaaggtcattacattttgatatttagtttagacacccttataaaataacaaaattacaattgatgataaggaagctgaataagcaaaccatgtatgaaaataaatttttactcttagaaatacacacatagttgttatatactttgaaataataaaacattaaaagtaacaagaaaagtgattcatcaaaaatatagatggtaaccatcccatccacactagtgactaaatctgtgggagtgtctcctaaatctgtacctccaattgtaaaattccccacattaattataagatttgagatgatgaacacaagtatataatcactttacttccaatattcatcacattagagaaaaaaataataggattcaactgatggtggaagaaagatcacaatgagcctgattttagggatgagattctgcaagagtgaaagtgacgacagacatgagcaaccggcaaccaatgatgaacatggaggtgaaatagcaaaagagatagcttctcaaaaatcactaccagaagagaccaaataaatatgattcaagagaaataaatccatgagagcccgttcattatacctaccaaatagagatcagcaatggcaacaaagtctccacgacatgaatatggcttcaaaccaaagagggttgcttattcgaagtaacaaaatgtatataaatatataaaaatagtagcttattttattatattacagggtaacttattagttttgaaaataaactttaaagttatttaaatgtattttaaataataagataatatgatataacttaaaaat

SEQ ID NO: 303492 - DNA, 3701 bp, Cannabis indica
tttttggagtagtgaatagtgaatagtgatctttggttcttctgccatgcatgtcttgtggaccaccattccattattatgacacacaacaacacaaacaattatatatcatcaatcaaaccctaacaatttctctctctctctctctctctctttctctcatatcaacatgtgtgattgtgtggtggtgatgatctcacatagaccatggattatatatatatatatatatatattcttagagcactcactcacaccattttttctaaaactataaaagcttaaaaaaaaaataaaaaattgcaattacaccaccagatgacatattattattggtgttaggaatgcaattaaagttccatattctttaagaataaaaagaatcaatatgtatataaggattgacactattctattagtacgagaccttttaagaaggtggtcaaaataaaatcgtgagggcttaggctcaaagtggacaatatcatactaatgttggagtcaagctgaggtagtagcccaacaaggtggaagagcgaggtccaacaagtggtatcagagccaaaggttcacgagtattaggataatgagttgcatttgcgatgtgtgagagaagctcttaatatgatgacttcgcgattgaagatctatatgatgtcttgtatcaaaagtctacttgatattgtggtggtcaagcagcgtgtcccgttgatggttacgacggtacaagatagagatcggtgttaagacctatgtcgaaagtcttcctgacaaagttgatggtcaggcgacgagtttcattagtgataagttgataacgatgacaaggtggtttcactgaagggtagtccacgggtatgtgatcctgtgtttgaaggaaggattattgggaatgcaaccaaagttccacattggcaaggaatgagaaagatcatggatatataaagatggggacactactccattagtaaaggcattttgagaaggtgcccaaaataaaactgtgaggacttagactcaaagcagacaatattatacgaatgtttgaagtcaaagttgaaggtggttatttttttaagaaaaataaataatatataaacaaaaatacataaaaatactaaaattaacacactataataattccacacttctcctcacaaaaaaaggagttaatttagtagtgagtctaacattaatttaaattcaaataaattgatatataactttagcttactttttataatttttatgtgtatatgccttatttggaggggagcttcatgtgacacaaaacagtagtcaatgactgtttttttcttttaattttcaactgttttacatataaatatttaattttataatatatatctttacatataaatatatattatatatatatatattatatttatttattttttatttttatttattattatgagctttcttaaattattcccacttccccaactccccaaactttctctttcctttaagtacatcttcacatcacatctctctctttcatttcaaagtaaaaaaacacaaaacacaatgaagcaaaactacttcacttatcaatatcttcttctctttctcttcatctttctcttcattatttcttcttccccaaaattaacttcagccactttcttggcaaccaaacatgatggtaacaatataataattactatactaattaaacccacttttatttgtatatatatatattatgatgataatattttatttattattctagctaaatatttatattatttttatgcaggaatacaagaggagcacaaactcaatattgaagagttgggaatgagaagtgaatcacttgatgtatgtctctttaatattatatatttatgaggctaatttttttatttgattatttaattattattattattattattttggtaattttttttaggagttaatgggattggaagattgtctaaatgaagaagatgaagaatgtttaaagagaaggattattgctgaggctcatttggactacatctacacccaaaaccacaagccttgaaataattatttatatatatatatatattatgataattaccttcataagttttctttatgtatttattaattaattagctaattatcttttcatgtataattatatcccacccttttcctttattatctcttaactagcttaaaaaatagtgtattttgtaattaatattgaggagtcttattagtagcttaattaggtttaattattaattaaggttgtgtacttaattattatttgttgtaactttgttttgtgcatgatgttttaaactaagtggaaatgtccttattgtgtaatatgtttgatgtaattataattagtctctcatagccattgctttggtttttttttccttttaaggaaaaataattaatttaattaaaattgaataatttgtggcctttttttttttcattaggggcaaaatgaggacttgaattaattaattatacatgttttaacaaatttactaataataataaagtaaaatcaacaaccaaaattaatacatctaaagaaaagtaacaaaagcttccaaagtactttactatatgcaataaagttaaaattaattaaatgtcatcttggtaggtaattaatggttgatggctattatacaacacaatttaatgagaaataccgttggaagaatgggattattattaaaaacaaattgcttagtaacagtaaaatttatgattaaaaataaaaaaaaaattataaataataaattatatattgtggttaaaaaatttatgactaaatgtgttagtcataaaaattaccatttatgttttttattacaatacttgttataattaaaagtaaattagtgacaatttatatttaaatatcatattttaactataaataattttttgttatgattaaaaattacttttagtattttaggatataagtaaagtaacaataataactattccaaagacactttgagtttagtggcaaatatgtattttcttatgctattttattttccctcattcttctatgtgttggattaaaagttaaaaattgatttgaaatcattatattatgttttataatgcatgataaattgtaaaaagcatttccaaattataaaacttaattattactaaaaagttcgttgctaaaagtatatattagtcataatatttgttgtgattaaaattaaattagtacaacttgtatttaaatattatattttaatcataaataattttttattgtgattaaaaattatatttaattaaaaaaattatattatgattaaaagtagttcttttgttttttaatgaacactaccattaatatcatactactattataattaagtatgagattttatatattttaattaactaactattataaaatatgttaataatttgttaaacactagtactaaaagcactagtacctaatggtgataatgtaataatagcatcatgggctacaattgtaacatgtaaataaaattctctaagaaaagaaaaaatcaaattctactttttttttttttttttttttaaattttttggtttaaattatattatgtatggatttaattttaacctttgaatcattatgtatttatgtgtatttttagttaatttttttatattattttaatttgagt

SEQ ID NO: 303493 - DNA, 1415 bp, Cannabis indica
tgtttaaacaacatacttgtgagtagatctaagatcctggtaaaataaatattccaacatttggaaccagtgtatttgacacccaaacttctctaagctttcgatcgtactccttatgagacctccacatctagaaatacctaaatggtttcctccccggttgagtcttaggatgcaatactagcaaaccaggtgaatgatcaaaggttccttcattggagaaaagaacctctactgtaggatatgtgtccaaccatgcctgattagccatcatcctatcgattttagagaaaattctatcctcactgaattgcttgttactccaagtgaaaaaattcccagtgtattttatatcttctaaagcacactgttcaatacactctataaagtctctatcagcatgatatatttgactctatgtcctactctttcttctttagccaaaatctaattaaaatcccccattatcacccatttctccttttgttatacccctggaagaaattccataaagccttcctaccatatctatcattaaaagcatagatcatagtaataaagcaagagaagtgatcccccatagattgtacaaacaaatgcattgtttgactagtacaatttaggatattcacctgaaaaacattgggattccatgccaatacaattttgccccctccatgccatggtacatttgaagagaagcaccatccagcaaaaatatttgagtacaaagcccccaatttgcgagttttgactcgtgtcttgaggagccctactagccctacactattagacaagataaagtgctttatttgtccttgcttgtgtatgctattagctcctcggacattccaacagaggatcttatccatttgcaaaggagggtcatcccccctcctttgtgttaccaatatgctgtagtgaatcaaatccatcgagtttcacccccatttcctcatgttcatttccatccaaagctttgaatgaattttcaatttgtgttaccaggttcctctctatttgtatggccttctttcctttaaccacttgttgaaaccctgcttgatcaacttttggaacctatttgcatttatcctccttaactacccactgtttcttcgtttcccttttcttcctgcaatcatctgcaacatgccccaatccaaaacagtgtccacattttgttggtttccattcaaaatggatcccaatatgagtgttgaagccattttcatctttaaactcaaccatatcgggtaattcattgtccatggctacttcaatcagcaccctagggtagcttagcctttccctattctttgtcacttcatccaccatgattggctttccaacctggccaataattttgaaaagagatctctgccgccaatatactgattagttttatattagtg

SEQ ID NO: 303494 - DNA, 1782 bp, Cannabis indica
cttttccttttaagcttaaaattcaaaacactcccaattgcattaggatttaggcatttagctcaattataaataagagaactttcaatcaaaaattttccacttcccataccgcttttcttgcccaatcctttatgagagtcttgaattttcatcttcatcagttcttcaagcattattcatccactaaggtagaatttttttttcgacgttacttttttcccaaattttttcccttcctcttcgtttgttgagcttgtttcaaggattctagaacttcccaaaattttttaaattacatatttagatcttcaaaactcaaaaacactattcttgaactaaattttctcttgtaatcaccttgaatttgcctttccaaggctaaaaaaacctttcttaagttgtaagtaactgagttttgaagtcaccatgcctcagatgaagagaagcaaaagactatttgatgaatatgatccccatgtggctcagttcattagagctaagcttattgtacccaaatctaagaacttagacaaggcatgtggtgggaaagtgattacaattaaactttttaaggctaccattgagagtgatgacctaagagattgggctttcaagttgagacctcttgtattcaacaccatcttggagcatcaagttcaattgatcagagatgattatctcctcccataaacttttgtcaggaaaccacgatttgggtgtcccaatggttcccagaatccatgctgcagtgcttggtcgagtttccatatgaatgtgggtgcttacttgcctttaccctgtggtttatatcaatagcaaatttttttggggtttgtgcctaccaattaaactcgaatggttatagaatcttgtccacctatttcatcttctactacttgagaaattggcctgtcacaactccccatgaaattaacttcctttgtgacttgataagaagtccaacttgtaaggaggaaggattttaccacttccaccaatttagtcaatatatagaaaatgtgaccaagagtaactgtgacctttaccatcaagaatacttctataccccaattcttctataaagacatattaccatccagaaggctaaccctttcaaaagacctacttcgttgattaacatgaaatggagagtagatgtcatgcttatagaaattgatgcatgggagagagatgtgagaaatttgtttaccactaaaatctttgtaaagttggcctgctaatgtcttgttagcaagtttatattgacactcacttttgtgatgactcttggacgatgcctctcgaacaagatgaccaagaatatttaaggagaatatctatgttcttaaaccgagatgatgaagatattacttctacttgaactattctagaaagagttagggaatgagcaggtaactgatgctccatgctcagtagttataccttgttatcttgtttttcatcactgtactaaccgcttatcttttatttttttcttaaagaaaacgtgagttttctacctgccatggcaacttgttccaaaaggaaggtttctttgccaaaggagaccgaaactctagtcaaagaggttgttcagggtatccctgctgcttcttctactcccgcgaagaagtaactttgaaagagaagtaaaactgctgaagttgttccccctgcccaagaccatggaaaggagaagtgtagagttgttggagctgatgatgttggaaatattttaccaggatctagatttagtaacaagtatgtttcattaacatc

SEQ ID NO: 303495 - DNA, 3498 bp, Cannabis indica
gatgttaatgaaacatacatggtagtaaatctagatcctggtaaaatatgtccaacactatctaaacaatgcaagaaaacaatctcctttgcaatattctcatcataggactaatgactctaagccctgttaccctgtaaaggggaacagaccttcagccaaccttggggaggaaccaggaggatctaccatgaaactgaggggtatgacatttggcgggtgaggaataatgaatcattctacactaggaagtacttttgttatgaaaggggtgtttagtgaaggtactttgctcgtactcctgatggctagcaatatgagtacttccctcctatgcatgaggaagagctaaacatgagaaattagttcaactcccctagcacctgaccttgcggaagactatattgaagggataagtcgttatggtgtttcggatgatcaccctcaaagtgatcattatgagtaggactctgtcctcatacaggttaaatccctaacatttctttcacgacctcgtggtcaagaggccatagccagacccaagtttaaattttttttattggcttggaaagcaaaaagacatgtgagataccttaacaagagatggctagtggaagcggaagcttttagcggtgaccccattaatcgattagctgaaggtccaacagggacgtagaccacaacccgtggtatcaacaaggacaaatttgataccctagccactttggtaaagggaatcacaactccaaagctatcaaagtttgagttagaccaagaacgacactcactgctcttggactgaatcaagggtttagaaattcctttgaagtttaagagtcccacctggcatcaatacattgggaaagatgactcattgttgcatatccactactttgaagtgcaaatcgatctacaaaaggttagggatgacgttcgttgtagaatcttccttgccacactgacggacatagctcaatgatggtatatcaagcttttccctgggtcaattaattcatgaaaagaccttgtggatgccattggatatctatttactccatctcggtaatgccaaatggaacccaatggtctagtagacgtgaagcaacaagaggacaaattcctcattgacctaattcaatgattcttagaggtagctgataagactaagatacttagccaagatgctcaggttatggcactcgtagttgggctcaaaaagatgaatcccctaattttagaccttttcctaaaggtagtctacaccatgaatgacttccttgaacaagtagatggctttatcaaataggaagaagttgtttcttgagctagaaactcaaaaaacaagaacaagaaatcaccagactcccctaccataacactaaggcgcatggggtcaatgggaaaggaggaaagaacacccatgaactccacacatttagggccacatactccggctaaaaccaaataagcatgtatgcacctgatgaagatcacactaatttataaacatacatcgagttatacagccacaaagggatgcccttcagactcaaaaatgctagagctatgtattaaaggcaagttaactgtatgttcaatgatttaatctggaataatattaaagtttatgtcaatgacatgtcggctaattaaaggtctttcaaaaccacattaatgatttgatgggatgcttcagcctcatgcgcgcttataagattaagctgaaccccctaaaatatgatttagatgtccaattaggaaagtttcttggattcattgtcaaatcttgaggaaatgtagtaaatcaagaaaaaataaaggcattgaaagacatgaagtcacagtcagggataaaagacgtccaaaacctcaccaaattaatcgccccactttgtcgatttgtctccaaatcaatcgatatgtgtgttcctttcttcaaccttgtaagagaaactagtaaagggttcaaatggacaaataagtgcgagaaagccttcaaagttctcaaaaatcatttcacccaatctccaatcctttcaaaatcaatagacgacaaagaattattgatcaattttcaatcatggagcatgcatatagtgctactctaatgcatgagtatttgctgtattacatgagcaagcatctcaatagggtttagtctacgtaacgcctattgaaaagttagcttatttcttagtattgacctctagaaatcttaggccacacttttaagctctacaattaaggtttttactgaccaaagaatcaagcaattttttatgaagctaaaagcatcaagacatctactcaaatgggcagtagagcttggttagtttgaaattccctatcagcctcaaagaataatcaaatgccaagaattaggtgatttcatcaatgaatgcactagcatcaaagaagataacctcatggtccgtgtagactagagtcccaaatcagagattgtagcttagaaggactctagaccctctttgaatctttgcatagatggatcttccaataaacatggatttggcataggactcatcatcataactcccaaaggattttgcacccactatgaattgtagatcaaattcaccataacaaacaatgagacagggtatgaggcattcctagcaggacttcgattggaactgtccatcaaagctgaatcactaaagatgtacattaatctcagttagttgtcatcaaattgtaagtgaatatcaagcacgaggactcaaaaatatagcatacttgagcagagctaaagacctcttagacaagctgaaacactactccattcaataagcaccacatgaatagaatggaaatgtggtttccctaacaaaactagataaaataatggatttaactccctaaccatagttcccgtcaaataccttgctcagcctagcatcagcaaagactcgatcgagcctattctcatgatcgacaaccgtccatcatggatgactttgatagctcaatacttggagcaaggtattcttttagtagacaggatcggagcctagaagatgatacgtaaagtcgcttgctttataatcatggatggagaaagacgtagaagaagctactcaatgctctgctaaggtctatcacgcacgaagaagccaagtttctcatgatcgaggtacatgaagggttccatggaaaccacactggggaaaaaacatctcaaagaagatatttaggcaaggaaacttttggccaacaatgatcaaaatacccagagcagcctcgaacgagctcaagggcatgcaaactccatggccatttttgatctagggtatcgatctcataggctcacttcctaaggaaaaaggtggagtccaatatgcagtagtggcagtagattacttcactaagtgggtcgaagtagagcccctaaccacaattacatcaaacaatattcaaactgtagggttttgtgccctaaataaaactctatttcaatgtaatcttttctattcagtt

SEQ ID NO: 303496 - DNA, 1222 bp, Cannabis indica
atctaattaaaaaaaaaaattaatatatatatatatatatttatatatattaggtgtgactggccacacaaattgcgtgactaaatcgcgcttaattatatggatcacatataaaataaatgtacatgcacaagtagcttttcacaacacttcatgaggaaccatcgtcccgtgattgcagtggaagttattgcattatcgatttttaatttcaacttgcatcaccatataaaaactcacccaacttaaaatatttggttgattttcttaataatgctcattaaaaatacatgcatgtggatgcttgtcaatccgatcatgcaatgtagctacgtatctcaaaatttcaatatataaaaacgaacaagttttatttaaacaaattaaaatgaaaggctttggaagtcaatttcaaaatataatttttttcctttgtttatatccaacattttaaaacacattataattatgcgtagttaatgggaactagtcatttgaagaagtgaattaattactatattaataattaagaagtaataaataaaaaaatatgaatctacgaataagattgtaaatctatctaaccatactcctgtttaattaattaggaaatagcaatcgagcactattttaaattagtaagcagtattctttgatacgcttattatacatatataatatttacaataatttttcaaataagtacattaattaatataaaattagattatttaagaataatggtgcattcaaaaacaaaaagaatgctgaatgtagaagctcattaaaatatatttaattgttcattttttctaagaaatcaattgttagatgagttatatagcagcatcctcatttttatataatgacttccatgactataaacgaagatcttcttctagattatgaataaattgaatgaatcaaataatataacccgaatgatgatcagttatatatattatgcaacattaataatccaaaatctggcacatccattagaattagtcaaaatccgtcgtcatccttgtaataattattatattactattattttatattgttgaaaacaatttcctctatctatacttaattataataactagttttgtcttaatgtggtaattaattaaaaattaaatgttaataatttaactagtgctgttcaaaaagtaaaacaataagggctcgtttggaacgctgtattaggtcgtattgtatt

SEQ ID NO: 303497 - DNA, 4980 bp, Cannabis indica
aaaaatcctaattagccttaacaaaatgaatcaaggatgtatgcacatagatatacgtatggatcaaattaatcatgataatacatattaattgcgtaccttgagtactctaagaagtactaaagactgggcttcctttgaattgtcttgagacttgaccaaaactggggaaacgtaaagaaaagtgataccctgatcggtgtctagtgcatgcaattgcatatagtacatcataccagaaacaacctcttgttgattggcatatgctatcttcacaagctcaagaacagacccaccattattaacattctctttcttgttatgttcatcgattgcaaaacgaccaagttcttctatcattggatcattctcaaatccttccacttccctcagtatccccacttcttccattcctatatatgttaattaattaacttaatttctaaactctctgcaattgctttccttttcgatatcttgattgatcttctctcaatcttttattgtatatatgctgattttgctttatttttaactactcaattcaagactagctagacaacatttatatactaattcatttatgtaataagtttggtgcttagttgatcatctttgaaaggaaccctttgagattattattttaaaataaaaagttagtgtataatttttgactagttttagcacctctgactttcttcttgctagtgtttatttatttagtattgaaaatttgcacaactatatagatctcacacttatattaaataactctatttaattaaaattattgatttaaaagtttttttttattattattaaaattaatgattaaaattaacactgttaaattaattaattatttttttcttttttttaaaaaataatttaaatatttaaatttaatttaaaatattaaaaattagagatgtttttttttttttcacaaaggaaaacttcattaatcaacagaacaaatacacccttaagcctcttttatacaaacaacaagaaaatcaaagccatttgtgattgttccaatgcccaaggattacagccccacagcctctctctcgtgggctaaccaatgcgcccctactaacatctatctaatgcaaatatctcatttatgagcagcttacaggcaactgagagtaagcaaatcgtaaggcccactcgacctgtatggataaacagattaattatattgtaatctattcaataaaagcctctcttgtctagtcattttcctattttttataaggtataatctataaagtactatactctttactttggcagcatctatcctagaaaaacaattaaaaatgcacttgctcctattcaaccatatagagtagcaaatgaaaactagattagcaatgtatatacttctaatcaaacttgaatccttcaaggaaaggcaacttttccagccctcatacttaactggccaagctttgtacccaaactaactaaagattcagtccactaccctttgagaaaggccacaataaaaaaagaggtgatcaggagattccaattggtcttcacaaacagggcaaatccgagtattaagcacaacatgaagcttactcaagttgtcacgagtgagaaggtgagaattcacaatttgccaaaggataaatcgatgttttggcaaattcaagtagctccaaatggctttactatggcagtccttgttctgagtaaggaggccattgtagagagtcgcagcgttgaatttaccagttttacctgccctcaaaatctcatcactagaaaatttttgtcacaatctgcataatttttttcaataccagctcgtgtctagtttttgaatgtaagaccaaaaaagaacacatttgagataaatgagattcactcacttaacccaaagtaaatcctttttcttcattatagcccaaacatacttggatagcatagcctagttccacttggatccctctttgaaactgaggcctccataggcttttgggagacaaactttctcccaagaagtcatatggattttgctcttttcatcattatttccccaaaggaaacctctgcataatctttccacctcttttgttacactttgacagagaatgaaaatgctcatccagtaattccggaggccaagcaaaacattgtgaattaattaggctcttcctacaaaggacatgtgtctactagcccaattatgtaagttgtgcttaattttagagataacaagcctacaatcttcaaactttcatttcgttggtctcaaaggcaccccgggatacttaaggggaaagtctccctcaataagagacgtatctgcaatgattccagcttttgctctgctatccaccccaccaaaaaagatgtgggaattttgcaagtttacgagcaaccctgtagtagaccaaactcatccaacactactttgataacaagcatgtctagtccctttactcaaaattattaagtcatctgtaaagcacaaattaacaagctataggtttctcccaactttgcattacaacttccttacagtcactctgatctacccaaaaactgtaataacgaaatggtttaaggctaattcttcagtagttgttgaagaaattacacaggagcaatggtataatattatttcccatttaaacattgttgaagtgttggggaaatggtcactccaatcttcattcacaaaagcatggtctatttttgagtaaatcctccttgacccctcttgcttgttagtccatgtaaatctcgagccaccctttttcagaacatcaacatgagcttaagcaaaccaagaacttgaatcaaccaattcattatgagtattggattcccaccaaccctatcctcaaaattaaacatagaattaaaatccccccaatatgatccacaatttgacagtgtgcttcaagttttccaatagtactaaccagagtgctcaagctgttattcccttaatattggagtcctaggtcatgtaggcaaatccatagaggcattgatcttatcaatttaacatcattcaaatctgtggtccaaggcctaacaataacagggttttctatcaaattgaataacaccattctacaggacttgatcccttgtagcctcatcattaaacctaaccattgttagaccattggccattcttgcaatttgtgctatcgccaggtgcccccaaacacgcttaataaatcccttaaacacagtatggggtggatttgtacctaacaccatacaaattaatgttgaactccagttagctgcctgttctttaacttcatcaacatccacttgtgctatcttgacaccatctttgatcattggctccgtagctaaagaattccagtgattctttgccgaagcttgataaatcccctgttcgagctctaatttttcctcttgttccactatttgagcccaactgcgattcgatcgagtcccagtatgtagatcatactcagactccttttcttgattcccattcccccgccccaactctccaacttttacaacctcagctataagattcagaccatcagtctcacctttttctcccgtttcatcagcttcatcaatcagatcttcaactcgagatactggcttttggatcactctcttcttcttcgccatggaagagagaaaacagagtcacacaccccaaattctttttagagatttttttttttatatatatataactattaatttaaatttaaactagatgttaattcaattaggtgacatttgatagcacttttattttaaaattttttaatcacaaaaataaaagtaaaattttgtttttgaaaaataaaaatgcattttataactacttttgttttttaattttagaaataaaaaataaaagtgtgttctgtaaattttattttttattttaatttgttgattttaagtcgggttcgggtccgagcccgcgtctggattagggtcgggtctgagtctgggtctagattttaaggtctaggttggggagggagtccaaaatattgatataaaaaattgtttaaaaaaattttgaaagtgatttttttttttgtttttaaaatttttaaaattttaattctcaattaaacatattaaaaagtaaaaactgttctatacaacataattttagaaaatatttccactttttaattttaaaaataaaaaataattgaaaaagtattaccaagcacactcttaattagttatattttataagaaatttattaaatatattgtttaaaatttaaatttatttacttgttttattatttgataaaattagttagatatatcattttataaataaatttaaaactaaattaaattttatgtatttaaaaaacataatcaaactaaattatatttaattttattattattattatttgagttaataattaagtatattaattctaatataattctaaacaaataacatatttatttatttttttaaaatatattaaacagttgccaaaaaatatataaacattaaataggggaaaggagggtgatgggcaggtactaagaattgaatcattctttgtagtttgagataatatggatatggagagctgcccatgttctcaaatacatatccattaattgttaattgttaaatcaccctacttgttttatttaaataaatagaagttggagtttatggaaatttaaagttgccaccctccctttagataagatttaacaaatttatatcattatgttttatcattgttatatatatatgatccctgatttgttagaggacatggtcaaaatagcatgtgcttattacaaaatgagatcaactagtatgacaagagttgagtagctcaaaatgcatccttcgctcataacactatatacattttatttttatgggtaaatattattttggaccctctgttttacaaaagttactaattggactctgtattttgttaaatgacaaaa

SEQ ID NO: 303498 - DNA, 1927 bp, Cannabis indica
tttaaaaaaaaaaataaaaaataaactcgattcggtcgtttattaaactggtcaattttttttacatttatataaataatcagtcgatttttaaatataaccataaaaactaaccgttgctcagccccaaataagaccactatgcatttttattgtaataaaaattaccatgtaaatgaaaaaagaaaaaataaattaatatatttgggcaacatttgtagttacccctaataaaaagagaaatattaaaaagatagtaatagtgtctatgtctagtgtctaccaccttttagcgtgccccgtattaatatatagctaataaatggtctattgaagcaatcaaaatatagtggtggtgatgtatgacatatagtaatgctcgctcattttatagtgtaattatacctatacaaatacaacctaataattacgccgtgtaactttcagacaagtaaacttttgctatttctttttcatttttaatctcctttttctaataaaaacaaaacgattctacacttaagccccacacgtgtaagtgtcactttccatttttgtgttcacagagcacgtgtggaatgagcctctcccaaacgtgtatcgcggagtgaaattatcccataactaaaataaattaatcaattaattaagaaaataaatagaattattctcatttttactacacgccctaattaattaattaataaaacttaaataaataagcactttgcaccttcttggttacctttttctcggtttctccccaagaatttatttaaccctaaacagcccctatttattattaattaataacatattatttatttatattatattatatgcattaagttggtgtctatatatagagagaggaaagaatactagtacaatactataatacagcccaaacgaaacatagagaatagaaaaaatcgaaacgaagcatcttttacgagtgttacaaatgcaggaccagagctcagaacaacccttttgtcccagctttaacagctactcctctgatagactcgtccatatagccgccaaggtctcacgagaattcgctgatttaggcctcgaaagctccgacggcggcagcgaacacgacaaccgccaccacaacgtcgatgatgaagatttcgagttcgtctcattcagtacagccggagatgaggtactagtcaacggtcctatcggtcctgtatttccggtttttaatcgcgatcttttatccgcctattacgatgaccgacggcgagatcgattaggcgacggcgacggcgacggagatgaaatttctggtcctccgtcgtgttcgtcttctgaggctgacgaattagacggaattccttcgggaacttactgtgtctggactcccaagggagctccgccgactccagggagatgcagaaagagcaaatctaccggatcttcatcgaagcggtggagtttcagagaattgcttcgtcgatgtaatagcgacggtaaggaatcttcgtttgtgttcttaactccgtcatcgagctcgaaacagaaggttgaagagaaaattggtcatgagaagataacgcccgttgcttccgccgttaacagagacggaagaagctcgggtagcggcagtagtaatgaaaagggtaagattagcacggccgtgaaatcgaagggtgcggcgttggcggtggggaaggcagtggggaacaataagatgatagcggctcatgaggtgttttatgtgagaaacagagaattgaatcgaaacgcagagaaaagacggtcgtttcttccgtacaggcaagacttggttggtttctttgctaatgtcaatactatgggaagaagtttccctcctttctgatcatcttcatcacttactctcaaacacttagtttttttttttatttttttatttttttaaaaatttaaaaaa

SEQ ID NO: 303499 - DNA, 3055 bp, Cannabis indica
ctagatttgaaagagttagggatccggaccaatttacacccacaagttgttggtggacgaacgtttttaccaccggcttgtcatgctctgactaaagtagaaaaacaatctttctgtagttctatctcccatgtgaaattacctgaagggtactcttcaaatgtatcagattgggtggatacaaacaaattgagtttgagtggtcttaaatctcacgatcatcatatgttgattcaacacattctaccggtgagtatccgttctgtgttgcctaagaaagttagatatgcaatcacgaggttgtgtttgttcttcaaatctctttgttgtaaagtggttgatgtccctaagttaatgaatctcaggtcagaaattatagaagttttgtgttatttggaacaattttttccaccttccttttttgacataacggttcacctaacagtgcatttagtgagagaggtgaagttgtgtggacctgtgtacttaagatggatgtacccatttgaacgatacatgaaaatgttgaagggttatgctagaaataaaagtaggcccgagggttgtattgttgaatcatacatcgttgaagagacgattgaattctgctcagactacatgtcagaggttacaactgttggctctcgccctactcgggtcgatattggaacaagtagagagaatagaggtgtttctgtttgcggtgttagccgagctgatcgtgaagaagctcaccgacttgttttgcaaaatattgacgaggtccaactatacattgagtaagtttaagttaacttttcatacttaaaacaaaataataatattcaaatgaaactgaaatcaatcaaatacttgaagggaacattttaattggatcaagaccactactccgactaaggcaatgaatcaaaaatgggtacaagatgaacattatcgaaatttcaatacatggtttaaaaaaaaggtactatttacattattgttttgttacgtatcatattgatttacttgtgctcactaactcacttgtatgttgataggtatatgtggaaatgtgtgaatccccaagcaatgtatctaacacgctactttgcatatcacgaggtccttcgtgtgatgtactcaagtatcaatcgtactatataaatagtactcaattttgcacccaaaaccatgataaatgtaaaaaaacacagaatagtggtgtaacgatagttgctaagactttccaactatctagttcaaaagataaaaattctaatgaatgtgacatgtctttttatggtgtaattcaagaaatttgggaattagattacaatagttttcggatccctgttttcctttgtgattgggttaggagtgataatggagtcaaagacgatgaatttggattcaagttagtggacttgaatcgaattggccacaagttcaataagtttataatggcgtcccaagccactcaagtattttacatgagcgatccattagatgcacgttggtcagttgtcttgacaacgcaaccaaaagattatgctaaccaagaatctagtgacgatgatctcatgctcagtgaccaaatttatcaaatcattccaccacttattgatttcactgttgaggacgatataatatcatctcgagatgatggggaaggattatgggtgaacgaacctatcaatacataagttatcgaatacatattggtatttagtctttttgatatatttacttttaattatcattttgcacatttttatatattctaatgtatgttttcaaatttgtgtaagattcattatggaatcagcaccaaacgatgattgggatggtttcgtttatgaagaggaagaagcacccgaagaacaatccatgccagaagaatccagtattgaactcgaagaaccaaagaagaaaaacacacgcggtagaagcaaaccgaatgatataacaaaaattaaaaatgaggggaagattctggaagttgagtacaatacacctattataggcatgatcctattagaatagaaagaacttcatatgttgcttgataatactaaaattctttttagtgtgacacaccatacaatacccctcattaataggttgaatatggcttgatattactgtgttgattggccaataaaatgactatttgtatttatatatataagcatatctaatctaactagtatttctaaaacaatttgtaatttcttttaggcccttaatgatgctctaaacaacaactataaccataattctaagggcttcttcctgccctgcccatacatcccaaaataaattcaaacttcatcaaatttttgaaatgtactaataacagtatgtcattttttaaagtgtgatatcttaaggtacccgttatcattacaaaacgagtattgtgaagagttatttccttaattttatataatcaggcaaattaataagttaactaattgtttaatcaaacttttattagcaagagattttacataatttgtcattgcatgcatttttctcaaacccaataaatcgacaaacccttttcaaattaagtcttgcagagtaaactttgttcaaaatatataaaacaaaatgtgaaacatcacaagccaataaagaaaatactaatgggaagaaattttgcttagttcaaaaacaaaagaaaaaaagaaagaacaacataattagtagcataattatttacgagttgatctaatctaagtatgaccatgatgatgatgatgagtttggtggaataacaaaatcttgaacttgatgttgaacttaatattgatcactacaataaacggttgtgatgatgccacgtcgacgaagatcaacacagaaaacaacaacatctcctcctttaaggccacgaaccaattgagaccaattttgaccaaacaaaatttgaccatcagctcttaacttaagcttagtctcaattttattttgaggaaagctctgctcccaaacaacaaccccaaaatcatcttcattcaagatttgaatcaaatcctctgctttttccattatcacttctccaatctct

SEQ ID NO: 303500 - DNA, 2309 bp, Cannabis indica
ttactactaatatactatctaagaaataactaccaaactcttcttttcttatcttttcttttttttttatttatttattttgtttttttaaaaggcaaaactattcttaattaagattagaacatctcaaatgataatgcttgaagagaatacttggtgatataaaaaaaatacttggaaccattggagatgtttgaatgtcaaaacaaaaagatatatttatacttagcaatgatgctatactcaatttttttctcattaaaatcaaaataaataatatatcaaataataatgtgtgagacaccgtaataaattcgaaaagtgcgaagtacttttagaagtgatattacgtggaaaaaaaatattatatttttaaataatatataaatttttagcacctttgaaaaatactactattggaaatactcttaaaactatatttattttattttatttttaaaaaggcacatattaattagttaaaccgataaaattaaattatctttgatatatatcaacagaagaaattaaaaggtaatttgcttacctgtattataatattcctctctattttaagaaaaaagagagttttattttcttaagcaaatcaaggacatgtataagtataatttttggctaaagttatatacactagaacatcaacaataattcgatcacggtattctacaaatagaaattaaagactaaaacatacaataacgagtataataataatatggataaagcgacaatcacttatacaaaaatgaacaaattatgtacttaattgtaactttatcatggtaggtttagatgggttctttttatccatttggaccccaaattggaaaatattatagcataggccaaagtgaactttacagcctccactatgaaaggagaccatgacctttaatatgatgcatccaataaacatgattacaaataatatatatattactattgcatagagcattcctactaggcaatgtaggtgaatttgacatgtttcaaagtctaaatttaacttgtcacatatgaaaaaaaaatagttgaacactcgaaacggaatcgaattctgatcagccgaacccagcgcaccaagttaagtgtcaacccgggcgctgggtgcttcccggactccttcccaagacttgttttgatacttctattggattcgagattgcgaacgaagtctactaccctgtttttaaccattttaagaagaaagttagagcagaatttgtgtttaaggagcggtaacatgcaaaccaggttgcatgtcaacctggcgtagggcctagtgccatgtcaacctaggcgttggggccctattctggatccctgaaaatctctttttctcctcgaggtcacttgtatcttcgttatttttttatgacgaaaaaaatacccagaacactttttcagaaaaatgactggaaatagcctaggttgacataatgtcaacccatgttgacaaaatgtcaacctgggcattagggccattttttttaccaccagatgactcactttgattcacagaaacacttgtattttaatctttggaaaaacaaagaatatgcccagatgaatctcagaaaaactccttggaaatgtctcaggttgacaaagtgtcaacttgggcgctaggcccatcaccgggtcaacctgggcgctgggtctcaattatgtcccccagacggctctgtttgtttcccaaaagcactcaaatcttaattttttaatgaaaatagagaatatacccagaagaatttttctgaactgctgctgggtcgagcgcgtaggttaacttgttgaacaaggtgtggattatgaatggttgccaattaagtgcagtaattgtgatagatttaatcatagtatggaaaattataaaggagaaaaggctaagtgggtgagtaagaaggaagaaaggaaagaaaagctaacagaaagtaaattttttaaggaaattaggaaggataacgaggtgatagctactattgaagttcaagacaaggagaatgtagatcctaaagttggtgaggatatatagaatgttagaaatttatatgtataatataaaatatatgtatatgtatataacatgcggaataaataaacatatacactatatgaatataatgatcgaaatacctccagccattgattttgagcttcaatcccacacaagctttgatctgcgaagaaaactgatcgatgtgggtaatcgggcttcctcgctctctcaactctctttagatggaatttgctgttatgaacagaatgagtgaggagctcggggaccg

SEQ ID NO: 303501 - DNA, 1630 bp, Cannabis indica
gcctctaacatttattaattattaaccatctcattatggtagtgaataaatattgggcacatagttaatgattgtgattatggtattatattagtccacaaataaataattctaacaggtcatgcttctccttgtcagatttcgaaagcgattttgaatttaattacaattttcaaataattattaataaaacatatattcttgcgcatgatgttcatcataatccaaaaattatattatatatgttaaacagattttgtatccaaaattgtatttagttttaataattaaagtatgtaagatctttaacatacatataatataaataaaaatgaattttactttgtatttgttatttttttaacaattcacaaactcttccaagtagtttggtatacacgggcggagctaaaattagagataatatccagcaatgcattaaattttacaattgtgggagattttggtaactcaactgttttttggatactgtatgtagattgagaaaaatatgatggtttgtttaattttcaaaattattttatgaaataaactagaaaatttgaataagtaaatttgaaatagaaagtgagtgatgttttatggtattaatattaggagaatttttcaaaaatatattttttttttatgttacatttaaaattttacagcttaaaatatttaattacaaatatatacttgtaaagttttaaaatcttaaaaatacattttgttcagcaaaaagtaaaagaaaaacaacgagaaagaagtctcataacacttataaatcaactataaatgaactataaaaaaaataaaaaaataactagaaaaataacctcatgaacaatacaactataaataaactataaaacaactaaaagcggtttattatttttactaagaaaatattttggtaaataaaaacgttcaaagaataaaaataaaaaaataaaaatacgtgttgatatgttttcataatttttttttaaatttttgatctaatgtaaatttttcataatattaactaaatactctacccatgatatcatcccattttttttttaaggggacattctatttaaaatatgataaatatgtataaattttaaagctcatatataataaattaaggagttcttgaaaagtgaggggggcaaggctactgttagctagttaaggtgggttaagttcgcgcttaagatccattcattttatgtaaacattccagcttcaagcttctattaggtccttacacgcatggaatgataactcttatacacgagtaaatcactctgattgtttcttggaatgatgactgacactacaaaccaatacgagtgtttctaacgtgctttgtcctcactcgcacagttcttgggaaaactacccaggaggtcacccatcctgaaattacccaaggtcaagcacacttaaccgtataattctttcgtgatggactaccgaaaaataagatgcaccttgttaatataggtagtacttatcaatccatttaagccctcttcaactgtgtagtccatacctacatagtctcagaatcatctcacttaacctttcccaaaggactactgactgtcacaatcaccccaccttacggggtccgacgtcc

SEQ ID NO: 303502 - DNA, 826 bp, Cannabis indica
tcaaaataccagcagttatctttcatggcagataaagatgtatgagcaacgagagcatgattttcatgtttgggtattctcttcttagtagtttcacgttgtggagcgaaagcaaacttcctttaactagatttattgttgataatgtttgtcaagtatgttctgagcttgtagcatttaggcctgatatgacctcacttgctacagaaatgacacattgggacaaagcattctatctatttggtattagatctttcattaattgaagttcttctatccgaattcatgttgggttcaactaaagacttatctgactcttcattcttgagattaatggtagcatacacaactttatcttgtcacctgaggatgatgtcaatttttcatcaatagtcagatcatgaccctgcttgtatagtaacttgtacccaattaatgttctatcaccatatggcttctgcatctgaagagcttgattcaaggtagcagtatctgaaggtaagtgagagagagagattgcttggctctccatagtcaattttttacgtttctcctcaaggtcacacttactttcatcaagagctttgttcagttctgaagctctttaaccctcttagccatgtaactccattgagcaaacatttcttcataggctttattcttctcataaataatggattctgagttagaagatgtatcatctccatctgatcctttagtgactgtttcacgagccatgaaggcaattacaaatttttcttccttagactcgtcgttatcctctttgtaaagaccgcttagtttaaattggaaattagcagttaat

SEQ ID NO: 303503 - DNA, 1368 bp, Cannabis indica
aaagttagcaattacattgatgaatagcaaaagagtaaagaaaaaagtaatattcattatcatgtaaaattttgtgcatgctataatttgtgtcaaatttaatgcatttttagtatgctaaatttaaaccatattataaaccaccattggagtttaattttataaaaatgaactaaaaaatacatacacatcatatttataacactccacatgctctcaagctttatattctggagaaaacaataaacataatcaaatagaaaaaaatgtaagcatagttttgggtcgtaaccaactgatttttattccatttaaaataaaagaaaaataatatcaaagtaaaaagttacatcttattgcaagaaaaaaaagaacaaaagattattttacaatacacaattcactcccacatatttgcccttgttgacaactaaattaacttttatagacactttaaacgacattcaagcacccttgttgacaactaaatttatggacacattaaacaacattcaaactcaacaaaatgacaactaacaaattggaaggggagcaccattccagctactaagacattctaacattggatcaatgatttttccttggcacatagcagaaaacactttgtcgaattcctctccaggagacttaacattctctccagtaagcaaaccagttcccaactcctctctcacaaacttgtacaatggatatgacctgcattccttaatcttatttgttatggctacatttccactttccacaccaatccttgcattctcaacctcttttggcaaaagggtcttcaattcttcctcaaaagctacaattttttggaatattgaagtgcttgaattcttctcattttcaccgtttgacagagcatgctcaacaagtacttgtctcagtttctgcatcaatgggtaggtagcactgcatggatcatcaatgtaggcaaacaaatattccctatctacaactttaagcaaatccttctcgcaaaatctcgatggatggagttctccattgacacctgttgttaaaactctcttagccacttgactcacaacatttttcactgtgtatttcaaattctcctccaaatgtctcaagtcgattgcttggcaaagtgcaaccaagaatgttgaagacatgagcttgagaatatcgatagactcagcagtctttcttgaagatattaatcccaaagagttcacatcttggttgtgttgttcagcccttggacatggctcgtcaccggattagcaaggtattggagctcagaacagtaagagccatggcaatttcagctcccttaaaaaccataatccaaaacttgggttgcggcctccagaaagatttgaaggc

SEQ ID NO: 303504 - DNA, 2538 bp, Cannabis indica
attttattttatttctcttccacactattttgacgctttttgttctaaaatatttcaatggtaagtacttctaaaaattattaagataatattatattattattcaaacatattaaatacctaaattattttactttatgacataataaagagaagatataaaatatgtcattcttagacatttttccctggcattctttttcactccaataataaacatctattaaaagatgtcaaaaacaaatccatgtcatcaaacattctttaaaacattcccattggagatgctcttagtaccactgactttaacgcctattccatatctggttaatcatcgtctcatcttctatacagaattacttataattcctcaaacaaactccagcaagcaaaccttcattgagtaaccaaaagaaatgcacatttcctactggtgtttcactttcaaagctatatcaactttttgatctttttatccttatgggcagtacatgccctccactgaatgtaaatatcactaaatacctatccaagtaaagggttactatcctttttcagtgtacactttttgagagtggaaaaagcaaattcttcacaaaatagtacctgaatggtatataaagcaaaattctactctctgccaaggaaataggttactaaatgcaagaccgaggtgtacaagaaaaatttaaaagtaaccaaacggtcaagtgccaatcccagcaccaccaggagttgagttactaacagttgaattaataactatagatttcccaaataaaattttgtttcattccaaatattcagtcaacaaaaaaagaagcagaaactatatatatgcaaagtacaaaccttgaagatccatttattctgtatatctatgccacaaattctgagtattttatctttttctctctttccaaataaaactatattttttaaccaatcgaaaagcaaattccaatatccaggcaacaaaaactgaaatagaaacttaatacgaagtacaaaccttgaaagatccatttatctttgaagtccttgaccactccaaccccaacatcttgctcgttgtctggtacgaagcccgaaacacatcatccccataaaccttctgagacacagaaaagtcccaagtattcttgatcaaatcataagatggctcaaatgatgtcaccccaccatgaatgtaagtgtacttcatcttgcaatttcccgtcccaaacatgtaattggccgaaaccttattagctgaatcaaagataagacttccatccaatatagtcctattgtcacctctgctatgaatgtaagtcaaattcaatggtttctctgcaaccttaattgtgttcatgaactgaaatcgaaaatcctgcaccacagagaatgacacaatcaaattctgaaccaaagaacaaataacccctaatatagccaaaacctcggaagcaaattctaacttggcctaacctattccaaaattttctcaccactttcttggagccaaaacagaattatataactagccaaaaaaaaaaaacactgtgcacacggcatggaaatcccatccggaaattgtcaattaaaaagaagaaaaaaagacaaaaatccattacttggaaaaacgaattacaaggagttgagattaagagagggtaggtacctttttggggacgttgtaatcgataataaaagaaccaggcttatcgatagaaagaagtaagccgttcaagctcggaccaccaacgagtgtggcttcggtcatggaagctctgagcctagcatcgccagctcgaaaggcgaaagatgcggaggcgccggcgtttttgtcagagtcgtacttgcccttgaaagtagctttcattgtaaacaacgttgaacttggaaagggggcaacaacaacaacaacaacaatgtctaaaactcaaaatagatattgttatgtgtgttgtgggagtgggtgaggtaagggttgaattgtttttattggttttgtataactcaattttttttttattattttatatattatataaacatgtgttttatttttcttatgtgaagaaaaaaataaagaagttggtgtatagttaaatgtaaaagtaagtacaaagtaaaataaagaaactaaaattttggtgagttattttcaaaaatagggtagagaagttgatggaatggtctttatgtcttcgagcaaaaaaataaaaagtaaaaatatagtccctctttttcattaatggattaaagtttaattgctattgatattaaactaaatcaacttctacttttatatttaaaaataccctgacataaggaagtcacagagagagtataaaatttgtaaagtatttttaaaaaaaaaatgatagacttttaaaaagaaagtaaaaataaaagagtatagagtctaatttcctcctagtacatatcgcactaataagattgagattttaagtcggggtaagttgaaaaataccctttttattaattaattaatcaaatttatctctaattttatatttatttgaaacatac

SEQ ID NO: 303505 - DNA, 1435 bp, Cannabis indica
tgtaagaaaaaactcagaaaaaataccctccttgaaactgttttgaaccttccatccatggcaaatgatactcctctaagcgaagatatgaaccaagtgaaacaacttaacgtctagggaaggagcatcagaattcccacaggacaaatacgactgagactcctcgctcagggggaggaaatggtggagatcgaacaatctaggggtggaatcctagaaaggcgtagtgaggatgcttatgatcccattcgatacattccattagtggaatttaaaaatagacaactccgacagcgactggctgaattaaatctaaggaatgttgagttggagcacgaggctgcggctgtaagggttgcacacagcgacgcacctcttaaccaaccagacacatccattaggagacctcggggaagacctagaggttcgaggaccataaggcatggggaaactcctaagggtaataaccatggaaatcttacgaatcccaggatgatcaacatgggaacacaagaatgttccagtagacaaaaggggccccccaaaatccaagatacaatggtaataaagaaactcaacccaatgatccaggaacttcccatgagagaggcatgcatgtcgagtagcatgcacaaagtgtatgccaagtgactcgaaaatatgcatgtcgagtgagtgattgggcatgatgcatgctcagtgagtgagggagcatggtgccgagtgagttgtgggatgatgttgccaagtgagttgtggaatggtgcttaccgagtgagttgagggacatgcttgccgagtgacatttgggagatgcatgtcgagtgatatttggaagatgcatgtcgagtgacatttggaagatgtgtgccaagtgacattgagcatgcatggccaagtgacattaagcatgcatggccgagtgacattgagaatgcattgccaaatgacattgagcatgcatggccgagcgactttgagcatgcatttcgagtgactttgagcatgcatgccgagtgaatttgagcatgcatgtcgagtgacttttgagcatgcatggagagtgacatatctttctaccgtttgcccattttttcgatagtttctcgatgctttttcgattgcttctcgacgatattcctagatgggctttctaaaagtcagggatgacatatttcgatagtttcacaatagtttatcaacaatttctcgattgatcattctcgatggtttctcgacattgttttacagacattttgggtgatttttcgataggttttcgacaagtttttgatagaagttaacttcgaagttagctattaattatttcaaattatcgataggatttcatgttcacgatgatttttcgatagtttttctatgtttttgcgattattatcgagaaactaatagttgtaaaaaataaataaaaaaa

SEQ ID NO: 303506 - DNA, 2392 bp, Cannabis indica
aaaaaaaaagactcaaaagaacaagctagattacaacaaaacaactattaaaaaatattaaaaatatgcatacaataaaaaacaaaaaatacgaaatacataacaacaaataaattaaaatgcgcaaaagatataaatcagagaaaaaaaactcttaaaacaactgaaaaacaacataaataataccttcgacactttgtgtatctcaaaatttttatcatcaagttcgaaattagaatctctgaatcttcaatgatcgatcggttttaaatattttgattttctcttttccaaagaatgaataattgaaagctatagaagatgtaggacgataaggattttctttaaaatatttcttattcattgctaatttactaataaaaacaagaggaaaaaaaaaaactaaaacaaaaatagaagatacaaaaaaaaataaaaataaaaacaaacactagaaacattgtatgaatttttaaacatgtataaattattaatcaaataattaaaagcaactgtaaactataatgttggtcaacaattacaattaataagctggcaaaactttaaaatatactaatgactcgtgagcaaaaattcttggttaagttggtttggttatgcaaaattaggcattactattactatatatctgattattttattctcgttgaaaacaaaaataagatgtgagaatctcacatgataacaaataaaatttcctctgataagtcactatcctctggttggatttttcttctataaatatatattatatatatttttcttttttgtaatttgttaattttgaaaatgatatagtttctttatgtagctacaattatgtcatgttgcgaaagaaaagtgtataaataaatttgtggtgcataatacatgcatattttatgtttgttttgtgtagcagtaatgtcacatttagatttagacaaccattattatgcatggctaggctaggctacacaaatttagattctttttttggccatttttcaccattaaaattaattttttattaactttaaaattaaatagaaaaatccacttggcataaatcaaattcaactcaaaggcacttattgttctaatttggcagcatacaaataataataccttgtaaagaaagaaaattatttttgtttgtacacacatgttatattatataggtaggtagtgaatattcaagaagtttatgtttaagattctttgaatctgatttattatatagtactatcaattaagtcaattataatgaaagaggttttttttgttaagctttctttgtacgtaatttataattatatagaaaaaataattaataatcttggacaagatgtgcgggtagtcttgtcttgacttttgaggatgttgagttgaggtggcttttcttttttttttttttttttagttgtatgtatttgtataccaacttctactaaggaattagtgacacatgctattttttttttaggaattttttcataattgcctctaatcttaatattgttcactgttttaatattgtatagatttgaagtttttttaatacggatggttgcccttgtgctatcttaataactacataattttgttactcttcacccagttaatttaatttttgttaagtattataataaaaagtaattgtttattaatataataaataataacttaaaaattattttaatatataataatattgaaattatattatctaattacataaattttattttttttaaaaaaataaataaaatttatactattaatgtataaatatttttttttttttactaaattataagtaaatagggtggtgtatgaaaaatagagtgttctccattatattaatgcattattttttatctgatcattcaatatcgtcacccattgtctcacattgcttcactgtatctcacccgtaatcatcactgtatctcacttattgtcatcaccgtattagagtattcaacaccatatctctcatcgtatctcatttgttgtcattaccatattttactcattgtcatcacttgttgtctgatcatatctcatccgttgtcgtcaccctatctcactcaatatcatgactgtatctttcaacgttgtacctcacccgttgttatcatcgtgtcattccaatcactctaacaaattttaaatagtcatattgttgagaaacatatatattcttcaaaagttattttcttaacattataactctgaataacttccatacttttggagttggtagaaattttttagattcgttgcacttgtagtagagaagttaattttatatatttagagtaaatataaattaatactgttaacgcagattttcgttaatcaaatatgagcctaatagtgataatct

SEQ ID NO: 303507 - DNA, 730 bp, Cannabis indica
tgtacgatattatttgggttgatctttgaaaaatctcaaagtctttgaacttttaaattcatatttaacaattattcccaactaattaatggcatgaaaataaattgaaccacatccaagtgccatctatttaaatcaaaccgttttaaactcaaaatatattgatttaatccgaatgccatatcagtttccaagaaacttggatgatttcaaattcaaacataaaactaagttgaataaaatatcaatgagagttccagttgttgtggaagataaatagtttaaagagaaaatgctacgaagcttcccaaaatacaataaaatcagtagcatcaaaactagcagaagaaaagtgtaaaacatcaaacataaagttgtcccagatcataaattatcaaaaaaaaaaagtgtgaaaacattatctatgatatccaaaagcaagtttttatatgtctggcgtcaaaaaaagctactgatgtcatccattaatgagtggttggtatattttgagaagtggcgggcatattttgggaaggtgcactaaatggactttgctgtaaaattgtaaatgtaataagagttagtacacatgtagttgattttcaaacaatgtaattaacaagttccaatagctcaaattgtactgtgagtgatctagttgttggctagtattgatgacgacccattaacctataaacaggcaatggcaagtccagaacggaaacgatgg

SEQ ID NO: 303508 - DNA, 2680 bp, Cannabis indica
aaattctacatagaaacctctattgcaactagtactgcaacctaaattccaacaaaaaatcgtatagaaatccctattacaactagcgctgcaaccactttaaaaactcaaactgtaaatttgaaaagaaaaaaaaaagttaaaaaaatagtatataaggtaattcccctaaaaaattttctttttgaatttgttattaaagacataaaagaacaataatttattttgttttgttattagttatgtaaaaaaatatattttaaataaatattaaataatttagtattaaaaagtaactaattcaaagtaaccaatccaatctgcacttttatggattgaattgaattagatttgaactattgtgcagatcatattagatctaaaatataaaatccacacttaatacaaatcaaatacaccatgagtagaatagtacagtttgaaatgaataaacacccctaatttaacctaccatacaaataagccataaaaatatacactaacaccaagtattattatctaattaacctccatatataacaattcaacttttcttctttccttgttcaaaaaaaaaaaaaaacttttcttctttccttgaaataaggatccagtgtttctaatttttgccataccagcatataaatgtaaaacaccacgagtgaaaacttgaatgatataacacagaaaaaaataatgtattttgactatctaacaaatatttatcaacagaatatatatatataaatattcgaaaatattatccatttgaagataatcataaagctcaaacctgacaagttcaaaattcaactcgtccccatatgcagaagcgtgtgcacgtactgggctgccaccagtaactaggcagctctaagctaggacagattaaaaagcacaatacacccccgtttataaacgcctaaagcaattatacatatgatacagacctaattatctaccaatgtatacaagccaggtaaaggaaatgctcttctaatgtcagtctcattgtctcccactcaactccaacggttcaatagaatctttgcatttccttaaagcttctcttatctctttcaacatttcttttacattgatgcctttcctgcgaaaagaagtaacaatgaaataaagatcaataattttaagggaaattcttactaggaactctcttatcataagcagtaaatatgtatagaattataatagtcaaaagataaacatatataaattaagcacgtctcctgtggagctaaatctacctatgaaaatttgagcaagaaaattgaatttgttagacagaacgaatttgtatggttcacataatttagctttcacgggctggtcttatatgcatcttaaagttgttcatcaaaccgtctataccgcacaaactatccacaccgcataaaaaatacattttttgtaatacggttgtagtttgtatttttgtcaaaccacagtgtgcaatacaatttgcaattttagataaaataattgctctttaaatcgcacagcaccgccctaattttactattttctatattgttttgatttaaatttcaaaatatattgatctaagttttgtctcaaaaaaatgtatatataaaagattatgtatgtataaaatgtctatttcaagtctttaaagatttatgtataaaaaattattgacatacttagtggggtttgaaacttttaacattattttttattttatgtactaaaagaaaaagattatgtatgtatatatattagtttgaactttgctgtatttttattacgtgttgttgaaactttaataaaatgatgtatttttattgtgatactaaaattatatcaatagtgtaaaccgctacactgtatcgctttttttggtgtagtttttgctgttttgaggtgttgtagtatgtcacagtttgaaaaattgtaaaaatcatggtttagtttgaaaaattagcttaaatcccatatcacacaccgcaaacacccttagcatctatgccggtgcttgggcattgcaacgctgttcaataaagatgtgaataatatgagtcaaggcttaggcaccacgatgccaacctagaatgcaagcgtatcaggaaagtaagtctggtgggaaaatcagtttggttaattgagcgggttctcactttcatttttctattggctatcttgtataatatgatcacttttgttgtgatatataaagcaagggacatagttcttggagatgttcgggttttgaggaaaatctctaaagaaacagctgttgtaggggtatgcctgaagcttgaaggcttgcacgtgacaaagccaatgttaaatcggttgtatttgaagcaagctctttactccttcaagattgtagagaagaagtcaatagaatgacagatttcaacaacttcatcattgatcatgagaacattgttgtatcaattgaagatgaagatcaacccttactcctcagaagttctttgccaaaataatatacaaacttaaaatggaaccactatttaatggtagagagtccttgtctaaggatgaagttcaagcagccttaaactcaaaagcattaatcggagaagtgaagccaaagcaagtaataatggagagtctacttgctagagcctagaggtagctctgacaaagagagagaacaaaaaatgggagatct

SEQ ID NO: 303509 - DNA, 1555 bp, Cannabis indica
atcaattagttaagaatatgagataaagaaactggtttcgtaaaacaaccaagataaaaacttatacaaaaaaatgagctaaataaagataaataaatcaaaaattagttccttgaattaactaaatcaaaaatcgattcttgaaataactaaatttataaccaaatccttgaattaattaaataaaaatcgatttctaaaataaataattcaagaaccgattttctaaaataaataattcaagaactattttctgaaatgactaaataaaaaactatatgagacataaattaaaatacaactgattctacaacaaaatgagtaaaaacaaataacacattatagcttagaaatcggttataattaaaacaaaacaagagggagtcaatttcaaaaatactgatagataaattaaaatagttttgattccctgagtaaaaataaataataacttaaaaaccggttctaataaaaggggggggggggagagaatcggttccaacaatactaaaacataagttaaatagaatcgcttccacaacaaaatgagtaaaaatatacaacacacaatcacttagattctgattatataattaaaaaaatataatatatattatgttggtcaaactatgcacacatgattaaaaaagacatgttcgtcacaattttataactctaataacactctaagagttattgctcaactacacaatatgaggcaaggaatgaatgaaatgatatgaatgtattattttattttattttttttcattaagattagtctttattagaacatttgtaatgaaacagagtaaaagatattattgattgaaaaattgtgttcgattacaatggcatgggacactctatatacagtgtacaaagtacacgaggaccaactaactctacctaactgactaactgaaataactaacaacactaactattttaataggccccctcaagatggactgtaaaaatttttgatactcatcttggagattaaagtatggaaatgtgtttgaaagagaggttttgtaaggatgtcaccaatgttggatttggaggagatatgattggtcttgatcttgccattgttgatcttttcacgaatgagatgataatcgatttcaacatgttttgttacgctcgtgataaactggattttcagagatgtgaagagctgcactgttgtcacagaaaagtgttgaagggagtttgatgttgatgttgaagtcatgcatgattgagtgaagccaagttagttcgcaggtggcattagccattgctctgtattcgacttcagctgaggaccaagagatagtgtgttgcttttttgatttccaagatactagagaattgtcaaggaagatgcaataacttgataggggtgttcataaaatacctgatccaattcaatccaattcaatccgcaaagtgtggaaatccgcacttgtacgaattagattagattggattagaaaattcaaaatccgtacttgtacggaatggatgttgattgtcatgtaaaagtaaccgattcaatccaatccac

SEQ ID NO: 303510 - DNA, 2935 bp, Cannabis indica
atttcaggtagaagaagcttacgtgtcacggtattaggaatagatttttttaattaaggttatttttgttaattgattatattattagtataatactaaaagtttcccaaaaatatgacatggctcgtgagccacctgtaaagtctataaacaagatgctaacactccattaagaatacggacatatttttgtacttaagaaactctctcaaaatacattctctgaggcttaaaaaactcgagaccagttgttatcaataaaagtgatcatggagtaagttgttactaacaattggagtcgaactactataaattttagtgttttctctttaaagaaaaaaaattgcaattattctctccaccttgtccataacattcaccaacgaaaagtttttcacataatgcaagaatactaattatttttcaaaattttaaacatcaagaagttaaacggtggcgtgttcgagtgaatttgacagtggtttgttctccttactcgatcaagtttaccacatattgaagagcgacatttgataagaatcatgaggttccatctcaacactaattggtaatgggaatagttcatagatcttatatatgggctaattttttcacattatagcaatgtcagactctctaacatccccagtcacaagtggctcttttgctctactttttggatcaatatttttgaatttttgatggctcttttttggctcatttctatgaatcacaaatggctcttttagtctttggctacttttttttggatcagttttttaccatattagaatttagggttgtatggttgaaaaagttggaagtgtataggataagatacatgaggtttcacaatgggagaggagtaacccataaatcttatacatggactaatcttttcacgaccctctaacaacattagggcaaaatcatccttaaaaatcaacataacactaggatgacgtgattcacggtgtacatttcaagtatttgttgttcatcatgttttgataagtgcaaaactggccagatgacacacataatgggaatcataaaaaataaaagaaaaagaaaacagataaaactacataataagattaatcgtgtggcaggaaaacgtttgatttggggtttgaatttccattattttttctcgaaaacaggattcctcatatttcacatttgtgtgcgaatgatgatgatggtagactttaaattgaaattgaattattttttctcaatggatcatctgaattacatgatgaaaattctcggaagagacatttcaatatttgtccaaatgatgaaagctagacatttaaaattaaaaatgaattgcctccatgaatttggaagtacatgatgaaatttctcatattataacagacaataaacaatttaaatattgaaatttccatatgtatacaacgaaactcctctccaacttatccatccttcacgctgaaggaggcttgtacaacttctccaccgtctttctatattctgcaagacccaaaaactcttatttgtaaaataaaacttaaataattagataaaaaaaaaaaaaagaaaaaaaaaaaaagataagtgtatttatttaccttcttgattgctccaaagttgagctgcttgtgtattcaaaggcgaacttatattgggttctgtattgcagtcaggagatatatattttttaatcaatacttgcatattttctaatattagcaaataataaaagcaaagcaaagcagaaattacctccaagaagactctggatggagagtagaattgttctaacatcataggcagatgaccatttgtcctacaaacaaaataaaattaacatcttttgtgggttaataattatgcgttgttaaacagttacataaaaaaaaatacctgaagaatgtccagacaaatgttgccatatacatccacattaggatgaaagcaactggtctcaaacttgaccttaggaggcttgaaaggataatcatttgaaaaagagagtgatagcctgtattctgtgccttcaaatacagtttctttgcttccagtaattgttcctttccagcaaaatatgttgtcttcttcaggaaaggcagataccccaggatctccacccatctatgtttgacaaaagcactttcaagtcagagaaaaaaaaattctaagacaaaacaatacaatttattttaaaactaatatgcctaaagaaaatacactcaaatgaaatcagatttaagaaaattattattggtgtactctcaacattccaaacagataaaagatttagtatcttaccattaaggccatcagttcagattgcaacctgtttaaaagaaaatcaaaaccgatagtagttagaatttaatggaatgaaaaaattatgtaaataaaacacacaaacccaaacccaaacccagttgaatagtaaatataaaagtaacccgaaccccctaaaagacaccaaaaatcctcagttatctcaaatttagtgtataaatatatatatatatataaaaattaggtcacacaaaaatcattaaaccaaaatcttaggctgttcattctaatctttttatcaaacacttggtgtgcaaacgaaaaagaaagaaaacatacctcttaagaacagattgagagtcaacggtcttcgcgggaggcggagcctgtttagccggagaggtgttggggccgacaggagtgttgtccgggtatccattgacggcagccatgagacagatttgcaagaatcaacggtcaggtctggaattacaccaaaataaaaccaggggcgtttgtaagcttttgcaaagtgatgaaagttaaaagagaaagatttgtgagtaggaagaaagagaaggttcgtttctccgacttcctcttttcacagagggagagagagagagagagagagagagagagagtagtagta

SEQ ID NO: 303511 - DNA, 1788 bp, Cannabis indica
ctttttccatctttgattctgtgtcattacactttttaataatggatagatatctctacaaccttctagtttttccatcacactacttggattcatacaaaacatctcttaagtgaaaataacatgtttcataggttataaatttctatgttgtggaacatattaacaaaataattattataagtaatgtatatatatgtatatgtatatgctcttcatgatatggaatactatttgagtgtttcttttgacaaataaaagcttgtcacatgtaaatgtatgctagacttcatacaaagtgtgaacacaggcatgttcttggatgcttcctttgtcagccattcaaccatagcatctactttaaggccacacatagtcacatttattgggataaaataataaaaaaaaaattagaggggggactacaaataaaacaggacatatataataaaattatgtacagaagacacaccaattatgatctatatatatatagaaaataaaatactcatattattgactcaacttaattagtataaacaaagcttggtcaagctgagcctggaccaaatggaggcaaggaaactatgaagtattgaccaagacatacttaactataaacttttctcatatcttgctatacatgaaagatatcaaagagataatgccattataagggaccctaaattaatttgttatatgactaagcttaaatatttagcatatatatggtgatcgattatgacaaaattaagaatattcacatttttatataataagtactaaaacattattgcaatacatgtctatgtttgttttctttatccatcatccactaagtactagaaataaaaatacttttgtgaaaagacaaatagagagaaatagtatttgtagagtaaacaaagtaaggcctctagaaagcatcatatgggcaactgaaatttttgttgggttgtttatttcctttggaacagaatcatttacatcagtttctttgtcctcttttctatcttaaaaatttaataagggaatcaagtgtggatgttgcttgtgggggtcttttaagtcccattttttttttcatatttgttttcatattttattatccattcatgccatattccttaaaattcattctatataattctactatgacattcattcattcattaattcattattacatgttctcaatttttaaaagttggttagccaacctccactccacattgagtgtttgaccaatcatcaaataccaaactaaatgagaagacaaaattgagttagtgagaatattatacagttaattattattgaattttgtttgctttctagacctcaaatttttgtttcgttttaatgatttttctctaatttttaatttgaaaataaaagaattatttcgagttcatttcttattattattattattattattattattattattattattgtggagtccaaagttgaaaaatgatcttgaagtagtataaatacaattgcgtgttcaattgactatattgaaagagccaaattcatctaatagccatgtaatattacgattaaatatacatccttctcacacaaaagttgaaattctttaacttggtttgggagatcattcaatcttaggatgcgtttcgaaagtcatatatgaattaaaattggatataagtggaggtaattatatagtttggcgtgtttgtttgaacgcataactacaccataactgtgttattgaaaaaaattgggagacttcaattattctctccaattctcata

SEQ ID NO: 303512 - DNA, 1771 bp, Cannabis indica
aataataataataattaaaaatcgcatgcatttaaagtaataaatttgtataattatattttcactttgtttcgaaagaaacaaattcataattatatatgtcatgcatgcagctgagctcatgcaattacaatttcataacgaaaaattgttgaaatctgtccaaatttgaatataattttaccaccttaatatccaaacataatgcatcaatttatttatttaaataattattgatggtgacaacaaattaatattattattattattctcaattcttactctaagtatctttcattcctttttataaatacaattaaaaacacattcttaaaatacaagtaattttgttaattaaattttataataataataagaataattggcagtatataaatacttaagttaaactctcacaaataaatatttaagtctaacttttatcggtaataatacttaagttatatttctggaaaggtacttgaccgttatgatcattattcacatggtcattttcaaattggtatattcaaattatgttttttttttaaaaaaaatttaatgacttggactaaaggattgacacgtagtaatttatataataattaacagaaattctaaaagaaagtatttatgccgtaaattactttaataataataaaaataataataagggttttttttaacaatttaaagtaattttttttcatttttatagtaatccacatatcaacccataaagcaaccaacaaaacaatttaaactgcaatgaaaatctacatagctacctgcataaaaatttaccgaaacaactactatagcaactcaaattattaatttaaaaaaaattaaaaaataacatataaaataatttctctaattataatttgtaaccatactttctacaagtggagtggtaattaacatttttgtacaaaagagttaatttctcattaaaaaaatagtgtgggaccacataataaagtagtgtggaaatgatgataccttggggaggagtgagaggattagagaaatggtccgctaattaaggaccgaattctctcatatgtttatttctttatttgatgagcttccattccatatttcctttctcttttctcaacttccattcataattcgttttttttttctttttccgtcgattccgtatctaattgtttctttaataatactttatttattctctattctctccacttatggctttgtctctaaaaagaacaaacaccattgttcttgttccaaaactataatgatgatgatgatgaatatataataaagccaatgaaataatatgacataattcattctttaattaatatagctaaaacgttaattttgtaatataacatcattttattttattttatttttaaaaaagtacgagttttcaaactttagatatgtaacaatttccaaaaatattttttcagttttaatattatatacgtctctctatttttattttgtgtttagatattgttgaataacctgctagcaaaaataaaaaagtaacgatattaccgaatgaaaaattttgggttgagtcacggattaggtcgctttctttaaaatgttcgcggcactgtctaggagtgtgcaaacagtccgaatttgtcggtcgttcccaggataaaataacacaatcgtactgtatcaaaactccattgcactgtagggcaccgtcgaatacacccaaagaattttgatatcgtagatggaattttaattttatgaaaactgtattttt

SEQ ID NO: 303513 - DNA, 1626 bp, Cannabis indica
tttttttttttttactttaaaataaaaaacttgatattagagctgcaatcaattttgaagatattttatattttgactgtgatgaaaatgaatgagaaattttgcctgaccctaaagggtattgagagttaattaaagtatcataactattgtggtggtgatcattaattcatcaaagacttcataatcagttcggtggctataaattccaacttgtcaattatgaaccataaatattggattcgataaagatgtaatttttgttgtaggtggctccactagacagcaatgtatacatcaagtgacataagtgacatgtaatatttatgcaatttattcatacaagttaatatgcaaattatacccttttatgacaaaatatgtagcattaggtaacatttaaacttttttattttttaattataaaaatgaaaggagaatttttatttatttatttatttttaaaacaaaaatatattcaaattttaaaacaaaaattaatatgtgtttatttttgttttttatttttatttaagtcgggattggggttcgagtctgactttaggtttgggtgtggagttcggttttaggttcgagtcgggatcgaggcccagggttgggtccaggatccaaggtaggagcttgggctgaggcggggcatgggccggttccaagttcgtggtttgggtttgggtccgaggacgaggtcggagtccgggtccaaggtctagtgctaggtctgtcttcgagtcccgggccggatccagggtttagggttggggctcaattttgagtctagggccagggtcttaggccaggtctggggttgggtctaggtccaagaccgagtctggggttcgggtccatggtctgagtctgtgttcaaggcgaggagtgagtccaggttcgatttcgcggtctgggttgactcatagtcatagcagaggactaagtaaaggacacaacaacaaatgaagatctaatccaaaagggtcagaagacacataaggatgtttcaactatgggaagcccgaacacttcaagaaagattgttatttcttaaacaagaacagaaagaactagttcaataggaaaagagacaactacaactcagaatccaaaaaccctaaacagaacagatcatcaaaatgcaaatttgagtgactgttatgaaaatggagaagtttatgttgttggatcatcttttaaagatgattggatattagactctggctgtactttctatatgactaataacggaactattttgactgatttcagagatttcacaaaaggcaaggtgatactaggaaatgaccaaagctgtaaaatcaaaagagcagggacaatggcattcaaaatgcatgatggggtcactagatcactaactggggtaagatatgttcgtgatttgtccaaaaacctaatttcactaagtgtgcttgatgatttgaaaataaaaagtaagatcaaggatggacaaataaagatttgcaaggggtcaatgacagtcatcaaaggagtcaagaaggaaggtttgtactacatgataggagaacttatagctagaagcaacaacacagttggacaaaacaacatattgcaaagtccaaaagatgctaaagc

SEQ ID NO: 303514 - DNA, 3518 bp, Cannabis indica
aaaaaataaaaataaaaacatttaaaataacctgacaagactgggtttacgaccctattttgatgctttgctgacgtgtcacactctgaatggtcaataaaatataacagtcgtaacccctttatttaattttttcttacacttttaccccaaactaatttcaaattgcaaaaataccacaatcttctcaactaatcctttcgtttttaaatctctcaattttcgaaaccctccatttttggtttccaagatcaatttttttttttcccttcaattgtcttcgtcggcggataatggattcattggacaacgggaattgggattttctcgactgttcatttatcggagaaacacaatcctccgattttctatggtccaataacaggttcgtcttttattaaaggttgaagctttttgatgttttttgtcgaaatatatgaaatatatgaaatttaatgtatttattgtttgggttttttgcagtattatggaggttgatttctcaggtggtggtggtggtggtgctggcaataatggcgagggtgaaggtgatagtaatttgcaagaaagggatgagaaagaatgctctcgtaagaggtgagtaatgggaatctcatttgttttgattcttttttatatataatgaatgattaagttttgtttgtgggttttgattcattctttgttaacaatcgatttggctgggaaaaattgatgctttgttttcttaacctttgtgattgtgatattgaatcttgaaaaaaggggttcttttttgggctaattaggtttcgtttcaccgaattgtgcccccgaactcttcatgctcgtaaaaattactatgaactattaagattgttgaattcaataatttttcgttcgttcaatttttactaacagcacttcatgtggatggaagttcgaggggacacaattggtacatgtcaaagtttgggtgacatgatttggtacatgaattattgccacgttaggtgttcgttagtaaaattaaacagaatttaacgaaagtccttaaatctatcaaattttaatagtttgggaggaattgttcatggttcacgagggagaagagaacatttccttctgttatctattctttatgctttgtagctttaggtcatgatgaatgatttttttaccttctttgtttttcgggtttgaattaagttttgtgttttgttcagggtacgcactgactcttgtagaaagcaaggaacaaaggcttgtcgtgagaagatgaggagagaaagattgaatgacaggcatgaatcttcatttagctcagtttatttgtttaaattttgattgtttatgttattttgatcgaattgccatatgggatcttcaaactttgggctaaaacttgatactttgtttttatcttggattgactaatttgttcttttcagagttttaaatcaaatctcatcttagaattgaacttctgatatttagtaactgatattcacaatatccttagagcttgttcctttcctactaatgtagtcatgaatatttttcaggtttttggatttgagtgctgttttagaacctgataggcctgcaaaaactgacaaaactgctattcttgatgatgctgtaagagttcttaaccaactgaaaagtgaaaatcaagagcttaaagaaacaaacgaaaaactactcgaagaaataaaaagcttaaaggttagctacatctcgttttcattgataacatgccttcatttgccttgttcaaattcttttacttgctttttaatgattagttgtttcgttcatcactctgctagttgatttgctcaacttagaactggaatatgccctgtttgtgttctcaacttaccccataatagcatgatttatgattagagttctcttaaagtattttagatttaggctttgacaacatacttaataatccccattatcaataggcggagaaaaacgagcttcgcgaagaaaaactcgtactaaaatcagataaagaaaagatggagctgcaattgaaatccatggcaatgccacattctggatatatgcaggctcatccagctgctgctgcatatcaaaataagatggcggtttttccaggctatagtctagttccaatgtggaactatttaccaccggctactcgtgatacatctcgtgatcacgagctgaggcccccggccgcttagtttctcaacttcaaacactccaacaaggtctttgttttttacattacctttcttgtcttaacaatttatctcaacttttattgtgttcttctcaagacatgtaaatatcactactgtctcaatttgcctcatattttttttaatcaattcaatggggtggcaaatttagtgaaaatggctaggaatgtaatgatgatgacatgggattttctaataaattgttgttgttgttgttgttcttatccactcttttgccatttttcatgcatttatttcatcttttgttttaagcttagtgacctaaacaatagtatatatatttatataaattaagtacacttgtaaatttgggattattttttttctccttgtagaaccttacaagatgagactgaattgaataataatttatacttttagaagctattaatattgtttgttattggttattaggtcatttattttttaaaaaataatttgttatattatgcttttgtgaattagaaagccataatttgaatgtgaaaaataatatttggcccacacactaacacaataaacaatggtttgtcttcatcacaaaagttcaagggtaaattacaatacccaccccaaaataaaaaattaaaaatattttttaaataaaataattgtaatataagtacttaaagttgagtttataaccaatataaacttaataatttttttagtaacataaaataagtatttaatgttggtaaaattataatttttatctaattttatcgttacggattctgttagtattttaaagaggatatatgtaagacttaaattctaaattagtgattttggctaaatatatgtattattaattatttataaaaactaagtctggttacaaatttaagacactaaagaagtttgtaatgacaaaatcggattaaaattataattttactaatatttgatacttatgtcttataaattttaaaattttaagtctatgctacttataaacttttaaattttaagtagttatgcgactgtttattcattttagttttaaatatgcagtttgtaaaaataatatagtcccttctttcttcttcttcaatggccaaccatctcttactcactcaactctgtctttctttcactactactgacaatatcgacatatgctggccaaatgtgtttgttggttgtttaaaccctaatctctagtttcgtactcatcatcgtcggttgttgtgggcgaaaaatattatgtttcgctcatattttttacataagctaacactatgtttggtgagaaagacggaaagagggattgac

SEQ ID NO: 303515 - DNA, 854 bp, Cannabis indica
gcaacatcagtagcccaaggaaataacatatcagctattagcccatctggacggtgtcgttttataagttgttctatttgtggtccaagcattggaagagcttgaaaaaactttgaaaccatctcaggtgttgtagccatgtgtaagctttcgattccttctgggagtccaacctcataagttggaatgttaatggtgagaacatcaatttgggtggctgaatcagtgttttgatttattgatttggagagaaaaggtaagaagtgtggtgtgatgataatggttgatctttgaccacgagaagcaaaaagcttagccatgtcaatggctggtattagatgaccttgagccattaaggggaggaaaaatacatgaagctgctggtggggttgatgtgtttgaatgtcctccattgatagaccacaagatttttactacaaactgatagattttccttagattttcctttttatggtttgtacgatgaacattgagaggtagagagatgagtatttaagtgtgagtgtcggtgttaggtgttaaagagttacatctcaaaactaattggttatgagtagagtagttttggacaatgttatccaatattagaaaattgctgagtcacgtggcactgtagttttggacattttgcacctcacctctccaaaatttctgtcgcaccaccaataaaaacttcatatccaacctcagtgattaaatatctttaacaattgacatgtctgtatacgtgaacgtgagtctcgttttcgtgagccaaatttttttagggggcttttgtaattttggctacatttgaaaaacatttttaattaatttttttttgttttttaatt

SEQ ID NO: 303516 - DNA, 1719 bp, Cannabis indica
atttttctttttaaactctctattctcataggaatttcaaaattactaagccttaaacaggagagaaaaggttttgatcttttcttatcaattttcttttcctttaagctttaaatttaaagactccaaattgcattaggattaaggtgttaggctcacatataaataagagagctttcaataaaaaaatttcacttcccacgcacaatcctttactgaaagccttagatttttatctttattagttcgtcaggtgctcttcatccatcaaggttagaaaaaatttcgttttttttttttcggcaccgttggtttttttttttttttttgaaatttttttctccttgttgagattgcttaaagggttctacaactcccaaaaagtccacgaattctttatttaagaccttcaaaattgtaaaacaatatctttgaaattcccttgtaattaccttggattcacctttccaaagccaaaaagatctctcttgagttgtaagtaaccaatctttgttatcattgtgccttggatgaagagaagtagaagaatatcttatgaatgttatccctatgtggctcagttcattagagctaagttgattgtgctcaagtctaacaacttagacaaggcgcgaggtggaaaggtaatgacaactaagcttcttaaagctgccatctagattgatgacccaatagaccaagctttcaagttaagacctcttgtatttagtaccatgattgaacaccaagtacaattaatcagagataatttggctcccaaaatccttattgtagtgcctcgtcgaggttccttatgaatgtgggtgcttacttgcccttgcacccgtggtttatatcaatagcaaatttttttggagtttgtccctaccaaataaacttaaatggctacagaatcctgtctacattattcatcttccaccgcttgagaaattggcatgtcctaactccccctgaaatcaacatcctttgtgatttaaaaagaagcccaactcgaaatgaggaggggttctatcatttttgccaattcaatccatatatagaaaacataaccaaaagtaattgtgacctttactaccaagaatacttctataccttaattcttctatcaagaaatatttccttaaaaaaggtttgaccctttcaaaagacctgctccattaattaacatgaataggagaatagatgccatgctaatagaaactgttgcatggaaaagagatgggaggactttgtttactactgagaacctctgcaatgccgacctaatcatatcttcttagtaagtttatgttgatactcacttctctaatgattcttggacaatgccaatcgaacaagatgaagatgatggttagagtgcagttgtcatcttgtctaagatagtgtcgggatatgagaactcggttgataatgaccctgaatatttagggaaaatctttgtgttcttagatcgggacgatggtgaagttacttctacttaaattgttttggaaaaagatggggaatcagtaggtcattgatgctccacgttttgtggttataccttgttgtcttgcttttcttgtattgtactaacaacttatctttccttctttgtagataatatgagtttcttggttgccatggcatcttattttaagaggaagattcggtgccaaagaagtctgtgttgggttttgtgctctaaataaaacccat

SEQ ID NO: 303517 - DNA, 2097 bp, Cannabis indica
tgataatgcctagaaatatattctaattactaactaggtttgataatgcatagaaataactaggctcactcaaaaatgactagaaataagtaggttcactctatgatgcctagaaacaacaataaagaaaattgcaaaaagataaaagagattgattaaagctagtttaaaacagtagaaagtcttgtaaacaacatcaagctaaatgcgatatgaataaataacgactcacatatatagcaagtactttaaaaagagatctcatagtgagtcttaataaatagtacacaagctaaggtgcggatagaggactaactattcgcagatgagcaatcaaaaatgttcaaaacaatcaagtactgtccagagcaataatgcataatatattcacaataattacaaactcgtatatttatttttttcaaaagtagataaaatgtatataaacaaaaaatggcataaaattatggtgtaattaaagctaagttggtcgtcgaacaaaacaaaatgaaattaattacataaataagaaatgccacaaaggaccagataatgtctcgactagaaggccattgttcaaaagaagatgttatttaaactaagtttttatggtaggagacttagagggtacattgtcttcttcctcatcagcaacctcgacctcattttccttgtcggagctaacatcctcgtcttccttggtttgtttgaaatagtccatcatcacccaaaaaactgaggtccatgtctttattttctaacgaagctttataaatggtgcgtttgccatcaaagtaacccttacgcaagcatcttctcttagcctcatcaaggtcttttggggctttttagggggattcgagttgttgtttcaagttgtcaaattctgcctttagtgccttctcaaacttttccagatcttcaacgtgtttcttgaaacaagtaatctctattcgaacatcattccactgagtgactagtagctagtagtggtcattggccttgcgaagctccagccttaagtggttaaagttttgaagacttttttggtaagccataaacacaagaaaagaagcctgcatgaaatatgaagttagagagagaagtaggagaaggtatgatgaaactaagaagtcaaaaaactagctgactacgtgagatcaacacttcatgccaagaggttgttctgggcactgttattgatcaggttccagtcatctgattggaaagtcctaaaatggtgacatgattgagtcacatatcacgagcaagccttagaaccttcaataccagcattcggtggcaacagacaagtggggtccaatatcataacttgtggcttgtctgcagaaaaagtaacttggtggacagaccccaaggttggcttgtctgcgctcgtatatttatggaccagagtagaattaggtggggaaaattatccttttcaataacaatgtcagaggaagtagttttctttttgttggttcccttcttcttcttggtagccttgggttgcttcttagaagtgtctgcttcagaggcacttcactttttgccttgcttgatcgagacattggggctgtaaaagagattttccaagtcatgtctacaaaaataaaacaaagggaggttaaaatttgtaaggtgaggataaacgtaaagtggcgagatcaaaactctcacctaattaatttctagaagtgctaggcgaggagggattgctattagaattactaaactccctagaaccaatgatcataaagagatcaagagaattaagtgaagacatatcctaattccatctagcagccctatgcatatttgtaacatattggtgatcaattccataataagaactattactagtcaactaggcgtggaattttgggtaccaactatcaagcctatgagcaatcaagtgaacacagtttctagatgaaaaagttaaaatgaatatttttaaattgtactaaagttgttagctcattcctaagggcagtaggagacaatccataaaagcaagaagttttacctcgtgcagccctttcttcaacctcattaacttcccgcgtggttatgttatttaagtagtgggtt

SEQ ID NO: 303518 - DNA, 2514 bp, Cannabis indica
taattaaaattaaattagcaaacataattaattgattttccacaatatttttccacaatttttgttactctcttttagtactcaatctaaatttcccaatgagcagcacagtactagagctagctattgcttgttactatttattagtatatatactaacattacaaacatgacataatacaaaatacagttagaacctacctaggtctaccagtggaggttccactaccaccatcagatgatgatccaaacatatgatggtattgttgttggtgatgatgatgatggtgttgacccatcatcatcatcatccccgttgactgaactccactactaatattactactgtgaccgtacataccaccaccaccagagttggctgcgaagctaccgtgatcatcagagccgccactatcgccgccctgaccgcggcctagggtggctccagcagtcttttctccctccatctcccgaaacttttggaggtaaatcttgagaggatcaacgtagtcttcgaatcccaaagtggtcatggcccagagcagatcgtcaccgttgatcgtctttctcttctcgcgttgacacttgtctgaagcttctccagttatgaagcttatgaactcagaaacacactcctgaactgtctctttcgcgtctttagagatcttcgcgttcgccggtaaagccttcttcattatccggctcacgttagcaatcggaagaaacctgtcctgttctcgtggagatgccgagtttggaccacccgagtcgttgtccgagtcagccatgctctctttcaacttaattgttatagtttaagatcagttttggatagtatgatgatgagattctggatttttttaatgtaaatattattatgttaatttggattttggatatagagagagaaagagagagagtcagtgtgtgtgtgtgttgagattggaatggttgaagtagtgaatctgaacatatggggagtttaattagttatagttatagcttttttttttcttatattgagttggggtctgacacgtggcgttattatgagccgttcgtttaacgataagttttttgtttctcacgttgacatgtgatcgggtttatttatatacagtcacaaattgataaagacctgatcatcaaattcaagccggtttattaaagtaagtctccactttagccgcatataaaactaataatctactaacaaattttgttccctttagattcgatttataagagtgtattatatattcccctattacgtaacgattacgaacgaaattaatcaaactaccaattaaaaattatattatatacttttattcatgaaaaaataacttattctcataattaattagtttataactttttatatatagtttagtttcattaggtttttttttttgtgtgtgtgcttagcgtatcgttttatttgtaaatgtgcatgtatatatattatgctggtgataaatgatcagtcttttaacgataaattattctacatagattaacttatttcaccctttttatttgtttttatttttgtaatatcaattggtttagcaaaaatggttatagtaaccaatagatattaattctctattaaaattaatttacttaacctgtggagcattttttttttaatatctattggtttagcaaaaatctagtttatctccctattaaaataaatttacttaacctgtggagcttttttttttaaagattgtggaacttaaatttaaataagtaaaaaaagaagaaaaaaatttaatgcatgtttttttttataaacaatttatagatatgaagagaatatattacaaaattaaacaatatatatacgatatatattatttgattttttttgctctagaattttctcacaaatttttgttggtacaaaattaattagaataatgaaagaaaatcttcaacaacattaaaaataataatgatactatttattgcaatagtttcagggtaaaatgcaaagaaagggtatgtgtatcagtatctacttactcactgctccattcactatagggtaaaaaccaactgagaaaaatgatagtacgtgttgaccgagtaattgaaatttgaaattggaagtaatcctataatttgatgagggcaagccatgcggtaaatttttttttgcctctgacgtcataaaaagaacattattacagcaaaaacttaaaaatcagaataattaaataacatgtacaagtacaacccttacaaaaataaaaaataaataaataaaaaataaataaataaaaaaaatattaacggctaaactatatgaattttaaattttttaacacttaactacacaaatcgattttttaggggcaaagttaactaaattgtactgctccaaaaatcaccatagtggattgtagaccgctaaaaatttgccacgtgtacaagtgtatatacgtggacagtccactgtagcacttaactgtaattttttagacggaggggtacagagcaaaa

SEQ ID NO: 303519 - DNA, 965 bp, Cannabis indica
attataacttctaagcattaaatgtcaaacaatttaatgtaaatacataaaatcaaaaaaatataattttcaataaaatgtagaaccaagcaataataatttttaactataaaaaatacgtgacattaaagatgaaaaaattattttaataagcgaaaatccataagcatatgtcgtaatgagaatcaaaataaaataattacttaataaaataaactagttttcatcgagaacttagaaatccataaaaaaaacaactaagtgttgttaaacttagagcgttttcattaaatttttctatttgaaactgtcttgaattgtaaaaatttaagtgtctctttataagaaggtaaaaggacaaatgtataattaaaacttattgcaaattgtatcgggtaaaaatacaattactcaatagttaaattcggacttgccacatgatacatttggattggttgtatgaaaacacgtggcgaatggatagaaagacacgtggaatgtgactgaaacatgtttgggctgaaggggcacggacagagagaagccccactctcgaggctgggcggtggacgaaaagagtggcccacgtgggctggtgtgcgtcacgcgcgcgtgagaggaatggggacaaccccttgttgttgcctgcgcagacgaaaaggacaatgccacgtggtgctcttgtctcctggaaaaagaatttgggccctttttgggctgttagactcaaaatggtcttcaaaaggcacttcttcaatgctttggaccatcttttatcatcttttcaattctctttttactcttttctcgtatgttatttttttaatcaaacacaaataaaattaaatccaaacaatatatttttaatataaaatatatcacaattattttaataaaaatatttattaaaaatccaattaatttgtaattcttttaataaaaataatatattttcttaacttttt

SEQ ID NO: 303520 - DNA, 2336 bp, Cannabis indica
gtacgagccattggggaaatgaagctgagggagaagaagtgttgtttgtttctcgggaaaattgagagcgaaaatggtttggtggaaagtattgaatttgagtttggtatttatatttgttttgtgtgttatgaggatgaacttttgagcgttgatttgttctcatctaacggtggagattcattttgttgttttcacgcggatcgtgaaaagaatattttggcggtttggaatttgacatatggtagttggatttgtgagattcaatgtggagcgttgattgcttttcatccaacgatgtagatttaatttagtgtgtttgttcggatcacgatccgtggtttaaattattgaccaataaaaattttggtattacgcttacgtttttctttcttttcaaatcatattggcgcttactttaatagcttacattagtagtggtaaatagaagagttattcacagctaaatcttattaactatggttttcactttatttaatctaacaacttcaattttgaatatatacatactcaaatatatgaattgtcttttttaatagacaaagaattaaatttattttcaataatacatgtatatatcgtaattttttgagaaaagctgtttttaattataggtttaatagagttgatgtagaaagattattaaaaaatatttcattacaaatttttttttttttttgtgtaatatagtaattttttccaaaattatattcatccagtttcgattagaaaaaattgtaaattttttaagtaaacctacaactttttttcctttctcaattcatatttttataaacacaattaaaattcaatttcacattattcacttcatattattattatcacaattaaatatcaacattactttctttaaatcatgttattaatataattaaatatgtgtttaaccttttttcagtatcaatttcacgaccctcatatcattattaacacaattgagtatcaattcctcaattcataataatataatgaaattaattataagttccatcacttgtaaacaatacccctatcaaatctagcaatactatttctttcatgattattgaaattcttcacagaaatgatactaatggattttacgtagtttatcaaaaaagagaaaaaaaaacaaataaataaaaaggtaataaaaattaaggaataaagagattaaaattgtaaatcaagaatctatttcttttttccagattcaaaatagctaacaatattgaaaatcaagacaaagattaatactttgattaactactaatattcattgatattcgttgctaacactgataataagaactaacgaaatctgacaagataatccaatccaccattggattcaaacacaattttacaaacaagacaagattcaacaaatcctaagctctctcgcctctaattctacgagccaactgaatatccttaggcatgatcgtaactctcttagcgtggatcgcacagagattagtgtcttcaaagagaccgaccaagtaagcttcggcagcttcttgaagagcagacacagcgctggattggaatcgaagatcggtcttgaaatcctgagcgatttctctgaccaatctctggaatggaagcttgcggatcaaaagctcggtgctcttctggtacttcctgatctctctcaaggcgacggttcctggcctgaatctgtgtggcttcttcactcctccggtggctggagcggactttcttgctgccttggtcgccagttgcttccttggagcctttcctccggtggattttcttgcggtttgcttggtacgagccattggggaaatgaaaagggagaagaagagttgtttgtttctcgggaaaattgagagcgaaaatgggattggtgagaagtaaggtatttgagtttggtatttatagtaagcgttgaatgagaagcggtagtgtgtgttgtaaggattaatttggagcgttggatttagtttatattaacggtgtagatttaatttagtgtctcgatgcggatcgtgatccgtgtgttgacttattgtccaataagaatgtttctttttggcgcgtagttttgggaactaaaagttttggttattcaaaaatatatatttatatttttctctaaattttggttataattgtttaaatgaaatggagtggattggttttttaaagcattcaccaagtgaggaagtataaattataggatgattataataatgcaccccctttactcatacacccttaaattgtttcggtatccaaaaaaaatttctagtctaatttttttttcatatttatgtacgttataactattt

SEQ ID NO: 303521 - DNA, 2875 bp, Cannabis indica
aaaaaaaaaatagttgattgatttcttttcttctattttggaaatgtgtttgattgatttaaccaacagatccgatattatctgtcttgttttaatttaattaaattaaattttatttgagtttttatttccaaaaaaaggaaatttgaatttaaaaaaagtacacttttttcactattaaaaaaaattcaatttatcgcttttgaatgtgttaattctctgaagtgtaggaaaaaggtaagaaacggtgcttgacatggcaaaagggttataagagtgtcgagaggatctttctgtgtgagatgatcaagaagttggggttctataattcttggacctggttggttcacagtttatctctttagtatcttattcagttcttatcaatggtgaggtaagtgaaagagataaaggctaccttaaactcttactctaaaatgatggaaagctacaggcaaaataaataaataaatattaattggttacaagggattaaaaaacaatttactttcatgctagcattaaaaaatgaaaggaaaccaatcacattgactcttttgttaacgaatatagtaatttagtggatgactataatgagatggtctttcattatttaaaccacttcaatggttttgtgggtagccacagttctactacaagtgatatcaagaagaattgttttgttatgagtgctactcttaatattgatcaacatatgcaactgattaagcttttcgctagttttgatgtgtatttaatattcatgagttaaagagccccaatcctaatggattcggttcaatatttttcaaggttttaaaatgatgtgattactcaatgtgatttcaattagggtgactctctatcaccttcattgtttcttatttgtgttaagggctctctcctttgctcagaagagatggtgatagtgggtattttgtcgggattgtagtgtggtaattcatagtcaactatctctcatttgtttttcatgagtgacaactttttttttccttaggttgtgtttgaaagtgaatttgctcaggaaagaaacaagtgaagaaaaggaaagaaaaaaagtgtgaggaaaagaaaaaaaaactattttaaagaaagaaaaattgtagagaaaaaaactgattttcatatatttttttttctctctcttatcttgtttggtttcttaatgattttagaagaaaaaaaatagattgtttaaaataaaataatttatatttcttaagttagaattacaataaaacatgtggcagaatcaaaagtcatgacagatgacaaatgacccattcgaaatgggtgtatcaccataagcaactttggaagtcaagaagctactataagaagaaccctttccaagaacccttcaggatcttggagaatgccactaggttttgcaaagacatcaagtctacctcttaagaagggaggttttagagggcctgacccttcaactacccttctgggaagggtgatccccttttgttagcgtataaatcaagaaaaacattatagcatgccccttccgtactaacgacaaaatgagttttccataaaacaaataagaattgagatttctccactaccctttttgacatgtacctttcctatgcattcatatgcagtttataccctcgcttgtcacatcagcagtggacaaggatacttacaatgagaggagctagctctggaagcttcttcattaggcaaaggagcctccaaatccagatgaagggaaccaaatttctaggccgccttatgggcctccttgcggtcagcctcactctaggcatgagcaatttgatcttccacctccttgcgcctccaaagagcgttgtactgcttctccatattagagatgtaatcaagtctctctttatccactttctccttgtccttggcattgggacaaataagtatggagagatcaacatcctgtatcgtttgtgagaccactaaaagatccattttttcctaattggcgatggtgaccaagtcccgcacattcagctcttccctactcaactttaggaagactgccttatggtccctaaatagatgactgggagcattcaggaagaaaggacctagaatgaaatatgttaatcctcttgaagaccttcagcaaaagaaaatgaagaaaaaaagaaggagacgaagagagtctagcttacctatcctcatccactagtgaacaaattaggatgagtaaatgctcaaaacacaatagaaaataagaagtgtttcccaaattctttaacgttcttctaatagttaaaaagtgctagatctttattctctagatgggcttagagggcataaaagtcatcctagctcctatctcctttctttaggagtgaaacaagttcatgaaaatacaagattttagcacgggtaagaacatcccaacccctgaaggaataaaaaatgaaaagtttggccatcaaacgataagcttgaggaatcaattggaaaggggctagccccacaaaaaataagaaatcaataaaatagtcttgtagcagtaaagtggccctagacatcaagtgagtctaactccaggctctgaacccgttacagttatgatttagagtcttatcttctatagcagagcagttgtaaagaatgttctaacgggatggcacacctctagttttttcaatccacaccaaatggagctaatgttgtttttatagtccaaattagagtagaaagcggaagcaatttatgaaaaatattttatactctcataatatgaactaaaagctgtaggaatacaaaatatttataaacattatgactgttggaattattttaccaggatctagatttactaacaaatatgtttcattaacatcct

SEQ ID NO: 303522 - DNA, 2871 bp, Cannabis indica
ttttttttttttttaattttttaaaagaaatttttttgcttcagtttataactgaagtagcgtcaatccactaattttttgcttcagctatgaaccaaagcaaaaacatttttttttctatggttcgtaactgaagaaataatcaattagcgtaggttcataaatgaagtaaaaaaaatcactatttgcgcttacgcttatagcgtcgggtacaccaacccatgcaaaatctttatatgtcacttaaaaaccgaaacaaattttttttttatagtagcgctctctcagcggtccaagcccgttgttgcttctagcaatctcgggggtccatgctcgctgttattgattatgcaatcttgacaatcttcgcccgtcaaattaggtacattttgaacacaatttagcactttgacacacttatcttggctggcccgaccccttgagattggtcgatctcgatagtcttcaaacaacccgccgagatatgctaatgctgtaattttttttaatttccctttgctattaattaattatatatgcaaatttataagatataattttagtacactataagaagatatatctaatgcatctcataatataataaagtattatatcgtaatatatgttgtaattagttcataaattttgacaataagtataattagtctttgctaataaacacaacccacaacacacaataaatttttttcttatatctccaaaatacacaaattttcttgaacttcactaaaaaatagaagttttaaccttccgttatcatcacaacacacatttaatctctaacattattattatatcattgaacaaagaaatgagtaattctaaatatctctaataatgaaccatcaagaaaatttgatttcactttgtaaagttgtacagttttgttgaggtgatatatattctaaactttttaagccaaacttttctacgttctaacaactaatgtgcatatccaaaatgaaacttgtcaattctaataaaattaaacaaaaaaaaaaaaatttaattaataaattacatttactatatctagaagataaattattaaaaaattagccatagtttaaccctacaccacacaaaaaatattaaaaaaagtttttaaatcatatcatatttatagagcttataaactaagaaaatagaaacttataaaataaaaactatattaaagtaacaactacacaattgtaatacaatatatactatatacaacaaaaaaaatcatatacatatttgtaaaaatactgtttgagaaagataaatttttcaagattccaccaaaataactagattgaaatatatttatataagtaatattttaattaaatacacacaaaacaaaagttattattttgatctaaacttacaaaattagaaaaaaataatggatgtgacaaaaaataaattttacaattttctaaaaaaatatttattaagtataagtcatagtatatatctcaacatcattttaaaaaatacacactcaatatattattattaaattttcggccaaaaataatataaaaaattaccctaaaatatatgtaaatgatttttcaagttattatagggttgtttaaactttaaagagtacccactatattaacctcaaaaatatagaaaaagataacaaaacataaccaccgccattttcgacaaataaaaaaaaaaaaaagaacaaaaaaattaaaatcttacacaaattaagctccaacaaatttccaagcgtccttagtgttgtacgaagcttacccaaatgagtttgaatctataacatccaaatataatttagcattttgtaaatttactcaaccttttaaactaaaaaaagctacaaatttagggtacaaatataaagaaatatacaccaataaaaattatttaaacttacattttctttgtagtgtagtagtaattaaatggagataagaaagctagattttggatgaaattttaggaatttttggatgaaacttttcggcgttctcaaactggttttgagagcagaaaagggaaaatattttgggaagaagaagagaatgggaaaaaaattgggacgtttaataaaaattttaaactgtaatgaccaatctcagcaggctttaatgagcctgcagtgattggggtattgtatttggttaatggggcggcacgagacaaactagggctaggtttattgttttttagatcaatctcgacgggttaacttacgacctaccaagtggaaggcttcagattggaatggtattgtggataatatttaaaggaagttacatggttgggccagccaccgtttatcttttacaagtagatctctgttagtgcattttgttctattgggtatcaagaattactggatgaacatttttattttgcctcaaaaagtaactgttgaaattgataaaatgtgtagagattttttttaggataagttgggaaatagaagtaagatgcatttctcttcttggagccatgtttgcttgcctaagaattatggtagaatttattttaggaaaggtataagaagtggaatatagttttaattattaggatttataaaacacttaagaaatatataaatcacagatctgaacatattcctaaagtgcttcaatatagaaaaccctaaatcataaataacctttgctaaattaaagaagaagaagatgataaaatacgagcggaagcactaacctgaagccattattagagattgcagagaaggttttgatcttccaagaatacactattttctaaagtattttctctgatggggaagaagagaatacagaagtgtttcttggggaccacgacctatttatagactcatcttagaatgag

SEQ ID NO: 303523 - DNA, 642 bp, Cannabis indica
aacagtagaacagaaacccaatatgaagatatgactaaaaaatttggttgttattttacgatcacattatactccatagcggacgtgattattagatcacaaaaacaggtgaaaagccttacctaaatgaatcgcattaatcaaacacggttgatatcgttacttttcaataccatttgtttaatataaccacccatgtttttacttttatagggttttaccagcataaagagattgttttaaacgatatagtatgtagtgcagcagaggtgaaaaacagatgaaattcactaaatatgtaactgtggagttacgagtacttatatataaaaaactcaggacagtagactataacaatcaataaaaaataaaacttctacttctacttcccatcgttttgctgtgtttgtatacctctggaaaagtaggtttatacttctaagtgatagtcaattttgtcagccaattgtagttgcataaaacataagcaatgaacggttttgagttgccaaatattaaaaagaattatctcaaattcttatacatttttcttataatcctactcctatcttgttcatgtaccagttgttcattttgaggaggcgttcataatatgataataagatatatcattttcagtat

SEQ ID NO: 303524 - DNA, 1468 bp, Cannabis indica
ctcgtttactttgattaactagtgcatgtgttcatctttctcatttacgatcttctcagatccattgatgaaaaattgtgtcaacaatttggtaattttattgagagcagtgaatacaagtgttaatgaccacttaccatcatagtgagtacgagacgaacaaactatgaggaggaaaactatggtggccccatgaatgaagaaaataccatggaacaccatgaagagtgtctacccactgaaccagctggcaaagggacctcttgatgcccaggcaaacaaccaatgcatgacaatgaagggtaagtccaagatgctaggagtttgtcaccaccttcacatggtgtatgaaggactggtaatgtctatgaggtgttcataaaaaatgatgtatgcgccaacgcttggatgaaactcttagattcaatatagtggcaagagagatatggtgcccaagaggccatgattaaagtttaaattcgtacattttaaaggtttaattgtgtttataaaataatttaattaattattttcatggtttaaattgtaaaaattttttaattgaaaatattttatttattttgaatttatgttattttttcaggttcaaagtccaaatgagcaagttataagtgattaaaaaagaatgtgtgaaaagtaaaattcaaagttcaagagaataggcccagaccatatgcatctcgttgatggacttgcatcccaccttaattaagctaataaggatatctaatgggttcaaagtattgatgtgtaattgggccttacatgttggtctgctcacttgcaagtgacgagagaagcccaccataatcaacatcacttaactctatatgtggtcaatttctagagaaaattacattgtatacccattttattttacatgttataatttttatctttatttttatattttttgagatatacctacttttatggatgatgtccctattatgccccttaagttaataaaaaatatgtgttagacttaagtggaagatgagggtatattgggcaacccactcacaaaagtgggtacattttaatgaaatataatataagggtatttttgattattggatacaaaaaagaggtattcctcaacttatcctcaatttccttccgtcactcaacaactccgcagagcataagtcacaattacatgcaactccatgtttgtctcaactcttctactcaaccatgtgcctcacttgttccagcatttacagcccactaataccagtaataaatatgtaaaaatagcagtgtgatgtattgtagtctctataaataggggcgaaatagaattgaaaaaaaaaatagattttacctagagacttattatactaaaattttgtcattttctttccttcttctttattttaatttagggataattgcggcaaaagtccctaaaaacttaagcttgatgcagattagtcctcaacct

SEQ ID NO: 303525 - DNA, 2209 bp, Cannabis indica
aaaaaataatgttgtttattgaaaacataaaagaaaaaaataattatacaactaaaaatatacataacccatataaaaattaaaaatataactaagcatacgtgcattgcacgtaatattaacctagtatatatagagatatttatggtaaaactacctaaattttacgctttataacacttaaccccacaaactcattttttgacggtaaaacttaccaaactcacattctattttgctctttacatttccatccaaaaatctttgttaagtgtcatagtggatagcccacgtatacatgataaatttttagtggtccacatattattaaggctaattaggatttttttcccccgaactttgacatgtaccaaatcatgccccctaaacttttttggccgttaaaaattccctctgaactattgagattattagatttaaggacttttgtctaatttcattcaattttactgtttcagtgattgtttgtgtactaaaccatgccccccacactttgatatctaccaaatcatgcccgtcaaactttgatatgtactaaatcataccccctgaattttcatccatgttagaatttttttactaaaattagacaaaagtccttaaatctaacaatctcaatagttcagggggaatttttaacgacaaaaaaattttaggaggcatgatttggtacatgtcaaaattcggggcggaaaaattgctaattagcctattattaattattaaaatattataaaaaaataatttaaaaatgataaaattaaagcaataaaataataatttttttttattattttatgttttcttttcttcttatgtaataaccctaaaagtttcaggctttagcgcaaaagaactaaagattccatggttcaataataattaaacctcacaccaccataacaaaaattgaaaattttagcacaactaccacaactgataaaacatccattccttcctaaatcccctgaatttcaaagcttcaaagaatctattatccgtatttttggaaggaggacacatttcattcccaattcaagattaaccctctaaggattagtcaaaagccctactaagacaacgggcctactctgtatggaaggatgggcctcacacctatttgaggcccaagatatttacgtccgagattggatctctccagatctagaagggtgtcctacccgaataagaaggagcccagagaccctccaaatgatcatctgggatacatccgaacggacattccaagaggcgtcccgtaaacttaatataggatgatgtgtcgaccctctaatacaaaatcccattgaattaggggattgtctccagtgtcagaccctaagaatgtgcgcaccactaaaaggaaatctcccttttgttcgacgatcactattctgacactacaatacataaagacaccgcacgcattccatctgtcaatattgcatggtccctaagcgtacagatcaccttcgccccaagcctcagtgtgtgggctcaaagtcaatgtatcttatgtatttaccctattagtgggcaatgtttatatgcaaaccctaataggtcacatatatatctaaaactagatcatagcctttaaatactacattataccctcatgcaaagggttggaaattcattatataaacactatagcaagaagctacggttcttaatcttatcaagcactgtgtaatatacattaaggccatttagccaaatacgattgactcgtagattagggttcattaacacctaaactacttacaaatctccatctctactttctaccacttgatttattttctcaactcttttattatatttagttttcaaaaatctttgtaaagaaaatcaaaccaaaaaaaaaaaattcaaaaaacacccaacacaaaataagcacaacccacctccaaaaactaccaaaaacctcgagaaaaaaccaacattttagagattaaatgtaacaccctaactagcataggcgtattaacgggattttaaacatactgtgcagctcgttgctaatcaacgagattagtaaaaatcgtgattaataaaaattttgctatttaattaaaacttataatattacatacaaaatatttcgggatcccgtttaaaaaatactttacaaaaagtttgctagtcatttacaaaatatttagtcgcccagcgactaacaaaa

SEQ ID NO: 303526 - DNA, 2806 bp, Cannabis indica
caattttcaatgtatagataataaagactcaaacacattcacatcctgtacactcagctgctaggtttctcctgctctgcgtcgtcaatgaaactaggcagcggctttctctacttttaagccatttcactttcctatcctcattcctccatactcgtgctgacatcgacttaaaagcattcctcatgtatttgagcacagccgttgcaatctctctgcaacaagaaaatgattcatagttttaaattgaaaccgagctattcttagttctataaaagacagtcttttgctacttacaatggtgagcagggtgatcggccgccatttacatagtaaacaaacaaataagaatcgtaatgttgaccgttgatcaagtagaaaccttgaagtctccgtaaacacctaaaagacattttgttgtacaaatggattgcggcattattataagaaataacatgcaagtaaacagctcggcaagttggaacgctcaaggcgtattttatgacctcgcgaataagtgaagaggctgcaaatcccacattgaatttgaaataagatcaataaatttatataacagtcaaagcttcaaaacatttacagaagtagacaaacttcttctacctatgccaagatttctgtagccttctactactccgagagtcagaatgtagaccaaagtttgatcagattttaatgaatcataactgagcatatcccctacctacaaaacaaattatttcccctatatgagttgagagggaaacactacaacaatactaataaatcgtaaggaaaaaaggacttagagacctgggtttaaattatttttaccaacacaccttaaggattaatttattattccaaactgatttatcaaaccacgattctttgaaatgtgcagggaggaggatgtaaacagtgccattttacagggcttacctcactttcttttgcaagtacaattcgcgctgttacaaatcctataagttgatcactttgaccatttgattgactgcgatcaacagcagcccatgatactatatcgcgcccattaaccacattttggaaaaactcggtttcatacctgaaaattaggacaatatgtaataagcacactgcaggcaaactacataccgaagaaggccatactcatggaaaaacatcaaaaggtcaaacacataccgaattggaaataaatcaccatgaatcttctctaaagttccaaggtcagagggtcttataggcctaaagcatatgactggacgaggagaaggtttcatgttcaccattaaagacagtttgttcaatccccaggaaagatttgatacagttggacagtatgagagaaaacttctccttccatttatgccacatcaccccggaagagccatgcaaaagttatactactgaaaagaggagcataaatcagtacttaatcaaaaacctcgtcaaaatgcaaattacatggcatctgtagagacctacataaacagaaaagtaactcttacaaaaacacacatcaaaagagaagtgggacttgttcacattttgttaaccaaagtccaatcccaccaaataaagaagaaacaaagaaaagggtgccccttttccttttccttttccttttcctcctttccaaaaggatcttcgtgtcatcttaacagttccccaaattgacaaacttgaaaactaataataatacgttgctttcatgattaagagccattcaactgctttatcatgtaatttctagataaactaactcaatacttgtgatccttctaaagtagaatcaacaattctccaaggtcttagcactaagatatactgtgtcttgttccataaagaattacccaaaatgcatatatggaaaacaatagaaagattttttcgttacactgaattcaattagggtatttagcaaagtcaaattaatacaattgagcgagaacaatcataatcggtcagaattgaaaacatatagcaacataaatcaattagataagattaagggtatccataaaaatcaataacaaaccagaagatactcataccgtgtcatgtcaatttaattaaggcaattgaaaagattaaataccataatcggagaaggagatgaaaacccagatgagatcttgagtaggtgagctaaaatgggaggatctggtggtgcttttaatggcttggtaagaagaaaagaagaaagatatgaagtaatttgggagtaattgaattagggttagtggggaatgtatggaattttgattaagagttaaataaaaatggaatcttgattgattggaactagtgttatacttttctctgtagttaagttatataaaccctgagagaggagaggaacctaaggaagaagaagacccacccaacaaacaagaagacataataacttgctctgatgcatggagatgtgaatttaccaaaacacccttctctgccaatatggattatcaagccttgtgtgactgtcttgttaaagaaaaaaacatttacattaacacttcaaacaaactttgtttttttaaaagaaaaataaaaatatatgtaatttgtaattgacataaaagggaacaaaaaaattagaagtggcaaaaatatcatcgtgttgtcgtgtttgtgttatatttgatgtcactcgcttctatattttgtgccaggcgtgtcaatcatttttttgactcgtatctatttttttaatcctaatttgacctataaaaaatcgtgtggtattcgtgttgatctactttaatctgttttgtctattgttaaagttggagttataaaaaaa

SEQ ID NO: 303527 - DNA, 1931 bp, Cannabis indica
aataataataataattataattggatgacacgttatttatttctatggttgagaaattccatttcaaatgtatatattacatagacttgactagctagtggatattaataagctgtatagtctcaaaattaatcaacaaaattctaaccaaattaataatagaataggacaatatatattgtataaaaatcaagaagtccaccaggcttgacctactaatcaatgctatttattattaaaaaaaaatgaaaaaaatgtatatatatatgtgtctttttgaagtagaaatagtgttacatgtgtcaaaaaatcagatcaaagttcattaaatggcctcgtaaaattttggcagtgtaagtgatactaattatgataatgaccctatacatagctatatagctttttgcatcagaaaatgagacccatatattatacaacattgatatagaaaatggtgtctaataatttctaaagagattattttgtgaccagatttgatatttaattatattaacgttgatattaatacataaaagaataataaggaccagactcaatcttgagaataagtagtatttagggcccacctacgccaaaaaaaataatcccatcttttaaaaatatacatttttcattaatttgaataatactacatttttttacaaaattatattatataccttttttttattactcttttatttatacctacttttataaattatattccaattatgtagattagagactctaatttaaataaattatgtggggttatatttgatactttaattataaaagagggtctttatcaattagaattatttcacagttatatttagtgaccctgaaaaacaccagtgatgcctattatctttttacgtgtcaattaatattactattagtataattaaatatcgagttttatataactaattaaatgtaataattttaattagaagtatcgctaaccaatcgtaaagttagacactactgatactcaatagcaacacttttatatatatatatatatatacgagcattgttattgaacaccaagggtgcctagcaccttatagtcatgtcgctttgtgattggttagcaatactttctaaaagttattacattaaactatatgggactcaatacttagttaaaccaataacgatattaacccgtaaaagagtgatatgaacatcgaatgccttttatcatttctcgtatacatatataaatacattttaaatcactacaaaaaatcttacttttagtcacaacaaaacttgtgaactaaaagtaaaaaagttgtgactaattataaattattattcctatgttgtgactaaaaggtccgtggtaaaaagtattagtcacaaaaattataatttgttgtgactaaatgtatttttagttacaatacttgttgtgactaaaactaaattagtgacaacttgtatctaaatgctatgtttttgtcacaagtaatattttattgtgactaaaagtcaaatttagtcacaaaaaatttgtattgtgactaaaaagttgtcattaaaagtaacagtttttatagtgaatacatacctacaatgtcggatatggttctaccattggtgaatcttccagtgggttttcccccagatggtttaaagtcaataccataaggaggtaaatttgccttcgaaagggtaaaaaggtaatcattgtttccagcatcaacaagtgaatccccaaacacaaatgaactaaaataaccattcacacttttattattattacaacaaatcaacactactactaataaaactatcacaataaacctagtagtactctccattacgcatatatataattattactacacatacaacaatattactcaacctcatatatatatatatatatatatatatatatacataagtaaatt

SEQ ID NO: 303528 - DNA, 7314 bp, Cannabis indica
tatctcttgacaaacaagcataacaaatgaaaacaaaaggtaatagatacctggcttgggatttgcctctgatagaacactgatgaaggtggaaaatggggctcgtaagatggcatagaatggacgtaaatcgagtaaagcccttcatgacccttgaagaatcgctcccaaagaggtgccattggcaatggtccttttgtcaagaacatgaaagcaatcttgggaactcttttgaaaggataagtcttgattcgaggagcaagagaagccctccataatagctctgagtcattcatagtatgcatcagttttgagggtggtcggatccaactttccaaactatgtggctcttcataacaatgctttaccgggagctgttctaatatggtttgtgttactggaacaaaattctgaacttttaaataccgaactgtaaacatactaaaaactgaaagcccaagtcccaaggctaaaaacaccaagaaaaactgaagaagcctcagagggaacagcctagaggggttgattctcagtgtaacgcccaggtccttgccttcctctacagccatcttagtttcaatcctaaatgaaatccaacctatgaatcttattacatacggaacatagaacaaggaacaaaggtaaaagaaaaagaaaaaggaaaataaacccttttatgtcacgaaaatctctacaactgttcaaacgcagcatggaaaagcactcattgtgatttgaggtagaaaaaacgtgaagcgaaagttggattagcgatctgggttttcaaattacaatcataccaagcccataatgccaaataaggaagaatatataaggaataattacaataaaaagaaattttcacttctttccaaacattggcccattgatgatggtccagtcaaagatgggaaaattcaaatcaaaatcagaaatttccagtttcaactcccaacatcgtggccaaaacggaaaaaaagaaaagaaggaaattacgtgttggaagccggttattattaataatatatataaacaataatcaaaagtggtgagaattaattaccagtagaaagtagatggattaagggaggaaaatgaaaatgaaactggggtcacaaaacaaatttcttaaatttcatggatagcgccggttttccatacaagatggagtttttttgaaaggagaaaccattccaaggatttggttagtcggaaagagcgaatttatttcttcttctttataattaagtaaagcaagcgagaatgatgcatgtaatgttttttttggaatggtggtgaaaagacctaagacctaggactttgggttggtttggttggctttgtctcttgctttgctttccttgttttgttttttgtttggcttgggtttgggggtagggggaagccttgtgctttacatcacatcgcctccgcattactgtttctctttggaaattttattcaatgcttttttaagttttattactactttggtttagcggtttgttctttgtacaagtgtcctcccatcaactcctctattatgtcaaatagtcattttctagtttcttctctaaatataaagttaatacaacaattttcaaactaatattaattatttttagtaaactttgagactgtacttgcagcgttaattagttagttaagccaactacatattatcggtgagtagtttagtcattgtaggtatacttgtgaaattatgggatactaatgcataataatatcatgacataaaggaatctttaagtaccttcaaaggaatcaagtcggcgtaatagttgaaaaatgaataatatgtgcacacaattgctaattgccatttggtatggtcttggtggtattttgaaaacttttattctgagctgaatgttacgaagtagtttttgacaaatttcccacagaaaattgcagataagctaagcgaattcacataacatttgggatcatcttcattgaaaatttgaaagaattttataaacagattagtttaaacccatgtacataaatgctaaccatttaaccccattagtacacagccgaacatcaaactaaaacctaccaaataaatacatagcccataaaatgagaggggacctcagctttattcacaatagtaccaaaaataatgatcaaagttatcaaacatgtgacataaatgctaaattgcatcttccacgcagtgtagatctgatacttgtttggcaatcttattgtcaccaaagttcaaaataatgcatctttggagttgtcaaaaagtagaaaataaaaaagaatgaatctttcgaagaaactacacacattaatatgatatccattaaaagaagaaaaaaaaattttagctgatgttaatatatgatatccattctccgaattcaatcacaaaaccaacagttctaaaataaaaaagcaagagacaaggaaatataacaaccactcaaccagtcccaaagtaagaaactagcttcaacatcactactaaataagctaatctactcgtactagacttgatgcctcaaaagtcatatttacttctctgaggagttgggtccccgcttctttccaaatccaacaactgcaaatacaaccaaccataacaatccatccacagaatcaacatttgggtttaaaagttattcaaataataataataataaatgataataatatttgggtttaaatgttatacatttgagaatgtgtcaacgttgttattataaaaataacaaaaagagtgaaagttaaacataccggcggtgacgaatctcctgttgtactgcatacgcttgtgagcgcggcctctgggcttcttcttcttatcttgcttagcaacctttggggtctgacccctgacctttccggcacgtgccaacgaaccgtgaaccttacctgtaacccgacacaatcacagatcaatcatataaccggattcaaataatgcagagaatatatagttgaaattatgaagaaattaaaaaaaaatacggaggaatgaatcgaattacccatggttgatttcaaaaactgctcgtacagacgccaaagactgagaaagacgaaaccttttgttgcctgcgagtttggacttctgatttagggttttcttctcagttggactatttaaataaatttatttctttcaatacggcgtcgttttgttcgtatttgctaaaaacttttctatttaccaaaataccctccatccaaaaagttgaagcaaaccgggtttcgtttatttatctctgctttccctccgagaccatagttcttctggcgctgaaaatggctaccatgccgagccacggcctcaggcatttgtacacaacgcgtccatggcagaaaacctatcggttttcaacctcattggcttctctttcttctttcaccgaagactcggaacaaaccaagtccaacgccgccgaaacatccagtacaacatccggcccgtactttccgaagcgaaaccagacactggaactggtttgcgagtcactggctttcaaagggaagggtctatgcaaggtggaggatactgggtttgttgtattgtgcgaccgtgcactccctggtgagcgcttcattgggcgtgttactcgcaagaaggggaactatgctgaggtaatggagtttctgattcctatggattcttataagtgggattctcttggtttttgttggtgagaaaattaagaaaaagaaactttagaatttgatgttggcgtgttatctatatgctgcatttggtttcaaaatgaagcagttattttagcttgtcaattgtactgattgtgaatgatttttgtgagtgtgtgtgttgtttgagaataatggcgagcttagctgacgaatttgtgggattagctatcatatctcacttaaattactcaccctgatgaatggaaattcattaattaagtgaagcatatattaattgatcatctggaaaaattcataacataccgtgaagatgaacatggatgcttgtgttttcttttacaaaggttttatacatttgaaatattcaatttaagcttacacccaagcgtgagtacataacacactagtaacgttatatgcgcaccaaaattatttaaacaaaacattaaacacgagtaatgaaatgtgcaccaaaacgttacacaaagacacagtacacacaatgatatggcattggcacgcttatatatatatatttatataacagtgttcctatgtgacccaaattgcaggtaactaagttaaagacattatctcctccttgggaccttgtggatgctccttgtgaatacgcttcttactgtggaggctgcaaaatgcaaaatttgtcatatgaggcacaaatccgagccaaggagcaacaagtccatgatctggtgatacatgtggggaaattttctcagtctgaactggaatctttaaggatcatgaagcctattgttccttgtgatatccagtttcattacaggaataaggtttgttaatgatgtaaaccttgttaagtttggtttgtttcattgtccttatgaagtaactttttgcaaattttatcttattactggtatgaaattttcagagagaagcagatatcttgtcttaatttctttcttcttttacagatggagttttcatttggttctgcaaaatggctaccgaaagaagcacttgcagaaaaacaagagggagatagcaattatgcactgggactgcatgctcctggattttttgataaggtcctagacgtcaataagtgcttgctgcaaagtgagcctgccaatatggtattatccgctttccttttattaaccatgtgtctaaatgcaagaaatgcacattagatctatgttacaacttttgcaagacaacgtgcctagcatatgctaaaacaaatgaagagccttttctttggcttactttaatcatgtcattttcttgtagcatggtgcccagcatcatttgaagtacattatcacataaggtttatgagaaagaattatttgtgtggtaatgattcccattcatatgttaatcgaaaaaaagaattgtaagggtaaggactaattcattcaatatgatagtttgttagcgaagggattcttgagtaattattccattaattgccattatagcaattactaccattttgtttgtaattgtagtggttcattattgtgttagtagcatcagaagaattaagttattttatccataacttttgtattgtatccattccataggttcttgctgctatccaagattgctggagagatgcggagttaggtctctctccttataatgctcgctctcatgttggttttcttaaacatctaatgctaagatccggaaggtattatagttctatgatgtcaatcataagctttttctcacagttatgtgaatatagatcttcatgcatctcaataaaatagtaaaattatatttttatttcgtttaggcttaatagcaagctgtaattgcaattccaggaatttgaataatggtcttcccgaactcatggttaactttgtgacctcatcttacaagccagaactgctgaagcctttggttgaaagagttactgctgtccctgaagtggtatgtgcagacttagttaaaagtttattctccttatcttcttttttccagctcttaattgtattttacctttaattaatctatattgtggacttacttttcaatcacctactacattatcatcatgttatctacttcattttttcttattagtttctcttatggaatggattcgtgctttacatgtaggtgagtgtcatgaataatgttaacacttctgttggtaacacatcagtgggtgaggaagagtatactttacatgggaaaccgtacatcacagaaaccttaagagggcttacttttcaaatatcagccaactctttcttccagacaaatactcgtcaggtgtgtaacacaacttagtcgtcgcctttgttttataaagtttgctctaaaacaaatcacttgaatttggttggtttcttaagacacctattgcgttaaattgttaaactttcaggctgaagttttatatagacttatagaggagtgtgctggtctcagaggagatggctcggagatagttctggacctgttttgtgggactggcaccataggtctgactcttgcaagaaggtggttctattctctgcccatttgattgagctgtcatgtataaccccatttgataattttttcctatatgctattggatctcatattacagggtcaaacatgtttatgggtatgaagtagttcctcaagcaatctcagatgctcgtctgaacgctgagctaaatgacatccataacgccacttttgtgcaaggagatctaaataaaattgatgaaaattttgggagtaattttcccagacctgacattgttatttcaggttaagcaaagctataacctcctttttcagtttctactaaaatagagagaaatgatcttgcatttcgaaacaaacagaacagatgtagtggattctctgttctccattgctaacatatcttcttcttcttcttttggaattatatgataaaattttagatccaaatcgaccgggaatgcacatgaagttgattaaattcctcttaaagctcaaggcaccacaaataatttatgtatcatgcaatcctgcaacctgtgctcgtgatcttgattacctctgtcatggagtggtaagtttcacatctttaccagttcccacttttttaatgcgtagcgatatttattagatcaaaaaatttgtgggcagatggagaaaaatataaaagggtgctacaagctaaagagtgtacagcctgtagacatgttcccacacactcctcatatcgaatgcatatgtttattggagctctgtgataatcctagctagggccagacaattcttcactcttaaggggtgattcactccttagggaaaatggtgattgttgttgtatcttgaaagaaatccataccatttacatattttttaatttattattcttttaatcaagatttcgtgtctgtaaaaccatccatttggatatgaaaaaaggaaaacagaaggcagatttgtttgctattgttggattaaacctccacttacactgatattaaatctaaatacaacttgaacacaaaggacagaaaaggaaatacatgcaaaatccctaagttgaccttcggtctctaataaaccttacagaaagtagttagagtggatttggttaaatccacttctaactacggtctgtaactaactaactaatac

SEQ ID NO: 303529 - DNA, 878 bp, Cannabis indica
ttttgttttgtttcagtattttgatctttgatggtttccaccaagatccattgcatctaaatagatttcagcatcaagaatccatgaagaacaaattcttctagaattatcaagtttttccctaaaaaaatgtatcaatataaagtgtaaattattagacatatacataagttttggaaagaaaataaaagtacaacaaaatataacacatagacaataaaataataaaatatagaataagaaaacaaaattaaacaatatataatatcataaaaaattaacacacatatataatatatagacatctatatagattgatatatataaacacagacatatattgtataaatattttatttttgaaccagagaaaaactttattcaaaaaccaagcaaatacaaacaaaggcagtggcaacacccacccagaagaacaaaggaccctaaacaaagggactaactccaagaaacgcctaccgactctctatgatcgaatacaaataaacattcattttgctaaacttttgggttctcaaacccaacactccacttataatcaaagtcttcatctcacagctaatactagcagccattctatatttagactcaaacaaacaagtgttacgattgttccaaatataatacagggctgctgagaaggcagcattacaaatttgtctcttgagatcaatctttgttaaagaacaccattgttgaagctcatcactagtctttggccaatcaacatttcccaaccatttgttaatttcttaaaagactaaattcgagaatcaacagttcaaaaataagtggttgtggtcctcattttcaagctcactgttaattccatttttggcatatttaattgacaaaaatat

SEQ ID NO: 303530 - DNA, 3344 bp, Cannabis indica
ggttaacttatcattttctttgtatttaagataatcaacgtgaaagtcaaaccagaagacagactgcggattttgaccgatgtggcctttcaagaaacgtcgtcgttttagatttgattagctaccctgtcttcttcacaatttcatgctataaaagcttcgacaacacagcttcttcttaaagcaaaacccaaaagaagaacaacacaataacaaacaatagctcttctcttaacccaaaaaatcctaactttaaagaaaaataattacttctgagatctcattctttcatcaatggcttccttttttcgttctcttctcttcccaattttcatttcttctattatcttgctgagccactcggttaactgcgaccatggtaagttaattacttttcttctattaatgggtttatcaagaacagaattttcccttaattgtgcttgttattgtgtaaagcttgctttcattttgagttgaatgagtatatgctcgagcaatatcacattttgggttaagaagaatcaagaatgttgacatttatgtgtgtgtttgggtttctgtattgtaagtttgatgttatggttgaaatcatattgggattagatctgagtagggaattgatctgggtatggcttattaaatttaattaggggaagaaacagagctattatcttaagatgtgtacaatactagcatagatctgctaatttgcaaatgcaagcaataaggtcttttactttgcatgaatcaagttcattctgaaatttacaagctaattttagaagaatttggtgcttcacttggaaagtagattaaatgaacttttattgttttctcttactgtagttaggctatgatcaccatcttactgtttactagatctgtatttggtgttatgtcaatttttctaacttagttttccaaatgctggtgaaaattagaggtttgtcacctcaaaactggattgggattaagttgaaagagaagaaaattatttatgtgataataggaactgtagagccattctcatgttgaaccaaattctgttgaagcatttctatcctatgctgtccatgtattcattgattcccttctcaaacaatattacatacagagaagaaccagctccaaactaaataagttagctttttatatatatatatatataaattcctcatcctgacctgcctggtaatatgctagttttaagattggaggaaaaccttttctgatctttctttttgttctttcttggggttggggtggagattgttataggaattatctatttttctgctcaggaaacctgggattttgaacaactattatggaacaaagaaaaagtagggatccataactttgaaatcttttaaaggacatagaaattcacattgaaatcaaatcatttaattataacgattaggtttattgcatggttcaactatttagggttgctaaggttttgtttctcagttgctttggtgcaaatgtttcattgatttgtgtatagaaaaagtatatatattagtagatctaacaaaacattaattatttttgtggtacaaaagatatatcaaattcattttctgcaactggcacttcaggaataagtttgaccggagttatgttttttatcctaaagtttagttgcatgacttcgtttgaggttttcattttggcactcggatatttttgctgttttccaggagacaaggaagatcatcttcttcaaagcatcaacgaatatcgtgcttccttaaacttgacagctttagtgaagaatgacaacgcagagtgtcttgccgatgaactttctgaacagttccagaatcgaccctgcacaaacgcaacaggcgccaacactgtgccaggaaccgaaccccagttcgctaactatccaaatatcttaaccaaatgccgtttgaacgtgtccaacaccagggatggggctgttttgcctgcctgtgttcccaacttggattcaagtctcgtcctcaccaacttcacacgttcccagtactcaaattaccttaacgacaccaagttttcaggcattggaatcggttctgaagacaactggatcattgttgttctgaccacaaacacagctgagggaagcttcgtgcctgcccagacatcactcgatacaggcaattcaatcaacatagccaactttgttcccaagatttatcactttgtgtttttgtttattgcatctatcttactgctataaattgagagcacatccatacaccctttaatttgtttgcttaaacacgattttccttcttttctctggatgaaggcgaacacaccatgtttgaataatctgttttgattttcacactgctgatttaattgattcctgtatgaacatatatatatatgctttaaatttgatttctcataaatattaaaatgtgttagcaatatagtcaaatggagtatctctccactgttttcgtgcagatactgatgaggaagatcttcttcttagaggcattaactctgaccgagctgcacaaaacttaactcaactgttagagaatgacagagccgagtgctttgctggagaattcgcagaccggttccaggatcaaccttgcaccaacaccacaggctctgtccttgcaccaggcactgagcctcaattccgtctctccagttacccaatgcttttagccaaatgcaacttgatcgtttccaacacaaccgacggctttgtattgcctgtttgcattcctagatcagtaccgaccctcgccctctctgacctcaagcgttcccaatacgggaaatatctcaatgacagctcgttcaccgtggctggaattggctctgaagatgattggttcgtcgttgttctaacctcaaacactgtggtaggaaacccagctgtacctgttggccgaacaccgggagccactgctcccggtgccactgctcccaacccactcaacagaggcagttcagtcaacaccattgattcaacaaattttgcagctcccaaaattagcttcacttactactccctattcttcctcattgcttccgctctattcctataaacacgtccatatatacacatatacacacaaatatagctacacatacacacgcatatttagttatatataatatgtagacgtacacacacaccccctttttgtttgcatttttcatcatttttagataaattattaagaagaaaataaaaggccatgacgttaggcaagctcgttgcaacttcaaacacagctattgatgatatagatagtgaatatttcttcaccattgaagtggacatgtatcttgttacggccatggcgatacatatctat

SEQ ID NO: 303531 - DNA, 1303 bp, Cannabis indica
agataaatcctcaacttttctcttgtccaacgaacaaccagatatcctttccccgttaccaagtttatttattgcacttgaaatgtcaacttcataaggaacccttgaatgatttcagatgatggaatagacgaactaaataagctaggggcttgccgccatggaacaggacctgatccagccaattgattccaatttttcatagacaaatctttgagtctttcagatggaaaaaggaaagattgggcccatgttggatttgatgtctgaagcacacagtacagaatactgagttgcatgataatattttttcacataaaatgaaaggcttaaaaaatcaaattgtcactaagcaaaacacacttttttaaaaaaaaaaattgagctcagaatttaacatgaacaggaaacttttacatgttcgtatatgcaaccataaataaaactttatcatttgttgcaataaagaaaataaactcagaatttaacatgaacaggcaacttttacatgttcatatatgcaaccatgaataaaactttatcatttgttgcaataaagaatatgaacataaggatggatttcctcctaccaaaaagacatttttccttgcacaggtaatgcattcaattcctccagggtccaataatgtaaaggcatgaatagaaacaatacatccacaatgaatccgctgcaaagaaaatataaccaatataaatgtaaatatcaagaacagacgtaacttttttttattcaatagtattagacatatataatctaaatattagtcacaaaatttctaacaacctttccacaagattcacaacacctccagccagaagcatttccatgaaaagtctcacagaatcttccttcctcaaaagcagaacttgagcaaaacagaagtaaattaagtttggagcaaatcatgacacaaatttggaagagagagaaattagaacagagtacaaattataacaaaaacataatgcttcaaagcataaaaaagaataaagagacaacatctagaaagttcaaattagataaagcctcagtgtgatgacaatatacttaaaatgcgagagaaattagactttctatcatcaaacagcaaactaaatacaacaggtaagaaaaatataaccaaatgccatttgcatgtgttggtaaagtccaatacataatcactggcccactataactagttggcacagtcaaaatcaggtatgccttgccagaattccaatttagcgatacctttgaccgtttgccattatgattagtaagatgggtcgtaagaactga

SEQ ID NO: 303532 - DNA, 2120 bp, Cannabis indica
ataaaataatatataaataaatatataattaaaatgtaattaaaattatataattaaattgaaaaaaaatgaaaaaactgaaattcgcgtacctatggcgtcggttgctacgccacatatggcgtcggttattggctaggaaccgacgccataggtacccctatggcgtcggttctcaggtatggcgtcggttcatataaaccctttaacgtcgccgtgatcagcgtcggtagcgaattttacgaaaaccgacgctgaaagggcttaaaaccgcttctaaagggggtttttgtagtagtgctagttgaataaaatttacaattcaaacaaaaattgaaagcgtattttctattttggacattttaaaatttataatttatataaatatttttacactgcggtatatatcataaacagaaaatttaaaaattacaattttcaaaaatttaaatattcagttacacttaattataccatataaattattctaaactttaaaaaaaaaaaaattataacttatatataaagctagaaaatttccctcacctaaaaaacccacaacaattatacaaatacaagactaaattaaaataatattggttatagaggcagatgaggaagacagcataaactcactataaataatataataatggtgaacaagattagcacaattaattatagtactaagaaagtcgcatatgtctgcgtattggagcactgactatgataataataatcatgtgtgtgcgcccacactatctttagtatgcactttattactccttccttccctctcttatttatagcactcatttcttccattctaaccatataattataacaattaaaatatacataaaaattcccaatgtctatccgtacaatttcagttgttttttctgttttatttggtttggtaattactacatatgcgtctagagctcttttaataactaataatgaaaaaattcaagactttggtactttcacagttggctatgccactgtcactactactgatcatcttggtgtaggcctaaatgttggtgttgatgccggtgttaatggtggagccgctggatatggaagcggaagtggtagtggagaaggtggcggtgaaggctatggatctgctggtggacatggaggaggtggcggtagcggtggaggtggtggtggtggaactggtggtgcaggtggcgggtatggaagtggagccggagaaggaggtggtgcaggttatggttctggtggaggagccggtggtggtggtggtaaaggcggcggtggtggtggtggacaaggtggaggggaaggtgctggtggcggttatggaggaggctctggtagcgggtatggagcaggaggaggagctgcagggggacacggaggaggtggtggtggtggaagtggtggcggaggtggaggaggttcgggtggtggtggagcacatggaggtggttatggtagtggtgaaggagcggggtcaggttacggtggtggtgctggtggccacggtggaggcggtggcggtggatctggtggaggtggcggcggtggatctagtggctatgctccttgaagagaaattcttcatcaacacaccaattagcaaatacttatacctacttttttttttttgaaagagtgcaattacttgtttgaccatcaatatcactaattatattattccaaatatgatattgattaattggcaagtaattaattagtaattaataagaagaaagaaggaaggaaaatacgtggtgcatgaatttgcatgcatgctagctccccaacgtaagttgtgtgtacgtacttaggttgtgtttctcgatcttaattaatgaataataattaattgtacgtgttttatctggttaccataatcaaaaaaaattaagttgataaatttcttttttaaaataatacacattttctgaataagaaaattaagttgagagctttataaattaaatataaaaatcatgatacgacttgagttaataatttgaactatgtgttctgtggttgttgcagtacaatgtaaatattatatatatgctacagaatcttgaatactatatagaaaacaaaatatgtatatatatatatat

SEQ ID NO: 303533 - DNA, 4208 bp, Cannabis indica
gaaatattcctagtaatttttagagaaccataagagggtatttgggttctacttctttttatccagattttttctgggtttttactttggactaatattgtgtttgtatttttgtatgttgtatgtgcagaacattagagtgcctccctgctttctgggtttagaattttacaactgaaggaagtctcttgttgagcctgtttaaatgcaaatctatagatatattccttcctgggtctctgacattctcgcatgcatggggtgagttgtatcgatttcttcatccttttaaatatcttaatttgtttgtatggtctaaagattttaaaattgtttcctgaaattagatctctaggtagaagcagagtgctgtgagtttttgtatgtttggttgctgagaaagtaaagtaatttcatgagaaaatatgcttattactttatatatgtatattttcaaataagatttgttttctgttttggaactaaatgagttaaagttgttagctttactgagatttccttttctattctgtgtagctattgaggattttcttgtttgagaatctgagatgagtcaggtggcaattaaaaaatattttcttgttttctttccctgattccttaaagttctggggaaccaaacaggctttgaggtttatttaacttggttaggaaggttcgtacttgtgtttacttgtttattaagcgaactagtatattgaacagtgcacatctggggcttttctttcttgcattttccattctttacttcaaatcttgggcttcagttcagttggtcatagcattcataggggttttccttttgcatggaacatctataggagctatgtactcaaaatgttgtttgttgtcccaaaccgaaagatgctttggaaagaaagattgctgctcgtttttagtgttttctggagcttgttttcaagctcttatgctcttaattgcggagaagttcaagattaaatgcaagaaagttttcagtgtaaggagatagaaactagattatcctgtttctaatttttatagcaattgcataacaattctagtgaccttggtcagtttaatgagccttttcgaattaatggaagagacccaagttggaacccgggtaattcgtttggtctctttgtttgttctcctaatcttttaggagaaatggtgtatttttatatgggaattagacttctgaatttccaagcaattttcacttggtactaattaactgctgttagattttgtctaaactcctttgcaatgtgatgtgtcattaatatacatgttagaattttgtcaagagaaaaatagaaagaatgtggaggatatcaaagcttttacagtcataaactctttctggttgcattttcatcagcttcttgtattattttctttttatgtgtaaattttttctgtatgtcacaatcttcagcgggtacctttaatttcagtctggttacaatctgtatcatgagttggttacttgagttgataagtggtgttaatcaatatttgttggttgaacctgatttaaaacagagcagaggctgttttggatgctttaccaaaccttcactaattatcgcggtggatgagccatcgaagggactgacaattcaaggtaaagcggcaacaaaagctagtttttccgaggatatttggagttctagcactatagaaatggacaatagcggcttccactcccagagaagtatctcattgggcacttcaaaccatgtttctgatcctcatgctacttcgagcagtcctcgcgaattcgtaaaccatggcaagtttcatacataccagactaccagtaccatcttccttgagttttttttttttggtcatttactcaagttttaagtttatctattcaccagtcttcttctttttcttctggtctttcctttctactttggttttgactgttggcatagtcaaactatttgagttttccttgacttccatttagaaatcaatgcataggaggcctgttctaactctctttttctgatatttcttggtctaatttccattcgtagtctttgttttgtatgctgtgaagtaataaattccattgtctatcttatcttctctgtatatgcacatatgaaactaagtattctaagtaatggaatgaatggattcaggtcttactctctggcatcagacaaggcagcaatggcttggaaacaaaaagtctcagataaggacacaaagcccagagcccaggataaggtaagaaaatcttaaaatagtttttggggttttcatagaagcaagcaacaataatatagaagcactacttgattgatccattcagataattgagaaataatagagattggtagtgcaatacttacctactaagtctttttttctagatttcagccgatcaactgatcaataaaaatatataattgtgatgagatgatatgtacttacaaagttagggaggaaaactagttagactgggcgttctcattaaaggcttctgttaactaagaaaacctacgtttttgcttcaactagattttacataaatgttaatcccattagcaattgatcatcgattatattcatgaacatgaacttatattttaataaaaacgttaatgtaagcccaaaataaaaatcttgcaaacacttctgagcttgtggtttgatatatatttggtttgtttgatttgaagttggaatgcctcttatgagagtctacttggaacaagcaagccttttccaaaaccaatacctctttctgtaagttaattatatatgttgttttcttccaatattattgtttgctggagttttgtttgtaaatggtttgtttcttgaacaggaaatgatagacttcctagttgatttatgggagcaagagggtttgtatgactgagacttgaaaggaagcaaaaagcataaaacactttgaatcttatcattcttcatccacattattatctctttgatcattttaaaaaaaaaaaaaaaaaaaaacaaagaggtgaatgcaatgcaactcttgtacacaacattcttcttcaacatagtagaattgggtgcaagtagaactttttataccaaaattgaaacattcaaatgtgtaataaatttagaaaacatctatttagtagtatttgagtgactatggattaacaaagcatgagttccttatcaaatgggccacggtggcaaatagggactcttagcagaattgtgaattttgggctttttatttatatatatttaaaagtgatagttacatataatattgattttgtaaaaaaatttcaagtttttttttatatatatatttttatggtattttataacaacacaaaaaataaataaaaagaacaagaaaataatattaaaacgatataaaaaaacaatatataaataataaaaaattgataataaaataataaaatacaatataaaaatacataaaaaaattatattttatgtaaataaaattggtaaaaaaatattaaaatcttaatagaatatttttgtaattatttattgatattttcataaataatccaagaaaattacaaagtacggaactataatttttttattattatttttactaggttttttttttatgttctactgtgtattatgctgtaagctgtgcacacatattcatgttgatttcatacggctatgtaaaaatataagtaaaaaaagacgttagaaagtaaatatagtctgtaaaaaaatgccattttttgtgtaaaatttctttttgattcttgaaaaaaaatatatttttacgatttttgtattctattttttacaatttatagtaaaagtaattaactactgtaatggtgttcataaaatattcaaatctaatctgcacgatctaatctaatctgcaaagtatggtatttatacttgtgcgcaggagtggactcacatagaagcgatgcgggacagtcggccccctaaaaaaaattatgtgtttaagttagttacgacatgtatttataataaaagatgatatttatagatataatattaattttagtgtaatagttaagttatattgcatataagttggaagtcaagggttcaaatcttacaaaagaacatttgcttttgcctattaccaatagcagtaaccgatccaatccacatatatttatgtaaatttttaaaaaatttatatatacagttaatat

SEQ ID NO: 303534 - DNA, 3260 bp, Cannabis indica
acacaattagatttggctatgaaatgttgagtacaagggatgggtgcactctcttaatgggtaatattagaaaaatttgagtttttataattaatttttctaattaaataaaaaaaaaaattctcatttttacattatatgggctgggattggttcatcagctaaaaaaaaataataaaaaaaaagtttttcggcaaaaaagttgattttgacttaaatatttttatataaatatatttttgatatagtgtaaaaagatatattttttgatattttctttaattaagtaactaaattaagcatagaaattcaaatttctcttttataattcgttatcggacaaaaatttaatgatttaatatttttaaaattattatttatagttaaatttatttattacattaataaaaaaactatccatccagaagtattctatatatatataaaccaaaaagaagtattttatatatatataaacaaaaagaagtaggtcaatgttgattaatgcttatcctaaatatatattatattttttaaaaaatatatttttatatatagctagagagtagatataggccctattatattaaatttttcaataaatttcatatttatattgtttctctcactgcatgattaaatcaaatatataatattatgaggtgccttcatgtttccaaacaaattaatagatatcaaaaccagcataatatattaatatcgtgcgatccatgcttaattattcaattaatagttttataattatcacttatttcattttcactttatatcatttttttttttttgacaaaataattaaaattattataaaaattcataatgtagacatcaatagtctgtttttaggataatattgtttaaccatacttatttcatgattattattaggtcatcttttattaatgttattatgttttgtaggtgaatgttaataataacattaaatcctgttgttataattaagttcaaaaattatcaaagccaccaaacatatatatatggcctaaaagcctgatatatataaggcactaattccataaataccgttcaccttaattatatataattaattaatcgtttatatataattaacttagtctcatagagacaataatttaccatttgtataatattcttgaaaattgtaattaaattctcagtactaacaaagttgtacaaaaataatgcatttacgtgtaccttgggtcaatggttatctataatatagctaattgattctaaaatataaaacacttgtctaattaattaattaattaatcctttttttcaaacttttctttggcatatatcatgaaatccaagtatatactcccattactacaactttattatttctttatttgtttaattttacttagggttagggagacctataactttgtaatatattagagtattttatcattttttgaccaaaataaataattatacctaactcactaaccaaatttggtaaatgatgaagacatgcaggtggttaagaaaaagtaaactatatatgtcgactcgaacgacatataagagtgacatataagagcaactccaatggacgttatccaattataatattttttacactaaatattgagaatttatgtatgtagggtcaagatattgatgatgtagacttttttgtatttgggcatcgtagctcaatatgagtatggtttgtttttcttttttatcttttaataataaaaaaaatgagtagttgcctaaaaaaaattggtgagtaaagcaaggtagcttaaaataatgataaaaacaaaattattaaagactttttatttctttgttagataaataaaacactagcttgtcataacttgtaatttttgccactctagtcattaactaaaatcttattattacaaataaacatattagatatgtatcaatctagttatgtttttgtcaagcatagactgtatcacttatatgtatcaatctaattatgtttttgtcaaacatagactatatcactaagattagaatgagaaaaattcatattaaaaatatctagaagagtgttcataaaatagtggatctaattcaatacgtaaagtgtgaatatttacacttgtgcagattggattggaatggattagaaaattcaaaattcacacttgtgcggattagatatatattgattgacatgcaaaaatagccgatctaatccaatcaacacatatttataaaaaaaaattaaaaattatatacaattaatattttaatgtaaagaaaatagtaatttaaaaatttaatacatataatacaaatatattttaaacttaatagatcgaatgtacactacaaaaaacagttacctttagtgataactttttagtcacaatataattaaaaatttgtgactatgtgacttttggatattgtgatgactaaaacataatatttagatacaacaacaaattgtaatttttatgactaatatatacttttagccaaggactttttaggcacaacataagaatactgatttataattagttataacttttttactttagttttttactttagttacaagtttgttgtgactaaaagtaacatttttttgtagtggtatattctattaattcatttatataaatttaaaataaaattaaacatgaagacgagtgaaaagctcaacacaagtcgcggcataaaaagggcatgtcgcggcccgcctacctaattcaaagcataatagaagttttcaatgtgggtttatctttcctatctaattggaagctgaaaaagttttctgcatgtgatatcctttttatccttcattggctatataagaagtgaacttcagttgatttcatcaagcaattcagaagcaatcaaggagtatgaattttggagagcaaaattgatcgcgaaggcttttataacgaagttttcaacatttcttctctattttcttcttctatttgaattaatatgtgtgaatttgctacaatatgaacatgagtagctaaacagttcattagggtttagatggaggttgtttgatattgattttagttttaatatatatgatttaattttccctcaattattttgtattctatttcattcgtacttaattacttttaattgcctaatcactaattaaatgtctatgattttgatgcgagatttgagaagtgagtgtcgattatgttatagtaaaatagaaccgaatttcgatatagaacgagagtacctat

SEQ ID NO: 303535 - DNA, 1793 bp, Cannabis indica
tgaagcctttgatgagcaggcccaactagggttatgtagctaagtcctctccctaactttatcaatacatattgtctcatcacaattgtatacattttgataatcagataaataaactgcttctgatctagggaggaaggcttagtttgaagtattgcactattgaattaaggtaattgctatggattgaattgaggtaatttctatggatcaatcaggtacgcatacctaattattatatattattattgtgttctatgttgtatacaaattgatctttagtttattattagttttctaacaacttcttgatattgaaactaaacaagtttatatttcaagagatgttgtcttctatgaaaatattttccccttattttcaacatctcctccatctgaaataagtcacttgttacctgacattgttcttcctacaaacaaggttttacaacaagagaatcatgctcacaaaaccttgcatatctcacaagcaccgtctggtttaccaccagcaacaacctcacaccactacacacctgctgcatcaaagaacaaacaacataaaccaacttccattggttctggtacactagatcccataccagcagcctccacaccaggaaaaactaatctagttttacaaatcctggtacaacatcagcaccacaaaaagttgtttctcctcattctggcacttcagcgtccaaaccagaagcctctaaacaagaaaataacaacttggatgtgactacagtagctcccacaacaacaaacatcacccgaaccataagaactggtatagttttgaacaaaccaaagcacctaacaaactacatctattatcatccatcttccagtgctcatccaattaagacattcctttcctacaacagattacaccctcaatttagagcagatgtccttgcagcctaatctaaagttgaacctcaaagttatgctgaggcatctcagtttcgacattggcttcttccaatagataaagaaactgatgccctcaaaagaaacaatacttggattgtcactaagctcccacctggccacaaagccattggttacaaatgggtgtaaaaagttaaatatgatgagagtagggttgttgaaagcttcaaagctcgcctagtagccaaaggctacactcaaaggcatgtcattgattactcccaaacatatgcccctgtggcaaagtttaacaccctcaaaaaaattttagctcttccagccatgtacaattagaatgtacaccaattagacatcaacaatgaattttttcatggggatctccatgaagaagtatagatgaaaattcccccaagatataaagcacctcttaacacggtgtgcaaactaaataaaagcatttatggtcttaaacaggcttcgaggcaatgttttagtaagcttagtcacaccctcatttcagatggcttctctcagtctctctctgacaattctttgctcatcaaaagaataacaccatctttttagctattctaatatatgtagatgacataattgttgctagcaacaatgactattgttatcccaatttttgcactttgacgtggcatcgcataatggtgacacgtggaatccacttggagtatctgctcggagggtgcaatccgagcacgatgcctcgccggcatgcctagagcaaagcattcagcaatcaatgcagagcaaccaacaattagcgaattcagctttcgcattgagtcatcaacgaaattcctattacttggggatcagattacagagatatggcataccca

SEQ ID NO: 303536 - DNA, 1110 bp, Cannabis indica
aaaaaaaataaatttaaaaatatagagaaattattttatatattatttttaaattatttttttaaaatttacagtttgaatttttaaagtaatttttatagggttgctatacgatgttggttacgatttaaattgctccgttagttacaataataatctctatgtaaaattttgtataaataaaaaaaaaactgtattaaaatataaaaatgaaaaaacctccaaaatttacactacaaattattacaagtatacataattaataattagaattttaatacatgtacattgaatcggacaaaataaagggtaaatataattaatattgttatattaaatcatataaaaataaccaaggtactgttgaggagtcaaacctgagaatcctttagctggtgcatgatgagaattatgaagtgtgactagacccccccttttaagccaaatgtatatatatatatatatgagtttgatatttgacagctactgaggtcgatcatggaattaataacaatgggacccatcaactaatatattaagagaaaaaatcaccactccttccaatccatatccatccctattcacctccatacaaactttattatatttttcttaccttaaacagaaatagcattctgctccaaattataggagatgtgtaatttataattaattagcactttataatataatttatactcaaaagtattgttattaagtacttaatattttttacaagtagtattttatgactacttactaatattttctcaatgttattatattaaattatagagcattatattggacaccactggtactcaatactttttataagtgacgcttcataattagttagccatattttttaaaaattattattttcttaaattatataagattcgatatttagttacaacaatagtagtatgacattagctaagcaaagtgctaaacactaataataggtaccttttggccgatttgccgttctcttttggccgatttgccgttagtctcaattaattttgttaaacgttctgtaaacaaagctgcacattgtcttgctcgtagctcttgtttgtatccagatcgtatttttagtgagga

SEQ ID NO: 303537 - DNA, 1126 bp, Cannabis indica
aggccaaaaaaataaatgaacaaaaaaaaccaaaatttgaatttaaatttcattataagagtcatgatcacaatacattaatattttagagcatatgttttaatgataaatttcatttgatatatttttttttttaaaaaaaaattgtatttattatataaggcggatgtggaagtttcatttgaagtaactgagttagaagagaccgagttaatggacccgagttgggttgatccccaactactttgtgatgagaaaaatgcaagtgtaagaggaaaaattggagcttttggtttgttggttttggcttcgaatgacttatctgaacaaactgcaattttctttcgcatattcaaaaccaataacaataagagtgagaagaagaagtatgttgttctaatgtgtagtgatcaaagcaagtcttcgttgaggaatgatcttgacaaaactacatatggagccttccaagatatcgatcctcttcatgagaaaataacactaagaactttggtatgtatcatgtttatgtttatgatttatactatctatattaattttatataaaaagagtagttatatgatttggattttcaatcttttgttcagattgatcattcaattgtagagagttttggtggtgaaggaatgagttgcattacaactagggtttatccaatattggcaattaacaaaggagcccatttatatgtattcaacaatggaacaaatagtgttaaactctcaaagcttaatgcttggagtttgagaaatgctcgatttttttcatggaaaggagaaggacattagtaagacctcttttttcatcactttatttgaggatatatatagtttgttgttctatttttctaagacatttcgttatattcgcatattcatcgtacgattagtataattgtgcgtgaattataactttctacactcacggcgaactagctagttttggatggatgattttttattttatctttctttgatatattatacattcactaagagaaataactatttttagtgacaaatttttagtcataatataatttttttgtaactaaatgtgacttttagtcacaacaaaaagttacttatgattaaaatataatattta

SEQ ID NO: 303538 - DNA, 1618 bp, Cannabis indica
aatatatataaaataataattattatttgggaatatgtataagtaaataatagtcacgatataaaactcaatttataaaacaatccttttgaaaaaaaaaaatattttgaaatatcaactaataaatcactattcattaaaaaaaaactaataactcgcgattatcattcaaaattcaaattttatcgttaaagataactaattattatcatttttataggccaaactagtcctaaacctaataggaatacagtagaacctctatattggaaggttataactaaatagagttacactagaaaaaaaaaattaaaaactaaaaaatatcattgtaacaataataacaataaataatcattaataatatatcataatagaaatattttagagtaaatataatttcatacatgtattataatttaaaataaaattattaattttacataaataaatttacaaaatacatgtatatattttattaagatgtaattatttttatatagaggtatactttgttaatatgagacttaaaaaatgtataactaattacaatttagaggttattcttatttataactgcccaaatcgggacttgattttttttatataggtagtgagtagtgagactcattaataattatcttctctttctttcttgtgtagatttcataagtaacttcgttaattaataaactatttaattaatggaggatcccatgagtgataaatcatcatattataatccttataccacaaaatatgatgatcaaaccaattccaaatcattatggaggatgttcttaatattcctttggtcatttgtaggtttgggtttctttatgttcatcataacccaattattattcatccctcccttgcctcttttctctgtcgccataatctccacaacctcctcctcctcttcctcgatcatttacaacgcctcatccaacctctacacatttccgaatttgaaagtagggttttggaccaaaaaccgagcttttaaatccatgtattacaaaaacattactttgtttgtgtatcaattattgtctctaaaaccttatcttttagagttagagggtaaagagactatcaaaccatattattttgggttagagaataatgagagcaccgatattttatgggttactctacacaacttgacagtgcctatcgacaacgacaactacaaaaggaaacatactgatgatttttgggtttcggaaagattggtacttatgtatcgaggtctacttatgtataaaggcgatcgtgttaggcctaaacaagtgattaatatgaaagcttataattgtagaaaagttaataatatactatttgtgaatgaaacgacgccgttggatcataataagcttgatttgagctcatgctacgtttatggagaaacaaaatttggaaatattatttcaaatgttttccttattcttcttagcgtttcgcttttgtggtcccttttttatgggcttaactatggatatggataaactagtacattttattattattattttagttgtgaatcatcttttcattattaggcatatttgtcattaattattattagcaataattaattaattaataattcata

SEQ ID NO: 303539 - DNA, 1987 bp, Cannabis indica
aataggaaagaatattcattacaaaaatacaatacaaaaaatagaaaattggaataggttgccatattcctctgactcaatcccacaattgtagggattgtctttgtgcttggactttaggagatcattctaaagtagctaagtcctaatatgtagtctggaaagtcaaacttgctcctgctcgaataatctaccttccagcctgcttaggtaacaagcacatgaataatatgaagtctgttcgggacattcatttccgtccagatgcgaagaatgcaggacacgtgtcacctttgtattcttccacgtcatagtggataacagttcagaccccttggaagtgcacttgaagcaaaaaattcacgaacaaattcaacaatatccgccccacaatgtgccaatatttttggaaaaaccctgctcccattaagtcaggtctcaaagccttatccgagtgcatttagaacaaggaaaaatgaacctcatcattggaaaccgtcttcaccagctaaacatttgtagatgcatcaatagaacgattactactagccacaaccaagtcctaactagcatcccctgcgctaaaaattccattaaaataatcaatatttacatctttgatacaattattctaggaggtccaagtactagcaatattttaaagctgctagatattgttgtttctctttcttgttttggccatagcttgaaagaatttggaatttttatcccctcaatgtaaaaaaaattattttgacatctgctttcagtataactcttgttgagctaaaacctcaaaataattattttgctcttgactgaaatcatggacaggtaagggatcggttttaccttttagagctgataatttttctttgctaaaatgaaaattatttttgaaattatttgttagattcctccaccattcttccagattagagctgtaaacctttaatttttgtggaaaggatacataagcgtgagaatctgagtaagactgaacaatctgatcataaagaggttctcaagtcaacacattttcaaaatagatgtgataaacatgaccagctgtaacaggtttttttggtttgagaaatataagagagtgatctgaaaaaaaaaatcacaattgctgagggtgatttgcgaaaaagattgaagccaaataggagacataagagctttatcgagatgaatttcaactagattagcagtacccttacctcgttcccaattgtagggatggccacggagctctgaattgaccaaatattagctgcttaagacttcctaaaaaccaactatcaatgactaggggtaaggtctgccccctccttctccatttggctaccgatattattaaagtcgcctataaagaaccaagagattttagaatcaaaggaaagaacttgaataattttgctaggtcttgaaacgaaaactccaattagactccttgtaaaagctagctcgacgccaaactactatttaaggggttctaatttcgacatcaatatggttgcgagaatacctagaaattggacctcctcattgaatctccacagaaagtccaacccacctttacggacttggacctcaacacaaaagcctcctttgaagcccagacgagttctacgtcactcaaaaacattccttttacacaatgttttgcactagaaaatttcagaataattcatttgtttgcattggaaagaagtttaaaaaaaactgcattttatagagggactacatgaacattttttaaattagtatttcaattaagcaaaaaaatgtcaaacttcactatatattttttcaacttcctttgtgctaatgttgtaactttctcacattaatattattaaattttatatctatatatatatatatatttatgggtgactattcaatggttatatttttattgaaaccatatggttacatttttttttacctataatagaatgttaccaataggtaaaaattc

SEQ ID NO: 303540 - DNA, 3778 bp, Cannabis indica
caaaataataaaaaaataaaaaacactatttacaagtatatatcttttcttgtttcctcttcttattctcttagaatgtgattgttattttctaattttattatttatttagttatttttttgttttaaaaattgtttagtatttaattttattagaaatatataagagtaaaccactaataatatattgactattgtcaacataatctgcttctaataggattcagcggacgcgatgaaggtattgtaaatgtaactttaagtatataatccgctagaaaaaaaaaatatgtggtttataaatatatgaaaatctaaaacatcaaatattcatactgcaaatactccttgtttgaataagatttaacatagtagtgacagaagtaacagaaatgtaacttaaggtatatttaatccgtcgaaaaaatgtatatagtatttaagtgtaataaaactaaaaacataaaaaaatttatgtcgctaaatatttttttttttaacaagtggtaatgacactatgtaatttgacattaggtacgtcatattacaccatataatatagtatagtatagtattataatatattgaattatattttatgtaaaattataattttttttttgaacaaactataaattatattaacttttatgaatatataatatatataatattttagtataaaataaaatttaacatactattatataaaaatataatataaaatacgacttaataaactctatgcacttttaatccatagaatagcttatattttctattttgcccttgattccttgatcaacacaataaaatattaaaactaatacaagggtaataatactatacataattttattactttgcatgtatatattatgattatttattatatatataataatgtttggtaaaccctaagatggtggtagttaattatttgttggttaattagatataaaagtatgcttttctctataaagatagactactcatgaatatgttgtttgtttgtagcattaaaaagaaaaaggttggtacgtacaacaaaatgggttattatatatcaaaatcaaattcccttgttgcctcatttagtataattataaattataaattttataatgataattatataagatagggctccaccctccaccaataggtacttcaccaaaaattggagctgagttataataacaattctttttaagaaaagaaaaaaatatatatatttttttatttttatttaactcaaataatacttaagtttattttttaacagtatgtgacaatattgctattggttcaattaagtatcgggtcctatataatttgatataatagtttttagggagtatcgccagccaatcgcaatacgacatgtcgagaatgtgctaggcaccactaatgtctaatagcaatgctcataaattattaaaaaaatttgttgctaaaaaaatatacacagaaatttaagtgcaacaaaataaattatataaaaataatatttaaatgcaacaaagtaaactatatagaaatttttatggcaaatgtgattgtcattatctctttcttttatataataatattttttttgtaaggatgaaaataataattatttgttatcatttagaaaatattttttctgtttttgggcaaagattaagtaccctaatgatattctttagctatgtgaggagtgtgattatatagctgagacaatctcggagttttggattagatataggtaatacggccataattagctagtattttttttgttatataaactttgttacctttgtaaaaacttatatattcatctatagtatagctatatatatattatatcaaatgacaattttaggattaaatttgagagggggtgtaatttttttttttttaaaaaaaataatatgatatgcaactgttaaagacatagttttcattctatatatatctacatatgtcccaactacaaaaataaaacagcaattaagtaagattattatttccttgtaagggaaattaaagaaaaactaaatgatccgtctaattcataaaaatgagatttaaattatgtattaggataaataggggcataagtacctaaaattttgagtttgtaagcggcataaactcaatgtttattttagtggcataagtacctaatatttataaaattgtaatttttctctattttcgtcgggttctgttttaaatttattaaaaaaagatttggaagtaataacatacatattttcgttcagaccaaataatctagaatttgggtcttatatgtgtcctgtttaagacaataacagagtctgttgaaactggaagaaaattacagttttataatttattaggtacttatgccgctaaaaaaaatcattaggtttatgccgcttacaaaccaaaactttagatacttatgccactgttaccctatctattaatcaaagttggtcgtcttaaagtttcatcagaattatcgttttctctaattaattattagctatgacactacaatttttttttaatttttagtcacaattaaacttatgactaaaagtaaaaaaattataactaattataaatttttattcttatgttgtgactaaaatgtccgtagctaaaggtattaaccataaaaattataatttgttatgattaaatgtatttttagtcacaatacttattataactaaaactaaattattgacaacttgtatctaaatactatattttagtcacaagtaaatttttgttgtgattaaaagtcacatttagtcacaaaaaaaattatattataactaaaaatgtataaattaataacaaatgtgaattgattacatttaaaaatgtataaattattattattattattattattattattaaaaaaattatgtaacactacactctttaaaaatgggtataactatgcaccttttttatgtttttagtcttaatttttttatataataacttacatcctaattatttaaagtgacaaaaataaaatccaaacaatcaattacacatataaaatatatttaggaaaacacatcaattttaaaaaacaaatgcaatgtacaaagacacatattattattatagaacattattattagacaccagtagtacctagcacttttatacatatcgccttacaattagttatattgaattatataagacccgatagttaattgaaccgatagcgatattgatatataaaaaaaatactaagtataggttgtaccttttagcattaacttattattgcagtatttttgttactgttactattaaaaatacagttgtgggtttaaaaaaaaaaaaagaaaatacagttgtggaccaaaaatgtacgtatgtgtttactagaggtttaaataaatggtttgaagtttgaacaagaagaaaaatcactttcagattggttgccaaaggcttatccataactatgtaaataaagataccaacttttcaaactacatttatttttcactcctcatttttccttgtgtcaatatatatccagggccggccctgaaaatttatgggcccaagacgaattaaattttggagccctaaaaaatatatcaaaaaaagagtgtcatgggatttgaaccatgaccttggacattatgtcctccacctcaaccaactaagctataaatttttgttgtttatattacacttaaattttacttaaataaaagcctaataatttttttttattcttttattttgggcccccggaaag

SEQ ID NO: 303541 - DNA, 3467 bp, Cannabis indica
taaaataattgctcttatactcactttagatatattatcataatgttgacttaattttattattgacatatttcgatttatatgatttgtagcaggtgcagataattgactggagcttcttttcagcagaaatttaattgcatcgtgtgcaaaaaaaatgctgaagccatactgttaagacagttaaagttagttagctttattcagtttagttagttagcttagctgtctttaagtggttgttgttcaagttgttatttttctattatgagcttgagtgagctgttagtttgttacaataactaattaactcactctcttgattgccttgtatataattaagctccttgagctcagttttagtaatcaatcacttcttttctaattctttctttctcagtttcttctatctttttctttgtttttctttcatttctttcatcatctcaagaaaaacttcaacatggtatcaaagcactttccgccactaatggaaaatattgctacaagtgatcaaggcaatcatcatactgtagctggtcctggttctatcagcaacaggggcaaggaagcaagtgaatcgcccactgtcttcttcaatcacaatctttctgttaagctaaatgattataacatcttgctttggaagcaataagttatggctgcaatcagaggtaacagacttctccctttcagtgctgctcctcctcttaaatttctctcagatgcagatcaagcttcgaatattctgaatccaacctatgtcgactaggatgttcaagagcagttactcgtgttctggctcctctcttcaatgtcagaagcttactgactcgaattgttggatgtgaatcagctggtcacatatggcgcaccttggaaaagtacttcacgcttgaagttaatgccaatattctcgagttcagaacaaagcttcaaaatctcaagagaggtaatcttaggactcaaatagtacttgcttcgaattaaacaacatgtagatctactggcgtctattggtgaagttatgtcagatcgtgatcacattggagctatcttcaaaggtttgcccagtgagtatgacacatttgtcgtttctgctaatggcagaatcaaaggctactctgttatagaaatcgaagcccttttacttacatctgaatcttgaattgagaaaactaatactgagctggatctcagtgctaatatgatgacaagtgaaactgagcttcatcctgaggcaaactacacgaacaataaaaacttcaaacagtctcagcaaggcaactacaatcagtttcatccttgaagaggaaatttcagtggaaaccttaataggagcacacatacacaaggtaacagtccaaacatctcttcgaatatctctttctctactaatgatcgtacttttaatggttaattttccaagaggaggatccaacctttcaagaggaggaaggttcaatccaccagtcaacaaaccacagtgccaaattcgcttcagaattggtcatactgctcaagactattactacaaattcggcaaaaagtttttcacactccactagtcaaggctcaagttcattagtagcaggatcacctgctcaagcgaatcttacacccaccaatcaaggtctagacaacaattggtccttggctcaagagcaaccaatcattccacactagatgctcataatgtcatgaacaacagtgattatactggacgtgaacgcatgtatgttggtgatggtagaggtctgtccattaagcatgctggtcatactttcaatactcaaaattcttgtcaatctcatcccttacttctcaaaaatttatccctgctattacaaaaaatcttgtcagtgtctctaagttttctgaagatagtggtgtttattttcagttccatcctaatcattttcttgtgaaagatcaggtgacacatgctattcttctcatgggaaagcacaagaatggcatgtatttgtttgattctgatgatctccaacttcatccatctacccagcctcaaccacaatgctctcagtctagtgttcatcagcctcctgtcaacacttttgtggtgtctacccaatctagttcaagtgaatctatccctcttaataaatgtacaagatgtaatcacaattccaataactttacaatttttgatgtttggcataagagattacattttatattaatatatgagttatattgtaataccctaagattaagaaactggattagaaaccctaactagattgattatgtattaatgcaaaattatattattatatatggaattatactgataaattgcattttacgaccccgttactctatcaggggcattttcgtaattttgactcgagaagggtaaaatcgtaatttaaatgatatatcgtgcttatggactatattattatatagtatgtttattctatctatctgcaggtattttctgacaaatcggcgcggtatagtcacatcgggtgttttgggccgaaccgggttcggggcccgaaatatatttttgagattttatgttggcatttatttgctaaatgaataatctaaaaattattgtttgtgtgatttatgataatttttcccttacagtaggcatatgtggtttattggccttaggggcatttttgttatttaaccacttaaacatatttgcaacaaaatgattttttacaaaattgaggaaattagaacttcatttctggttgctttcagccctaaccgaccccctccccctttactctccctctctacttgcttttcattttctataatcttgaaatcaaagcttgaatttgtgtaatttgtggcttgaagcttttggaatttgtggtaagcttctaatatttcttttgttgagtttaagttctgataattaagcttgaaaaacatgttcttgttgttgttgtttaagtttttgaatgcatgtgtatgagaattggatgacttgtgtggctctatgtatgattgtgtgggtaggattgtaaggtgtgcttcttaattgttgatggcaagttttggatgattttagaatgtgtaattttaggtttcactttaatttctgagcttgaagttttagtttagaatatttgagttttgagcatgaatttttgagtttaatttgaaggattggagccttggagtgttgaattcaaagcttggttaaattgcatattttagtgatgtgtagagcttggtactatgctttgattcattgttgttgatggttgttgttggtgaaatatgaattggttttgagcatgctttgatgtgattggtatgatgtttttgggtataatttcgagtaggttggaattggtatttctaggtttttaacccagatgtcgcggctagggctgaacatttagacccgcaaacccgaaaatctgcccacccgccccgacccgctgacaaaaaaaaaccgaaaaattaaaaac

SEQ ID NO: 303542 - DNA, 1714 bp, Cannabis indica
actcttttacagctaatatacacctaatatctaacaaatataaatattcacttaagcttctacttcttaaatttgcatattaattgtggaaaagtttcgaagttacatggccagtcaatcagattgtggctgaagaattagcagtattagttcactgatagtatatcgactcataattacttgtagggagaaaggggagactagaatctttctaatgattgaacatgtaagtagaaagaagaaccatgcggaccactgcctgaaacgactatgtccaggggactgcccccacctcccacaagatacatctagctcctatagaaacagaagcacctcacattcccaacccaaattgaaacatacttaaatgattaatgtattgaaacaaacctgaaccattgggaattcaggtgagatgtaagtccatacaaatctatcgtctagcaatgtgtgatcctcagactcgttatctgaaaagtcagtatctgattcgccaagatttctgagatggcccattttaaatcggacagctttacatgagtatatcgggtagcggtgctgaaaatatgctgatatacaaaaacaaattttcgttaagctagaagtaaaacaaaaactaaaccagagatgaaagatgcaatgcaacacagcagagtaagaaaccttggaatggttgaacatggatttcactgaccagacacatcttggtcactaactcataaagtagtgtctcaggaacagatggttcatgttgcccactacttgaccagtatgaagctacattctgatttctatccccgggttgcaaagtatgcacaatgctttcagttgggtaattgtcagtgctagatgcactaatagcagttgataagcaatcatttgtaatgacaggagaaagagctttcgctaagaaggaaaatattttatggttcctctttaacaattcaaattcggtaccgtttctaagaccaatatctactggttctatcaagttgtttagttcaacagcaccagatatttcaggaaacttctttaagcaaagctgtttacagatgtcatgttcaatcactgcacaatgtaaaaaataaaaaaattgacatcagaactgtttagagactgaaatttagatctctttccaaattcttattaaaaccatcagatgtttatatccagaaaatgtcattcaatctttctctattacattaaagtcaaattaagtcaaaaagaaaaccagaattggtttatacatcattcagagagagtcaaactgcaacaaatcatcattaaatggatttttgacaaggccattaagccactagggttaaaaagaaattaaagagcctaattgtcttataattcacgctcaaaagggtatccaaaaaaaaaattgcacaacagtgaaatttgacacaaaccgttcaccaaaatactcaatagttatagtgtagcaccaccatgggcttaccaaattgccgccagagcttggaaacagaggaaacacggactacatcagatgggtcatctagattggttaaaatcttcattgatatttcttccgcaaaccagaatataaaatcaccactattatccactttgggcatcttaagaaataatataagccttcttccaacaatcaaattcacactgcaaaaacacattactgatataagcataatatttagcttgaattcaaaataaaccaaatccaaaaaaa

SEQ ID NO: 303543 - DNA, 1602 bp, Cannabis indica
ttaaccacaaaggcatgtttagaagaaaaatagactataaagactatggtagaacaacatacaaggataatccccatctctagtggcaagagagattatatctgcacaagagacaattccccggggcaaactcgtttctatttcctccttttatcctatcaataatgtcaaatcctctcaagcttttgttaggcacagcttgcttctcgattgagaaacttctattaccatgactgtcatccaaaaggactgaagcatcacatccctaaagtgagaataacccattattaggaagaacaaatcaaaacatgtgcagtcacaaaaggataaattgaaacagcaaacactgtttaacccaaagtttggattattgtattataacaataacttttaatcacctaaaacatccaaacatttgagctcacatgaagagagctaggcagatatgcaggaacaatgaactgagattgaagcttattatatagcaagaatacagagcaacgcaaggacaattaaacaagaataataacaggagcatcgttgatataaataatatatacatttaaacacagtataaatatcagtcaacaaaacgtcgagcatgtatgattgatcataataatttaaagtatgacaaaaattcaaatcctacatgaaatgaaggaatacccaaaaaaagaaaacaatgaacaagtttcaatggtggaatggaaattcagcaatgtcggcaaggaatgaacctccaagaatgcaattcgccagaacttcaagatcaaagctaagttcaatattggatttattcaaccaaaaaaaaaaaaacgctaaaaggaaaaagcaaaagaggaaagaagtgttacgtgaacgaagcagtcgtggaagaaaaggcgaagcagagctgcagagatatccttttgttgggagtaagcgtcgaccattttcgaacgtacaatctgctgagcatcagggcaggaatcacgatagaaatcgtactgaagatccttagtgctaccgtggtctgacaaggaatcttgaagagaagccatggaaacagaggaagaagaaagagtagaggtaagaaaagaggggttgtcttgctcaggatgacgtctagggtttgtgattgtaaaggtcattagaagtgagaaaatccctatcaataaaagcaagcgagcatgcacattcatcttcatcagacgattgaagggagagttgcagaggagcgtgaaagaaagtgcgcgggaaagagtgggaaaatactactttaacccccaaacaccatatatgacttgtttctcgcacatttttcacttccctagtcagctttatttgttcatttagtaattattcaaaatttaggggacatagaggaatattataaatttgaataattactatttttacctcttaaactttcgacactacttaattttgccatctaaaatatatgacttgttaaaaattctctctataatataacagttacatagttatgctacttctgttaggttcttttatctttacccttaaaaattagtatttttacccctaaactttgactaatataaaattttggcctcttttataaaaaaaataattttaaaa

SEQ ID NO: 303544 - DNA, 1195 bp, Cannabis indica
tcggattataattaaattttatttagacaaaaaaatccattcagggttctatttgtaccattttagaaaatacatggtctattttatcatttaacaaaataaaaggtctaattaataacttttacaaaacacaggctccaaaatgatatttaaccttattactctatttttatttaaccaacaagaccactcactccaaactttagctaataatgatgtgtttgtgtttgtgcaggcacaaagagcacgtggaaggttgattagggaagtggaagataatttaaagggaattgatggttttattgggaatgcaaccgagtgggaaaaagtatgtatgggaaatctagtaggaatgcctgtaattgtggttccaacaggtctcaaacccatctcccatccacctcccaatactcgacgaaggaccactatcaccactgccatttatgctcctcctcaacatgatcacattgtaattatcattatcactaataataatttttatgttgacatttaattaatttttttaataccaatttgatgtgtctacatgtgtactattcgtgcctcgtaagaaattaacaatagggtcaatggattttatttttgcagggtctagcactggcaatggcttaccaatcagtgacccatcatcacaagcagcgcccaccaattgatgacctcggcccacatgatgtgcttcacattccaagcccacctccttctcctcttccttaatttctaatcattactacgtcaaataaattatccctcccactcccactcccactcccactcccactcccactcccactcccactctccatttgttggtactatttatatagtgctctatgcgtgcatacaatatatacatacaaactattttatattgttttgtttagaaatcattattaaaatttatttataagttaatcaccaacaccatgcctcaaaagtattaatgatgtctaacttttatagtgtcatagcatcattggtgaacctacatagaagctaagagcatgtttggtattgttttctgttttttgttttaaaaaattgtttttagaaatgagaacaaaaaatagtttttaaagtttttaaaacacaagtcatgtttggttagtgatttttaaaaacaatattgaccaaaggtggattggtttttaaaacagaaaacaacattttgttgttt

SEQ ID NO: 303545 - DNA, 3666 bp, Cannabis indica
aaacagaggaatattgttgaaactgaccggccaacatttttcaaagtgcacggcggtcgtacaagtaaaaagcattattctttcttattctctctctctctctcttcactactttctctctctaactccttctctttcctttggttctcttattaatctgtcatcgtcttccaagttctgacgcaacaggactgtctcttcacatgactctctgcaacccacgtaccccattaccattaccagacaaaccccttcctctctgcaactctgccactccatttaaccttccctaaacttctcacctttatttttacttttttacctacttctctctcatcacctaatactactactactactactaccattgttgaatgaacacccttctcttctgttatctataatttattaatctattttctctttctctctttctttctgtactttgttttttttttttttaattttcttttaatttttaattttaataaaaaagaaaggctttttaaaggtttgaaatttcttcaccatttttgtataactggctctcccaacaatggaagctttcagtttacttaagtattggagaggagccggcggcggtggtaacggcggtgatgttgttcagaacagacccatttctacagttgctacgattgttaccgccgtcggtgaaaacacggcggaaatagacggcgacgatgacgatgatgatgatgacattggtggtggtggtggtgatgatgatggtcctttctttgacttggagttcgcggtcaacgaagaagacgaagctgaagaagaagagattaatacccaaaacagagaagaagaagaagaagaagaagccattgatgatgatgaagaagaagaagaagaagagagagagtttaagttcacactctcatctggttcgagcaatgatcgtacggacactaatctagctctttcaccttctgatgatttattctttaaaggtaagctagtccccattgagtcttcttcttcttcttcttcatcagaagaagaagctaaggctaatgataataataataacttgatgaagccaacacaacaacaagctcagttcccagtttcgttgcttaaatcagcaactaaatttcgagtctttatgttgggtctcaaaaaatctaaatcaaatgctttagcaaacaacaatggagttgacaaaacagagcagatcacaaagaaacggcacagaaggaaaagaaacgccggaaaaaacccaacaacaaaaatcccaaaagaatcagttcttcactgttaaattaaaggtcgaagaagttcctattgtatctctgttcagctcaagatcagtttcgaacaagtctcaaaaacagagcaacgaaaacgaaacggcttctgtttcaacagacgagaaacgtttcgctaaagaagtcgtacagaagtatttaaaaatggtgaaaccactttacgttcgcgtttcgaaacgatacggcgaaaggttgaaactttccggtcaggttagtctgaatagttcgggggctaaacccgtttcgccgccgaacacgacagagactgttgagaagaagagtactcaaacagtggagccgccgccacctccgccgccgccgccggaatcggcggcttcatcagaaatcccggcgaacaatgttaacaagtctctgaactttccggccggacttagagttgtctgtaagcatttgggtaaaagtcggtcggcttcttcgacggccgccgttgctccgtccggtacggcggcgcaggcggcggctgctaaaagaagagacgattctcttcttcaacagcaagatggtatccaaagcgctattcttcattgcaaaagatcattcaatgcagcaagaggtaataattatgaactgtgttcttaattgattaaagattagatttttaaatatcaaagatttgttttttcactaaaatttaatgttttttttgtttttaaattatgttttagattcagagtctaatcttctatcacggtgtgctagtgacccatccaaatgaaaagtccaatcaacggttgtgattcaatcttataaagaggccatttttagtggcgggagttttggttttggactaagaacaaagctttctcaattgttcttgttggtcaaatcaagtcaaagctactttaattactttttgttcttagagaggaaaatgggttcaataagttcttatatagtctatatagagatataaatatatatatatgtatgaattagttctagtatgttggtagtatcttcatctgtaaatgttttttttttgttatgaaatttcagagataaaaagtggaggggttttgtagtgatgatgaactttccatgaaagtgaaagaaaaatcagatctttgtttgtacctatgatctcttatttctttgtaatcagtagttaaaattaccaaaatgccactataatgtttcatcaaatgttgttgttacattgtgtaatgtgattattccttttaattaaaaattgtatttttttttcttaagttaagcttcccatcaaagtgggtttgattataattagtaattaattacattggattaattgaataattaattaaatgttttttgtttcatggatctccgagtcatcagacatagagggctttaaaaattgagtctttattttttgttttggtcagagaaagtgggaaaagttaagagagacctaaacagtaaaaaaaggttttttctttttgttaaagaacaaagtaaagttaatgggactgattagagaagagagtgggaatatttgcacgcctaaaataaaaacacacacataagtgaaaagatagtaaaattgtgcccctaatttactataaaatgtttatacaagaactccctcaaaaggagactcttaaaattttgtagtctagtaatctacgttatagttatttaagacatgttgttataaaattttaagatattcaaaaaaaaattaaactgtcgaaaatagagttcaaactatctatttttattttatacgcatgtgaaaaattgtctgaatcttatttttaacatgttaaatttttttaaattttattgtaaatgatcataaaagaattagagtaaatttttctttttttctaaatattgacacaaataaaagatacatgggtgaatcatactttgtataatttgtctaaaatgtatatttttatttctaattatctctctctgtttcagggttttgtttctatttgatttatatataggtctaaaattcagaatgagtgggggggaattggaaatggtgaaagtttattagggtttgggttgatgttgatgcttgttgttattttaagtgtaaaaacaaaaaattgggtttgatttgagaatagaatagatttagtttgtctccttctgctactgcttagtcctacaaagcccttgttgctttatggactgcttggttttgctttttcaagttattttggtgttaatgagctctaaaatatgagcattgctaaaagatacttcatgtttaatattataataaagtgtcattttataattaattaataattttttataatatttattagggaaattatctcatatactatttttttatttttattttttaaatttacggtttgggtttcttacaatttaagttgtagcgcta

SEQ ID NO: 303546 - DNA, 3365 bp, Cannabis indica
aaaaaaaaatggctgtggactcggctctatcttctcctttaggccctccggtctgtgaaaaagacgcaaaagccctccaattcattgaggaaatgacacgaaacgccgatgccgtacaggaaaaggtgttgagcgaaatcttggctagaaatgcccatactgagtacctgaaaaggttcaaactcggtggcgcaaccgatcgtgaaacttacaaatctgaacttccggtaatcacttatgaggatcttcagcctgaaattcaacgaattgctaatggagatcgctctcctatcttgtccgctcaccccattacagaatttctcacaaggtgagcttttaaaggacttgtttgtaatttcaatgccataatttatattatataattttttttaattcaaattttaatggtaattacagttctgggacttcagctggcgaaagaaaactcatgccgacgattaaggaagagttggatcgccgccaactactatacagcctactaatgccagtaatgaacctgtaagtttcaagacattttaattttaatttaatattatttaatgtatttaatcgatgaaaaagcgtaactttcaagtaattaatcattagttatttatttttttattaacttgaattattatgctatgtacagttatgtgcctggattggacaaaggcaaaggactatattttctgttcataaagtccgaaacaaagacaccgggtggacttgtggcccgacccgtactcacaagctactacaaaagcgaacacttcaagacccgaccttacgatccgtacaatgtatacaccagtcccaacgaggctattctttgccctgattccttccaaagcatgtacactcagatggtctgtggtttatttgaacgcaacaaagtcctacgcctcggggcggtttttgcttcgggtcttattcgggccatccgtttcctccagctcaattgggcccaactcgcccacgatatccgaaccggatccctgaattcgaaaattactgacccggaattgaaagaatgcatgaacagagtcatgagacccgactccgaactcgccgatttcttaacggccgagtgttccaaggacgattgggaaataatcataaccagaatctggccaaacacaaagtaccttgacgtaattgtgaccggagccatggctcagtacatacccacattggattattacagcggtgggttaccactggcttgtaccatgtacgcatcctccgaatgctatttcgggttaaacttgaacccgatgtgtaaacccgcggaggtttcgtacaccatcatgcccaacatggcctacttcgaattcctcccacacgacccaaaaacggcgtcgtctaaaaccgttgactctaagctaattgagcttgttgacgtggaagtcggaaaggaatacgaacttgtaatcacaacctacgcaggtttgtaccgttacagagtcggcgatatcctccgagtcacggggttccacaactcagcacctcagtttcacttcgtgaggcgaaaaaacgttttactcagcattgactcggacaagaccgacgaggctgagcttcagaaagcagtggagaacgcgtcgaagcttctgaagaaattcaatacgagcgtagtcgagtacaccagctacgccgatacgacgactattccgggtcactacgtgatttactgggagttgctggtgaaagaggcggcgaactcgcctgatgaggaagtactgagtcagtgttgcctcgagatggaggaatcgcttaactcggtgtatcgacaaggacgagttgcggaccactcaattggagcgttggagattcgggtcgtaagatccggaacatttgaggagttgatggactacgcgatctctagaggcgcgtcgattaatcagtataaggtaccgaggtgtgtgaactttactcccataatggagctattggattcgagagtggtatccacgcacttcagccccgcgttgccgcattggacgccagaaaggagactgtagtttaatttattattaattatcctattttggatcaagtcaacgatttaagttaattaactatctttgtttaatatttatgggttaggtttttgctcttatataaaattttattttatttttttttttataaggaaaagagagaaaaagaaagtgtaatgtttgattaggacgtttcaaaggtcaggttttgtattttggttcaattaacatgttatcaagaaaaggaaatgatgtgactctcatgttatgctctttacttatggctttattggaaaaaaagaaaaggtgatgttctaattcagtgaattgtgtcattttcacttagtggaaaaatcgggtatggcaaaaggtataaaagctctttctttctgaacgcagaccattaagcacggcagcctaacgaaaaaaatttagataaatatttaagtataattttctgtagataaatagttaagtttttttttttttgttgtaataatatttaaattataattttaaagtttttgtttactgttaagtgttaagtaaattactaatgaattttaattggtctaggtcattaattttttttttaataaaaatactaatttaaatgtatcaataaaaaaattacatgtagataatgacttaacatttaacgactaagtacttacagagttttagaaatataacttaagtattattatcgcaaaaaattaaagttgagtatttatttgtaactggaaatcaaacttaaatatttataccgtaaattcttctaaattataactttttattttttattttagactctcaaaatgtatagattttaaacatagccctaacccgcatatatttaagtctaatcctcatcataactctatccgttccgtggattcattgcatgaaattatttgatcttttcctattaataattttgtctggtgaaaaaaccactttgtctgtccactttgcttttatagtctatataatatatgaagtgttttttttttaattattatttaataaagacttatgagtacaatatccatggtaacaaaagtggattattgcataggatgaaaagtaatccatcttgagttaattttgaagaataagcacttgaacaccactttcaccaaaggggacagcactaacagaggagacattaacctgaatattacaaaccccaattctctacttgtttctaatcactatgtcagatgtgattaattggtgaaagtaagtacaccattcaacaaaataattgtaactagaaaaagtaatattaaactacattattaacaatatattagacatatccagataaataacaattaatataggtgacgtttggtaaca

SEQ ID NO: 303547 - DNA, 1726 bp, Cannabis indica
aaaagcagcagcctttccttggaccctcttcctgaagaggaacaatgattttagtaccctttaaaagacctgaagtaccagttgaatcaacctcatcactagctgtaagtgttttcttgcttattaacctatatatttctgttaatatagtcaaaaatgcagtctcaacattagtggactcaagtgctgatgtctccataaaaaataggttctctctttgagcaaactcttgagcatcctcagttggcactgctctaagactccctaagtcacatttgttaccaatcaacatgatcacaatgttcttgtcagcatgacccctcaattcctctaaccaccttgccatgtgatcaaacgactgtcgttttgtcatgtcgtatactaacattgcccccactgctcctctgtagtatgcacttgttactgccctgtacctaagaatattatcacaattcaattatgatattattgaattccacaatctacaaagatattattctcttaggtatgtatgaaaatgacaggccctaattgaatttttatttaatttggtatgctagaaaaggcaaaaagggtattattcctatttgtgacacaatagcatatgtttgaccctaaaaggaacatcaaacatgttgtgaaaatgcatatgcctccttcattaaggcatattattttcttttctttttttggtgtctaagatacaaacctattgtcatccatttatgtcatgtcaaaaaccaatatgaccaatttgttatatgtattcattattatgaaacaaaacccaaatcaaatctcatcacacaaagattcatttatatttctatgtataccaacataacataacataaaagaagaagagaaagcaatggattaagaattgaatgggcaaaaacaaacctttcttggccagcagtatcccaaatttgtgccttaacagtcttttgatcaataattagagttttggtctgaaattcgaccccaattgtggccttagaatcaatactaaattcgttccttgcaaaacgagccaagagttgggttttcccaacagctgaatctccaatcaacactactttgaatacataatcaatcttttgactataatctccatacaaattcgacatcctcttcaaaccaaaattagataatttcctccctcaccactttcttctttcacataaaagatcacaaataataatctgctcaaaattggaaaatttacaagtgatgaatttcttacacatggattcaaaaagcatgaataaaaataataacaaggatttgaaaaatttgaatgtgattagaatgttaatgataaattttgggacattggtgagtatttgattgaaagaatatttgttagtggagaagagagaaagcagtttgagaaaaatgatgaatagctattttaggagctaataaaataaacaatacttatttctttttcagattgtttgtattaaaataaatacattaatatatatatataattatttcatggccaacatttctcacttgcatttcgccttttataacgcaatatcttattagttacagcctctccaacatgaaaggaggaactgaactagtatttataattgatataaatgcaattttttaaaagtaaaaaataaatatataaagatataaatgcattatttttaaagaggatataaatgcatttaatgatgtattcaatattatcagtggtgattattat

SEQ ID NO: 303548 - DNA, 4011 bp, Cannabis indica
gttagagagatcctaatgtcctttatcattttatggtttcatgtcatctgtaaaacactttttttcatttttacttgattaaagtatttattaatgtttaaacttgatatcaactaaacgttgagcatgaagtctcaaactagtgcttgtgcatttgtcactaactatttgtgggaatgaaactaaaatgtcatttacaacttaagtagctcccatctttccaatgaagcttgcatctcaaaatcaacttctaataaaatagttatcacagaggaattcaacaagagaggtcaacagatctcagatcataaagcatatatactacaacaaggaacaaaagaaatcgcctacgaacctggcctcgtaagtcgactactaaaccagttggatgggacatctggttgccagcaaaactgcccatcctcctcatgcctactaaatggttccttaccctttggtatgggtgcctttatagtctggccttcaccccctgaactccacgttcttgaactggattcagagggatcacaagttgacttgccaggaaagaaacagaattcctggcttatgaatgggcgtctttcattcaacttggcccctcccgagaacagctgtctacatcttccgtttcagtggctaaccttttctcagtattcctaacttgatttgaaaagctacccagccttaaagacaaatcccagcctgcttctcgtcttcgtttctcccgggcgtcgaccgcattcatttgtggaatcatgtttgaagcattttcagtattcttgcgagagaaacatttatgtatagtaggctcagcagtagatgtagtgactggtgtaccaacataaattgtattataatgtaacttttctggaatctgagagcctgattggtactcttccttttgataatgagttccataatacaatggatacactgaaccagtgctcagtgtggtgttagtggtcattgttgttacttggttatggccaataggaatattcttgtgtaaaagggaaagactccgaggagaagttaggttatcatttcggtttatgtggatgcttgaattaggaggaaatttcacagagtttgcaactggggtccttacaaaattcgtttgactccctgagtgaattggcaatatatgaggctgcctctcatcagtagttttagtaactgccgagaatggttcctgcgttcttggggtaaggtaattcctggggttacagtgacgttggcttcttgaagcccttaccggaacacaacccagattaagagcagctgaacaacaaaaataactaaaataaataaagggcataaactattgcacctctatgagacatcagataagtaatcaatactagctaaaatatatgtacaagaaattgataatacacatttaaaaggagaacagataaactaccaaatatcaacgtgtcactgtttaagctaccaaatacaagcctataatacactgtggtaccttcaacacaagggggcaaaaggtctccagtttcagtggtttcctctctccggataatggtgttaatagcatcattgactctttcccatagtgtatctggatttgtgtactcagcctgagcagttaaactaatgcaatatgagtaaagcaataaacaaacaagtttcaaccagagatctagtatacaaaaaccaagacaaaacctcggagttggcttttgagtacataatttcttctgctttcaaaaccacaacaggtagcttctcttgccattccttgttctttttagtggaagagctatgagcttcattgacaaccctaatcaaacacatggcgggcaatcagcaaaatgtacaaaaacaacacccacatcgcgacaaaatagaaataaaataccacaacagagaaaacccagaacctgaaaatctgctgaataatagaacctctcatgggttgatgtcgatcgctgtgccaagctcgcctcacacactcgtagggtcttggtcctggtctcggcatctttacaaacagcttaaccctttgagacagaataatggaagaaagaaaaaaagctagcaagcccaaataagaaaagagggaaaggagagcaaataaagaaacagtttcctttcaaggtttaaaggaaaacccagttgagctttctacatgggcattgatgggatgaagcaaaggtctggtctttctcttggtaactcactcaacctttgagttgtgcaaagttgagaataatcggagagtttttcataggcacaagtagcagtagaagaagaagaagaagaagaagagtagctttcccattcctctttagtgttgcccaataatttagaaagtttaccatagttcagtgtccaatccggggctctttgtgtcgggttgaagggttacctctttgggaaataaaaattaaaaatgagatccttttggtcttagtgttattgtcatgtaaaatttctcattttgaaactaagcgtgatttacaataacatacgtttgattagaaagagaatattcattcaactaagataagtttatatgacacgtcatcatacataataattacctaggcaaactctctaggagatactcttctttcaaaaaacacaaaaagtgagagatggagagactttcccccctcacacattagggtttggttatatacctatagcattcctagatttacaatgttaaagttaaacctaatgatgtgtgtacacagttagttatgtaattgattaccatgttgtgaatataatataccattgcagcattgccctatctttagtattacttacccttttgcattgccgtttgtgaagtccttgactagttaatgaaggaaagtgtttaaaatgttagatgagaatgataaagtttggggactaattaagtagtttttaagttaaagtgatatgataactattaaaatattaggcttagttcttcaaatgataatgaagattttgagttaaaagtgtactcaaatattatgtaagtcaatttgacaattttgtatcctccttattattctcgcttaattataaatgatataattagaattaagattttctgttaaaagatagtgtttcatagttaaatcaatttaattgtgacactaattaatttcaacattttgaggaaaaaaaaaactatctagatagttaatagagtctaagaaaaataattatttggagttatcacatttaaattgattctatgggacaccaatttttaataaatagtcttaattctaacatagtatcaagatggaaaattaaaatcaagggaaaaaaattctttatacatctttcttacccaataatgcccatttagttttttaggttgaagaggtagcaaaaaatagctaaacaactgaagaaatccaggaagtctctcactaattcagcaagtatcttcttcaagcccaagcgccttcttagacaaatcgtgggcaatagtgttggctgtctggcgatgtgactaaactgaacattctattgaaatatattttaccaggatctagatttactaacagatatgttgattaacaccctaaatatgaatttttaaaaataatagaattaaacacacataaagtttaagaaatcttacatcggtggcaccggaataatctgtccaccggaataatctgtctcattccactcagatctctaacccttgttcctttcgcgaatcctgtaccttcttttttcttcctgggatcgaagtaggatttttctcagggttcccctcggcagggtaccgtatagggcttggttccctggtcttgggcctctgagtgcttggcgaagactcttcttgtgtttcctctggtcccgcggggatggccttgggatgtatatgtattctagccgtttccatagctttttgcatcgcgaccattatctcttgcatcttcttattctgctctttttggacagccagttcggcttcatgatcagccgcatttttccttaagaccagcttttcagtatagctaccttcgtcat

SEQ ID NO: 303549 - DNA, 3812 bp, Cannabis indica
aaaacccaacagaaacatcaaaggatttcaagttttggctgttggaataaaaaacttcacaaaattctaaaaagtaatccatcaagtggcacaacaagcaaacaaaaggtagaaaagggaagcaaacgataagcgtggaaatgaagtaagcattcatgagaaaaatagatgtctctaaagctattatagacaaccccatagttagggcatgattaaaattatttctggaaaactaaaattaaaacaaaaaagaagaagggaaggagttgttggataaagtcatttgttggtctactcaatgggttgttcctgagcttagcttgaggggacttccttggctagaacgatgggatgctcttgaggcttgactgggggtacatcctgagtcaaagctagaaggtttgctggattgtcttggggcgggccatggagatgttaggcagtccccaaaaagactaccacttaagctaaatgctccagctcaaagtttccagttgactcttcattagactcattgctatcgtctttataaaagtacttcttgagatacgactcatcatcgatggcgagaatcctctggctgtattcctccctgtctcccttaacgtgccgatggatggaagaatccttcttccacaagcgatgaagcaagattgagtaagacatgtccacggatcaaatgcgatgtgttttagtgtgagcctctgcattaatggcatcactgattgattgcacaacagtctctctggccctctgcattgccaccagagcaataaaagcttttataccattagctggttcttgggctaattgcttctagagattcgcgatagtggcctatggtttttgctggaagtacgggtactctgaaggatgagtgtctaattatcatatttgatgctccaagactcgccctccttctttagtttcttaactttctcttggaaaagcactattatcatccagtacacctttgatgattctctccttttcgtggacttcattttgaaagttggaaacttcttggatactaatatttagggtggccccttggattgccaaccgattctccttgtttcccctctccgttgtcacttggcaagatatttctcaagagaagacacacgagattcaagttggcttaccttgctatagatgtcacgttcagctttgtccttgtgtacttgaacaacttccaatgcttatcgctagccacattatctctacgcttaatctctgcctcacagtcagccaagacttgcttcagcttctcctctgcttccttcttggcatcatttgccgcaataagggccttaaccttggcttctttgagcctagtgaacaaacctctattctcggtgtacatccattcaatttagcatgggtctgctcaagctctacagttaaattgccaacctcttgcgtggtcctctcagccatcagcaccatctgacacaataaaaacgtgagaaaaatagtatacaatgacagaaacgaaagtgaaaaagatgaaacttacccccagcgcctattgcttagtagcatgggctaaggaaaatgcatcaccactgctgcaagctacccactttttagaggaaaactcggacgcactaccaaccacttgatctaagagctcagtagcaaaggggcccacttcccttctaactctgggtaccaaccgtttccccacggcctaagtctcaattctcgacctagtcggtacagtggcatgaaggccttcaaaaatctctgccctcttcacggtagagagactgtaggccctcttttggagaatgctcttctctttcttgtgcctccacttcaggatgccttcaacctcccccattgtatttatggtggcgtggtcggagcaagaaggctttagggggatcttgaagccaagcgatgggattttggggagagaaatgactagcccctattgctagcaagaagtgggtttttgcctcctcgacggggtaatggctccccaataaggttgttgtaggtgtttttgtcgttattattattgtaattgttgttggtgttgcaattattattgttgttggagtttgagttactgttgttgttgttgttgttgttgttggagttgttgttattgctaatgttgttactgttgttgttgtctttgttgctactactattgttattgttgttgaagaattttttcttgtttgttgtgaacttattgttgttgacggattgtgactgtggctggaaaatttggtggtgttgggacattagctctccatagatcactgtcccctcccaaagatacctgcttaatttgactcgccttgacctttttagcttccctatcagagggtggcagaggggtcatgaactttggggtcacagacacatccttcctggggaagactcggggcatgaagaatcgagaggggtctgtcacctctttcacaagtgctcgctcccaaggcacccttgtttgagtacactacttcgtgcctctcccgaatttccataacttcattcaaagggtaaagatggcgaagtaactagcaagcttccaaggcttggtcttctttagccacctctgtgaggatcttggccaaatcatgggtgatctcctccttaatttccttaggatcttggctttgacccctattagttaaattgtcaatgctttcgaattcagtaataagcccatgctcatggagaagggatatggtcactaagccctcaacttttagctggtcctccgtgaaagctttgtactgggccacctttttggtcaattcctcagtctcggtgctctaaggcactggttcagctaataaaaacaatgaagtatgatcagcacgccgaccaaaccaagagaaagtgcaaaaaggaaaatagataagaaagaaagaataaaagttcttacttggaagttggaagtcaagctagagagtgggtaccctcttcaccgagaagacagaggagaagaacctatactccctcaagacgtgggagttcttggtatgaatggtgggacagtaggcgtgaatatttttctaacttgtaaagacctacctttttacagctagtcctcatcgactgagcgttcactttgtagaagaataatatctcttcaagggaaggcacctcgaatttattaatcttccagaaaatataccatttgaccaagagcttataagacagaggtattaattgaaatggggcaagcccgatgcaggaaatgagctccatgaagtaagtcctaagcaggaggtgtgcactgctctgaatgtgtgactagctcctggcactgaaacctgttgtgctcacagacacagatccatcactggcgaaagaagaaaagaaaagtaccaaacaattaaatacccactatcacttgtcatcgtggttaaatactataaatcaacttggacaatattattttatcatggaacaaagagttacaccttatttagctttcactataatattttattttatattaaataacattattatttttttagcaaacattggaggttgatcatagctatatatgatattgggaacaattgtattcctaaaccgcttaagagactacccccgccaaaaattgtttcaatagtagaaatataggtttagaactttaagcttaatttttttaaataatgattactaaatttcagtagcttcactcataataacttcaatagtgcatacaaagaattagctcaaaatactattgtatgtgtcacaaagggaccatagatgcatagttttcgtgatatccttcaatattaaactcctattttagtcaataaaacaaaaag

SEQ ID NO: 303550 - DNA, 1394 bp, Cannabis indica
aaaaaaaaatacttattaatatttagggttaaaatggcaatagatgtgtaggcgagaaagagacaaaagagagtgtgaaagttgggggtagtgtaaggaaagtgtgtggtttaacatgttggagaattatagaccatttgcgtgttgactgtcaaaatcagtacccttttccctttcccattctccattaattaaatcattcattgattcattttttttttctctcttttgattttctcatcaagtcaagtttcttaagcgtgaatacagacttccactccactttccttcaaccagtgtacattaattacgtgttttgtgttcacatgaaatttgtctcatatttggctcatattttgttctcttcaatgaaattttcttctaaacatatactaagagcaacaacaataattttagtaggagaataatgttagatgaaattattgggaaagaaaaattagaagagagaaaagaaaattaaaatgaattgataaataacaaattatgagaaaataaaagcgacacagaatgttttcaatttattgtctgtgtggaaattatactattgtatattatcagtgatacattatttcttgtgattagactatttccaaaagtaggtatttcttttaataagttcattttcttcaaaaaaaaaaaatatgctcattaattttatgataaaaacacaaaagatcaaaatgttaatctgatacttttgtgtgtaaatgttcatcaagctattgaaagccaaatagtgtaaaatatggtttttatatagtaatttagaaaaatatgggagtaactttccttttttcttttatggtttttatatttgaaagttgaatttttataaatttgtcaattataattcttactaaaaatgcagcaaaattatattttatttttacaaatttatataataataatccctgatcattaacttttaagaataaaaaatcataaataaaaagaaaaagttaaattactatatgaagtttaaaaaatatatttttttttataatttccccgaaaagaatgtgagcagacacacaatacaacatggaccacttgataatgtcatccacatagagaggcccacctgaaagctctgaagcagttaagcccaatatcataaattttctctcatagaaaaaaggttgagatgcatgatcttaattttaaaaactaaattaataaatgtcaactttttcaaaaaaattaagaaaatggcaataatataataaattaggtaataaaaattattaaaacatatttattataaattatttttttaaaatatatatataataattaaatgaagttgtataatttttttagtattgcatattattatattgtaacaaaaaaagaataaatatattagatcatta

SEQ ID NO: 303551 - DNA, 919 bp, Cannabis indica
agagaagagggaaatggacataaatttttgtttctatttaaaactacctctaaataaaagttgatgaatttgttaattgagattatattcaaatatcatatgaaaaatttactatacatccttaaaagggttattaattggtactgtatttaactgttttttttttattttttatttatttatgtgcgttataattatttacacttggggccaatccaataaaccaagaacttgttgagcatgagctcttggaagaaatgttgtatcaaatttccacttgatgagttgaataccaatatgaatagttctttgttctctgaatttaataggtcatttttggttgaaggaatttttgtaagtacttattggtattacattttcctgtaatatatataattatacaccaatatgttatactatttcttggctaatttcatcaatgaattatcaacataattcaattctaattctgatggtgttgttgatgcctattaatgattatgaaggatcattatgcttgttggcttgttttcttttagtttttgtatttttgtacacctaatttggttactaataagttgtattttgtcaattatttaaataatgtcacacttttttttttttcaattacttttttttttccttcatattagtgattcaaactctatccaactaatttaaacccttaattcatctaatcaattttagcaagtattaatcatgagaactcaatttctatctcgattttttattttttagaaaaaagtttaatattaataaactttctcaacaaatgtattcaaataaaaactaatctccactaatcatatccaattgataaaaaatttaaattatttcattaattatattagtcttaacaaactagtacaatttaaattatttcattaattatattagt

SEQ ID NO: 303552 - DNA, 1217 bp, Cannabis indica
tttcttcaatcgtcgtcttgattacaaacaatgcactttcagcttttatctttcattttttcaaagttgcaacatcttcatgtgggtttatttcactgtcattgacgacctcccatagatcttgcccttgtagttatgactccaatgtcattgaccaagtatttataattgtggttgttgagcttcttaataccaccaattacttgagcatatatcactcatcatggtttggcaaacaaactaccaaacgagcttaacctgatttgtaagcttcacaaaactcaaattgtgcacgacaacgagaagctcttctaccactacgaacttgacgaacctggctctaatactacttgttaagtaaaaaaattataacactctattattattgaagagtactagtacaaacttagaacactttggacacaatgattctaagacactcttatacttttacacactttggacaaaatatttttagatttttttaatttactaactaattaattacttcttactattttctaaataactttattactgtctaatcttagttcaagtaattcaaaattttctttaaaattttctaagtgttcttggttttttttctaaatttttcaaaacattttaaaaaaaatttaacatattgtagatttaataatgactcttaacctaaattacagttttatcaggtgctttttttacaagtttttcatatttttctcaaacattaaatgattttctccttaaataatataagaagaataaatttattgttgttagaacttctggtctaattaattaacaatatctcttggaaagtttacattatattattaaataaatgtagagcaaagcaaactttcctgaaatgaaatgatccatcattcccttatatactaatatgttttatttatatatattatatataaatatttaggtaactctgtactttggacacatggggtttgagttaagttaagctataagtttatttttgttagaatgataaaataaagttggtctcatgccacaaagtaccaattaaagatagagagatattctcagtattctccactttggacttagagatattgtatagtaattagtagaagctcagaactccttttttaagttatattatattatacatacataatgggtcacatatgtatatttatatataaatatatacacatttggaagaggtttcaatggtt

SEQ ID NO: 303553 - DNA, 1013 bp, Cannabis indica
aaatacccttttggagttagcgggtattacaggtaagactaaccgatggccatgtataaaagtttccgaggactaacgatgttgaagagacgatcaatgtatttaaacatgttctcaaacacttgttcaaatgttagtggagatggaaactaaaataacataaaaaccaatagaaaagaagttaataaagggtacaaaaaagaaagtggggtaatataaatataatatagatgtatatatacttcttgtgcatcatcatcatcatcatcttcaggatgaaaacaggggtgaataatgttattcaagtcaagataaaggttatcaaactcaatcccatttgggtttgttgagcttgtatctaagtaattgttctcccctttagcttctatggcatttgccactacttttggatacttgttcactaaccaacgataaaatgaaggcactcccatgtttattttttttcaagctttctttgtgtatattcatatattgtatatacatacatggacatatatatgtatgagggatgagagaaacatggagaagatccaaaggcggaaattgacacgatattcgaagagacagaaggtgggaagagagggtaggtaggtatatagcttcttcaaggagcaaagctctagttccaacattacttacacagtttgtaatcatttcggggatatttggaattcggcggcaatattattaacttaaaaattcacactattatgtatatcttctaactttgtaggtagtaaactatctataatttagtacgggtgtaagtgggtaggtttagtcgatttatagtacattttatttaacttaattaaaaattgggttacaaaaatgtaagtgaaactcgtccaattaagaaaaacgaaaataataacccgtctaattaaattggtcagtttggtcgggtcaatctatccaaactgattactaatattttttaaatttttttttatttttactactcaattgttacattttaattaattataata

SEQ ID NO: 303554 - DNA, 902 bp, Cannabis indica
aaaaaaatacaattttaaaaacttatatgattgaaaaatatatttacataaaatcaaatatttcgattattaaataatataatgcattaattaccaaacttgttacggttgacggcaagaactcgtcatcaatcttaatggctggaaactctaagtaattacgttagaaaataagaaagtagatgaaataaaaatgaaacttaagaaactttttagattaataatggtgaaagagaatgagctctcttgtattgcgaaatccaatgtgtttgttacaaagaatttccaaccctcccttcaatggaagagaatggtatttataaggagttttaatggcttcaaaatacaagataattccttggtggtccccaagtattaggagaaggatgttgcaagttgcaggctacggttacaagaggtggcctgatgacttgtactgttgtcttgtgttaggtgttcctgggggcacaagtagtggctctagtgcatatcttgtcaggaaatcagagcttgtaggcaagatgcctccactactcgtcctcttcccgtgttgtggtgttgaaggtagcgtagtcgtactcgcttgttaggtccttttgattcctttccttacaactcactaagcattgaccatcttattgataggtgtggcgacttgtcacaatatttaaatgttgtatatgatgtcgagacgcattcaagcaagcgtgttgagaggcatgcacacatagatgcaaagtgagtgcatgctgagtggcttcaagctacaacatgccgagtggctggaagctgagtgcatttcgagtgggtgcatgctaagtacatgccgagtgggtgtatactgagtgtatgccaagtggctacttgagcacacataccaagtggctgccttgcatgcatat

SEQ ID NO: 303555 - DNA, 1046 bp, Cannabis indica
tttttttgcggtgcaaacggttttagcggtttgaggaacacccctaataaatggtataaattgtaaaaataggaatctttcacaaatttttttagaaaagttctaaataatttagtgtaaaaattagaattttaatattttatttcagatacatataaaaaatgacaaatacgaatacaacatgctaatttagtaccctaaatatttttctaaaaaaattgagaaatttcttatatgaagattaaactttcaaaaatcaatatatataaaaaataattctatggtagtgactatagttttgttcctatactatacatacatttttgtagccattgattcatatgacttttgaatgtccaccttatctaatatgtgcttgtctctattagattaaagttataattttaaaatcctacatcacttactttgaggaaaaaaaattctgacaccatttgagaaaataaaattaataataatattccatagaaaataccattttttaaagctatggtggtgtagtggcacgacaacctcaaatccaaaatgaatctgaagcttttacctaagtcattttcatattattagaaagaaattcaagcttttacaagaatttcacagaggatagacaaacacaaacaaaaaatagtttttttattcttctgcaaaaatcaaaaatttcatttatgttataacaacaagaaaaacataatcaacaccattttacataaaacaagtaaagattctgaaaattggggttgggaattgaataaaaaccaaaagatgtaacagtctattgttctttggtgtatcaacacatttacagacccaatggattcgccgaaaaaaaccttaacattatgaactttgcagcagcgagattttaaaacgcatgagagaaaataaaacacttaagaataaggaaaacccactgtttggttttcaattagttttataatttcaagctagaagtaaaaaaatattaaaaaaaataattggaagacttgtggtaaccatctgtgggttttatgccctaaataaaactcttt

SEQ ID NO: 303556 - DNA, 1829 bp, Cannabis indica
atattatactaaagttaatatataattaataaatatatcttattatgataaatttaatatacaatttatacaaatttttatttacaatattgccacaatataaataaataaatttaatacacttctttaattacaatattattgttaataaaataataaataaattttatgaatttttatttttttgacattgaaggaggggtgttctaacctcattgtgaggagaggtttaaaaggctatgcttatgatcacgaattttatttattaattattattaataataattactttttatatcaatttacatttttttgtcttaaagtacaattgcaaaatccttttcaaaaaaaaaagtacaattgcaaaaagtttactaaatatttcatttattcaatttttttaatgttaaatttagcacattttcagatcatgaattggagataatctaccatttcttttcttatcccttgtgttattagtgtttctcctcctaagttatatattttagtttggataatgttgttgtaatgttgttggtgaaagtatggttcttttttttttttcttatcaacaaagaaagatatttttagacattagtttttcaaaagaatggcaacttgacctataaaaatttgtcatcatatccattaaatatttcaatgggcgggattctgagaaccataccaagcttgagatagctatcattatagtaaaggcttaaagttatataattgataaagaagtcaaatttgttgtccaatttgaccacatgttcattacctttaatgactcaatttttcaaaggcattagtttagttttatgtagtgctcaactttgcaccccaattaagtagaggggtgatttgtaatggcacacttctcccattttgcattggtggtttatattttggactataatattagtcaccagacggcaaattcagccagccaacgtaagagtataaatagattgggttggatctgatccgattataatccgacctgatctaaattatgtaataatttgtcccgtctcattcggctagatcagatattctgtttagatcaaatccaacccgacttatttaaatcggatttgatctaacctgacttttttttttaaagaattttaattttatatctattttaatagattgtgtaaagttatattatatttttaataaatttaatcccaacaccaattacaggtcgggtttgggtttgggtcccatttttcgggtccgagttcgaatctcgagtcccaacaactatgacgattaattaaataataccaattattgttattaattattcaatactggtggtaattttgtcctttagaaaaaataatttatcacgaagacatgcaaatgaaaagaatttgtatacatcaaatgactatataacaaaaaaaaaatgatattttcttaatcactttatatagtccataatatatccaattaagtttatttctttttagagaaataaatatttagactattaaatttcttcttcttattaacaccaagtaactataagctataactcaatgacaaaattttgataattaaatgttattttggtgtgattaaatctataaaaataataattgtgtttgtcttacattgttatgtttgagtaatgttgaaataaaatcccatattaactatacactgtaaaataaaccagtacatttacaaagagtttacaaaggcagtaaaaattcttatgtggcctcaggcctctatttacctagacatattagttaagttagtgacaaagttttttttactttgtaactaaccctcctaactctgcactcctctac

SEQ ID NO: 303557 - DNA, 1954 bp, Cannabis indica
agaatttatacattaaaaataatttctaatggattttttgggggcgtgtgaagctctctgtttcctctcatggcgaagaagaaacgggcggtttcgaagcctgcttaaatcacagccgtagtcgagaatgaagaaactcacctcccttcaatccaaactgaagatgaagaacaaccagcttctcagattttcttagatacttgtgaaaacttggaaggagatccaatagatgaagttcctagtgagatgattgctactcccaaatccatgagctgggctaaggaagtagagaaagttgattaccatgccaaagcgaaggatgtctggagcaaatttaaatacaatcaggtttgtactccttctacacgtcttgaatttactgaacctatgaaaatagggaatcaaaaagtagttgaattggatctagatgaggttgaaagcgaggcttatttttggaaaaaactcgatcgtgtgcattgttctaggagctaaccctccgttcagggtttttgaagggtttatccaaagagtttggggtaatttgggtatttaactgtattgcacatgttctttgacttgttcgttacagcttacccgtagacataatacttacatcttgggaacacggtagtgcaatagagtgagagcgttaatcatataaatggaatctatagcttttataactatttataagtgaaatgatagtttccttagagcttggctaataaacataaatggaagaccttctatttcagtaattatattagtttactgaaatatcatttataagaagctaagtattttaaggataaaatacattaagaggtaaaacagtaattatagtccctatttaatgtagattatctatagaggatcattgattatttagattaaaacaaaggataacttatagcatatctattcttggtgaatagagcgctctatataatcaagagtgggattctgaatctataatggaatcaggaggaattaataagattgaaaaatattactcggtaaatgctagaactacttattgggagcttgattatataggcccatggtccccaaactagctgagataatattactttgtagtcttaattaattaattttcattaatcaattaggattctaagtaaagaatttagagtttatttgttaattaagacacattgtagggtctaattaataattaaaataaatggtaatttttttgataattaattataattattaaatagataaagttagcatttaaacaattagaatagaaaaatagtatttttgaagaatttaattctaaacctaaccctatacctacactatatataacattacaactcttaacccaatgacaagttttgactctctctttgtaagacaaatagaaaattaagagctattatactatattcactttgaatttcaaaattctcttagatttcttaataaaatttcatcctccttagtattgagtgattttccacacatatcaatacaatacttaggatagtgtggaagattttgtagtcttttacaacccgaaggggaatccaagttcagcccttgatcacactctgtgacagaaaagatcaagggtgagagaacagaattgaaggagccaattaattctactgcaaccactgtaaggatatactaatccctttatgtgtttatgtaattgttttagacttttttatattaggatgttagataagaattaatttaacatattttaatagtaaagaagatcttggttaaagtgtttccaatatataggaggagtagaggacatacacctatcactattggtgatttaaaagtgaggtataggagctatgtagtacgttgtgtgttgagttagctaaaaagtacatctcatatgtcatttgatataaaggagagagagagagagagagagagagagagagagagagagagagtagtagta

SEQ ID NO: 303558 - DNA, 2856 bp, Cannabis indica
caaaagccatttaataataaagactagtgttcatatcataacagatgattgtttatagattaatccaaatcttgagtgttcgtgaaccccagttcatgttaaatgaaattttaattcatttattaaggtctttccatagagtgagactagtgacttttgttttggaaatttaattacatggatgactaggaacatgaattaacaaaaaagaatccaatccttcttaacagattgtatattggttcccttaagagataattctggtattgaatgattttgggctcaaatctataatcagattatagattaattatacactagtgaattaatgatacttaaagaataagaattaaattagaagggtaaaataataattattctattctaatttatgaaccaatttattggagggttgactattgtaagatgattatattgatagacaacttaagaaaatatttctataaaagtatatctataacataaagagttcaattttgaattcaaagtggagaaatatcagaaataataaattaactgatataatgaaataatttaattctttagttttgaattattgaagcttaatgttataagtccatggttcccgagacagctcaattaaaaactgacaaatgtaaatacaaacaatgaacaaaaggacttatatgatattattttactatgtgataaatataattattagataattatgagtatctaatttaatttagaattaattgaaatacataaatataattaattatgcataatttattttgagatatttcgtatttaattaattaaaaaattagagaatcaaaagatacataagccctccctagcatataacatatgtgtgtaacacatcgccctgtcactatgtgttacacacatacaacatgttcccaaaaaaaggaattttgattattaaatatcaaattaaataattaattatttttatatatcattaaaattattattattttataaataaattaaaaaatcagaatattttggttagctgataaaaatgagtgaattaaccaactaattagtttttaaattattttaaaattaattatatttaattattggttaattaaaaaatattcatttttaaattaaataaattttctcattaattaaaatatgttgaccgagatttcgacaacaattaattcaaaaagtaatgcaaattaaagaaagaaaatttttaggtggttgggccattaatgagtcttagtccatgaactatttatatttatgaattgtgttacagagagtcaatgcttctatccttttttcctacatctttgggatatttgtaggttcatagtggtggggaaaaggtcaccattgtcatgttcgcatgaaccatgctttgtacaattttccaaacttgattatagggcatgattgcctaatatatagtatgttcctgggcttgatataggtatttggtgagactagacttgtctcttactgatgacttgacagttcatgatgtagccgtcaaatgaggcacattatatcgtgaagtcaaacaattatgggtttgaacccttgagcacgcctttcgtggtaaggggtaagttgttcttccccatgctgcataaaatttatgcacggtaacttaaccttaggctacacgccatattttgtacaatcctgatatctcttctctaggtggagctcccttctagagagaaaaagacaaaccaactatcctcccagaggatccttctggagatgactactcttttgtagctcttcttgattatcaagctcttaatgtggtttaacatagcttgtcctataccaagggtcccattgccacatggttctttcctgaagtatcacgtattttgggaaaaatcctaggcaacatttaccccaagttcaaattcttaatttttgtgaaatgttactttccaactcatctctcactattgatgtcatgcttccacgcgtgataggctttttaatgtcattcaatatttttcccttgcatctggtagagccgattcatttttcctacttatttgattttgatactcctattaattgtagggtgtcagactgagccttgagtagtgtaatagtttgtttattctcatgcttctgacaacttgccctagctatcaaatcatggggggtttaagtgagttcaatttagaattgttggatgggcaacgatgcaaatcgctttatgggtgtataaatgtctttcatctccccttttttcaaatcttactttcacgccatctcttagaatcctaaactagcaaaaattttaggcaccgtgtactagttcctttgaccgtttaaacttctcccatttgtaattatttttcatttttattttttcaattggtgatttttttgtataaatacaataactttactacatgaccttcgtttgagagtttttatcgaccatcttctgtttatttcttgggctatggctaccatacctaaggtttacagaacatgccttttttccttttctttgcctcttgtaccatttcttcttctgtatggtgcaattagcacccgatgctcggcatagggaatttctaatttcatgaatatgctatcatccggagggggcctcttctcagtggttaggggacccccattccatttcttaacttagggcttgatgtgggggctaaatactgagtatattcttatttttcagatgagaagttttgagagatctacacgcgcatgacttctacgcattcgatcacaaaatcctcaaacttcactcctagataaaaatgtcaaatctcggagccccttctaactcttcatctcaggaattggcattgctgttggaaattattttac

SEQ ID NO: 303559 - DNA, 6517 bp, Cannabis indica
ttcgaactctttttttagatatttcacaacttctaaaagttttttaggagtttcaataatatataaatcattagcataaacaatattgataacgaactcagaacttgaacattttataaaaatacatggagaaataggatcatgtatatacttctgttatccacatttatgacattagaaacgtgggttccaagtcagcattcaagacccgttagtgggaccctcatcaataataaagtgggccaagcccacctgggtatgcccttctaggagctatcttggttttaaacttgtagagtcttccgcccttagcggatcgagcccagaagacacctctggtatcatgaggtcggaggcctaagatggtaccttctcagaagactcttccaatttccctatttattcctacctataaataaggaaattctagatgtcaggtcatgctagaataacatatcacgattaaaggggaaacttcccgtagcaaacgctatgtagttattcataataatcatccactagtagcggacacggttttgacttaatcaaccaaactccgatctgcctagtcagtagatcgtattcttcatgggctgaacttcacgaaaaagcttgaagatattgttcaattgtaaactccccggtagagggaaaatgggaaatcctaatgtaattctccaactactataaataccttactaatctcatggattaggggttgagctctcttacgtactttgctcaggaaaacttacgaacatacatcttgtgtatctcttaaagtgtttagaagtaagcagcttactgaataaaactaactcgtggactaaggctagttaacgcccaaaccatagaaaaagtggttgtctctttttatactttctctttcggtcgttatttcttcagttcttattatttttattccgtttccaaaaatttcaaaaaatattttggtgctttcattaagagttgaaggaagcagtgagaccaccagttaattacttccgagtaatcatggccctcaccaaaaccaaatttggtctttgtttcactggtcctatcaccaaagcaggagatacgagtgatcccaaagaggtgactagcctccagaaaagctattgagacgaggaccaaaatttagatgctcctatcgtagaggatgcatagtcaggaaaaagtagttctgaagacgttaaagctaacgctgatggtgcgccgcagcatatgcatgaagacgacccttaggacaaagccactgagaataatgttggagaaaaaagccagcctgataaatccaaccccgttgtcattatggtgtgacaactgcaactaactgaaaggaggttatctcaacaagattaattcaatgagatattactttgcaagatgaccagaatggaggctgtaatgaccgcattgactaagacggctctagacatacgagcccctccaacaacaaatgcacctgagaaggccgatttgaaggaccgtagaccttcaggtgttcacaaagataagaacaagggagtctctactgaggagccaaataggaatccttccacaaagtagcccaacaagtctaaagctcctgaataacctcaatagaggaggaaaggaaaccacgcttcagggcgtggagaccaaaccaattctagatgtagagtcacacagaaagacaataaaatagacgctgggacacagaagccagagtcttgaaagaaaacaccccctcttagtgattccagcaatcatgacgaggaggttgaagaagtgcatccagtatcagataactgtggcaaaagcctttctacaaatgatcttcaaagaaaactagatgctaaaaaggaaagagctaaagccaaaaaagtaagaccccacggaaacgatttgaggaatcacatcaatgatcgcgtttgcaaaagagaatcctctagtgataagactcaacgtcttgaacgtaaagttgaagagttgatgaagatcgttgaaaagatctctaggaaataaagtggtgtcgtgctcgactttgaggaagaagacacagagccttatgtgaagaaattattgatgcaccattgtcagagcatttcaggatgtcctatatggaattgtatgaagaacgaacggaccccagggaccatttgtccaagtataattgcatcatgcaagtagtcaagcccagtgatgatgctaaatgtttgtgcttttcattaacattaagtaagtccgcaaagaacttgcgaaagaggttgtctccaggattgatccacaacttgagagacctacaagcgatgtttaggaaacaatttatagcagtcaatgattacaatttggaagccagctccttgacaagcgtcaagccaacaacaaggagaaagtctgaagaagttcatccagcgcatgatggatgtggctaccaagacaaaggtcacagttgacatgaaaatggtggctttaacatcaggactaacaactagatctttactatggggagatcttcaacgtaaaagggaagacaccttaagtgaattcttaagaagagcttaaggattcataaatctagaagacgcttatgcctaagcatatggagtactccccaaaccctcgaccaaagtagcaaatgcctaaccttcacatatgacaactccatctatttaccctccccaactgcttttactactcccacggtgtatggaccaagtacttccatacagccaactatagagactagtttttcctggcttggggctgcacagacaggatacaatttcgttcctagataaacaaactagaaagcaaaagctgtagaatccaacgtaactcattctaggagcaaaaggagtacaaagggtccaaatcaaagtgaatatgcaaagaaaggcaagacacaagatttaagatacactgagtatacaaggctcatagatactcgagagaatgtatacaaggcaacctacaacatggtacactacaggaagcctctgccaatatacaagggcagaaaacatagaagagacataaattaaaagtgtgaatatcatagtgatatttgtcatactaccaattagtgtgactacttaagagatgaaatagaaaggttggtacggaacagacacttgaacaattaggttagaatcccagtcatctatccaggataggtagttgcacatggacagcttttcgttcccagacaatagggagccataaatcctccttatggagtaagccacctgccacttggagatgtcccttcaaatttgagctttcaccctccagtttggtgattcttttgtgggattcctcaagagtttttgcagttgtagccagcttactctcagcctcctctgccctcttgatggcctttgcttccactgcctctactttctgctgcaggtcgagatggaaatttaccttttctctagagtagtctcattaatgaatttgtcttcgataacatgggcttgtctatcgtactcctgggataaggtgtcaatctttttatccttttcttagacattaagcttggcctacttcagactagcttccaattctttaatacaggtaagagccttggaatgcaagtccttatacttgtctccccagtccttctccactttggttgccttttttcacgagccaaagatttgtctaaggagtcggacaccctctgctttatgttggcttccattttggcatttgctttagctaaagctctctctacctcttctctcctctactcagcgtttgcctgctctgcccttagcacctccaagttgtaagctagttggacgattagggagcagttcctctctgccatcaggccaatctgcgaaagaaggaacataagtgaatcaaaataaagtaaggacactaaaccttcatttgtgtcagagaagtgttaaatttaaaaaattagcatggatcttcatgaagtcggccacatacattggatccctacttgccatcatggcaaacctatcagccttaagcctatagcctatggtagcgcttttttccaataagtcggccaaaaatggtaacacgtcggtcccaacgcgaggatgcaacttctccatcatctctactctattcacaagaggaggggtagctttgttccacctgtcataatcgacaaacttagtattacgcttggaggagatactggtggatagtttcttcatctcctcaacttcgtaaccacaccttttttagtaaaactgatccactacttccaggcaagcttcgtccccttttatcaactgcaaaggtctgacaagaagtgtgaaaggtgccgaaggtagtggaggcaactcagtcctatccctggacagttgagtcaaggtggctggcataactttaagcgcaaggggtggcagacgaggatctcgattatcccttgatgttcaagtacttttcctaggtggccttctgccatcatgagaattagacccccttcagaattgagtatttgttgattgcctccttgaggctaccagatgcaagactttctctttggtctacaccctcacctttttgttagcaccaccgttagatgaacctgcttgcttcttcatcactataggaccgtcgtagtttgagctttcccctctagacctatccaaaggctccataaacaagacaggctcaatcaggtccacaatggcagtggatgcagcctccatacccatgagccttaggagcagcttctggattcgaggtcggtagtgttggttcctgggacctactcctagaagcttgattctcctctctgccatcaccgcccccttgggaaatctcttaaatcttgtcagagtgagtcttgacactgcctaagaatttgtttgatagcccaatttgaagagtggctggttgatctatacaaaacaacaaaaaatcactcaaacaaaactataacaatagttatggttcttataacatatcatcatgcaagacattaagacggtccaaaccattaatcctagcataattgacttttcttgtcaacttgtcagctttggtcgagacggtgcttgttgagacaatgctaggtttgcttcctgagccagtctttaaaaacttcatctcttttcttacttcctctattcaaacaaacacttgagctctttcattgaactcggtgatgtttttcactggccgaccttgtaggtcatcccatagctcgcctctagcagtagagagatcagttgtgatccctgcctgaagagcaataagctgggtactatcgtccatatttctcaccctcacagcagctgtgctaaaacaacttaagtaggccttaagcgtcccacccaactattgctttatgttagtgagtgaagatccaacgtaactcattccagaagcaaaaggagtacaatgggtccaaattgaagcgaatctgcaaagaaaggaaagacacaagaattaagatacaatgagtatacaagtctcattgatactcgagagaatgtatatactgagtatacaagtctcataggtatttatttagttaaaaaattaaatatgatttaattcaagggttgttaactagtataaatagaagcatgattttagaaattagactacacttcctgaaaacttaatttttgatattagagagagaaaaaggaaattgatttttctctcatctgttcttgctcatgtgttgagaatcaacaagtaataagcctatacaatttatcctaatagcccacacaatccttgtgtgtggtggaatgatttggaagacactggtatgggtccaattacaatttcctcattatctaaattaagggatacaacatatgaaaagtttcaaggataccctgataggcatcaagagatatcttctaaacttactattattatgttttgatttaatgtacacacatctggcgatccattgggatacggtacactgataattagataatacgaaatacttctgttgcgtacctgatttagtaccaaaaaaaccaacacctccctctctcattgtgagtcttcagtgttgctttcttggtcactatctttggaagactcataagatacatctttactgctaatcccttattcttgataattgtttgaaacagagggagaatcttaatcactaccccctttcccgagtcgtcatgggaagtaggaggagattcttcatcactaacttctttctcgagatcttcttgagaaatactaggggactcgccatcactatctccttgctcgagttcatcttgccaaatagaagaggagtctattttagtggaggcataagttgttaattctccttcaccttcctagttaatgtattttttagactcaagaaataaataagcagtgcaatcagttgcttctggttgagcaactcctttgaccttcttgaaggcttcttcgagcttgattaaactacctactctatctagaagctcttgaatggtgtatattggtttgagcttcaaatctttatagaagggactcattactgttagtccaattttttggaaattattttacc

SEQ ID NO: 303560 - DNA, 2121 bp, Cannabis indica
ggagatttggttaagtgttttgttcatctccggatgatgggcctacttctgccacgtgctctatattgcgactgccacgtatattgagagaaactttaggcaacaaagggaattttcataaatacccattttttaacggaaaaattttattaatcaaaacaaagaaaatgctacaaagaccaaacattcacaaaataactaccaaaagacttacttatatgttacaaacgaaataaaaaatttgttggtctctcttagagagattccttctattaataagtaacaatctctctttaagatcatctttatcaagttattcacataaggaattataaaacattttgctcaaaaatacgagtatttcaattctaccaaataaaataagctacagtcgcacaaacagccacaacaatcctatgaagaagattgcgatctcggtaatcattcaaccacacaagctaattcgagtaagacgatggccaaatggcattaccaagccaagaaaaaaataacatgtatgaattgcttgaaaaaagaaatttttttaaaaaagctaattatgacagtattgaccaacctcacaatctatgtagctagtagaattaatggtgatacctctttccatcatgtgatctcttgttaataagttattatgagaggcttgttaaaaaataaatctatgctttggtacggataatccacactaaatcattttgtgattatcaactttagcataaggagtaagaaaaagagttgtaaggcttactaacccaaaatcttcaccattttccagcatccaaaattgtcaattggtacggataatcgagtaaacatattcctaagattaagaagtttgcgctagtaccaactcacttcactcttctgaacaaccacccaaaaatctaagtgttttaagtttatggcattgatctaattaacccacaaaacattttgtttcgtagtaatagcccagatgtaatgagcaatcgaagccttgttccatttggacccttcttgaaaacccaagcctccatagttcttaggcttgcaaacaagatcccaagaagctagatgcatcttactagtattatctttctcaccccacaaaaagtctctgcagattttatcaacatccttaactattttttgcggcagtataaagatactcatccaataacaacgaatgcccaacaacactgaatgaactaattgcactctgtctgcaaaagagagaggtctgcttacccaactatgaagcttcaattgattcttcttaagaaaatgattacaaatcactattttccatttagttggtctcattgtcacaccgagatacttgagaggaaaatgtccctcttcataagggacctaatcccgaatagccaatttactcgtcaaccccgccaaagtatatgtgagatttgttcgggttagcatgaatgcccaaacaactactaaaggtagaaaaagcttctttgatgacccgaacgactttatctgtccccttacaaacaagatcagatcatcagcaaagtaaagactaaccatctttaagaatttacacattggatgatatttgaaattcgaactaccaccagtagcaaaaagtaataaccgagtaagatattccattaccaacacaaaaagcaaaagagaaatgggatccccttaccttaaacccttttttccttgaaatctcccttgcacaggaccattaagaactaaagagtaggtagaccctcttaggcacatcatgatccaattaataaacctagtagtgaagaggtaacaatttaggaactcttaagaaatcacagtctagtgtgtcataaaccttgctcaaatcaaccttcatttcataaataccctttgttctatgtttatttacaattttataccttaaggtttttatttacaaaaataaacttgtaaaattttaaaactataaaaatacactttgcttagcagaaagtaaaaaacaactaaaaacaataaattaatttcacgataactataaatcaactataaactataaaacaaccaaaaataatcataaaacaatttataacaactataaataaattataaaataactgaaaaaaatgatttattatttttatt

SEQ ID NO: 303561 - DNA, 2027 bp, Cannabis indica
cactgtggcttccttgtttacctcttgtttcagttagcgagttaaataggaataagacatgttgaatagagaacatgttctagtactcaattttacttgtcttgtggattgcagtgtcttgttgacggtggggatgagtacttgcaactgcttgatgtggctagcaacacaatgcgtgctctttgtaacatgccagaagaattctcttatagcaattaggtgttcgagatgccagtaccaggtaaccatttagtgagattttgcaatttattcaattgcctaaaaattatttaatttggtgaatcagtgcctcgtcccaattggttgcagacatgttcaacgcctcatttataatttgtccagagtttgtgagatccctagcggtcgggaaccagcctaatcctggtgtgccatcttgatgctaaacatggtaaaacatatgtttccttgtaagccatctgagattgtgttccaaaatacataaccattactaatgtctttcatcccatcacggtcatcttgagaatcaaattcaactcaatccttgatttgaggtgcatttctttttgttttttgttttagtcatagctaacccttgtgatttgtgaagtgtaaaatttttcaacaaacattgcacttcgatgggctaaatatttaaattccataatttgaagtttaacttatacaggtccacatcatatactaatttggcatggtcgatatgttagttttgaacgcttttttttcttccataaaatccatgtgcaacagtaaatcaatcaaaagtttctcaaattgtacacatgcaaattaaaattcgcgagatatgattaagtttcttcagtaaagtgcaacaataaacaagctaatggtgatcgtatcggtatcagaaaggtaagacttgattcggttgtgaaaagtaaaggccagaaggattgttggtggtggtgtcgttgggtaaaagtgcgcaccacactggagtttgagcgccttcgacggcagtcgtctggccagtattgcaagtcatatcggtgatgacatagccgggatgcacactattaactaaaatatttggatactttttggccaaaatccttgtataggcattaatggcagcttttgatactttgtaagctgacaagtgtccaggccatccttttgcctctgcttctgacttaccttctttgtaatctttcaaaaacacactcactacctcctccactcgctcttctgatagcttttcgccgtcgcttaacatttctttggcccactcattgggaataaactggtaagaaatacacaattaattaattaaaaatcatttattaatcttagagagttgatactacgctaattgtggcattgttattggccattattagaaccgataatgtaaatggttataggcaagtaatttggttgaagttggggcgtacctgcaattgtgctaaaagggaggaaacattaaatcggataactggaggagtgggagtagtgcttcgaccattgcttttgcaccatagtagtttgttttcaagcattcttctgtcttctcatagctttcactcgacatttcactccaattgccctgctctggctgcatattatacaattatacttatatgtacatataatagtagtgtagtttattactatgattatgattatagtacatatttacccaatcaccacgagccagttcgaactctttgacaaaagcatcagcatgtaatgtagccccagaatttgctgcattgtttatctgttggtgatttccagattaaattctattgttttgatatggtataatctcaaataaatacacttatgaacatgcaaacaaagtacgtacaccaagccggatctgtatatttggattactaacatcataacatgcaaggggtatatgttataaatatacatattaggctgatgttacttgcttgcacgtttaatttgttttctttttaattaaatttaattaagtgatgttaagtgtaacacatgtttaatttttaaattagatt

SEQ ID NO: 303562 - DNA, 4235 bp, Cannabis indica
taacccacagaacatcttgttttattgaaatagcctaaatatatctagcaatcgaagcattgttccacttgattccttcctgaaaatgcaaacctccataattcttaggtttgcagacaagatcccaagaagttagatgcatcttactagaattacctttcacatcccacaaaaagtctcagcagagtttattaacctcattaactacttctgtggaagcataaagatactcatccaataacaacgaatgtccaataacactgattgaatgaatcacactctacttgtaaatgagagatgcatgcttgcccagctatgaggttttggttgaatcttcaaaagaaaatgattacaatctactattttctattttgttggcctcattgtcacactgagatacttgagagggaattgaccctcatcataaggaaccgaatcccagatagccagtttacttgcttcatcaaccacgccaaagtaaatatgagacttgtttgggttagcatggaggcccaaatagctactaaaaatagaaaaagtttattggattacctgaattgacttaaccgtccccttacaaaacaagatcaaatcatcagcaatgcaaggactgactatctttaaggatttgcacataggatgatacttgaaatctaaaccacgagcatcaaagagtaataatcgagtaagatattccattactaacacaaaaggtaaaggagagaggggatctctttgccttaacccacttttcccctgaaatctcctatgcacacgaccattaagaactaaggagtaggtagaaccccttaagcgtgtcatgatccaattgatgaatctggtgggaagaggtaacttttcagaagttcttctaaaaaatctcagtctatagtgtcataagcgttgctcaaatcaatcttcatgagacatcgaggagaaattactttcctattatacccatgaagtaggtcttgaagaatgagcatattgtgggtaattgacctattcttgataaagacaccttgatacctgtttacgagagaaggtaacacattagccattctgctgcacatcatcttggagatgcatttgtacaaaagtactgcaacaagcaatcgatctataatcaacaactttagaaggcttcttagtcttagggattaaagaaaggagtatgttattcagctgagaggggatttcccctatttcaaagaacaactttcgagatgtcatcaccaatatcagcccaaaaagccttgaaaatttttgagccaaaaccatcagggcatgtactttttaaatcaagaatactaaacagagctttcttgacatcaaaactagtaaaaggcttaatcaaatgaatttgttgatcaacatttagagtagtacccatgatgaaacaatccttcttgataatcctttttttgtttggtcattagactaggacttcccataaaacttttaaagtggtttaagtagtgtgagaccaccttatcattattatccaccaaattaccatgatggtcaacaaaagaggctgtacgattggtttccttgagctatttaatactatcatgaaaataagttgtgttttcatccccaaactacaaccaattaatcttatttttttgtctcaagtagctttccatcattttagaacaagaactcatggttgccttaatctttgtctcttcgtcaaaaagctccatggaatgaatgttacattgaattcgaagctggagctgatcaaaatgaaccttagctgaaatataagcttgttggacatcccctatcaatattttattaaactccccaagtaccttcctcactctctttaacttgaccatagtttgaaatagcccagtacaaccaattttccaacactatctatctaaaatcttggtgttctgtccatatattgaagaatttaaaaggctgaaattctaaattcccaacatgcaaacttctaagaatacacaagcagtggtctgaaataagattctattgataaaaagctttagtagatggatgtagaacaacccaatttcattcttgaaaacccaatcaattatagaatagattcttccattatctaagtaaaaataaaactagaactcttaaattcatcaactaaaccaattgcaagaatcctcaagcttaatgggcactacaggtcgaccaccaactcgatcctcaacatcaaaaataacattgaaaacacccattatgagctaaggattaacaggaaaaggaagagaagcaagatgttgccataacttctttctctcaatgatagagttcaaaccatagaccacagtaagacaaaactcatttttgatcccagagtgtttaacaaaatagtgcaagtattgtttattttcaactaatacagtaatatttacatatgtatgtaaccagaaaattctaaccaaaaaaatcggcagtcatcataacatcaactttattaccaagaaccttagttttcaacaaagcccatattcccactttattcaacttgcagagagtactaacatccttctgattattccttgtaataagacccctaacattccaacaaagtagattgcaacaatccattaagaatgatgaactgcattatccctgccctccttgttaattctaggaggactcccaaaacgtgatggtaacttccatcgatttcctttacgtgtctcccagataccaccaggatcatcacaccttgttgcctactaagtaacaactccctccgtacttggtagggagttattctttgtaatctcagtaacatcaatattaatagactcacgaataatctgatcagaattactcacaacactatcaacgatagtaacaaaaaccatctctattttctcccctacaacctcaacctcaacataattctcagtattctcgcaaggtggcacaatataaacaatctcatctatagcttgaacttttagtttctagatttgttttatcacttatagacaatcaggaacattatggctatattttccacacatggtatatttagtaggaagccattcaaatttaataggaacctcaaagatctgatctcattcattctcaaaagatataacattagaaactttatccttgatctccatctctactaaaacccgagcgaacttaattaaagtctgttctttagtaactttatcaatgagaataggcttgcctatcgtgctaacaagagcactaaaataattgaggccccaatactacagtcacaaaatcttgcgatcgaacccaaaccaaaaccaatcgaaccaattgtataacatccaaatttagagcccatggtcgcataataaaagactttcaatcaaagtgaataacaccagcttcaagaatcacatctctagtagccgtgtcattaaaattgacaatagtataaccagaattcattctcaaaattcagtcaatactaaaatttccccaaatacgtttaataaatcctcaaaaacagcaaaaggagagttaactcctaataccatacaaacaatcgcagacttccagaagtcatattcaaattcaacttcagataaatcaagtttagcaattgacaaacctttcttgactataggtgtcgtaaaatgaactccattacctttgttgctggcttgaggcttcaattgagactatagggcctgcaattaggcgtgcaaaatggtggtcagaatcaccacaatctccacagaaagagaactctccctaggtctggaggagcgaactagagccaaaaaatcagtttccaacgtatcctgatcatcctcaatatctacatcaatctctttttcccgttgtcgatcaaagccttcctggtttgaatggagctctagttcagtctgctttagtctgccaaaatccccttcagtcgtccgagaaacggacgtcaactttgaagacgatattttcttcttcgccatcaaggaaaaagaactatactgctttgccttcgtgtctcggtttacacaattgtttctcattatatttggttgtttaattttttgtctattttttaattcacgttttttgattacatatgtatttgataatcacaaaatattcctatataatcatttgattaaaaacacaagaatttggggtgtggtttctgggcagccagtggagaaaaaaaattaaaatagtttatttagtttttttaatattaaattattttaaatcaaaaatataatttagaccaataa

SEQ ID NO: 303563 - DNA, 1686 bp, Cannabis indica
aggaccctaaattgattttttttggtcaaaacacacgtatttacccttatatatatactacaatgcatgcatgggagacaaattacatgtatatattaccttaataatgagattagcaccaacgaagtatttggccaagacaatgacggtggcgctatccacagtaccgtacaccttggccgtatcaccgtggctaataacgggtctgtccgtttgggaagaaccaattaatgtaacgaagtgttgagtgaagtcgatcttcaccttctcattgtactcacctggtccaatctcgatgatcacccttttcgtgttgtccgccggtaccgttttaacggcctcagatatggttttgaagtctccactaccgtcttttctaactttaatggtcctagctgcttcttcagccttcaccagctctgggtccagcgtcgattttctctccgagaatggctttatgtttgcgttaaaccatttgtttatgtctgccttgttttccggtaccggcacattgtcgtccgccgataccaccaccacggcggcggcaatgatgagtaacgatactgataaggccgagactgagagtagagccattcttttctttctagtttaattattattactactcgtgatattaatgtatatttctatttggttcacattgataagaaaatatatatatagtagtgattttgtcgttgagatttggtgtggtttttctgggggttgggaaattcttaccaatatattattcttattatctacctcatcaactaatttgatgtggtaagaaagaagggaaaataaggatgtgaggacataaatggtgtgtgtgtgtgattttatgtgttggaaaaaaatgacattggataagtatggacatgcgtataatgagcctattgtaccggaaaggaatgggagagatttcccataacgatccgtgttttaagtttcaacccacaccaaaaaagagaaaaaataaaataaataaatgaaatgatagaaacctaactctttattacttactaattatcgatcttgctatatactacgtactttttttaatataatttcattaactaaccagcctgtgttgactctttaatttcaactgtttgtttaattaagatgacgtgtcaatttatggtaggtggtttgagaactataaccaactacatattgaatttaaatctcgtgtcaaattttggtgtctagtcaaataaagaataacactgctggactagcctttaaaaaaaattataatatttaatatatctacatgtataagtgttcatcaaactgctaaaaccgctcgcatcacattacaccgtaaaaaaaattctgtttgaaattctttgaggtgcggtcgcagtttgaatttttcttaaatcgcgtggtgtggtgcggtttgcggttttgaattgttaatatgcggttcaaaccgtaccgcaccgcatattataaaaataccaattttaatatttatttaggttcaatatctgaatgtccaacccaaagcccactaattattgtattgttgaaacttaaaagtttttttgtatttattttcaagccttatggtatttttgacaagtgttgccaagctatgttgtatttgtgatagtttaattatttggtgatagtccaaaccgcagaaatacaaaaaccgcaccgcactgcaccatt

SEQ ID NO: 303564 - DNA, 3286 bp, Cannabis indica
attaattagttgggattatttctttacttcatgaggattgtattgtagctttttgtttcattataatggtaattaattactcctttactctgtttagagtactttctagtggaaaaatagtccttgtaaaaaaggttatatattgcaaaaattatctcttttttttctaattcaaaattccttgctatcatgcccttacatttattcatatcacaaaaattatcttctttttttcaacattcctctcatacccttaacttgattcatacttaaatctattcctattatttcaagtaaaatttctcatttcatatcaattttgtttgtttcagttgcttttatatcgatatgagagaaagatagtttggttacaagttgttataacttataaatgtatttataaagtgaaaaagataatttagtaaaattaataatttggtatatggacatatatgattaatacatatgtataaattaatgggaccttattaagttaaattagtttaaatatttttaattaatcttaattataataattataataaacccatgagattataaatataataattgattgttttcttttaattgatatttattataattttccttaactaataaataatatcattaattaaaaaaagtcgaataaaaagtacatagaatagttttgaattttgatagattttatggtgacaccttgagaactataaaataaatcttttggtaaggttgaaaaaaaaaatacttttcaaaatggaatatcttggctaaattcccacattgattgtttatgaacatatcattcttattatataaaacaaaaattatttacacaacataactttcttttaattatcaaatttatattgtttggtatatatttcattctttttaattttaattttatttgatagaaaatatgaaatctcttatacatggaacaatgttgttgttagacaaatggtcccagatcctttataagaaaataaatgaaaaatgaaaaaaatttaaacaacagatatggcatgagaattgagaatacagattgtgtagatatatacagatcttaataaattaaagattgaagtagagtagagtagtaattataagaattaaaagaaatattatagttaaatattaacctccaaggtacatatgaacaccaacagctaacaagaagatacaaataagaacaaaatagataagagaatgaaccaaaatggaaaccccactggtttgaaaattaccaaattctacaaatttgcttcttcctgggatctgaataagtagccctggtgttagtaatatgaacagtacaactgccacaaaaactggcccccaatcagacatcttcttcttcttcacccctaattcactccacttcttctctcttcttcttctctctctatctcaatctctttctttcttttgcacagtttttcttgatgtgggggacatgattataaagttgtggacttactttggtttagaggaagagacaaagtttgatgactaggaaaaaaaaagaaaaatataaggaggagcagggtaatggaatcaagctattcttattcacatttttacacctcatttttccactttttgcaggaagcttcattgggtcatgttcacacctgtacttaccaactgccaaatattaccgttacacacattcatcactttggtttatagtaaattattatagtcttatgttttgtggtaacattatataacagtagcagtacaatcgcaaaaaataccatgattattatgttagttgttgtgggataaaatttgtcagcccaattattataaagaagcccaaaggcccattttaaaataaatattatatattttattaaaaatatatcctaaatgaaataattatacaagtggaaggattacatcctacataggtgacatattttagatgggatgacatatcacggatgagatgacatatctcgaataggatgagataccatgaatgggatgacttatctcggatgagatgataacatatcttagatgagttgacatatctcaaatgggataggataccacggatgagatgacatatcacggatgggatgggatgagaaatatcagttgggttaacatatctcggatgggatgagataccatggatgggatgacatatcatatctcgaatgggatgagataccacgtatgggatgacttaacttggggtgacatattttagatggggtgagataccacagatgggatgagatatctcagatgggtctcagatgggatgacatatcatatctcagatgggatgagataccacggatgggatgacatacctctgatggaatgacatatctcggatgggatgggatgagataccacaaatgagatgatatatcgcggatgagaaggcatatcttggataacatatcatatctcagatgggataacttagcttggaagggtgacatatctcggatgagatgacatacttctgatgggaggacatatctcggatgggatgagataccacagatgagatgatataccacagatgagatgacatatctcggatgggatgacatacctcggataagatgacaaatctcagatgggatgacataaacataaacaagacggatgacttgcatccaagatgaaagatacatctaaaacagatgacttgtgtccaagataaaagacatatacaggacggaatgcttaaatattcttgataagaagttacacatcttgcataggagagatataaagtatggatactgaaaagggaacaaatgacacttatcgaagtatgtaaagacacctcataaaaagtaatggacacatgtctgaataagaccttgtttggttgacgcctaaaggaaaaagaaaaagataaatagaagagtaagagagaataggaatggggtgttttgggctaaggagggatcaagaataaacagagagtaaaaaattccaacaaaaaaatacacgttcttgactggtttcttactattaaaaaatagtatctcggtggacctgacctctccagaataatctatttcggtagtttttccccttgaaatagaatggagggtctctcttagcggttcttgcaagtgggcaggcattctttttcaaggttgtcgagataagttcaatcttggcacatttttagacctttcttgatgttttaagattgtcgagattgattaattcaatttgcggggtaagttgaaaaatactttttttatttatcaattaaccaaatttacctttaatttttatt

SEQ ID NO: 303565 - DNA, 3705 bp, Cannabis indica
ggtccaatctgtaacttttgcaaaacacagggtctaaaatggtatttacccttattatccacactctatatattggaatatgaaaaagtgttatgaagaaaaatagaagttatcttattagcctatgataaaaaggtacgtgtcaatatcgctattggtgtaatttagtatcggatcccatataatttaatataataatttttagaaagtatcgctacccggcaacatgtgttaagggtactaagcactactgggcccaataacaatactcaataaataaatataaaaaaaaataatataagtcatcttattagcctatgacaaaaaataaataaatattatttaatttaatacatctcgctctctctcgaaaaataataataaaaaaaaaacatatctctctctatttatatcatccaattctttcttatatgcgataacttagaagagtatagagaaagaaagaatttcaacaaggagagcagaaagaagaaatctagtgtgatctaaaagagtactagtgcgcggcctcatcttatgatctcatgcacctccaactgttgaagctgccagcatgatctaccctttgctacaaattaataattaattaagaacagagtagatcatgtggcagtttcatctgttgatgggaagcatgatacaaaataaccctattaaaatccttaatctcatcaccttgcctcttctgacctttcttccctctattagggtttgtttctttctttaattcctgggaatcccatatacatacagaaaatatatactatatatatatttcgctgcttaattattttgattatgtttcttattttttttcattgtggtttttgaattaattatacattttttcagatattgtttttagcagtactattggcgatcagtgtgcctaaatcaactaggtgtggtgtgatttctctaaaatttattactaaattacatttgagaatttaagcaacacgggtgagttttaacatttcctatcatattagtcatttttttatcttaaaaaatattagtcatttatgttacagtacatataatttatttatttatttatctatttctttcataagggcggtttagaaaaaattaagttatggaggcggagatggcttcggaaagtgtgccataataatattgttcagctagtttttctgatgcacatctctcggtatgtaaaattatctgtttcagatttttaaggatatatgtacttccagacttaattattatttcatgtatatgcttacgcctatatatatatatgtatttcttttttgctaagatggttcaaaagaatatatgttattgttgtgagcatatatgtacactatagctctatagcagtgccagagctattacgtgatgatttatatattaatttaaacatgggtttgaaatcttcttatatcaactacaaaaagaccggccggtagaaaaattacgtaaatttctcttttgtaccatacgtactagtgatatatactgatcagtattgtgcattttttttcttctagaagttgtttaattaatatgttctttctcaatgcacacgctgaagcactaagaatcagtactatatatcccaaacgcctaaatcttcatacaaaagaaataccaaattgactgatcttattctcatcatatataattaccagttgttagctagatagatgatcggattaatcaaaaaaatttcagtactaatataatataatatccaaatatagatccagatcacacagagattaatattgacaataagagattcagctcattgtattacttcaaactcttctttacaaattatcaacaccttttattgtaaggccggtatgaaacctacggctacaatacaatttctcaaacgaagtaacattttccttttttattttcttaggaagaatttataaaattctccgttttacacccattttgaataagagacatttaatatatgttaaagcagagacgctaattaaaactctctagtttacagtatactgattttattagttattagtcctaataatatttatatatgatctctaccgctaattttatagtgcactcctaaatagtgatttgggtacatctcttatttattttagtattttagaaaaattatgaatagttgatagtattaaaaataagatttaaatatttgttgatttttttttattagtttgatatgaaactatttaatttacagatatttttaaaaaactacaacaaggtggttgtaaaaaatattaaatcaaaaactcttctacgacttttaggagtgtactatacatccaacatttataaagctagtagagacaaatgtaaactaagaaaattcacacatatatatgtgattgatatatatatatataaatgattttcgagggagcaaggacgaagccagatttgcctccatctcggattgtttacgccagcattgtttgtgagatatagctaggtacttgaattttatgatcacgagatgagatgagatgagatgagatgatgcatgtataacttacatttcaactcactcgtattattagttgttagctagggaagaagaggaagagtacacacattaatatcaattatataaatatattgtccttttgtttgttaacttgatttggggtacagtagtatagtactcttttattaaaactagctcaatttatttatggattaataatgtaatgctgtgcgtgggtgcatcccacgtacccataaacgtcacgtatatttggctcttgcaatacttgttcaaccgtagtagtcatgttttgtcttattattccatatttggagtaaaggatctcaacaagtactactaccgactgcgcatgcatgtgggggctctccctgcgctaggctttgttcttatgtatgcccaatttatgaaaattttctgtatatattacgtaacacataactatacatatttattaaagaaataaaaaaaatatctagtctcaaaatgttattattattattattattattatttatcaataattgtgggtactcaacagagaatcttctcttgtagatgaaaacaatttttgggtgtaaagtgtgaaaattgaaaccctttgtgagaactgaacaaaaaaatttgtctcgattgtattgtacctatttttgcttaaacaataaagaaagattacggtggtgttccagaactggagtagagtcatagatcacatcgatctataggacttgaattagtatatatcttggtgttgatttctttattttctgcatttattgttttttggttttaatactatgtttgccttgtttttcatacgattgttgatcttagtttgataatcttgttattgctaattgtttgattgtttaaagtttcattgattagattctacacatttagtcgtaatttttccacaaattagagcttcgtaatcaattaagattatagaatcaagatttagaccgctgcaaatctcgaagaaacttgaatgttgtaaagaccgcttagctttaatttggaaattagtagataattagggtttaattatgaaagttatttattaattttgaattattaatttacgacgatttatttgaattcagaatgcatttttatgtcatatagaaatttcataatttttgcatgttttgtgcccgacaatattggaacgcggtgtttgg

SEQ ID NO: 303566 - DNA, 1043 bp, Cannabis indica
ttacaccaataacagtataacatcgaaaatgatgtttagtaagcattttagaaattttctatatattatgcaatttgttcatcatataaaagtagccaattaaaatttcttacatgattccaggtttcatcagcttggattgtgggcgggccgaaggttcaagttacatagagaaaacaacgacaataaattacatttcagatgctgcttttattaaaagcggtgtaatacaaagcataatgcccaaatacagagccggtttccaacaacaagcaacattcctcagaagctttcctgagggaattcgaaactgttacacactaaccataaaaaagggcacaaagtatttctttaggacatcttttttgtacggaaactacgatggtctaaacaagaacacaatcaaatttgatctccacattggacctaattattgggacactgtgaccatcaagtcagattcagtatttgtgtttaaggagatgatatatactcctccacaagactatgttcatgtatgtcttgtcaacacaggatctggtacacccttcatccaagccatagagctgagacctttaaaaaacaacacttatatgatttatgattctggggctttgtctcactatgccgccgtggatacgggttcaaccaccaacagtacatacaggtgatcatataatttcgtatccaggataataaatttcgtaatagttagcacctcctaatattttctagacgtgtttgttttacgtacaagagtattgatcccttttaatttggtatttctcaaagcgtccatgacagggccggtcctaagctatataggacctaaggcgaaattaaatttcggagctctatatatagtttaactattatgaaaattgtagttctagtacttagtttaatgctaaagggttggaaattgatcccgtgaccttttagaagtaccttttatcattacaccaaacaatttttattatattttcttcttatttaatattttatctatatattaatattttttttttcacaattttgaggcc

SEQ ID NO: 303567 - DNA, 3442 bp, Cannabis indica
acaaggagaagacgcaattacatccaatctctacagaatgaacagggggcgacaattggagaaatgaatggcatagcccaattattcatagagaaattctcaagcattttctccaagaacagcgcgcgagttatgttcaaagctgaggaattgaatcatcttcggagggaaacacggtcaatggatgatctcatggaagtgccaaatgaggagaaaatcgtgcgaactctatctacaatgggaatcaacaaagcccctggaccggatgggattccagtagccttttttcgaacccattgggacaccattaaagaagacttcatcaaattcatcaatcactttttccacacggcagaattacctcattacatcaatgacacaaacatagtcctgatacctaagaaagattgcccatcaaaggtaaatgactttcgcccaatagctctatgcaatgttctgtataaatgcatataaaaaatcatcactacacagcttcgagacatccttccaaccattatctccccgacacaaactgcattcatcaaagggagatgcataactaaaaatactgcaattgcgaaagaaattctccattccatgtcccggagaaagggatcgagaggcttcatgatgataaagcttgacatggagaaggcttacgacaagatggattgggagtttctaatggaggccctatgttttcatgggtttaagaatcctttgctgggatggttaaagagctgtattcaaatcaagaaaatgaacttgttgatcaatggggtgaaacaaggcacgatcactccttcaagtggtctcagacagggtgatccactctcccccactttattcatcttagctgcggatattctgtctcgacttctacaggattacactctcaaaggcaagattagagggatcaaagtcactcgcacgaccccatcaatcacacatcttatgtttgcggacgatgtaattttgtttggccaagcaactataagagaagcacaagctttcatggactgccttcacttgtactgctcttggtcgggtcaaatgattaacttacagaaatcgacagttcacttttcaaaaggggtgcctagagttcgtgctgatgagatattaagtctccttggtatgagtaagatgaagaaggatgcctcctatcttggaattcccctattcagttcaaagaaccattcacaagacatgaattatctggtgcagagaatgcttaccagaattgatgggtggaaatcccgtcttctctccaaagtagggcatgcttgccttatccaatcggtaggaacctcgattcccgtctatgttgtagcctcggaggtgattccatccgggatagcaaataaaatggaacaatgcctaaggaatttttggtggggcgacaatgagaagaggaaatccattcacacaatatcgtggagttcaatatgtaaatccaaatttaaaggagggcttggatttcggaaaattaaaaatattaatacggctctccttttaaagtggggatggaaattgctcacggacccccacaacctttggagttccatagtacatgagaagtatttaaaagggagggatctctttgatgctgaactaaaagggacagaatcaattctttggaaagcaattctaaagtctaggcctttattgaaagaaggtctatgcaggaaaataggagatggtagaactatatcaatatggttcgatgcttgggtgcccaacagagatcacatgccactactcgtcttggatacaacccaaggagcaaatctagtaagccattttatcaatgaaaacatgacatggaatgaggagagagtgagacaatggctccatgaaagggatgctagaaacatcctcaacattggacttcctatacaacaacaacggactcctgaaggtggctaggagaatcgaggggtacctttttggttaaatcagcttataagcttgtcatgaatcaaagcttacaagatcagcccacttgggattggaagaccctctggaactccccgatccatgggaggttgaaattgttatggtggcaattgatgagagatgcccttccaaccagaggaaagatcggaatggccataccacttcaagcacgagaatgccccatctgtggagaggaagaggaaacatctatacatcttttttgggagtgctattttgcaaaggctatttggtttggtagcctttggggtatgaggactgatcaattacactgcccaaattggacagattggatgttgtggtttcgtgaccagtcgcatagactgcgaaacttgtcttatgaggagtttatgaccggggctctctgtattttccaaaaaaattgggaggcccgaaatgacgtaattcatgagaaaagtctcagcccccttctgaaggtcatcaattcagtcaacaggcttcatagagatcacatgtctaaatggactttgcgcactgaaggaagagtacataaacggattctcgaagaaggctggtggaattgctgcaccgatgtctcaattcagtctaactgtgctttcggggtggctgtttttagagacaggagggatagaattgaggccatctattctgagaaagtctctgctacaaatcctacactggtagaagccacaatgctggctatagcagtaggagttgcaggagaaaatcacatggggaaagtcactttttactgtgataatgaagtggtgatctcaaattgctcagctcactgcaccacaaacatggacctcgacatctctggagtagctgatcgtttcaagaactcggctcaatctctgcaggatttcaaactggagaaaaatgacagaaaattcaattacatggctcacaactcagcaaaatgggcggccatgaaaggtgcaactggagtccttgaccttggtactatggatgaaagcatcttctctgacttctatgaatggtcccctaactaatggtggggatgtcttaatttggaacctatgttgtgtcttatctcttagtttattggtagtttatttacttgtgtcatgtttgttatttttctgttagttttggcaattgggatgcttagtcccgttttatcttgtattttggctttgccgttgtttcaatgaatgggtggaatacacctgccttttcaccaaaaaaaaaaaggattcaaaaccatcaaatggttttagttgagacagaaggatcttactccaatcagatcacattggattctcttgatgtacacgtgggccatcttaatagatatatatatatacacacgctgaattgataatgcgtatcgattaattttaacctttataaaaaaaatctaacttaaaagtttgaaatattggctgcaactgaatattttttaaaaaaatatttcaaaatttaaaaatataaatatatcatatatcatgatatttac

SEQ ID NO: 303568 - DNA, 1392 bp, Cannabis indica
aaaaaaaatacttaaaatataaaatttaattttgcttctttatcacgcgatattaacgccatgcatatatgtgtgagttaaacataaatctttttcgtaaaaattgtcaactcatacgtactttcttttcttatgaaagttacaggtgcaattaaaaaaatctcctcgcattttgtttgtcttctctttgaagttttcttcagacttattctagttcattctaggtgcatgcatgttttctcctttcttctcttacttctaattttcatttattgcttccaaccgtacccatttatttcccttgatgttatatgtgactttgatgattacttaagacccatttcctcttcaacctcatttctctctctcaactccatttaattttgacggcgcctgttgtgtcaaaatttattggaacccaggagttttatggtgagatcctcttccaccacgaccaacatggaactgcaaccgctattttttgccccttcaggtatcaattgttaatcattacgcatctaggcttgtgcagacttggctggagaggatctggaaggatggagctacaattttcccactaccctagatggcatttcatctccaggtatctcttcctgtttttcctttaactaatttatattttaggtgttgtccctctttttctagcatcacaccctctatccctgatatcccctctaaccttcactttgtgttcatggtgtcttcttcccaagcccaccaaaatcctcttccactcactgatgaagaacatctcattcatgtctttgatcacatctctcttaactcgaacaatgcacatgattctcaatgcctcgtctttatggtaatcttcagaaatacaagacaatgcgaggacttaaaagtgttctagggttgtataggaataggctctccatccatgtagagaaacaaagtaaatgtgttgatggaggcttcgacatctggagttgggcctatgtggagatgggtacacaccttctgctaaggagttacttcgccaaattctgtgcagtaggtggatttgtgcccttcaagtttatccataggtttactgtctcctatctagatggtaaattgtgtgctcgtggcacaagaaagcagtaccaacaattgaggagatcttgtatttctacaagattaaatctcaaaccatgatgggtcacaaggagaagactggcttctataggctggaaagatactccaaaaaagtggcctgcccaatcagttccctgaagtgcacacatgacttctgggactattggtgtaatatctcgaaaaataaataatatttaaatagacatattttattaaatatgtaattattttggtaacgaagtaagattacgatcttgcttagggtaattattgaga

SEQ ID NO: 303569 - DNA, 2457 bp, Cannabis indica
tttctttttaaataataataataaagcagaggacccataacacaacgaatcaataggaaactaaacaacgcaaaatggacaatgttgttgatcagttcaaatatacacttattgtaactgtctgtcaaaatgtaagcttaacaacacagagtagacaatgttggtcaagtaaatttacctctttgtattcctttaattactctcttatccttcctatagctctcaactggcaaagagaccagctttgcggcaccagcaccaagagcaaccaccgaacggatgggaggaagaccacgaaatactttatgaatctgcaatcaatacaacaataaataagtaagaaccaactactatttgcaagactaccaaaattttcaagagaagtggtgaacatgccacttacttgattttgggatatatcttccaaccactcccctatgattgtttcacatacactgccccagccatagataccaatgccgtgaacatgtttgagctgcagctcaaccccctacatcaatttacaatcattcaataatcgagtgaattccagtataaaaacagtgaagtccattcataatcaatatcatgagaaataggtaaacagaaatatcaatatcctggtcgtcagacactaactctgtactaagcctttatacttatagaacttgtcaggacatgagtcttggtctatataaatatatgtacacatttataaagtatataaagaaatcgaacatgtcagtggagaaccttacaatatcaacacaactaagcagagctcaaaactctaatccctacagtggtaactacagcctgaatcataacgtgtgactaaaattcttactagtcagaacaatatactggctatttaaaccatatgatacgaaactttattgacaacgtaatcattaaaaaaaacatattcatcacaagcaatgctgaaaaaaaaatggcatcaaaaagagcagggaacaaaaacataaaggaagatgagaacaagaatatgtctagttggtaaacaacttcaatataaagcaatttgtagctctttactttaatgagggacaaaatgaactgttcgtggccttacatcttgaaatttaaagttttgcttttttctttttctgaataagcaaacttggcaaataagaaacaaaaatgtgcaccttaacaaacaaacaaatagtttaccttccagggcacaagattaacaagttccgcataattcccaccactcaacgcagctaaatcaacacggcaaggactatagtcaacacgaacaagaagaggccatatatcaaagctctggaaagaacagaacaacatgaaaaatagaagtttatcattgttaggcaaaataatgaatagaatacagaatggaagaggatgtcataaataaataaacttgcctggaagtatggaagaaatgcctcctcagcaatattatgctgtgcaagattgttgcttgtcaacgattttgaactatctgaatcttgacgacaacttggagattggtcaactgatgagctttttgccccaaagaaactgataaagaaatcaagttgggactgatgaagatgcaatagcatcggaagaaatgctatgcgtaatctggaaggaatataacatacaagttagggactgattaacatcgttccaacaaaatgtatcctctacgtgaaataacaagaaaatgcaccatcaattggttcataaatcatattactcttcttaccataatttcacagagcaatccaacatgagatattaaattttcaacaaaaaaaaaaatagaactgctagttgaagagaatcattctttacaataaaaaagctgaacagatatgacgtaaaattcaacttaataaacagtctttaccggtactcttcaagaggtattagaggatctggcctgacagcttccaagtccagcttaaatgcttttgaagatgattttcgaggatgatcctttgattgataatatcctaacaccttgtaatgcaaaaggaaaaaatattctaaatcttcttgtaaaagaaataaaaaaaggtaagatgattatacaaaagaaaactactttaccagcttccaaggagcgtctctactcaagtcatataggtgaatttcttgaactgaaagagagagcttagaaacgtgtattccaccaactggaaaaatctcatactgaaattccatccctgaaagtgaaagctccaggcatacagttgtattcctgcccccattatttgtagacttctgatcaatccctttgcaatctttccagtcgcaaccagcaaccattctccacctaacatcaattgttcttaagtaagtacacatccaatagcctttctgaaaccttgggcttctgtattgtcagtatagggacacttagttccctcaaatttttgtaatgctgcactcacttctcaactctgaaatgtggtcttctac

SEQ ID NO: 303570 - DNA, 3777 bp, Cannabis indica
aggagatgatgacgtgtcacgtcattttgtgtgtgatacattattaacgttatttttgttaaaaacttacttaatataatatattcctaaaaaaatcccatttttattttatttctattttgggcctatatgggcctccatagcccattaggcccacaaacattagaaaccctaaaagtaaaagcttggttttgttttaaaccctaaatacagactaagctcagagacagagctctgtgccgcctcattctcactctcaatcccttctcttctccggacaaaggtaactaattcttgtttataattatatatctatatatgtatgtgcatttttatatatttgagtatatatttatgtatatatgtttatattgatctacggcatagaatagtacaagcttaaggttcgaacttatctaattactgaatttagagaaattttgaaatgaaaaattatgattttcaaggggaaaatggattattagtttgtttttagtctattgtatttatatttcagtgatttgatgatatatttatgtgttaatattacttaatatatctaatttctttttatttattgaacaagattcaatcaaaataatctgaaattagagaaaaattgaaatgaaaaattatgatttttaaggggaaaatggattattagttgtttttagtctattgtatttatattttagtgatttgatgatataattatgtgttgatattacttaatatacctaattatgtttttgtttattggattgggaagcaacttttctggtttgtttggttttagttaatcaaattcttttgaatatggacttttgtgaatttcatttattgattattagatatgagaagtgttttaggattcattggtgggtttttatgaacatgggctattgtgaactttatttattggttattagaaatgagaagttttataggatctagttctgattcattggttgggttttttttttttgtaggtaaggtaagccatggtgaagcacaacaatgttattcctaatggacatttcaagaagcattggcagaactatgtcaagacatggtttaaccaacctgctaggaagacccgaagaaggattggtgagttactctttttctacttggtttggtttagtgaagttcgatttgagttgtcttattgatacatttatttgtgtttattataaaattattatgatcagctcgtcagaagaaggctgtgaagattttccctaggcctactgctggaccccttcgcccagttgtccatggacaaactttgaagtacaacatgaaggttcgggctggcaggggcttctcactggaagaactcaaggtaggttgttttgggattatgataatttcataccaacaattactaaattttttttatttgttttatggctttcattgttctgttaattttaaattgtgcaaatatggaaaatgtagtgtctgtgtgtgttcttatgtttctgatcatattttctatatgcaaaatattttgaggatgaagaagatgataattgttttggtttttacttaatgatttgaatgtattttccatggtttggtctggattcaatgctgtgttcctttgcgaaattatgaatctttttacaatacgggttcatagtttctcagcatattttaagcgggacactgagatggattgctacgactacaagttgttgatgtataggatttgttattttgctttccaggctgctggaattccaaagaagcttgctcccaccattggaatctcagtggatcaccgccgtaggaacagatccttggagggtctacaatctaatgttcaaaggcttaagacatacaaagccaaacttgttgtcttcccaagacgtgcccgcaagttcaaggtaaagatagtctttttttcgtattcattaggttgtagcagtaaccgtgtttatgactatgttatctcatcttttactcgtttgctttttaggctggagactcagctccagaggagttggccaatgctacccaagtccaaggcgagttcttgcctattgctcgggagaagccagcatttgaacttgttaagattaccgatgacatgaagtcattcaaggcttacaacaagctcaggttggagcgtacaaacgcacgccatcttggtgctcggttgaagagggctgcagaggccgaaaaggaagagaagaagtagagagtttcgggtttattccgaagaattttgtgtttttgggttggaccctattttctgaactatatagattttgttgttctgtgatcttagctaagattgaagatttttctattaattttatggttgcattactgattggacttttggtaaattccttttattatcaaaccactgctgaatcagttttttattattacttgctctttagtttaaatttttatcacaatgaatgataaaagagaaaacatcaaattataaaatcaagtagttttctatttttaagatcttgtgtaaaggtagagataagtgatcaatttatcaaattgaggctgaaatcaaagagttagtgcatatttttgtgtgaattgcaatgaatactttcattaaacaataacttgatttaactactatatagtatataggtaacaattcatagtatggcttcaaatcaagttctctagctaagtaaatggcaaccttatttttggttgagtaatattattactttgctagatcattagtttaagaatgaggttttgctctcaattcgagtagggtcgttcttttaagaatggttgcctgttcatcttgattgcatgtagaactgataatttttctgatttcattggttaccatttcacaagaacttgattagttataataactcaagtttatttttggatatagtttattggttaatgttatctatgaaaaatattttttttatagtttatttatttaagtaaaatttaaattatagagtttaccatcaaaaggattaaatttgattacaataagatttttttattacaatagtttgtgttatataattttataatataatatttagattaaataattaagataattttgtcaaataataaaatacaataagaggttatattattttaatacaatcattataaaagaattgcaaatcttcgaggaatgatgatcgtaaattgtgcaacttttttctccacattataactcttaataaactagtaaaagatattgctagttttttttttttttatgaatgtgaatgaatgagagccattgaaaatattgttgttgagacttgatatattcatttctaaagtgtataaatggttcaaaatcaagtgtgagtagtttagaacactttcgagaaattactttttttttttttcagcatataattgcacgcgttttttttaaatattggaagccttttcaacgactcaaaacttacctaggttatattattagagatatccttgcttattgtaaaaattttagtaatatttcttttatgtactgtcttaagattgctaatggtgtggctcacactttggcaaaattagctttatctatgaggatcattatgtttggtggcctggccaccctgattgtattgcaatggctttgcagacagacttttatcattaatgttattgtctagcactttttttctcttgaggtttctctctttgggtttactcttgaggttttaatgaggccgtcttttctaaaaaaaaaaaaaaaaaaaaaaaattctccaaatcacccaactaatatcataaatgatc

SEQ ID NO: 303571 - DNA, 2275 bp, Cannabis indica
taaactcgaacaataaaacaaaaaaactactaaaaatgtctaaactaccctaataaacgagtatacattttgttgatcaaactctcccaaacttaacacttactccctcgagtagttacactaaacactaaccccaacacaaaattaaaactgacaaaacacataaaagtaaaattaattacataaaacaaaatttgagcctcaacctttccaacaagctagatatcacatttatcagaatgtctcactattcatcaaatctaacttctaagctgaaccatatcataattcactcaaatcttttttaaatatgcctacggaaccataactagtaaataataagcatttgagataatttatacatgctaaatcacattaacaatccatcaaacccttaattctatatgcttgcaccacttactattctccactaatataaatgatgcatgctcaaaaatcaaaaggtcttttaggcttaagacatggcttaggtaaaggtagatgatataatcatttaggctagaattataccataaacacaaaccaaacaaatcaacaactagaattaacattatgtctcaaattgtcatccacacttccaaaaaattgagaaaacaaaaataatttgctatagtatgtaaacactactcccccaaacttatttattattatactagtataaggggtatactttaatttttcttttctcttcttttgttttttaattttcacatattttttttctttcttggtatagaatactgaaagatagtgggttggaaattctgaactttcatccggagctcccgaaatcaacctaggcgaagggctagagacccctcctagagagaaatatagagaatgatgttatgtaaatgtgtgaagtaaaataataaaaaaagataaataccatttcagactctgtgttttacaaaagttactaattggaccatctgttttgttaaatgacaaaatggactctatatttttcaaaatggtaaaaataggactcagagctcaacttttaacaattttattttttaatataaccaactttgagataatttctaacatgaacaaatatagaaaatataatcagctttgtcataatatctctagattagattatcattaagttttattttgacaaaaaatcagtttaggatcttatttgtacaattttagaaaatacaagttcattttgtcatttaacaaaataaagagtccgattgataatttttgcaaaatataagttctaaaatgatatttatcctactaaaaattaaaaaaatattaataaaatattttgaaaaatagaatagagaataatgcagtaaataataatattgtctttttgtcatttgattttggcttggtagacctaattgacccgttctcaacactttttaacattactaataatatcttggaaacgattacaatgagtggatgtggatgtgtgcattattatttaatcttaataaagagtaaattatgtatttaatagatttgtaaatgttccatgccacgatcttacaataataatgccacgaaataaacgtttaattaattaattaattttgaaataattattttcgagaaatataggtgagaaggaaatacataattaaatataaattatgtgacatatgtatattaatcaattaataatgtttttatttaatagaaaattatcaagtgtgttggccacaaacgtgcttacacatttttgttacacatcatataatattgcatgtgtatatatggcatattatatatatatatatatgtatatatattatgaaagatctgtcaattattatttggtcattttcaataattttgagttttattttgttaatttatatatgatggagctaataataatggtgaaggaagtttaattattacgtgaaaacatattcgatagtacgaatcacaccctgtatttttattaattataatagaaaatcatcgttttatttaaggtgatatagttatattatatttataatatttaaataaatgcaataattagaaaaataatgtgtagaaaaagaaaatagaagaaaacatcgaccatgtattagaattagaaaggacgttgaaacaataaagaaaaacaacaataatatatatttataaatatatttcaagagaaatttatctcgaattatcaaattctttcaaattttgctttaattttttattttatttttaatcttttttttttgagtgtagcgtaatagtacttttacaatcaattaatagcttg

SEQ ID NO: 303572 - DNA, 4036 bp, Cannabis indica
aatacctctatgaaaaaaaattgaaaacaatattctaatatgtaatttcaaacgtagaagttaactaaaagattgtaattagcactcctcaaaacgtaaatgtaaatttgaaactaatgttccctaaaaaaaagattaaaaataatggaacgaaaaaaatatatataccttattacaagcacaattttctccagtacagtttagggcatcatcacaattgcagaagcaaaatttgggactttgaagaatttgctgaaaaaaattacttaattcattaaaaatatatatataaaaaaaacatatcaaattaaaataaatgtgtaattaaatattatacctcaagcatataattgacggcgagatcgggtcgatttaggcagccgttcaccgggtcttggcggttgcaaccacattcgtcggtgcaaaaccttagtgcactatggcacctacatcgtctttattaaataaatcaattaattaaattataaaataaaatattaaaataatgaaaattaataaattatatatatttttgggttttataaaaatataacttcttaaaaaagaaattattttatggccaaaaatttaaaaaaaaaaaaaaaaaaacaggtataaaaaaaaataaagtaattggttaccttataataagataattagttaccctaattaggaattaccttaaagtacttatgtatattcaaaataatttatttaaagaaaacatattttcataaaattttctaaaaaatataattctaaaaaatgaaaattcttcttaaaaataataaaaactttaacttgtgaagacatgtcttcttgcatccacagcctacaacaattgcttctccatttctatttttgtcactgttatttgtcaaaaaaaaataacattaataaatataaagtagtcaaaaatcaaaaattaaaaatcaaaatcatatatataacataaaggaaaaaaaaatattttctttctcttaatattctaagccttagatataataaatacatatttgattagaggtaataaaatagaatattattctaattgaataattttcttattatttcagtacactgaccattctattttaaaattggaagaaaattcattccaatacaaaatcaagaaaatttaatagtttttatttcataatttttgtatacggttaaatttgattttattccatttctattattatattttattctttctaaccaaatgtgacttaagtctttctctgctcctaaaataaaaaataaaaaatcacaaaagagagatttcaagaaatttgaaattgaaattcacatgattgtgaaaggaaaatgaaaaaaaaaattaaacatttctaaattagtaaataagagtcacaaactttcaccttaattctaatagtgatgtttttgtgtctagctagtactttgtatttattagtttataattatgagttctattgaatatgttgatctggtttatgtattattttacttatagtatatttaattcgcattaagtatagattttatattttgaatcaaatttaatttacataatatcttaaatctgatcggttaatttttatttaataagtaattaaaatatttttgggcccctgaatttggtgggtcctaggcgcagacctagtccgccttaaaccatgtccaatcctacatattgatatcatcttttcattaattttttttataatattatatatatatgaaaaaaatatatatttgatcaattactttatttagatataattattcaagtacgaattttagattgaattagatcgaatattttctgaacattaatcaagtttttaaatattaatttcttaggtcattaatctaaaaaatatatagaaaacatattaaaatttctttataggctaccctgtatacaatttaatatatattgtaataacttcatatatttatatataaatatatataatcatatttcaagatatgctataacatggagatgaacaagtttatttccatttaatttgtaccatagtatataattaactatgaactacttttaattaccatatggatcaaaatgaagaaataagatgacaagatccctaataaaggaatattaattcaagaactaaagaaaataatgaaaattattattaattaattataattaattacctcttattatcatgaggagggttataatcaccttcagcttcaagaattacaatattcatttcaagttaaattagaagatgaaagaagaagaagaatgatgatgatgatgatgatgatcaaaagagctagaacttgcatgagaagagtacgtatatatgtatttatatatacacaatatacatcttcataatcaagcttaatattcatggatccactgtaatattgggcttaatttaaagatttattattgggctccaaacacttgggcccactccataactagaaaatgttgagagcccaattcatctgaatattcttgaagaggtctactcagtttattgtgttcataaaatactcaatttaattcaattcggataatttaattcaatcaatttacaaagtgtggatattcgtacttgaacggattagattagattggaaaatttaaaatctattatacttgtacggattaaacgtttattgatatgtaaaaaagtaattgatccaatctaattcacatattcatataccatttataacgctccttacatggacttatttttatcatttataatgtacataaatgatataaaatcaagtgagagtgatttggaatgttttggagaataaaaaaaactgataactagtaaccagttactatattttttagctttgtgtgttcgtttttgaatgctatggatgctttctaacctatgaatcacccatttgagactatttacacttaattaagagatgataacaactatgaggtgtacgttatttgaattttaaagtgtgtaatcctaaacactataaataagtgtctgaagtgctcattttgtgacattggttttctatcaactaagaacttgctagaaaacacaagacttgatggttttcaaatctatttccaagagaattctattatggagtgtttattatgtgagtttgagttggaaggagtaaactttgagcgagcttagattaatggaatatgaaactctattgatggaagggattaacattaccatcaatttaatttaaaagtgagacctaactagaaacacaaactccttggtcattaaaatttaatttaccaaacatgacttaacactcataccaaatgccctattagggcaactctaactctaatgccaaaatccaaatttagtattagatcaacactaatatgatactattttagcactaattttatttttaattccaactacaacaataaaaattatattcgttattatattattattttattaatataataaaaaatttacttgataaatgaattatttaattattaaatataaaaaaagggaatgtcgtgatctacaatgtttactattattagtggaacactgtagactctcatcaaaataagatgagttttactcctcacttggagcattatgtgggaaatactacattatgtatagtatgggtgtttaaagtgtcattagagatgaccttagtgcttagagataaggaaaataagattttaaataaaggtgatacaccttactcaaattatgatgattctcattaatctacactaaaagttgattgagcatttatattcttcttcttgttcttacatacatcatatattgtgtaatattcaaaatatatacagatatatataagatatatatatgaatgaagttttaatagttatatgacttacatcaaatatgtaattaaatatatagttatgatggttacaattactttaaatcattagatcattattacatggtttataattaattaaaaattaataaattacataataacctacttttattttatttccttataaataaaaaataaaatatatatatttataatt

SEQ ID NO: 303573 - DNA, 4842 bp, Cannabis indica
tggatatctaatatttggcggttagttgtaattggatttgatcgatttatgcatactgctaatgtgaagtttgtgaaaattgaccaaataacatgtgtaaagattgataatttacttacctatggtgcaggctatttttcataaaggttgtatgttcagcaaccgaaaatgtgtcttccatgtaacgagtttccgccttttccaagaattcagtaacttcctttttagcacaaaccgaaacttgttccatgttcaacatctcttccaccaatctagtgttctcctgtttattcgagtccaagatttctcttgatgcttccgaaacctgaatacattatgtgcatgagttttaaggcaaaaccgctttataatcttaaaatcaagaagcaaagaaagatacttaccatagcaacttttttcgatgttacagttgctaatatggctgcaatattttccaaagctgatctttcctctctagcagcctcttccttaaacatcctctcgaaattaactaattggcgggatctttcattgtagctttcttctataaatttaccaacttgagaagcacggttatggaggtcgttgaaaaagttcatacttgcacttgaaatgacttgtgctgcaatcaaacttcgtttcagtccctcctcctgttgtttcgtcgaaaattccaatatttgttgctgctcacttagagacttttgcatgtcattcaacacctgctcggcatccataaccatagtggcaaggaactgcaaagagtagacaaagattgatttacaagcaaatttcaaaagaagaaccaaattagtatttttttcggttaaaaacaccatacattctcaacagcagttgcttgtgatgcaaccacatcatttatctgattcaaatcagatgatgcttttctttgcaacatgtcaacgagttctttcaagcttgctactcccgagcagtatgtttccgccattttctcaaccttcgacttcattactcgagtcacctgtaacaagttttgtataattaaacacttgatttgttagacaatgcaaaaaaaatcattacacatcaatggtattggaatgttttcttacatcaaatttagtagcaaagttggtttggacttgttcttccattgatcttatttgctgtgtttgttgtgaaacagatccaatgatgaccttatggagttcttttaaactcttatcaaggtcagacccgaatgtcaaaaccaagtttcgattttctgattccaacctatctttatgatctaattttgtgaacaatgaacttatatcatctgatgcatactgcaaatcattacgcaatcccttcgcacattcaatcaaagaattttctgaacacagatcaaaacaaatcatcaatatttgtcacaaatggaaaaagagaatgactaggaatgtgtttgaatttcctgacctgaggataccattttcgatataatgatctccttctctttcaaagattccattgccaatctatagctttcttgtaaatcaagtaatgccttgttggtagtttccaaacttacctataaacaacagacacaaaacatagtttttaggattcaatgaaaaacaaaaatcagggaactaagcagttaacaaaagttcaaagttcatgttacatactttgcaatcattgagctcgctttgaaggtctaatctttgctcttgctcggtaacatagagctcgcgaaagctatccacttgctgtaacaagatattaaatattcataactaaggtaaagatatgatcttagtgaaaaaaaaataccatctaaaaatataaaattaccttctccgatagaatgagatcgttctctagttgctcaattttttcatccttagcctgtaaagattttaagtatgaatatgatagcaaaaataccatctaaaaatttattgagtaaagaatcaatataccttcttctcagcttcatcttggacaaatctttcatgtggaacataaacaccgttcttctcccttgcagctcggacatctgattttcaatcatgtcaagataagaaaatgtataacaaaaagccaattctcaagtatgaaaatgtattactcaccatctttcattctctcaagttcaagatataaatctttaagcaacacagccttagacattttctggtttgcctgcatatataaaatttactttgttagaaagaaatagaagcacaagagaatagaacaatcaagtaaacaaaataaacaatgtgttgtgagaaacaaacctcgggtttgtttcgaatatttttggcacgataagcatagtctagtgtgcttaaagtttcctccaaagaatgagcagagggagaaattgtagcaataatacaagtttttgtttttcctcctaaagaatctctcaacaatcttgtgagtttgctatccctgaattgagaaaaaactcggttcatatacatgtcttaacaacaaaacactacaatacaatgacaatgtgagtatgctatgaaaatggacctgtaaggtatatggctcgaatgttcaaccagcgcatttatgacacggcccaaagtgagcaagctcttattgatctctcccgcttctcttgctcggccctatcacattattcaaccgaatgtaaaacacattatcctaaactttgatgacatgatgaacaaacaaactataacacgccatacctctcttgcacctgatctagatatgttctctgatcccgctaagtcaacaagattaagttttccacatttgatcagctcctcatcgccaatggtagcttctttaatgtgcacggtaatggaaaacacagaatgagagcggctgctatgcttgtttaacaaggtatcagctgtacgtctctttgcagaccctcgttccaagagattgtagatttcgctaacactgtaaacagcttcttcttcgaggcctctcacaaccacacaaccccttccatcctccattagtgaaatgggcttcttttgcttgtcttctggacatcttgaagtgtcatcagaggccaataaatcggttatatcttcattatagagctccaagaatgtaactttaacactgtagtcagcgttttgtgcttcaagcgtttcaaaaatttggcgaactgctcttggaataacaccagcctcagcagacagatcaccaccctacaaaagataacaacaagatcattaatactacttgatatgattatatgaaacttaaaatgattagttagaatgtaacataatattttaccttgtttttaattccaccctccatagtgtaggttttcccagttccggtctgcccataagcaaagacggtacagttgaaaccttcaagaacttcattaacaattggagaaatcgcttggtcatatattgatctttgctgtgattttggcccaaaaaccttgaacacatgatgaaaagtaagccaaaaaatacaattaaagaagaaaaatagataaaggggtgatttgaaatcaaagaaaaagcttaccttatcaaaggtgaagagtctatctatttgtttgttagctacattctgcaacacggtcacctctttcttttgctcattgcatgagatcactctttgcacattggattttgcctcttcatcactcaaaggtctattatttgatcaatcaaacaaaatgggttggttttgagtcctctaaaatccataaataagcaaaaaaagaactattgagaaattgagtttaagagtgataatgggattttttctcttcaccactcaaaggtctataatttgactaatcaaaataatcaaagtgcaataaatccaataagagagatgataaattatccatccaaaacaaattcaccactcaccttgagtgtatgaacaactgaattcatgaatagccttacaaaatgagtttgtttttctttttatggcaatgaaaaaactcgttaaaaaatagaaataataatgccataaagcctaaaagattataaatcccagatataagtgatctcatctaactacaaaagttctctttccacccgaagaacataccgagctaatttatatgcagccatagtggcccaccgaacaaattcattaaaaatagaaataataatgtcataaagcctaaaagattaaaaatcccacatctaacagaagttctctatccacccgaagagcgtgccgagctaatttatgtgcagccataaaggccgaccaaaacatctatcattagggacactcaaaaccaggacacaaaagacattaaaaaagaaaaattgagcttaagactaatgacctaatggggtcgcttagtgtaattaaaggatcacttgaacaacagcttaatggaaaagagggaaaagggagtgattgagtacctgcatcgaagcaaaacttgaacattaacttctttatccctatcatggcgattccaatcaacccctcttgaatccattaagcgccgcctttcgggacgaggagtgaggaaaggagagggagatggggaaagccctcccatagtacccactttcctagtcatcagatcaggagtaactgacattgttttgctcctcaataatctcactcactatacaaacaaacatatatgtataattaatcatcagatagagaagaaaaggcataatctttaaaatcagaattctttgttttgggatcaaatttgtatgaacttacctgcaaatcacgcttgattgatgagaatcagtaaagggtttgattcgattcgagagaatttgatgaaaaagatgagctttttttggttttggggaagaaaaagatgagtttttgaaaatgagtttttgaataaaaggaatggagagt

SEQ ID NO: 303574 - DNA, 3050 bp, Cannabis indica
ccctccaccccaagttaaatatcggaaatgcttcttccaagatgttatttgacaaaatctttatttttcacttgggttgtttagagataataaaatagaattaaaaaaaattaattttcattccatttaattagagtattagaatatcatttcaataaaataatcaatccacaattttaatggaatgacttttctattttaaaataaaaagaaaatatagtactttcaatgcaacataaaaaaataattaataatttttttcatcaattttttattcattcccttcctatctttattctcatcaatattcttatactttcattcctcccaaccaaacgcgaccttactttattcgaaaaaagggaattatataattataaaataaagagggcaaaacttcttccactttcaccatattatcattcttacatccaagtctgtttctcaatatatagcatttttaacagcagaaacatgattacataaatctagaagttctaaaaacaaaagcagaattctaggacacatattttggatggaatcaaaatcttggtatctgctctttactcaaatctaatcttctttggagcaggttccaagttacccaccttgaaaaccaaacaaaacacattaacaaattgtgccaaaaagttaatcataaagagagacacagtagctgctacctatgataaagtaaaaaaaaagtaacggaaaaaatatgattgtatgacttacaatttcagggcactcatagtcaataccagcagcctctatcatctttcgacgtttcccatctcgcttgacgattttctccaccaacttcttatgctcatccaatgttctttccttcatagattttcaaaaaacaatcaaaggactaactttcactcttgtttggaaacagcatcaaacaaatgaacagcatgatgttaagtttttacaggttctaatctgcaatggataccttatcgtgacgctttcgctcaattttaacccagtccagtggcttgtatcgaaaactaacacctctccatctatacaagtaattcataaatataacatcaattaccagtgtataaaatatattttagcaaacaaattaattaacattgaaaaattcaagcctatgggtgtccatttccaatttatgcattttttaataggacttcattatattaataaactgtaatatggagacacggttagttacttacagtttaggatggatacgatctgaaggaacaagttgaacttgcaacaagtgttcaaataacaaatagttattcattgtgtctgctacaatgctggctacctgcacccaacaaaatatcacattaacgaatattctgagcacaaagtccttgcatcagtggaacaaacaagaatacgtataacagcatagaaaaaactacccacccctgaatcctcaaattcaatgaagccataatgtttggactttcctgtctgtaacataaatatcaatggaaaaaaatagaaagttagcaatagaaccaccaatgtaaataaataatttgaccaatatctataaatataaatgcatatttctccagaaaacatagtaaaacaattgccacataacattaaacaaaattcgaggggttaaatcagagcagcaattcattcaagataagttcataatatagaacattatttgctgttttaagtcactaaaccgtttctagtgacatgccccacctaatatgtgtctccattgcttcctatttggtctgccacaaactaactacataatctagaatttttatattgctgtaatttccattgatcaaactcaactagctgccgcaaaaggggccatgtggatcaacttcaatcataaactagcaagtaaacttgttcttgaaaaatccctagtcaacctggaatagttgcataccatccatatcagtgttacaagtacaagcccttcccaaattgaaggtccccacagtattgctatatgaaggaaattacaagcataacctgcttatcctcccagtttagttttgcttatagaaggggaaatacgaatgtatactttactgtcatgataatcgatactaggggagtgactctgtccacctatgaaaaatttcaaatagatacaaacctaaactagtgatttcgaaaaatatagtgcaaagtaattaaaattacaatccattctaacctaaattcattcattagaaagaaccatattacacaaaatcaacgccctaaccctagcatcaaagttaattttcaaagagactttctataatccaacacctaatatatttttcaactgtgaatgtatcaaatttgaaagctataaactaaaaaagcctaaactggtgatacatttaatataaaaaggaactacacaaacgatttctagagatcagtatgtaagcaacacctttttattccttgcgattcttagtctcttgattaccccaaattgtcgaaagaaacctgcattatatacatatatatacacattaaaacccaggaaattatttttttttttataaaaaggagtgtgaaggcagtgaagtaaatacggaccttccatctcattctcgtagaatccatgaggtatccgaccaacgtatacaactttagaaacatcttcagtaggcttctgaacaggaagcttgagcccaggacctccctctaatggcctttttgtgaacaagaattggagacaaactaagaacacagagaccaaaaacgcttggatggaagaaaaacacaacacactcataaacttaccaggaaatcagcagcttccttcttctgaggagcagcggaaaccttgctcatatttttcttcagagctttcttcgccttggcccccattttactctctcacgcgtaataccagaacaaaattagggttttagggaaagaacgccaaagaagcaaaccctcatagcatttccctatttatactcaccgttctttttcattaaaattaataaataaacaatgtgacgatatttacccaaaagcataccacaaaaataaataaaaattaattttttttacgc

SEQ ID NO: 303575 - DNA, 1929 bp, Cannabis indica
aataaaaaactaaaatattaaataaaactaacactacgaggcttggcacgtaacaatcacctagaatatatatatatatatacttattgtgtaaacaataaatataatattttgctttacaaggggaaaaaaaatatcattcacactgcaagaaatttacataataacttactagagtaacttaaatcttaaatcgtaacttaaatttatataacaatttatataaaaattatttaataactcaaatggtaaaaattaaaaagtatataaccagatgattccccttattagttttaatttaaaaaaaggaaataagcataggaaagagttacttcttgttttttattgggtcagtcacttataattgacttttatagaataggtaagagccccaccttgtatttattacttgtgtctcattcattttctttgtaagatcccttctttttttaataattagcaatgattatataaaataaatataatttattattatagataaatattattttaaattttatattctgcaaaaattattacatgccttctttattacatgtgtcttgttcattttctttgtaagatgccttctttttttttataattagcaatgattatataaaataaatgcaatttattagtatgataaatattattttaaatgttgtattttacaaaaattattgattggaccttctgttttgtcgaatgacaaaatatatcatgtattttctaaaatagtaaaaataacaccttaagtttaatttttgacaacttttttttaatataactaacttaaaaacaattcttaacacaagcagattcagaaaatataaacagttttgtcttaataccttagattgaattattattaaattttattttgataaaaaaatcagttcagaatcctatttgtaccatttgggaaaatacagagtctattttatcatttaacaaaacaaaaaatctaattaataactcgttattatttaaagtttttttaatgaacaactgatcatatcattatttaaagtttgatgacagcttttgcataggtacagaaattaaaataagagaaaaatggcaacgttcaaacatataattttagaaaataataaaaagtataatctgtacaaccaataataattgtaatttttttagcaaaaaaaattgtaatttattgattgatggaagcatacatattaattattttataaatatatatatatttaaataatcacatgattgacgtgagctttaaataatcacgtgatttatttttaatgtttctataaaagtcttaaactatataatatttcaataaaaatattattaattaaaaatactttaaattaagttatatgatgagaaaaattatttgttataagaagataaaaaagttaaattatatttgtatcaaaatttaaataatatttggaagaaaaaaataaaaaaaaaaaatattttaaattttcataaaaagaaaaggcctcattttatattttaccttaggcattttaataccttcagacagccttgattaggtcaatcacttatcattagccttctttatgaacataggcaagagccctaccttttgaaaaaaggcgtttgtatcataaattcaaaataagtcagacctctcggtcgttacaaaatatattgtctggtaaaaggggcggagcaaggaatttatctgagggggggccaaactatagtaaaacttaatattttttttgaaaaaaaaatatattattaaattcataattaaattaaaatatagaacgtctctcttgcatgtcacgaaaattatctataattggatctatactaaatttttcagcaatttctctttcaatatacactagcaaacaatcacttaaaaattcatcttccatcttgttgcggagtgtagttttcactaaattc

SEQ ID NO: 303576 - DNA, 1774 bp, Cannabis indica
cttgtagctagagacataaaaattctctccttgagatgagggttttccctaactgatacacggtgttgtattcctcgatttctttgctcttggtgttttattatggctgagataggagaaggaagttctacgataatggaagatgtcgaagctctacgactacagttccttaaggaagctacgctggaactggaggctgattttgaaatcagtgcagaggtagcgaaagcaggggtcttagtcaagttgctggggaatcgtagtttttccaggaacaaaatcaaatcgatactgtcagaggtgtggtctttcttgcaaggttcatggaagatcaaaactcttgagaaaggcatttggggtttctttttcgacaatgaacttgacaagaaggaggttcttcggagacggccatggatgatttccaaccagtttctgaatatcagggactggcagaagatggaagatggcaagatgtttgtatggccaaagctgcagtctgggtacaaatccatggactccctaccccttttttggttgctcagaattctacagtgataggtgcaaaggttggggagttcatcgagacagacagagcagacaataagacgatttccaggcgaggcttcctaaaattcagagtggacattcgcacggatgcccaactcccggcaggtttctatctcagtatcaatagagaccggcgggaatggatacagttcaaatactgtaaaatacctatgttctgtttcaactgtggttatttggaccataatgataggagttgttcgagagctaaagcttatgcttatcctcccgttggccaagcggttccattgtatggaccatggttgaaagcttcggtttccatcagagattgcttcgatacgcgacgccctgctatccatacgaattttggcaccacaccgccatttttacaaaacaaggggaacgcagtggcaccgacgaaaatgaatattcagggtacggaggggagtgacgtggcacctttacctatgggagacgtaccaggtagtacggaaggtacaattggtgtggcggccactacacaaaagggacagaatagtactgtggggacccctctgatttcgaatcctacagttggagaattacctgggctgatcaaggctaataaagcccaaagacttactcccttctcgggtcctattcatcctatggtggatttgggtgccaacccaaaagatgataacattattatgagtttaatgccaaatgttggcccaacagcagcccaaatgatagacattcctcagcatgaactttgtaaatccaggaccccacaccatcaccctgaacccatttatatccaaaatcctatggacccagcccaatcacccaaacccccctctaaatggtttcattctgataagggagtggagtgctctggtgggaagaagaggaaggcggctggaagtgtagcccctattttaattgctcaaaaagaatcaatccctgtagctgattccacgagtaaggctttcgaggaaactgagaaattggcctttgctattggaagctctgagagttctgataaaacaaggaagggcattcgactaatgcaaagaagaattcttctagatcaagccagagacacaagaagaaagtccgagcagaatcgggtaattctatccctttatcttttgaaaatgaaaattctgaaatctctgagttgggaaacatggtcattgagattaaacttgatcaaaattttcaagtgggcgaggaggcggccctt

SEQ ID NO: 303577 - DNA, 1978 bp, Cannabis indica
ctgttttccacaaaagtttcttccagggttgattttaaaattagaacatgagaaaaaaaaaaaaaaaatatataagaagacttacagggacatgagagtctctggcgtttctcttggcatcagtggctgagaaaacagtgtagacaaggacaaaggtgccaataatctcagcaccaagaccatcacccttggtgtagccagcattaacaacattagctccacctcccaacctttcaaaagttgaggcattctcaaagccctttacaacaccagcaccacagatggcaccaaggcactgcatgattatgtagaaaacagctcttgtgagggagagctttcttgccaagaagagtccaaaagtcacagctggattgatgtgtccacctgtataaacacacacaacaacaacaacaacaacatgcagatctggtttagctaaagctcttcttcacaaaaataactaccagaacaaacccgaaaaagctagttcttaaaaacaaaaaacatgaaaatataaagataaaggtggctcctttattccacaaaattcagcaaaacatgttttttctttcttaagaaataaaagggaagttgggttataagaaaggtttgttacctgagataccagcagtgcagtagacaagggcaaaaatcataccaccaaaggcccaagcaattccttggattcccacagtagagcacttactaccagacttgttcacacccataacagtcaagacagtgatgtaaaggaacaagaaagtagcaatgaactctgcaattccagctctgtaaaaagaccatgatgagagctctcctggctcaaacaaaggagctggtggtggttccttgtagtctttgtctgtctgagctgatgttccaatgggttgtctctctgagtacttgttagctcccagcctaacatcctcttccttaccctccatttttgaaagaactcaaaaataaaaaatatctcttttactctctttctcagactctcaagcaaaggtgtctgtgtactgaagaaagaatgggactttatagcagataagcttgtaatttagccaacggtataatatgccacctctttttctaataaaaatattaccttttttaaaaataaaaattaaagttccacataataattgtgttaatagtggtttaaacaagtgtcattattagaagaatattaaactattaaggagggtagtaggattttggggattgttctggaatggccagaaaggaagttgacacactgacagagagggtcctgttttctttttttcctttgttgttcttatcctctcttctacagattgtcacattttctttttcctattgtttattaatttttatatgtacttttatttagtttatttattatttattctctctcagccaccaacttcacacaattcaaaatttaatacctaaaccttaattgaaaaagaaaaaggaaaattgtgttttaagaaaagcaaaagaaaaaaaaacgaaaacagaagtggaccactcgtggtccctctcttgtaggcatcctcagcggaacaaacttcttttattctttcttattttctcttttggaaatatccttttatcgtgtttgagagctattttaaggatcggaaattaggaaaatgaaatatgtgtaatatcaaagtaaatttggtttaccataatataaagggatattagtgccaaaaaaaactttatttttttaatacttagcaatataaaccaaatttttgaccgtaaatctactgaattactattctgttttcttctttacactttcgtctaaaaatctcagttaggtgtcacagtgaattaattattctgaatttttaacagtaaatttattgaattactattctcaattacccacatgtacatacacatggtaaatttttattggtccacataatattaattattaaaaaataatttaaaatatttaaaaattcaaaaataaaaa

SEQ ID NO: 303578 - DNA, 2206 bp, Cannabis indica
ggtcagtcatcagtccatgaagcagccagagtgacgtactcgtgtataagagtcattcattccgtgggtgtaagggcccaatagaagcttgaagcggggacgttacagttgttatccttttttctctctttctttttttcattataaatattacacttaacatatcttcaattcaattattttttgtatagcaaacccgcatatcaagaacaaaataatgtttttttaacataatatatacttacgtacatacaaaaatgttttgtaaacgtatgtattacagattaatctacactaaaactttcctacccatacgatattatgctaataaaaaaaaattctaaactatttatattaaaagaaatggtcaatgcgtattacaattatgggcacacacgtagtagtttttgaccttagattataagtgagaaaaacgggtaaaagttgaatagaaatgtgggggctaaacgaactgtgggattgtttgtacaatgattatttagagtgaagaaatgaaataagtagcaaaatatgaataggagaaagtagagagagaaggagaggttgatacgatgatgtgatagtgagtgaccaaaagcaaagaaaagaagtaaataaggtgagtttgaagagttcacatgcccccacacacactgttcctccaaaatcttaaatatatgaaagattaaatagtcacgtttccacatttgaccaacacataacgacaaaaccaattcattcccaataccctccaccacaccattccactcacgtgataataaataacaatctaaaaaaattaattaaataataattttgataaaaatattctcatatttacttaaatctagattgatgatgtgggactctgatcaacagaactattaattaagcatgagagatggggttgatctggtgtggggtcatgtttcttcattaatctgctaaagaatgagtgtggcacatgtggatggggtcaaactaaccaggagatacaacattattcaaatatccatgaaccatttgttagatggttataacacctcaagagctataaatgcaaaaagaaaaaaagagtactaacaaagaaataatactagctagtacatgcaagagatacagtactagaagtagcctggttaccatacacgatggtcgtcttccaacactgtaataaaagttaaaagaatatggacacatgagcatcatcacatcactaataatgtcaaaatgatctccttacaaatggcaatactatatatctctaataaggaagcctaagtagaaaatatcacaaccattaagatattcaaactccacaatcaaaactcttaaaaaccaaaacctactacatagagcccacttagaattattgtagcatcgaagggaggggagttgcacaccatgcggagcaaagtcttggatacaagcctaagcaagagtgtgtcattatttacttggttaaatccatactagtcaaagtcaatgtgcctaatttgtagtcatatacacccgaaatatttgttatcattaacggagcgtttgaaaagggaagagaaaattaatagtaattaattaaacagtattgtctatttgtctaagtgtataattatatttttatataatttgaggtaattgaaaatatttcaattagactctttaattatgagaataagtagtaagtgtactgtaatttttaaaaatattctattttaaagattaagaattaaaatttattattttttatgtaattacaaactattttgtcatcattagaattattacttcatattcaaaaaaatattgtattttaaaatataatataattactatacttactaatcttaatagtaattacacttagagagtcactttaaagcacgtttgaaaagtcactatctaattaaaaataattacacattttttgaaatatttgtttgattatgtgtaattagactgtaattacgtgattctaaataattgatgggttctagttactcttttacatcctcatggtctccataaaaattaatattatctgtattttaaaatggtataattattagattgtagaattattaaagatgcacacgggacgggaaagtggcggggagtgttctattagaatattttatttatggaaattattttctaattaaggaaatgattttctatttaaggaaataaataaataattgattttctg

SEQ ID NO: 303579 - DNA, 3407 bp, Cannabis indica
ttaaaaaaaattttaaaattttacaccacatttccaaaatgctaggccttgcgtagaatggataactttaaattgtaaatattatttttaaaaaatttaaaccaaaaattaatcaatgattaaaaaaaatgaagtaagacatgtaattattgtgtacacgaacacacctgattatttttctcactgcggtccaaatcgatccaatcgaccttgcaggactctcctctcgtaaatttctagggtttccttttttcctgctaaattgggtgcgaagccatatcgatctgaattcaaatcaaggtttcgaattgggggtttgtcattgcgaactgacggagaagaaagagaaagggagaaatgcctcagaggcactcaaagaacaacaacgacttagctttcttcacttacgatgagaagcgtaagcttggttatggaactcagaaggagaggctgggcaaggactctataaagccttttgacgtttgttctctttgcttgaagccctttatcgaccccctttgttgccagaaaggccatgtcttttgcaaggaatgcattctcgagtgtatgctttctcagaaaaaagacattcagaggttgattcttttaaccttatatcttatatatgtgtgtatgtatatcttattaaaaaaaattaataaagactattggtgcatctacttgtttagttttcatatgtatcacataattggttccatgtaggaatacatatacactttttgagtagtagaagagcaaattttgggagataggaaaaaggaaatttaacatcgtctctgttgttgccgagagtgatagcattttggtaatgaggtgagtgattaaggcccgtattccctctagttgagcgaagagttcagtgagatgacttagtattaagtcatatgaagtttagtaattagcacgaagaattttgcagggtttgtctggtaatgtctttatttgcgttttgaatagcatggcgggggaatcttttcaagcatcatttgaaatgtctccacaattcattcgctcttatgggaaaccaaatagaaagaggaaaatattactaagaaagatcgaaacgtctcaaatatatggtcgaggtgacatagtgtgctaccgggttgtaggtgggtgggattataagcttatgtttcttctcaacataatgatcttcatacttaaaattaggttataaccctagcgagttaaacaagcacttgtgccttatataaaatttggtgactggaccaaataaaattgcttgaacttggtggtccaatagtattcttggatcatttatatgcgttgtcttttgctctatactagcatactaagttcattcatagtttttagcttttctgtatctttggtttccctagcttagcatgtcatttatttcaattatgtactgaagatatcgtcaacttggcaggaagttagctgcacatgttgcacagcaaaagcaagagaaacaagaggaagaagagaagataacgcaacagaaagctcgggagcttgatgcatttgatcagcaaaaccatggtgcggtaccccagtacagtgatagaaataatagccgtgataagaatggctttcatggggcaaatagtgtaaaggccacatcttttgaagaagaggcactccgcacaatgaaagctttttggctgccttccgccacacctgaagcttctgtcaaagtagaggctccctccaccagtactgtgtgtcctgaaggcaatgagaaactgaagctgaaaactctttttcctgtaatcttcacagaggacaaaaccgacaagaaaatgtcatctttggataagagctatatctgtcccagctgcaaagttactctaaccaacacactttctcttgtagcccttagctcttgtgggcatgtcttttgtaagaagtgtgctgacaagttcatggcggttgacaaagtttgtctcgtctgcaataagggatgcaaagagaggaatctggtaaacttggaaaaaggagggaccgggtttgctgggcatggagatcatcttgaagcgaaagactataagcatttggggagtggttcaggactggggttggtcaggccctcaacaaaaacttgagctgagctataaatgcaatgcagttgattttctcaatcccctttaaatagttatacactatccttctctatgtctcttcatttataaatgagcttattgtatgaaggccccaacatccatgcaagctaacaagacatccttataaagtgaaagtatggtttttggctacttgttgttggttcataactttgagttgaagttgattttctctccttttctgtttacttatatataatgaatcgcattccaaaatttcatattacagcacttgacaacatatgggcataggctgatagttgtgtcaaatttaacacttgtttattttatggaactaaggaatgagaataaaaaatgggtttcattactctgtttatttctgtatgtggattagtgtgggactaagaaatgggattaacaatttcttgagattggagaataacttctgtttatttctgtttattcggtattttgcatcactcttttttggtgtgtgcacgcagaataacttctacacaaaaaaagatgtacttgtgcatcttttattgtttcggtatttaagaaaatattttaatttatatttttcatgatcgtatccgttatttttattaaagacctgcaaaattttgagaaatttataatatcaaaagtagtgtccaaggtgctttcgagttgttgagtatattttacattgtcttgtggggtgttctttcgctttcacatgttgaaaaatagctggtatttcgataatggagattggggataattctttcagagaatggcttcatgacaggtttgagagttagagttttgaaataaagcatagagctgttatgttttgttgggcattgtagtctctgcacaatgataaactttggcatgataggaataagactattagagaggtaatttctttgactaaaggaaattttgatcaatagagatgtgctcaagataaaacttttgattcttctttgttttctttacaagacggcgaagggcatgagtattgaattgcaccagttagtaatacgatcaaaatcaatgtcgatgcaactctcattagtaatctgaacaagcatgggtatggttggttggcatgtgactcttctaattagcttattctggttgggacaacaagttagatggatgtggttgaccctgttcttgccaagtgttgctatatttttaaacactacgcaagtatacgcaatcaagtagtaaatctcacacaggtgaggtcgatcccacagggaattggattaagtaccactaaattatacttatgattctattcgg

SEQ ID NO: 303580 - DNA, 2211 bp, Cannabis indica
aacccttgggcgttccaaattaggatattcattgttgaaggcgaccctgaatctcagggtgcgcctcttccgtattcttagtggttgccaaatcccccatttgagaagtaccatccactttaccctccacctttcctttctttgctttggagtctttcttcaccgaaacctttcttctattttccttggacatttcttttgaattacttcccaccacaaaggatgccgagccttctaagttttgagcttccatagaataggatataggtacattgaataggttgttttctggtatagttgtggccattgcagtgttggattttttagttttttcatagccagtaaactccatattgtctaccattcttctcttgcctcttccattatcatcccatgttacattttctctctcttgaaccttgtcacttgaagtcttgtctttggcttgtatcatttgtattttcctcccttccttgatggttgccatggattcttgttggctttcaatatcagcgatcattttgtcgacccctttaagtgtgtcttctagtggcccaaatgaattgtgaattaccgtatcatgtgttacccccattgctttcttagtagtgtgatccccttgaagcttttgattgtccatactaagttggagcccctgaaatccatctcgacaactgctttcacttttcagccaagtcccgtaagcatttacaacctcatttccttccccttccatagtaaccggttcttgatgacattctttgtaacaatggccaatcatcccacatttgaaacacatatatgggagttcatcatacttaaaggctatccacaactttttgccagcaaacgagagtgagaaccccgggcaaactggctttttgattgacatccaaacccgaaatcggaagaacccatctgccaccatctttgaaatgtctgaattgttcactgtgataacctcccctgtttttgccgccattcttcgtgtgttgtttgttgtgagcagatcgatcggcactcccaaagcccttccccaaattgggaaattaatcaagtcattattccaagattcattggaattctccatcttccccagaataagcactccatttgataaataccaaggcattttagttagaattctgttttgaatggattctgatgcaaaagtaaaagtcaagaaaagacctgattcgtatttttccttgattttgagattccattccgcttcctttaatcgccaaatgcctcccagaactttctttaagaaactccggctatgctccgtcgtagtacacagtcttccccgtaaattgcattttgcaatcgtaatcgagaggctcttatcaatttcccattcctcatcgtcagtgacttggaggttatgggtcttcgccaacagttcttccatggaggaggatgaaacacaccaatcccaggaaacgggaacccttcaatcgagggaggaagacagttcactcagacagagcaagccctagcagagcacttttttcaaatataatggtttcagatttttaaccgtctcagttgcacctcatcccgtatgttgttttcttataaagagtttcctctcaagttcattgcttgtgttttactttttcttatcttttatacaaatccccatgattgtcaatattctttggccacacaaataatactctatttttcacaatttttcctatcttctttacaagaatatttattctagttacttccaatgaccaaattaagtgcttcattcctagcttggtatgcaagcaaaaaagacaagtttttaaagttacttacattggctaggtcaatccaacaaatcagatgttgaagagaaatagctaatacataattccaaccaagccaattttaatctccattagaacccttgctactaacaatcaaagaacaagtgggaaattgattccgatcccgttccacacaaaaggcaagagcaatcttccaccaaatttatgcgcttcaacctgttcgtagtataacaaaattaatttacatttaaatcttaatttatgtttaaattagatgttataaattcaattcactaatcataattttataacaaatttattagttatattatttaaagtatttaaatttagagatttttacacttggtgtccttttttgtcatttttttacttttttgtcaatgctgggttatttaaacttttatac

SEQ ID NO: 303581 - DNA, 844 bp, Cannabis indica
acttaattccgctgccatcactgtaagttattcttaacttttatgtgttttgtttttcgttttagaagttcatatttaggttgttaaatcaacatacttgtgagtagatctaagatcctagtaaaaattaattccaacaattatgacatgctcttaatttttttcattgtgatcatttttaggacttatagaactttttattgggttcaagaatagaaatcttgatttctaataggaaaagagttgctaatgttacaagatagtcctcaaggacaattccattgtggatagtcgctccatgctcaaaaaatatgcagtccctgattgacctcatgccccacaagttatagctaattcccattcgatgacatttgaaggcctgaccattcatgaattttcatatgttatcttcatttatgaacttacaatcaactcactttttgataattttagttaagagaattgcagaacagagtaattgcattattctaatttattaaagatagaacacgattaaaatatatatagagctaagctcttgatacaagggtagaagagggagttgggattttgttataactatgttacaaaatccaacaaactcactgacaaaaaggacatgtgtccaactaactaaacctatttaattaccatctcaagtatctaatagccccctcaaggtgaagtgtagaggtccttgacacccatcttgaagataatatctttgaaagaagctagaaataatggcttggtgaagatgtcagttagattgttgttggaagaaacgtgcataatcttgagtttcccttgttgaacttttttctaacattgggtgcagcggaat

SEQ ID NO: 303582 - DNA, 4917 bp, Cannabis indica
gggggggggacggggaggctttttatttttatcaagctggcttttactgttgttttctcttattttttgtatatcctagctggcaccattttatgttatccaatacctgtaaataagggaaatggaatcatttgtacggtaacttataattagaaaagagtagactcttgtggagacaccaatcctctcgaaagattgaaaatttggaaagacaggcctctcaaatgctcgatactataactttgtcactgttttttcagaataaagatcacttgaagaattcattactggtgtttattttgaaaaataactcagactatttccactcttacgattattctatcattaacatagccactaaaacaaaactaggaaaaaattactaaaagacctgaatacaaaataacccctgtccaaagccattccctcggtctcctagagtaaacaatgtgtattggggcttatcaggaacttgaatcaaaaaagaagttcaagagtttaagaacaaacaacggaagagaacataccagtaacaaaattcatagcttctataaacaagaagatatcaaatgacaattaacaatggcataaagtccacaacaaaatgtgtattggggtatcgcctgtcggatcccactgcccacaatgtgataatcaatagagacgtgatatgtttagaagataagtagaacaagaagaaaatgatagcactttataagaaaaaccaaagaccattatgactcaaactattaacaagaactagatttctactgaagcagcactagagcacaaactagaagggcagcaagctgactcaactccacaagttcgacgaccaatatgagaaaggagaaaacaagcttggcactaaggctacgttatggagagtaatgttgcatactgcctacttatagaggatggagagccataaacttcccatgaggctacaaaaagccaagaagcattgctgtggatgacagcaatgcaagaagaaatggaagctctacataagagcagaacatgggatcttgttccagtaccacacggaaggaaggccactatgaacatatgagtctataagaccaagttggcaatgacaaagttgagtgatatcatgctagattggtggtgaaaggatttcctccgattgaaggaattaagttcaacaagatattttttcctgtttttagacttgcaacaattcaagtgatcttaacaatgtgtgctacatttaacttgtacttaaagcagttagatgtaaaaactacaattcttcatggagagcttgaagaagaaatttatatgcttcaaaaaggaggatatgaagaaaaaataaaagagagcttcacttgcaagttcaacaaatctctatacgatctcaatcaggtgcgatatgttggtataagagatctgaatccatcaagaaccttggatgtaacagacttagtgtagatccttgtggcaaacaagattctagagatgcgaattcaccaagacagaaataatgagaagattggactttctcaaaaaaattaactcaacaaaattttgcatcgctttaatatgcaaatttgtaagccaatttctacctctctctctattaatttaaagttattctcaaataggagtcctaacagtgaagctagaggatggaagtgtctggagtatcgtatgcataaacaatgggtagcttaattttatgttatgatttgcacaagaccagacattgcacaagcaatgagagtggttagtcgatacatggcaaatcccggtatagaacattggagtgtttgtaaagaggatcttgagatatgctaagggtactttcaaatgttgcattaaagatggagaattagactttactgtcaagtgctacgttgtttcagattattcaggtgatcttgataaaagtgaaatccaccacaggttatgtaagttaggttttaaaactacagtctatcgtggctatttcaacgacggaggcagaatatgtcacaactacacaagctagcaaagagatcatctggttgcaaatgttattggagtagtttgagcacaaacaaaagaagattgctttgttttgtgatagtcaaagtgccttacacttgacaaagaatccttcactcaaagacaaaacacaaagaaattcagtattattttgttcgtaaaaagattgaagaagtgtggatatccaaaaaaatccataggaatgacaacttatcaaatgctacgacaaaaccgatcaataatgacaagtttatatgatgtcgatcctctattggcctagcagatacataagttgcataaaatgataataagaagtaatgacttaaagtgggagaaatagtaaagttatatttaattaatcatttatttaggaaattcttaatttagatttactaaataaaataatgatttatataattgttatttctaggttagctaactattttcgtagttaatacacattagacatacctatgaactaagatgatgtaataatttctaaatcatcttataaccatttcgtagaaactaactttcttttctgtgttttcttctcattgtgagtgctgtatcttcttcttaactactaatatattttctttaccaattcaaacttcaactttaagttgttgagcaccccaatcccaacaaagactccatttgaagatttttagaataatcgtatgtttaatcgtcgaaaatagttgcatgttaatacgctaattacaaaaggttgtacaatcaatttgtcaactaatatactacaaatcagaggtataaaacaaataaatataaacaatctcaaataatttggttttccctactgataccaaattaaatacataatatttacttaattctagaatttctctcaagatgggttatgtataccaaacattcccaacttcctcaacaattcatcaaaagtaaattcctgggaagagttttggtgaaaatgccgactgtttgaactctgaatggagtataaatagtttgaattgcagcactttcaattttctcagtgacgagaagccattttatgggttgtgccaccttcattgtggcaaggctcattcaagaaaacttgtatacaagctgtgaacattccctatgttcacacctcaccactttcattattccccaaggatgtaaccactttcacatttataacttgaagtataaaagggaaattggaaactttaaaggaccatagttcctgaagtactcctctcagttacatctcatgcccattatgcatcactgtagacattgatctgtatgttattacttttctgtaatagaagtcctttcataggattcatcttcaagtaccttaggattctagtaaaaactttcatgtgttcttcagtaagattgttcatgtactgtctgacaacactaactgggaaaccaatgtcaggtcttgtataagatagatagatcaagtttccaactatagcctttgatactctccccatgtccactggggtcctgccgatttcttaaccaactttcttgctggaatccattgaaattgacagcggtttgcatcctaacattccagtttcttttagtaagtctaggacatacttatgttgtgagacaaagatgccaagttttgatcgagctatttctgtacgaagaaaatgtctaagattaaaaagatttttaatattgctttccttagataaaaattcttcccaccacctcctcacatgtcaatcttatgtcatctgcataaataactaggatagatatccttttactttatgagaacctgacgaatagagtggtctatttgacattgagcgtagccattctgaatgattgacttagtaaatctatcgaaccatgctcactgaggattgtttaacactacatagatatttcttgagtttgctaactgtatctttgtttgaagagttctcaaaccccggaggatgcatttgaggttaggctttatatttcagcttccatgatgaaagagatgcttgaaaaaaaaaaacataaaatttgtggcaggtgtgattatggtaggaattttttttattagaattagaaacacccataccatgaaaattcgtatgtttattcctcaaaaataattgcccattaataggctaattgcaaaaagttgtacaatcagttttgtcaactaatatcctaaaaattagggatataaactgttagggaattgggatgctcaacaacttagagttaaaaaatattttactagctaagaagaagatccaattctttctcaataaaaagaaaacacggaatagaaattaattctctaagaaatgggatgattatgagatgacttaaaaatgattacaacatctcaatttatatgtttgtctaaagcatattaacagcaaaaatagttagggaacctataaatatcaatttatataagccattcttaaatttagttataaactagattaagaatttccttaataaataaatataactgtactattttaatattctcccacttgaaatcatattttcttattcccatgttatgtttcttacctatctgctaaaccaacagaggatcgacatcatatgaacttgtcattattgatcggttttggcaaaccatctgctaggcggtctttcatatagactttttggatatccacacttccttcttccaccttttcactaaaaaaaatctttctggaacatgggatgaaaagagtaaagatcaagctacctttagtaaatgacaatttttgcgtacagccacgccattttgttgtggtgtatctacacaagaactttgatgaacaattccattggattgcaaataagatcaaagtacagaattgaagaagtcacgagcattgtcggtttttaacacttggatgtttgtttggaattgagtttggatcattttgt

SEQ ID NO: 303583 - DNA, 2550 bp, Cannabis indica
taaaataatttccaacagtttctctgtcttcctacaatctgcctgaatgtaaccaaatgagctgtaattcttgcatttcgcaggcagccattcatagtcaatagcctgatctacaaattatctaacttcattaaagtaccacaaggatctcggagggctttctaagatatccatttcgaccaaaactcttacaaattggattcgagtcctatctttggtaaatttgtctaccataataggattccctattgtgctaataagagcactgagagtcttgcttccccagtattgcagggcaagtccatggagcctaatccataacaacacaaatttgactaatcgaaccgtatcaagatcagatgaccaaggcctcactataataggttttttgtcaaactgaatcatgtcgagttccaacacctgatcacgagtagcatcatcattaaacttcaccattgtaagccccattgtcattctagccatttgagtaatgtcaagatgaccccagattcttcgaataaaaccctcaaaaattagtgcaggaacattggctccaagaaccatacgaatcacaatcgaactccagtgcgcctcttcaatctttgcttcctcaatatctactttagcgatttttaatccattcatagccaaaggttttgtaaaagaaagcttagggtcagaatagaacagcttaccatctgtgaatttcttccattgattctgagcacttgaaagaaaatcctcttcccgatctacttcctctacccaatttaagcttctttcagccttagcatcttcatcaacgtacagagctttctccgaatctccatcgacgtcaacctcttctggttgattcatgtccataaagacatccatgacttcatccttggctggagctccaccatcctcgattcatactgcatgtttctcacctgaaattagctccgacgatcacgtgatcggctttctaagaaccctctctcttcaccatggaaagagaaagagagaagctagattagcatttttttcaaaaatattattagaacaaaaaacacaaaaataatttgaaaaggagataaaacaaattagattatttttagataatatgaacatttttgacgtgtcactactgaagatcattttataataggattgtcatcatgtagctacacatgaattaattttgcatgctcttaaaatgaataaactacttctactattcttattttatcttaaatatttagactttctaacttgtatggcactatttgtggcatacgttgcattagtaactgaaattatttaaattattttttagcaaaaagaaatactgaatagtgttagtatccatgtgctacactctgttaagtgttgattgagttaacatgtatcattttatgatgagaattgctaaggagtattattttaaggtgtcaaacattacgaaatatgcaatattagtgtatttgaatatcgtatcccacgtatttagatttaataaataatataaaaaattactaactaattataaaatgtcactacatatagtattgcacacctcagtgtgagaattatagatagaaaattcataactttctataaaagacaagaaattgaaggcttctttcttggggtgtacctttttttttttggctaagaactttaattatgtagtctataacttggccaaatgggcaatgaccaatgaaatttaattatgtagtctataacttggccaaatgggcaatgaccaatgaaatttctgtgttcacatagcaagccctaaaagttgattgcaatggtcttattgccaaactaatttgttttattatttaactagaaaataataccgcatttcgaatgatttttataagaattgagaatttcttgtattaaaaaatatatttttttatattaaatattacatattatattgtttaaattaatagttattttatagttgtgataccacttaaattattataaaaataaataagttaatatattgtttccttattcatagtggaaagaattaagtcacttaattattaccgatgtaaaatattcctctaaattatttttatactgagttttgtgaccattctcatacactctatctatcttacatgactaatagaaaattgatttggcactttgacgtgtttttatcaaataaatatacataataaataagtattttgtctgttatcactaaatgtgttttgtgcgaattacattatatttaaagaatttatatttttatattaaattttgtatattttacagtttaaatttctaactaatttatgggcgaatagtgttaaattacattaaaaaatattaagagttatataaaaggtgagactttttctttagaaatataatatcatcgtaaccgatttataattatgtctcttagctatttataatttgagtatattggtgtccaccaaagttgcattatattttaggtaattaattatgtgagataaatatttattaatgtaaaaaatttgttgttgttataaatattaataattatgtggatgt

SEQ ID NO: 303584 - DNA, 3231 bp, Cannabis indica
tttattccgttagcttctatcccggacaatttatattgcaatgaccgtaaagtctaacttttttctatttatatataagcagaaaattcttaataaaaaaaaaaaaaatctaaccagtttttaaacaatttcgaaaaaaagaaattagaatgttaaacaatattataatatatttttttttacaaatgttgacctaggcattttgggttgtttctaattaagtttatgaaaaaatgttttggttatgtttttaaataatgaagacttaagtaaatttggagagaaaaccacaaacttgagccccaagaaacagcgcccaagttgatttggtgctggcctagtgcccaggttaacaatcaattacctagtgtgttgattttgaatgcttaaatgtaaatctgattcgaccaatgaattaggattggttaaaaacggggtatgagacctcgtcctcaagttcaagaaccttggaagtatcaattcccggagctcaaaaatagggtacccaacgcccaggcatgacaaatggcctagcgcgttgggttctgcttatccgattttgattctgttcgactgtctgtctaattttttacaataactaagattcgtgaagtcagacaagtcaatttacaacttcgcatttctcatttccagcatgggaaactcactcgaaaatgaagaatttcgacacactcatttctgcagaacagtactaacatctctgagaattggtgaccagcttcgccagaacacagtaacagactaagtggtgtcaaaatatcacttaaacatcttaaagtatatcccttggacatttttatacttaccgatgggtcatgaatgccttcagtaaaacagtcataactcactaaatattgatccgattaacgcaattcaacttgcattttaaaactaattcaatgctctatcaagtcatctctcacacttcaatcataattctgaagctatcaacgccaaattttacccaagagagttacgaaaataagctctgggttactcgcagcaggcctgtcgggctctgaaaaatgactatcactatgagaagctaatatttaccattagatcatcatctacggtcaaaaacatctaattataatttttctcttatttttgtgaacctcatagctcccttagctcattttacacattcagaaaactacgcacacggtcaaaacttctctctagtttctttctctagaaatcagaacttctgatacttagattgtatattgttatagtagtggaagacttaccgccattttttatttgccgtgaaataattcttggcgcacagttagtgcttcgattattattatattcgccaaatatccaagaagtatgtttagaccaatttttttatggtcatgacaaaattttaagaaatttaaaaaatttaacacgttcaaaataaggttcaaagtatatgttgtacgcgtgactcttttattttatacgcgtatgaagtaaactatttaaacattactttctgtattatattctgaatttcttaaaattttataaaatatcttataactataccttacacgaatatgaaaataaaaataaattcaaatttttttagatgccaaaataagtaaaatgtgtagtgcatctatttttaagagtgtgcattaattagcacatatcaccctataataatatacttcctaaatgaattataaggctcatgcatacaattatacgatcttaaatcatgtaaacacagaagaattgaatatattaatttagcttaattataaattagtcttttttaattttattttattatgtaccaaaatcttcatttgtgtccaatcgcgtgcaaattgacaaattgctatgaaataaaaaatgcataaagatatatataattaaggactaagaaggattatctttcttcaaagttagctattaatttactaatactgatcaatctatatatgtgttaattaattaataatctctagctatatagatatagctatatatagtactatagctcatatatacttagaaaaacaaatattttatttataacgattaaaatggacacgattgcgttaagaagaagatttcggcacagattggaaatattggtaaataaaataaatatagttatatattgtatgtaccaaattatattttatagtttttatgttacaacacatatattatatatatatatatatggtcagattatttttgtcttcataatatataattataaatcaaactttttatatacgaggatatatatattatgataatagtatgcatattattccaccagaacaattctgaaataataatttacaattaatgttacaaaaaatattaattagttgtacgggtgctagtttttttaaatatacatagataaattaatatgcaaaaaataattcacaattaatgttacaaaaaatattaattatttcaaactctatttcatgatcggtcccatatatattattccaaactttttgaaaacttgttaaaatatatatgcatggtataattataatatgtacaatattatatatgttcggttcggtcaaataataaggataatgttaacacaataattaactcaatattaagcaaacaattaatatatatacatgaattaattaatcacctatatactgattaataatatcatatatataaatatataattttcatttaacaaaaagtaaagcaatccctcaaagcactctgtatatatagctagcactattatttaacaatatctatgttttgaaaacatatatatgcaaagaagaaaatatttaattatgtaacgcagccaattaatgtacatatatatcgcattagcaagttaacaattataattaatatatagataaaatattattgtgataagcttaatttattcaattggaaaatgagatgagataattaatatacatgcattcataccaattaggcaaacatatatatatatacattccttcaaccctaatcaaacaacaacaccaaacctctttataaatacacacacatatatcattctaaaccacacactaatctttatatcatcatctaaaccatacattcatagcaactacaattatatatatacttatcaaattatattaagtatattattaccaataccatatggcttattccaataacattttgatgatgaagatgagtttgttcattttatacccactaatcatgttg

SEQ ID NO: 303585 - DNA, 2518 bp, Cannabis indica
agaaaagagtggaccatttctgagcatatagtgtttcaaagcattttccatattttgtttacttgggggcatacaataaaccaatattttatccaatatagagtttcccatgatctactcttacaaactgtggataatgataaaattattcccgtaggtgtactgtgtatatggtaaatctgcacatgtatctaactcacttttaattgtacgaaattcattggataatcataattttttttgtcggtatctatatataagtagaatttcatcaaccaattaattggagatgccaattctactatccttaaggaagagatcttaaattatgaatttatgcattattttccacaagtcaaaaagtgcagaacaaattcttacaactttgataaatgataattaagctgtttgaattttgatcaagattatgatatacaaaattgtaagcccttcttgaagggtctctatctcttttaagagattcttgtttcctccacattattaagctagaatcaaataaacttttctcaattctcatatttttggattaaagattagaagcataatattggtcgagaactatatcgcaagttgacagatataagattaccctatcacttcatgagtgatatttttatattattcgtaaaatatatatatttcacggtgtacaaattaactaaaaggcaaataatataaaagtgaattttatgaatccccaaaagtcaactgggcagcctataaatacatgaataattataagttacagctgcattgtatagaagatgttgagaaaggtgtggggttcatgagttaatatatttttaggttttgagtttcttgcatgaggataacagagagtgaacatgagccaagaatgacttgctggctgagtctttttatgtgttgatttaaattatatcgacaataagtggctcttaaaccggcaagcttctggctctgtttggctctctatattcccatgtgagatattaagaaaaccaatcaaaaaatatatttcaacaagttgattatttatttatttattatcatggaggagaaaaggtattagactagtggtggctaatttcttctaaactgacatatggatattggtgtatttattaaatatctgagctcatgactaattattatgattattttgaagtataattactgtaagttaaaataaattaaagtttcagctataataaatatgggttgctatacaaatttttgttactatttagattgcttcgttaattgctataagagtttctatatggaattctattaaaatataaaaacaaatattttaaaatgtaaaaataaaaaaataccctaaaatttatacacaaaattagtaaacccgcaaaaatatatataaggtatttctttatattgtgcacctttataaaagtagtgtgtaccagtgtactttataaaaagttatttggagtgtatatcatgtattgtagttatggtaagcttaatttattctaatattagttgttaagttgtttgttacagacttaagttggcataacaacttggttccacttgtatcagctcatgactattatactctgtatataaacatggtcttaattaataaacacactttcaacctataatatggtataagaagattaaatctctttggaacgcaacacctttgtcttcatttgaagtactctacctcgccatcgtcattgtcctggctagaactcgagcaactagaacctggactgccagcatcaagattctgacgagtatacttcttaagctctggcgaccaccttggcctaattttggtgcctggaacaatactatttttctaaaatgacgcttcctcaattactagttgacgatccattccacaaccattggtttcgatgaagccaaatgctcacgtcttgtatttttcaatatgtgacctctaaaatcaaaagaagtataatgttcttatacaattacagagctatggattgaaatcaatttgcacttcaatcagggcaaatgacctcgaatctcatcaccttgcatcaatgtgatgactttgtaagtgcatattttggaaaactaagatctaggcggtatgaaattaagaaactccgtccaagaatcttaggtatttgtgttgttttcacttattttaccaaaattttatttactatcacgtatgttgattataaaataatttatgaaccttagaacatgcttttccaaaagagaacataaacaccttaagattaagtatacttatgtcgaccttatgtcggtcttgatagaattataaatacaataattactgaggaaacaacattataagtatgaatagatgattaactattctcatatatattatattgatcccatatgttaaaataaccaagaaattagttgtctaaaccatttaagttcattttgattacttaatgaactaacaagtagtgaatcttaagaaagcgttaaaactgttaatttcatttttggcatatttaattgacaaaaatat

SEQ ID NO: 303586 - DNA, 4607 bp, Cannabis indica
agaagaagaagaagagagaagaagaagaagaagaagaagaagaagaagaaacaaaaaaaatgattagttttgtaggttttagtttttaatttatttaagttttagtttaagagagaaatataaaaaaaaaaatgaacaactgagattaaatgagaggcgtacacatgcaaagttagtcactctaacaaaatggggatgaacaaacttacgaaaaatgtgatgttggggactattgctgctatttttcgatgttggagacttatttgcatcaaacagaactttttagaaacttttactgtaaatttatctatttttattgatgtaaattaatgggtttggtattttataacaagcttatattgtactgatcatctatcactaaattgaagcatatagtcatatatatataactcagagatgggtgtaggatagacaatttcagagcatattggaaagaaaaaattactaaaattttgtgatttgttaccaaactaacattaggtattatttagttttttttttttttttgtaagaactcatgttcattaactaggaaagatagttgggaatcacagggggaattccctccccttatgaaccagcagaaagactatcggttctaacctttttcgcaagaccatcagcaaaacagtatgcttaatacaagaaaacttacaaacttaaaatgtttaattaaatctaaaatagaaagggaaaagttaagtatcttccagtctgaaggacatttgtttttttgccaaagcttgtaccacaatttgagagtctgaaagcacatgaatttccttccatccctgctccattccccaagaaagagctacctgaattgctcttaactatgcttccacgataaaactggctaccacctgattggaattaaaggcccaagagccatcttgattgtttatcattactgttgcgatcccagcagagtcattagcccaagatgtatcaatgcatatcacctttgctatttctgacattgagtgcttccctcagttgacagcttcttaagaacctcactagagccaaatcgcttgtcaatgttctctaaggtacgcatctcaaaaaactctttgaaggcggatctgactttcgcaacagcgtaagaaatatttggaggactcccattaaagcaaataatatttttttgagaccaaatctcgttaaaaatgcaacatgtaaaaatgagaaactcaaacctcaagcagcccgagaggttagaaagcaggttttctaggaattgaatcaaatcaactcccgaaatcttatcaactaaaattggataagggccagaaaactataatgcttttgcgaatccacaatctcaaaaaagatgtagaatattttcgacaaaagaagcatataactcttttttcagccaagaaagagagtctactctttgtaggaagagccctactaagacttatccaaatatttattacaagtataggatggatattagaattccaaatcaatttccaaatgtttctcgtaggagcaaaataagtagactggtccacacaattgaagatgcaggtaaggagaaggagatcaaaggcttagaggaccaagttctcactttttcaaatgagttgaaggatgaaaaggaaaaagttgcggcgttggatgtggagaagaagaaatcatacgaccaagcgatcaatgattatacctacaccatcctaaccagcattcttaactttgactttgcagtttttggtccagaaacagtcaagatggcaaatgcctttcgcactatgtctccaacaaaaatccaaggcgtgagaactccttttcttgaaaatactgcttatgagatcacataaaatcttgagaagatcgcggataatgttgatgctcctaatttttttaatttattttttattagaggtacataggtactcgcaatttgtacttaattcaagagacaaagttgcctcgtgcctttaatcgcacatcttgaacttcatgtccctttgaggacctttatttattgaaaatattttctaagtacattttctcttgagtagttagttgcttatgcaattacaaatatagcttagtgcaattagctttttcttctttgattatttaagtgcaatttgtagcttggtgcaacctttaaagataacgatctttaaataatgtgattctaggaacatctcggtgttcattaattgataaaaataacctagtaaataaatatgtgagaaaattttgaaaatctacgaataatcaatagtacatgttattaatcatggggatacataaaacctcttaatagttagggaattaaaaattctgaaattgactaagtatatttatgcgagtactactgataataaaatttcaaatgttcagcgttccaaactctgttgaaaactgaaccatcgagattagaaaggcagtaagttgcaggacgtttttttttgcgattagataagggccttcccaattatcgcaaaaaactccatgctttgagttgcaagtattgggcatcactttacgaaggactaaatctcctactcacaagtttttctccttaactttcgagttaaagtaacacgcagtgcgttgttgataggctgcaactttgacttgagcttgatctcaattttcttctagaaattctagatttagatgttgccctagctcgttatcattaaggttgaaacatctcgacaaagggatcgtgcggcttcctcaactgagaccatggatttgcgcccataagataatgagaagggaatctcactaatcgttgattgtggggtcgtattgtacaaccacattacttttggaaactcttctgcccaaacaccatttctttcctcaagtttccctttgatgatgtgtttgattatcttattgactgcatcggttcgtccattgctctggggataagtgactgcagaaaatgccttctagattcctaactcttcacacaaagatctcatctccttacaatcgaacagtttaccattatcaaaaattagtttgcaaggaataccaaaacgacatattatagctctaaaaataaactcgcatagtttggtagcaggtatggtagcgagtgcttctgcttcagcctattttgtaaagtaatcaactgcgacaatgacgtatttaactcctcccttgccattgggcaactctccaattaaattaataccccaaattgcgaaaggccacggactggtgatagagttcatattacttggtggacaatgaacatacatcgcgatacgctgacatcttttgcacttcttggcaaaattgaccaaatctgcacgaagcgttagctagtagtacccttgttacataattttcaaagccaaggaatttctagcagtgtgattaccgcatatgcctctgtgcacctcttggagaatatagtcgcattcacttctatcgatgcacttcaagagtggctgattgaaacttcaatggtgcagtttttcatcatagataacatatcaagccacttgataacgtacttttttggcttcattcttgtcctcacagagcttccccatttttaaaaattcaatgataggggtcatccacgtgacctgactatcattgtctatttgtataacttcttctcgatcaatggttaaccttttaagaatttaaacaggaatgacatctagtaattcaaatttgcgtgttgaggacagttgggccaaagtatcttcatgagagtggtaagctcatgaaggtattcgactaacaacaaccttcttgaacttgggcaataactcgcaagtgtaggcgaggtatttggtaaggcaaccacctcaggctaaatagtctttgttgacttggcaaacaacaatctgagaatcactgaaagctttgagatactcgactttcattttaagagaaagttttaaacctacgattgtggcctcattgttagaagcattaaattcaaatcttaaagccgcatgaactttaattttgtttggccttatcaacataattcctccacctgatccttcagtgtttgaggctccatcgacataaagagccatcttgtacctttgtggacttctagatcaagtcgctcttctgagattattcacaaggaaattcaagtataaaattagcaagggcttggctttttatcacggattacgatttataccggatgtcaaattgatcgagctcaattgaccatttaagaaggcgtccagatgtatcaggcttggccaatacttgtcgaataggataattagtcaatacctcaattgtatgagcctaaaaataaggtcgcggttttctggaagctattatgagtgtgaaggctagctattccatctgaggataacatgattctacgtcaagcaaatgtttgttgacataatagatggtgtgttgtggtcttcgcgaatgagcactgaactgattgcatagttagatactgcgaggtaaattgataatacctctccaggcagcggcttggagagtattgggggcgcaccagttgcatttttagagcctaaaaagcctcttcacatgtgttagtccattgaaattttttattaccttttaaaatttgaaaaaattctttgcatttatca

SEQ ID NO: 303587 - DNA, 1610 bp, Cannabis indica
attggatcgattggatgatgaaattaatttgatcggatcggatggtaaaatctaacatccaatatatgattggatcggatctggataggcctaaaaacattggatgtgatccaatgaacacccctagatttattaattttctaagttttttgttttctttaaaaattagtttttattaatgttattttactaagttttttttttgaaagctgttactttactgagtttgaatttaaaaaagttaaaaaaaaaataatagttattgattcatttatttagttattttgaaagggtagtaatttattatatgtaaaattctcaatttgttcattatttttcaatcagtcttgttcttttaattgtagattttaaaaaagtgaaaggtttcttatcatttttttttttaaattataataactaatttcaaattaattacacactattcaacattaattatcatatgtatatgtatttaacgcaaaagttaccgacaaaaaaaggaacaaaaaaagccaacttatttgagccaacttacgaatttctgactgaattagttgagtttttttttagtttcaactaatattatatattttaattaatgttttatatgcacttgtcttaataattttattttatataaaatatatatttttaattatattaattttttatttttttcttccaattcgtattcataagatatacttattaaacaaaaataaattatatttcatatattataaaaaaagtttaaaaatatatatgaattaaataatatagaaaataaaataaaaaataatatgagaattttttttaagaaaatttaagagccattttaaaaaattataagcttaatttttttaaatattaaagtgtactttttattttgtatggtacaaattaaatttctcttttaattttagttaatttagatgcaggagaaaatagaggaaggcaactataaattactgtatcaaagtattattgcgaacaatatagtttataatcaaaatacaataacaagattctaccaggaaaaaaaaattacaataacaaagaagaaacaaacattgtgaatgctagtttaataattgtgtaaaatagttaagacattgtgtattatcatgtctttaatgtgcttaatttacatatttctgagaaggaaaaggatgactgttatttttaaatttatggacaactatatctccatggaaattaaatatttttaaattaaaatattctaattggtaaaataatgaaaaataatgaaaaatcatgtgagtcaacccgctgtcctacaagtcgggttgaaatcggttgccccaaatttattctttgaacatattatatactgtggaaacaagttatataaccgattattagaggttaaaatgacaaaaaatgacattttctgtgtgtcacacatctaaaagaaatgaggtactaaataactacccttaattataatattttttgaaacttaaaaatgttaatatgggttgggaaatttacacagtgtactgtattttcccattttctttcttttatactgttacacgcccaaaataatttttatactgttttttttttttttcgaaattaactttata

SEQ ID NO: 303588 - DNA, 1351 bp, Cannabis indica
aatcacgtaatacgcctatgctagttagggtgttacactacttctttagtagccctctctaccatcaaggccacctgatacaacaatgaaatgtaagaaaataatgtacattagacggaacaaggatggaagagccaaagcttacccccactgcctgttgtttagcggcatgacccaaggcgaatgcatcaatgctactacaagttgcccatgtttcttgaggaagcctagatgagctactaaccacttggtctaaaagctcatcaataaaaagtgcagtttctctccccaccttgagcgccatcaagttctcttcaatgtccactatcggcccagcgagaacagtgtcaaagaggccttcagaagtttcaaccctcttcacggctgagagcctgttgactctcatctgaaaaatcctcctttcctcctcctatcgcctccccaaggcatgttcagactccctcgctctctttatagtagcaagatcaagaaggatagtcttcatagggaagttgaagcccatagaaagaatctcatgtaggaaagtagatggctagtgatgtggttgaaacagttggtgttgttgtcgctgttactgggggtattgttgatgggactattgagtaggtggtcagttaggtgaactattggaacatactctcgtgccttttccttttccctacgaaacctcctccccttgcaaagcttgtcaagccaacctctctcggtgggcctagcattcttgctttaaggagtatatgcaggcacaaccaacataggataagtgagtgaatccaaaattataaatttgggaagagtatgtgctatatgagatccaaagtaagaattaaatatatggaaaagtaggaatggtgttatccttgagagacatgttcagttgtgcccgcataataacaataaggaatatttgattcgttgctataaagacttgactgactggccctccttggaggaggttacaaaaatgacaaatcttggtatattcttcactttggataggtgtcccaagagaattctaaagttaggaacactcttaatataaagtaaaaatcctaaagcacgtgtctattgggttttatgccctaaataaaactctatttcaatgtaatccagattattcaatatcaataaaataacataagtatttttcattcatttgagtatgttttgtttcatcttatcaattgtttgtctatttgatttataaattcattcaaacccttttcacatacttaatcaagtatattgtgttgtcaacacagtggaaagtaaacatgactatgtgaataaagattcctagatttatcggaacactgggttttactgatat

SEQ ID NO: 303589 - DNA, 2385 bp, Cannabis indica
aagttgtgaggcacactctcaacaagtacccatcgaaaatactattaaattacatatttaatcaatcttaaataaatcaaaattgatttagttaaatgaatattaatttgattgtttgatatatgatttaaataacatatcaaattacttacattgattaaatggagtgccaaggccaactccacatatgcacctaggagttctataatcaagttataagttataatatacccatccaacttctttaagtatatgcaaagattttagagggctgatatggaatattttttttagggtaaatccgagtgcctaagtgaaccaaatggctcaagtatgggagccacaaaaagacaaagtatatttcgagccctcaagatggtacaggtggctcagacatgtagctacctagactcagagaatttgagccctagagaatggatgcagtgctcaaatttgggagaactgatcaatacaatttcaagccctaaaagagcttagagggcttggatttcgggtagaatgtcaaaattagagtcctacaatgaggagatagggctccaacttagagaaagaattccatgcacactggagccctagagtgatgtgcaaggtctgggtataagatgagtaaatcaagggatcactcttctcaacaacacttctaaagatggataattctacatatgcataaaagaggataattgaactatctcctttactttagggatatttaaattggactttagatctttattttaatttatgaatattatattaaaattttaactgatatcaaagcaaatagatatctgaatttaagtgttttaatatttgtaaatatcttccaaatttaaaggaatattttggagatattgtacctatacatagctaactcatttatttgtaaagggagaactccagaaactttgtgaacccttgcgaacttaaaaactcgattgagaagaaaactcttggacaatataattctagagaactatattgtcgagcatagagatcaatataagtactaagtagattagcctattatagtcaaaaagtggttaaccacaataaattcggtgctaatcattttttcattattgttcatataagatttacttgaaatcaattattcctgtgtttgatcgctttattacgatcttcttatatccattgaccaataatcgcatcatcaaaacaaattgaaaatatatattcttttccttttgtatttttttcttcccctccggttgaattctctcgccctctttctacctctgcacctctggttcttggcacgctaacgctgcgtccagtctctaaaattccaaaaacctataggcttggacaacctcacactcaacttcctcgcctccaaactcccaagtaactattgactcaaaaattaaattgttaacgaaagtgtcgtttgataagcaacagtcgtatatatagaacgaaaaactaaacggttaacacaacaactttatattatgtcacccctgttcgttggtaatgggattatatttacctaaaattttattgatttgatcaacacttagagcactcattctaagtgttgatagcaaaaatgcttacaaaagcttgacttagaacgtttggtctatagtcagaaaaaaatgcatagttttttagagctctatagttatacaaagattacaaaaggtaaaaaatgaacgaagtgatccctttttagaagaaggaggttgaatatttatatttaaaataataataaaatattcaaataaagagaatattttaagaatattctcatcaagttgatctgcatcattgaatgatggcacaccatccacatattgattgtagatcttcaagacttgatctagtacattaatattgtttcttgatgaatagttaagatttacccatctcaacttgaatgatgtctgttgatcttcgagattgaacgaggtccgttattaatcaaattctgtggctctgatacctaaattcgtatttccctcgcgactcgattttttatgagaaggagtctgaattaatatttctttccttgcgaaacatcaattcgaaagagctttccaatacgcttaaaagtgcatcaattcaagttgtattgagtgagatatgcccaaaacactatgtaatgtgcaattgtctcctagaccaacaatcaggtgagcagttttgtttcacttggtcgcaaaacacatatgattccgaagatgtgcaacccctgttgtgtgttgagaaaaaagatgtgcaacccctgttgtgcactaggtagggtgtacagtggtcaattgggtcaggttatggcatatttttaccagctcttaataatatcatgttataaatatttaattgtaactcacccaattgaaa

SEQ ID NO: 303590 - DNA, 4813 bp, Cannabis indica
ggattttttagcagcttggagaaggtgtacacaaaattttcaattgagaaatatatatttttattaatatgtgtattttttatattttagacgtattaatagtttttagattatatttgatttaaatattttttttgatatattaaagatcatgtattattatgctagtaaaattttattaagaataaaatttttgtaattaaatttaaaaaacttttaataatatatttatcaacagcaatactagtctagtctacagttgggaaattatttcttatatattcctattagagtgtttttttggatattgacaatgttattcaaaacaaaaagagagatcaaaatctcaatggtattatttaaaataagtatcaaatttaggaggaaaaaaaaataaactcacaaaacaaacaatgcattaattagtatgataatgatagatgggggattgtgctgtcattgtaactacatgcaatatatatttaagctgatttagtttgtgtttactggtgatggtataaatatatttattttattattatttatattatttttatttacatatttattaatttaattttattatttttaaaatatattagtagtgggcattagcggcggaaccctgccactaatgttcgctgctaataatattattagcggcggagtcatatttttctgctaataagaattattaccgataaacaattatcagggaattaccgccgctaataacctatagctgcaaaattgagatttattagtggcggagtggcccaccgctaatgaagaaaattgttgtaagttgcaggcatttgagcaattaatcaaaaaacagacgaagttgttcttacatttatttttttgaacgtttgtattaattaaattatgtaattaaatgaaccaacggtcctgtcactacaacaaaaactgtcatcaggagcgactttttttgttctagaaaacctcctaattcgttcctgaagattatttggcgcgactagtcattcctgataacgcgtgcctgaaaatcgatatcatgaaaaaaatgtagttacgttgctgatgctaaattatttggaacaaagatgagttgttcctgaaaaataaatgtcgttccagaaaattaaactcgcagcttagtttttacacattatcaggaacaactgttttgttatcagcaacgaaattgtcgtttctaaagtcatttttcagaataataataattatttaaattaaataattttttttaatataacacttttttctattaaataatttctttaaaaactaaatatttttatatttgatactaaaagagtccttacattgcttttatatttaatactaaatattgcttatatatttaaaagagtttatactaaaagagtttataaatgttcaaaccaacaaaagtaataagctaaacatctaagatgtggactcattatcaccaccattttcattccctagagtctgttgcgaaggtgtaagttgtactcttggaatctgtgatggttgttgcgtttgtggcatcgacatcatctgtggtatctgtgacgtctgaggtacgtgcgatatcatctacatcatatgcggtgactgtgacatcatcagcataaacatctagaacatatgaaactatgacatcagagtagatgatgaagatgtaggaaaagtgacaattatatactgcccaattgaattaatctacgatattagaagcataatttagttcacaatatacttccattgctccaaaaacaaaacatttaataaaaaaaattaccaaaacgagtaagaaaatgaacaaccctaatcatataattttctagcgctttccaaaactgtcaaaaacacaaaaacttattctccgaaagcaaaactaagaaaaaccattaccgaatcagaaattcacataaaccaaacatcgaatatccttaattaaacactctccaaatttcacaattttccagtcaatcaaccaaacagtaaaaatctcaaaacctcgaaaagattcacaaaggttggatcaaaacacacagatccataaccaaattagatttaactgttagatagcatatgaaccaaaaaaacaccaaactcaaatacaatcaaatacttacttcgaacgagatgactcaggtaatagagcgagtgatgaatctaagtcagagagaaaaaagtgtaataggaaagagaagaagaagaagaaatgggttggcgactgtgtaaccatagctgagacagtggtcagggaactcacaagcagagacgaaaatttacacagaaaattaaagggaaaaaaacttagaaaagggaaaggggaccgtacctgtgagtgtgaggctatgaagtcgagctcgacaacccaacggcttatactcagcagccccgcaactagaatgcctcctctccaatcagttagcgaagaaagccaggaaggccgatagagagattaagtaacagaggtttattagaaaaaaatattaataacaaacatagatattatggtgtatatataaattagagatatgaaagagatatatatagattagagatatgaaagagatagagagatagatttagatctagagagatctagataaaacttactggagctcgatcgccggagggacgaccggttgtgtccttggccagagggcggaggtgctcggtcggagatgagagggcgaaggctgtgagtctcaaatggagggtttttgtatttttattttttttatcagactcgaaagtattagaaataaacagttgcgccagatgttgttgacgaaaattctccctctctcaaaaacagtaaaataatacaaaaaaatggggaacgaaaatttcatgccaaataaaatataagtcattttaagtaattatttaattattttaatatttaattatttttaaaataaaataaattttatctggaaagagtttgaaaagtcgcacctgatataccatgactattaggaacaaaattttattattattgatagtgttgcgcgtgaaacccttatttgttgtagtgaccgattatgtaagatcaagtgacacttgctttatatttaatggtgtgatccaaatcaatgttgaaactattacaaaagtggactaaagagaccgcgttccgactgaatcactatatttctctattgccctttatttttttgttccaatttttatctattttcacaacctaaacattgagtactcgttattttaagtgagtacttgcataattgttggtgggtgttcttgatttactcggatacttgaattattttgtgctgtctaatttcgaccaacacttgggataagctttgtaccccataatacgaagtctcatgaaattttatcaagctctacttgccaaacaagggtggcatatcctccaccaaccccactccttcttagcctggatgttgaagaattgttactttccccattctagcttacttcatgctaagtgtctttcacatgcttcttgtatttggaaaggcatcctctggggctgggatctgacacctgcatttcgatgctcataacaaaaatcatgtatgcattgtcggattgtcttatcaataatcgcaagcaattttacgcggaggttgcatatttaaacaaattaatttttcttttttaataaatctattttggtattaaatagattcttacaaacatattaaaataagaattgaaaaaaagagactactatatattttatatgaacttatgacggtgctacactctcaaaacaaaagtacctaggtcaagaatatatatattatatatatatataattagctatattcttaactaattaatgtatcacgtactagtatattaaaaaattaacgacttttattatgccagcaagaaatatggtcataggtttgtgtttctaggagaagctaaacaatatgaacataaatatttaattatttttccatgtccccacagagagaattagataatataaaaacaaatatatatgtaaactgaacatgtgcagagattggcgccaccgacaaagatgaagtgagagagtcaaatggcacatcctttcaatatcatacgatacaaaaatcatcacattttttgtttttagttatattgatattatagatatacggtccccaaaactatataactacatacatctacaccaataatacatctctcatatactagtctccattggattgaattacgtaagtgtggatctattaaataaaattgccaaatggaagataaagatcatttgattaataaatggtcccaacccaactggattgagtaataagttactatacttcgaccagtatgattatagagttgagtatgatgagtgatgatgagcaagcgacaaaatcatgttgggagctaacatgccatgcatgcaaacccattctttatccccgaaattttatgttctatgcgagtgatggagctaatcttcccatttacgtaattaaaactcgttatctcaactacttttcggtgcattaaatatagtacagactaaatatgatcaaaaatgccacttttccaaaattgtggtatacgtaaaaaagattaaacatatgttgttatggacagccatagttgtttgttaattcatatatataatgggataagttgagaaatatctcttttttttatatctattaattaattaaaaatactctacgtattaaatttcattaaagtctacccacttttatgagcgaattacccaacatatcttcacctacttaagtctagcacataatttacattatgttagagagtccaacattga

SEQ ID NO: 303591 - DNA, 3625 bp, Cannabis indica
atcatcatcaacatcctcctcttctccattttatttggataatctatctgagtatttattagaaccaaggccggaaatactaaagaagatgatggagagcttgaaatttcaccaccttttgattgaatacttcgacgcaagcttacaagcatgtcaaacatgcgaattgcttctaagaacaattcatcaaactcgtttggattatcggaaaatcagaaaggtaattaagatgagcaaaagggtattactactaacaatccatgattatgattatgatcatgatcatcacggccaatattattatcgagccatattcagagagctcgcttcgattgcattgcttagaaaccatttgacaattataagccctcttcaatatcgtgagattcgggaaagttacatggttttgctccgtaaactaacgtccaaacacaagaagatcaaaaggagagaaaaggtcattaagatttgcaagaaagttggaggagttggccttgtgatatcccatactttgctcttggttgccttgttagtatttgcattacatggcatatttggtcttgtggctgttcctgctgcaatggggtgctcttcaattcaattgggtaagaagagaaagttggattcaagggtgaccggaggtggggttggtgagcagcttgatgtggctgcaaaaggggtttttatattgatcaatgattttgatacgatgagtcagatggtgagaaggttacaaatgaggtggagcacaagaaatctgtggctgatatatgcgtgaggagtaacaagtttgagcttttgaaggaggttgtcaaggagtttcaagctcagattctagctttttggagcaactagaagagcttgaacaccacatatacctttgtttactaaccataaaccggtccagaaggctagtaattcaagaaattatagctagtcaataatgaatgagacaagctgaatgaatgtacttattaggcctctttgatttcatgtcctgtacggtaaaactgtccaaataagtcttacgattgattttttattttttattgttttaatgacatgagtatatgatagaagttatttcactacaatctactatttatacaacattttctcgatactctatctcaacagttgacccttctcctaatttacaaatttttattggtgcaatgccatgcctttagacaattagacctttgctttgcgttacattacaataaatttagtcattattttgtaactttaataatacaaagaaaatgattacttatcttcataaacaattaaaataaaatactttcatctgttagaatatgtatagaaaaaagtacatcaacagcataacaaaaggataatgacaatatatacttatggctttcgtttgactaaatttctaagccaataggatgcgggagcaaagtttcacttatagattttcttaaagagaattgctacaagacaccatgccaactacatcaccatattttaaatgcaattgaccaagaggttctacttattctactttcgatgaaactcaatactaaactacattattagcggatgccctttattagcatttctcgttttggactagcaaatttctctaagttttttatactcctcggaacccattaaagaatccttgatcttgagccaatctgctggtcttggcatgataatgccaatatagccctctctatctgcctgaaaaggaaagcaaaagacaagtgtgagagtataacgaaccccaacaatccagcatataaggaaattgacttattaaacccaatatagattaaagatcaaaccctccaattatcaatgtgaaaaagctatgtaatctaaatccttcatctacaagtgacagacagtgtattacatatcacagtttctcagtcttccattatcataaatgaaaattacccaagacaaaataatcttaaactgaaacagaacaagaatttggactttatttagaaactcgcttcaacagaaaatatggtaatagtagcatgttaacacattctcttgtacactcggagcaatagtacgaattagcttgatttttattgggaacagaagaatgttagcttatggaaactcattatctttgtctgatatattagtcccatccatattaagaagcagaggtgaacaaaataagtcatttattttaatatagttgtgttacctctataaaatattagtttctacttcggtcatggcatgctaataagttaaacatgatcaattggatcttaagcaactcactttcagaataccaggaatccacaataaaacacttcattcaccattagatgataaagatagttaaatcatgcaagaaattagtacaacaccacaagaagagggaaatacataatgggatataacagtcaactatttcctttctcacgaatcacaatggcatacttaaacttgaattacaacagtcaacacagaggaattaaattaaaagaatataagtaagggattgaattgattaccaacgaattaagcaagtgtggctgcttgattaatttgtcatttacttccagtaatgagcctttcacgcaacacctgccaaaagtccccatccacacaatgtaagagatacaaaacaaaacaagcatcgagccaacattggtgataacgataccaaataaaaagaagcttctacctcacaatgtaagagttgttcttggtgaaaactttaaagagagccgaatttggctctaaaggttgagcattctgcataccaacaattttcacattcattaaacagtcccctattcgttatggccaaaattgaaataacaaaaatcagagagaaaaaacaaagaccttcttccgttttccagtgactttgatctcacttcgattagatttcccaacattaaaatcaacggctgtgatacctccttcgtccttaaaagccacatgcgtcgtagccaaaccaatcacacacaatcttttttttttaataacataacaatcataaaaattcaataaaaaatttactaaaaagaacaatactttataattgtaaaatttaaagggggattacccatttgcgtgacgataaacgtactgatcgtgtcctggcttcaaaaaatctggaagaagaaagcaaaacaaaataatgtcagaattaagggctttagaaaaagcgttttgggtttaaagaacaggttatggtggtaagtcttaggggaggggaaacctggagcgaaataggaaataaagtttgattgaacagcggatggaggagtatgaggaaggtccctaaagtcagggagtagaagcttgtaaatatcaccttcttcttcttggtttgtggtggcggtttcatggtccttcacaactgcagaatctggttgagctgactgcttttcaaactccattgtcgaactcgaactcgaattttttgtgatgctgatgctgatacctacgcacacgtagatatccaaaacaggttaatttcactttagtccttatgtttacttttatctccttttgacccttgctaatttagatgaaatgctatttttgtaaaagattatatttttacattttaaaattttttttttttattatatttttacaattttctatagaa

SEQ ID NO: 303592 - DNA, 1366 bp, Cannabis indica
gttgttgttggtgttgtggtgattgtgacaagtgtagcagtgtgtttgtttgtatgatgggagagagaataacccctgggagttacttccagtaccctcctcctcctcctcctcctcacactcaactccatgcttctccacacaggtcttcttctattcctatcgatcgagaaaggtcagtttaattctttaatgggtcttatttcatttttctggatgtcggtgcctcactcctcgatttcaattattatgcaacacaatagtttattgcctttgttattggttcagaattgaaaatattgattgggtttattgctttcactattcactatcttgtagtactccatattcacttatccaatgttaattgagaaggagatctgggcatttcctgcctttatcttgttttcattgtgttgttctcttttatttgattatcatcacaatggagtaattggtttaccaatgatatgatgcttaatctaattggtttggaaattggcagatatgtggctgaattactggcagagaggcacaagttggggccattcattcaaattttgccttactgtaccagacttattactcaaggtttattgatttcttaaagtttattacctttgagatcattgtttcttgtgttattatatcttgtgccaggttttcctaaacaaaaatctctttgcattatatagttatagtaaacactaaacacatgttcctgcatttttcggtaaaaaaaaaaaagaggactgaatctttacatcttacatgggtctgaaagtttgcttttctttcctcttgtgattattttatcctgcctatgagtttgcatattcagtatttgaaaagaattgtagggctactgcagcaaagagtaaagagttaaatgttgcgattgtgtcagcactagaattcgatgtactgatatatgccaaaagcaattgttcttctttggtgcttaaagtcatcagttctattggttggaagttgatgtgtgtaactaagtgtttagtttgtgtgaactcggtaaccaatcttcttgttcacacattttgtgctcaaaccttacctttttgttcacgccaatcacagaaatcagacgggtaactggaggcttcaatacaggtttcgttgatcatgaaagacttgagcatgagagtccgcttcggtcattaaatcaatttccaaatggtagaccaatggatttggagggatggcctggaatgcaagtggaggtaatgtcatttcgccaaattgcacttaagtgtctcagcaattacatagttaggccaaaatattcactgtggaagtgcctgcagtcttgccaatttagtgtggttttcatagttttctctctctctct

SEQ ID NO: 303593 - DNA, 4689 bp, Cannabis indica
atagtgctttaaaaaaaattaagatagtagtggtatcattgtatgagtaacaaagttaataatagtgattgattctcacattaggcttgttggtaaaagtagtaaggtaactatagactacatgttagtgatgtattttggttaattcatgttctaaggttatcccaatataatttatttatgtatgaaaacgtaaaatatatatttgtatatattttgtgaatgtaaaatatattttatgtatgaaagttgtctcaaatttggaacatctttcaagaaatgggttagtttgggttgtatagagttaaaatgtgtccaacccataaccaacccataattataaggcctattatttttcaacccaatgagtcatggcctactcttagcataaccctttactacaaaaaaatgagttgggttaaccaggttgaatggtttgacatatattttgtgcactcctagttggactaatacttatgttatgttatatctaagtttcataaaagattgagtattttagaaagaaggagaatgctgatcacaaccttaatgtaacagaatctaaataattatctagtgcatataaattgtctagtcccaaatatatgagttgtcttaccatatatagtttttaacagtaaaatagatgtacttttggtgtggcaagtgagataatgaagaacaaaagcatcattccgggcaaatgtgacaacttttatataattttttttttttaaatggtaaatatgtgtgttttggttaaatgcatatcctaagctatattaaatttactaattattcctttacaaaaaaaaaaaaatttactaattatttttttttttccaaatttactgattactttagtataatgggaaatacaagtcgatccaatgaatactattattcacgattataaataaaaattttaaaaatgatttttctcgatttaaatgcaaagaacataaactaaaagaacaatgtagcaaattaaatattggtattaacaatgataaaaaggagttaggaactaattagctaccattaaacaatcatatcaccaattaacaatatttatactcttcattccatattaaactaacaatagtagataaaacaaaaggagcatttatttcaatttctcacattttaattaatcaaaagaaaatgttattgactaactctttttaccaaacaatccaaggaaaaatatttaaaatttaattcagcaaaatcattaaaattaatagagatagattatgctaaccaataaattggcaagcgtaatctacatgcttcatcacaattaaaaactacttttacattatcaataatttagaactttaaactattaagtgaatagcaattttaaaataacaatcaatttcataattccatcgtattcaatgaccatttaaataagaagaaggcaataatcataaacaatcaatttaaatgcatatgaacaatttaattaattggaatgaacaattcaaaatattattaattaatgataatcatgcatttaaataacccttaatttaagagaaactactccataaaagtaatcattataatcattgacataattataatcataataaaaatttaaagagtttaatgagaaaaataaactatattggtaattttgatgatgcaattctctttttttttccagaattcattctcaatttttatcttctaaaacataaaataaacccgaattatttttttttaaataaaactcttttatagtcacacttaaattgtaactaaaaactaaacaaaattctgaaattagcaccgcaagccacgacctggaaaactgtgtgtcactgcctaaattgtgtttcagccaaatcaggcgccgtgggccgcgacccaacctcatttttaagcacacgagcagtggccaagaaaacttaggccgcgacccatgcaaaaatgtgtaagcatttggatagtaaatcgatcgtaacttctttagtacagttcgaaatttgacgattcaagatgttctgaaaaattaaaaaggaaatctaaaacttttatgttcagctccaatttttttaaggttatcaaaattcacaattacattcaaatttgtcaaactgagctctccgacttttactatttttcaccaaaatgtgttaaaactcttttaaatgactccaaatgcctaattagccttccaaaagatcttgttctggtgtgaaaaagatttttcaaaatgagatcgtgttatattggctaaataaatatatagtttctttatttaaattattatgattaactttttatatttaaggcaagtaattatatttattattttttttaaaaaaaaatattttctagttaagaagcgtgtatagtgtgtctttaatgtatattttgttttcttatttatataaggaaactttcctaaaaatctgtctatgtacagtgaatctgtttaaacgaattggcagattgtttgaacagattttgatttttcttttagcgaataattttcatttattgtctgattgttttcttacttgaaaagtattacctgtggtgtattaattgagaatatattgttactcaagttgtagttttatatggaaagaataaaatattttattatgtaataaatattatatctatagatggtatttatttgttaatttattttatttatttttatgataagatttcattaatctctctagttagtttgtgtgatgtccaagaaaaatttcttaataatgaacttagttttgatggtgtctaaattcacaacgctgactagactattcagaattttatctgcacactttctttatttgttcagacaaatttttgtcatttaataaatttttttaagtaaactaataatattttctctttgtattcatacctttagaactcaattttaggtgtcatttatccctataaatatcacttaaaccaagaataaaagatcaaactcttccactttttaatttcttatatttttttagaaaatagtgtttctttttgtaaatgatagttgttctgatattcctatgtgagttttgtgtgtctttgtgattatttttatgtgaagtaaattctaaagtgaagaagatgaagaacaaccttctaaagaaggttcatccaagtcttgctttgtgaggaagcaagtattgctatctttcagagaagatttctacaagttttcatcgggaggaaggcaaacactgctatctttgggagaagatttctacaagtcttgcatcgaaaggaaacaagcattcatcaaataatttgaagggagttcaaaccttagtatcttaaggagattcattcaacaaatatgagtatatcaagcttacgacaaaatcattaaagggagtctatgttttgtttaagttaattactttgtactggttgaaaattgactaatgaatcttatctttggacgtgatcccgtgaactagtagcaatttgtaaggaatgctgataccacataaaatattgtgtcaatttgatttctacaattttactttctacagtttaattttgatctatcaggtttgttttcttataaaataaatttcgattatattcaaataatattacaacacgttcgcattaaaaattgtttgttaatttcacctgataattataaaaatagaatctcaagaatattgactcatagaattagccatatttataaaataaatttagacttgtggcaacaattatgtaaatatttcgagtatattttttaagaattaggtttagtactaataatagttgaaaaatgctaaaggcaaccgagtgtttacctaatataatgtgctaaaatgatatctttaaaaatgatataaacttgtattttttataatattaaatataatttaaagtaataaaaataataataaaaagtctagtttcaatagttaagatactaaacacaaatgttattgctattgtttctctaaatattttatatcgtttgttaaggtttttagttcctaaattcttagttgtcgaaggttgtcttcttttttttacggtcaatcctccctgagcttaggtatagcttggtctgtgactaaatgagttgttaatggtgtagtttcgtacattgcacaacagttaaacactcaagttaagtggttgaatgaacctacaactgtttttactattgtattttttaagtggttgaaaaaattgaattaactgttgtaatctttttcatttaactttatgattaattcatttttctgaatctaatcttggctatgttttgagcgggggacatgtccgttctgtcttgctgctcctgagacgactctggatgtgctggtgcgatgcccttttgctcaaagttgctggagcaaggttccaattactgctgtggcgcctgatgcaatgttgttctcgagttggttcgaagcgggtttggtatcgtggaacacggccgaggctcttgaggctggtatggtctgttggtcagtttggactcatcgtaacgatttggtttggaactccaagcaccctgatgtgagtgaggtagtggcaatggcaaagttaaattatgttgaatggtttaatgctcaaaaacttaatgtcacagatgcaagcttaaactagccgactgcagtacccgtggagcaatggacaacactcgatttcccttttgtcaaagttaatgtggatggt

SEQ ID NO: 303594 - DNA, 3976 bp, Cannabis indica
atagaattacagatagaaaagtgctatgtatatgtatggattaaagaaaagaggaaagcagtttgagtacttacaagttttttcttcaatgaaaaaatgagcagagagagccatctaattagagtacatttctgagcccccatatttctattatcctatttctgaaatcaacttactaccaataatctttacatgaacagaaaccgccttcaaaatgatgaaaacggtatgcatcccttactatgatagctcgatttgagaatctcgatacatacttaatccaattatggcaatcattacaaacgcgaagattcttaatcacatgtataggacgacggctattagtagagctaaggagtccaaaagatatcgccagtttctcgctatgaatgtatgttgttggatctctctgctcttgttctacctcgtttaagaggtaataacagtcctgcacatatccaaattcagcagcacgagtattcaaatgagctaagaagtcatatatcttatctgcgagtggatggagtctgtcaccgacgaagaatgcatgaaacgagttgttaatctcaatccaactacgaccaggctctttcttcacacccttttctctcatcaatctcctagtttgatccctgaaatcccatttctttgctattgcatatagatttgataggagtacatatgtagctgagtcctcgggttccaactcgagaagatgatgggcagcatactcctacctaattttctcgctatttttatgaactgtacaagaactcaagtagggtcctccacactaattgcatcttggttttattggcatcttctctatgaatacttttgcttcgttgagtagaccagctcgacttaaaagatcaacaacacacacgtagtgttcgggatggggaattaaaccatactctttgctcatagaatcaaagtaggcaagtcccttgtcaaccaaacctacatgactacaagctgacaaaaccccaacaaaagtgacatggtttggagtcagaccgagtttgtttcatctgctcgaaaagatttagagcttcaataccaagtccatgttgagaatagccagtaatcatagcattccatgaaacttcattcttttctggcatttcagaaaattctctctgagcatcatcaattcttccacattttgcatataaagtgattagaacattagaaacctcggtctctgaactgtatcctgttttaatgatcatggcatgaaactgtgttccttgttttacatttgctaaattagctgcagcactcactgtagaaccaaatgtgaacaagttagccttaacaccagctctattcatttcggaaaatacctgcagtgcttcctcacagtaaccgctctgtgcaaagcccgagatcaatgcattccacgatatgttatctttactatcatttttctcaaatgccaagtaagcttcctgtatgctaccgcatcttgcataaagacttacaagtgaattttggatcgagatatcatctgaatagcccgaaatacaagaccgagcatggatttgttttccccaagccagtgatttaataccagcacatgcggtgattgcacttgcaaaacctatgttgtcgggtttgatccctcgattttccatttctacaaacaatttaagagcttctgaaaacatatcatgctgtgtataccctgcaatcatagcagtccatgagacaacatcctcctccttaagtcttcttagaatttccagagcagtatcaagcttcccaattttagcatacatgtcgataagtacactacacgcatagacattgagctgaaatccagtttttattacttgagtatggatttgttctcctagatcaagttgcccaacagcagtacaagttctcagaatacttggataagtgaattcattgggaataatgccttctatcagcatctgcctataaatttcaaatgattggcttagatcttctaactgtccataagcaactagcatcacattccatagtaccacattttctgtctctgttgtaatgaaaaattcataagcagtatgcaaatcagaacacttaacatatagatctaacagagaaccttcaatgataatatctgaagacattcctgcttttatagcatatgaatgaagttgttttcctttatcgagtgccccgacagatgcacaggcgcttaaaagacttgccactgtgacacagtctggttttaaacggtcatgttgcattttctcgtacaattttaaggctctatcaccaaaaccagactgagctagacccgagataagggagttatatgaaactccatccctgttctgcattgcactaaagactttctctgaagatatcaagtttcccgagcgagcatatagtgttacaagagcattgcacacatatctttccgaagaaaaacctcccttgaaaacaagaccatgaatttgctctcccatgttaaacaattctactttggtacaagcacttagaacacttgaaaaaacatatggagtaggggagattcctgatgtgtgcatttggcagaaaagcataacagcttccttttcacgtccattctgagacaaaccggaaataattgcaacccaagaaacactatccctcaaaaccaatttatcaaagacctttctggcagaatctacatacccctttttggaatataaatcgatcaatagattgcataccaatggagctgtatcaaatccatgaccaataattcttgcatgaatttgtttaacataatcgaaaccaacatcaccatagccacagacctttaaaattccagcaaaagtggtttcattaggatcaatattattcattaccatcttatgatacataaccaatacttgagaaatcaatttccttgctagtaaagcttgaattatcttattccaagaagataaacttctaatagacatttcatcaagaactttaacagccccttcgaaattatcacaagaaatataagtttccataagcctatcacacatgacaagttccccattaaaacccaactttaaaattctgcaatgaagcttcctagcatctaccaaagacccagaatttagacacccctctaaaagccatagataagtttgaagattagcacgaataccacgttcttccatcaaccgcaggaaatcaactccaactgagttggaaccttcacttccattaagagggatttcatcataaacatgggaagttgcagcacaactaaaaccagctgaatttaactgcaaattcaaaagggaaagacaaatcaagtctcaatgattgaatgacaaaaggtaagtgaaaaaaaaaacaaaaaggttaactttttattaccttgtgattgttgttgctaaaagagaagaccctcaaagaagaatggggcttgaatttacatgttagggaatgacacaagctgcttagaagagagactgaaagtggggaatgaaggagttgaatggactcacaaaccatcaatgacttagcaagaagagtcatttatcaactggggttaacacaatatacaatgaaacttcatccttatatagaaatactgggaaagcttcattctttataattatcaatgaacataaaaatgaatgactttattaacaagttagcattttttttgctggcccaatgaattgaactctcagaggcattttaacaaacagtttatgtcatggcatgattaaaatggagtagtgagtgagcttagagaagagacaaaggggaattaggatgttattgagtggactttgaagttggggttttgagagtgaagtatgaaacagatagctcataactggcagaggaagtggaagagcagagccagaggttgggaaagggaagaagacatccaaagaaagctcaatataaccttttagggaataaatttgtatgtttttttaggtattttcaataataataataataataataagggtatttt

SEQ ID NO: 303595 - DNA, 1574 bp, Cannabis indica
attaagggtaatggattttattatttttattttatttttaatattaaatatataatgacaattttgtcctttaaaatatgtcttgcaaaataactaccatataatatagtttaactcaaaatggcaatttagtcaatttaagccttccgattacgtttcctaataaagtaaacaagataaatcaaaactattccatttctaaaaaaatttagtaaacaacatattataaatattgattccgattattttttatttattctgttacatttctccattaatttattccgattctgattactgtatagtaaacgtgcctcacactgttactcatagagtcatagggattacacgacaaaattttattctcttcaacagtctttcttttcttttgtttctttcttgtttcaattttttttttctctgagtttgaatttttttcctttttttttctgaaataattcttaaatataattagattagatatctaattttttttttgtaattagattagatcgattcagtttaattaaagtcattttcttcttaattgccctaccttggatgaagtttagcgaaaagccctctcagattgattgttttcgtagtataaaatttatttttagtttttaaagatggaataaagtttttaaaaattagtagggttcattttgttgaattatttaaaaatttaagttttaaaaaattaaaaaacagaagatatcaaaaatttgttttttatttttaaatataatatatcttttttgtgtgtttaaaatatgtattttacaattttacttacatgttcgaatctgaacccaaacctgaatccgaacattagaacttggattcaaaactaagaccctggtcaaggtctgggtagaggttcaagcccagggtgtgagtccagtacaggctgggattcaaagttctggtccaggtttaagtacaaagtagaatgagttcatgtcatagtatggtgtagactattaaatttttttagtaaaaaaaatctaaaaatagttttaataaaacttgagtcaaacactattaaatttttaaaataacaaaaaacagttttttattctcacttttaaaaatataattatgaaaactaaaaactgaaaatacaatcaaacaactttttttttttttttgcaaaacctttctcacaaagtcatttgtgttagaacattgtaaattcttaatttagccctaattaattcaagagaatcaaagaataaaatatagattagtggaagcgtaccggtgtccgtagaatcgacctttaattggtatgatctttcaatttgcatcaaaaacctttgaagcccttattttcctaatgatggggattcaggaagtctgaaaaatatgatagatgcaaatggggaccattacctgttatattaccaactgttaaaacagttagtaatatttattaactacttctaatttgccctcatcaaattagaaattatctaattggactccagatattaaaatcatgacaatcatgcccattaagtcataaactttattccaaaatagaccacataaatttgacttatttattt

SEQ ID NO: 303596 - DNA, 1076 bp, Cannabis indica
aaaaataaaaatgttaccaaacgacacctaatataagcccccaaaacaaaaatctaccatattgcttgcaaaattgtaaaatatagtttcaaacttaaaaactttagttacaaatttttaaagttcagtttaaaaaaattttgttaatagaaaaatatactacatattttgtaatttttatttttatatttcgtatttctttttaaaaaaattccattatctaatttaaaagattttttctcttcaaaacatattcttgattatttttcttttaataaaatcaaattcaataatcataaaaatttgtcacctctaaaaatgatatgatttgatagtgtatctttaatatttcatgtaacataaaaaaaataatcaagtaaataagaagaagaaaaagaaaatgaatgattcgtaccccaaatcatgagaaatagaaaagatcataaaagatgtgacatttattttattttaaatttataaatatatattattgtatgatatttataatagagtgaaaagaaataatatcaagttgtattatatttgtacatataataaaatcacaaaatgcatggttgggccctaaaatctagtaatggagtggagggtgtgattctattgtcggtcttttttgttctataccaatctacactactttagtttttggattgtttttattttttttgtaaataaataaattaaatcaataataataattttattaatttatcttcgtggttagtgatggtaaatgataatttatagagtaataataatgtattatagggtattctcacctttcatcaataattaaagtgccatttaatttgattgataattataatatgtatctatatatcatatgtatgattactagtgctaattgttctgtaatatatgttacacaaattatttgttacatgttttttgaatttgtacttcttaatatataattgctaaaatattattgatacacagctagaaaaaggatctttatcttcgatttttaagcaggttagtgcatgtttggtatcataattaaaaaactgttttttgtttttaaaaactgaaaattg

SEQ ID NO: 303597 - DNA, 1060 bp, Cannabis indica
agagagttacactgaaactctacaaacaacagagattggcttatattattatgtatacatataaagcagccaccatgtgaaatgttgtgaatcataaaccataccaggaaactcaacattcttgagattacaccttctccaattattcccacctgtggatatatatatactgagcattaaactgaacatatcaaaaatcaggtcccatctacaggaactttgaaatcatgaactgaaaagcccaaatttgtgcattaacagactaaacagaagaatgggtgaatttggatgaagtacaaaaaaaaaagacataagaaaaaaaattgaaattattattagaaatcttctaaatttttcagaaaactggaatatatcatcatctaaacaaatttgacattatatatgtgtcgaaattttcctaaaaatatattaataaataacaaattttgattcaatctacaaaaacatagagtcacaatgctaataaacgattttgcccaaaaacccacaagcaaaaatgaatcaaataatagaaaaatgtgagtccaacatagccctttttctacaaaacagaggtcaaatagggaaaacaaaccttttgagagtacagaaggagtggaaaaggaactcagaaacaaagaatccattggccttttgcatgtaccagaaaacttgctcagttcatttacaaaacaaaatatgaaaaagaaaaaaagattgtgatggtgattattgtaagcctccgttggtgaatctgactactgggtttttcgaaagattcgattttggacaagtggagcgtgtgttagaaacagcggagttattatatataataacaatttcctctgctgagctgactgaatgagagagactgaatgagtgaacctttctgtgtagactgtcacatacccctttttgtttggtggttacacacttacacttcatcccaaataaacaaatttatagcgtaacggcatcaccgtgtcatatatatataccattttcgatatctgttttgcaaaagttacagattggaccctatattttgttaaatgacaaa

SEQ ID NO: 303598 - DNA, 813 bp, Cannabis indica
catagagaagaataaaaatgagaaacaaaagtggcccttttctctttttcctttgtagtttgagacacttcagctgtagttttgtgatttctttagtaaaagggtcccgcatatatttgacaataattagaatcagactagatcattggcatgttgtcaacttatggtgtgtatgtgtctcaatcaccacaaacgccttatttctttcgtatatgtaattaataaagttaataaggggaatctagttctgattagaggagatctttatattattgggtgcggcttcctttgacttgtaagccctctactgtgtccaacaccacctccgtcgcattgtaattaattaacaactagaaaactacctgcaatttgcgtgctctactatgaacatcctaaattatattatacaaaaaaaaaatatttaaatttcagatttgaaaaaaatttcttatattattttcattgatatcatcataaatatattcattattatttaatttttaaactaaattaatatattttatataatttttcttttcataatataaaaaatattatacaaaactttaattgatattgataatagcaaataatatttatatacatgtaaaatgattatcaatttacagtcttttatttatattattattttgaagaaataataatttctctaaaagtgtcgaaaaaatttgttacatatatataaactagtacatcccgcgtttcgcggcggatatataaaatattttaaattatatataaaaaataaattagtgtattttaattaacaataattacttagtaaaattatat

SEQ ID NO: 303599 - DNA, 2438 bp, Cannabis indica
gtagagggtgcatcaatacatttctttctttttaagaggttgcattgtagaatcaccttataatttatatttgtattttttttaatatattagtattctttttataaatttaaattatattttagataataattagtttattaaataatatttgatgagtaatattttaatttttatataatttaatatttttatatatttaaatttttattataaattttattttttttattaagagattctccattatgttcctccctccattaacagattttctatcctatttttaataaaaaaataagtagaaataaaaattaaaatccttaacgagaattagaaccggaaaaccctccctgccaatttcccaatccttcagctttcctttttctattgtaactttattgtttagtttgagaaacaaaacaaggtagaataaaatgaacatatatacataattaaggtgacacgtcgatacatgattaaggtgacacgtcatggggacccacacccactctggtacaccctttcttttcttttgaagcgggcatcaaagtacccatcgtttgacacgtgtcacacataaggtttctctctctgttttattttttctctctttctagggaccaaccttgattgaaggtctgccatagcacataatccaaaagcttctctctctattctatatgtgattattgaagattaagggtgagtgagtgagttggagaccgatcttggtgccgaacaaggagtgtttgctttcaccatttggaccaagccatatccaatcccatctccacttctttctcctctttctctctctaaaactcatcaacatacaaccattctctcttttcaaaacattgctttattattattattattattattattattattattattaattgtcaaaatgatgggatggtattttggtaatgattgaatgcaatacaaaaacagggattcaaatttgattgatgagatactacttttttgaaagaggttgttgatcatgactgctccttcttctaatgctaatagtctgatctctgttcttcctgatgagctcaagtttcaatgtatgcttcttcttctcttcttcattttacagtcttttttttcttaatgtctacaaaaagtgtcaaattttgtgtttctttttctaccatcgagggtaaagtttttctttttaatttatttattgttgaatagatttgactgtgtaaatcgtttgggttttatgaaaagggttgataaaaagagcagaattgatgtagaagagattattaagtgggtgatttatctttgaattttgtgctgtgttggttagtatgggttttttttttttttttgaacaaggttagtatggatttttagagcaatatgtttgtttacttgttgggtagagaagggtttgttcaaacatgaattttcttcacttttggttctaagaaagatcaaaaggtggcaaggtagataatttcagggttattattgcttataattcttggattaaaaattaaggaaagtgattacaacttaattatattatgtaaacatcttctctttaagcattaaaaaacaagaagtatatacagtgttcctatttctaagaggtttgctttcttcccaagttacttacaatgaatgatgtcttacctttttagtgacttctatagacaaagcaagttagccaacttgaaacaagtttaaaaatagtttggtagaatagagaaaattaaaagaaaatggtactattgcaaatacttaacaaataggaaacatgtaccataacattaactttattatcataatttgatgctaccttactgaattgctattttggagattgagtttagttagggatagaaaatctgtgattaggcctattggatgcttgttattaacaatttgagaagaaaaaatcagaaattttgctgcaccatccaagcaggttttctttgaacctgaagtgttgtgaaaatttaacttcgagtttaatccgattagacaatttttttttgttattttgaagttatttttggagtaatgattgtggtttttgtgatcagttgagctggaaaagcaaaccttttgtgatctaaaagttgtcaataacacagaacaccatgttgcgtttaaggtatatgtcatccactgtgaacttacatttacactttagcaattcattacaatgagatttattgggcctttggaaggcccttatttaaaatatgtggtattattaaaattaaagaaaaaaatgtgtatttttacaaataaaaaaattaagtcttggactgggtaagcactgagtgcaggcctatcttagtgaggatcagccattaaagttattcacatttatcataatagcacgttaagaataaatttatagagaaatgtaatagaataaataaaaaataatcggaattaatatt

SEQ ID NO: 303600 - DNA, 1486 bp, Cannabis indica
ggacaagaattcaagaattgttgcttggatagtaggaggaggatccctaatttctttttgtagggccatcaatctcattcattcctttaaaactctctcaaagttttcaactttgcctttagataccttaccttctcatagttcttaagtccccacactcacacaaccccaaataataactcaattcaaatcaaaccccactttgacatttttgtctcttgaaactttaatgagtacctaaatttaagttatattattgtctcaaaattatcatagaatttagtttgaaatctcaactattaagtagcaaaacagaaaccacttgaggctagctcaagtggctatagaagagtgcgtgtgtgttagagatcctgggttcgagttccatattatgcatggttgtaatatataaacgcttaaattaaagaaaaaaaatagcaaaaaagaaacttcaacaaacaaaaattgacaaatttgtattttgttggagaataatgtgacatagtaattcttttagttagaaaacaaatcatttgaataatgaattatgatattggataaatgaaatgttgtgtgtttttttttaataaatgtacttatatttaacattataaaaatatttcaataagggagattaagaattgggtaatagctatttctctcattgaattaaggaatttgcataactttgtctttttgttatttcaatttgcttatgtaagactaatattgtataattcaagaattttagcagaaaatatatgtataataacacattttcgaaaatatatgtattataaatagaagtgattattctaaaaaaatatatgtataaatttatatatatatttaatatcaataagctcggcctttctacaacatttatagccgcatcataaaaataaatataaaaatatattatctacattttatatacaaacaaaataaatataatagttaatgagtgtccatactacatcaccttgagatgtagttacatgtgtgactattgtttttttgataagaaattttatttgtagtatcacaaattatttaaattatttagagattttgtctcatattattgtatttcttgaattttttagtatgttaaaagtaattcttactatttaaagtgttgtaaaattatttctctgtctgattttattatacgcgacaaacaaaataatgatgtagttatttatactattattacatcaacaattcatgtaacaaaatatcaagaaaaataacttttcagaatatcgaaataaatttaaagtgtaccgaagtgttctttcatagaataaatttttctatataaataataatatgtaggcaattataatttttttttctcttaaattttaacatctgaaaaagtttgaatgatataatttggtagatgtcaatattcatggaggaaaagggtaaaaatcattttgaactatgttttgcaaaaattattaattagactctctatttt

SEQ ID NO: 303601 - DNA, 637 bp, Cannabis indica
acctccatcagaaattattatcatctctcaacaaaagaaatcccttttttgctgttgtttttgaatcaaagaagaagaaagttattgaaaaatgagtgcagcgtgcagagcttggattgtggcgacgagtattggagctgttgaggcattgaaagaccaaggagtatgcaggtggaaccatgcattgagatctttgcaacaacatgttcataacaatgttaggtcctattctcaagccaagaggctctcttctaattctgtctctctggtttcaaaccaaatcaaacgctcaagagaggagaagataaccaaagtcatggagttaagctcatggggtcctagcactataaggttttaatattagtttgttatcatttcattattagtagtattagacccttatttttatgcagctttccttgagataatgcaagatctaattagtgcgatctggtgtaacattttgtttatttttatatatacgattgagagataatttgattctgacttagttatgttctttcttcaatttccaataccatttcaagtgccataagttcttcgtagattcacacagcaaagggtgatttctttccactgttactcatgggatttaaaagtgtaaactttttttttt

SEQ ID NO: 303602 - DNA, 1696 bp, Cannabis indica
aaaaaatatacttattaaacttcttttttttcgctggagtggtatattaaacttttgtaagcagcaaacacttatttttgcaagaaagagagattcctctgattttattctaatctcaagaaaagctaccaagactagaggctaactcagtaatgagagaaaggtgcaaaaaaggagagcgcatgagttcgaactcaatacccctaacttattagtaaataagtgatactactatgctacactcaaaaaaaatctcactgactgcagcatgcagctaatgtataaaaagcaccaagtaatatgctagttctaactagctttctttaagctctcaagtctctcgtcaacatgactattttatgttctaggtagatggtggaatttcccaatgcttcggcaggggacctaaatcatagatgatttctctgtggcatgaccatacaagctttattgcttctggggtcccgatccctgcacccctaggatctccggctggtccaaacctgtcatagatcattgttttgaaatagttaaacacctagctcaattccctatgtagagatgaggaaggaaagtaaaatatactgaccagtgattctgaggagctccagttgttctacctcttagtccagcataagttgtcccatttactgttttaccgataacctcctgcaatttgacattttacaaagtaaataaatcgagcctgagataaaagtggattattctgatatcatacaagatttctgttgaacaacccaacactctaggtggcaccatttcaactatgaatcttgtgtaaaatggctaattcaactttgttttgttattcatttgttcgtttcgttcttgggaacaaggatattgggttgttgtagcacaagtggaagatttggttaatgggattaatgggagcagtctttgaggtctgatgtttcggcctaccgtgataatgtgaaattgcaaaaattgcatgcttggatattgcagaatgaatgaacataaatagaaaataaatttatgcatagctttatgagagaaagaaatccttgcctgcagaaagtgagcatcatttgaaacaacagcggccgtcaagtgtgcatgcatcttctcaagaatgtccaataccagagggagttgttctttcttatagtcggtaattatctaaaggcaaatgtatcaatgtctatcagtaacaaatctctctcatattataagctactgaatcatatgacagcctatgagtctatgactattccagtcatcattttctataagaaagatcttttaaaccttaaacatgttgtgttctttacctggaatggtccaaatatttcttttgtcacaaggtcataattgttgtccttcacaatttcttcaacgggaacatagacagctgttggtttaatagcaccataaatttggggaatggaatgattctctaaaggttcacccccaaagagtagctttgaacctggtatctgaagcaattgattaatgtgttccagaattgctccagttgttacctgcaacacacataagagagacaaggtcgatgtcaatgggaggtgtttggttgacacacaaaacagcattactggtcacatcaaagagctcattaaggcaatctgaaaaatggtcattggctaaaataggaaacataaagtttagatgggtagcaaaataacaacataag

SEQ ID NO: 303603 - DNA, 1084 bp, Cannabis indica
attgatgttttctaagaaggcagagtagatcttgggcttggcccaatttatgttatttgggtccactgatgggccttaagcttatgtttaaaatccacatgtcccatgctgaaaacacgggtaacaaattgaaacagttataatccacagatatgagtgagtacaatatattattgacctaaaaatccttttagcaagaatttttttgtcatgatgagaaacaaaagttgaacattgaaaagatctaatctaatactctagaaggaagggtaaagtctcgccacacgtggagcacagtaaaaaaggaaccccattttcacaccttgggtgcatcacaagaaatataggagtcatgccccccgtgtcgcaccattagatcactaaggaaaatatgaggggcctagctttcatgcatggcatcacacaacattggtcatgaagagagatgaagctcacttctgcatggtgttgtgtcgcacgaaccaccagcgagatgggagcctgacaatgtctcactccctcacaccatcctaatcccctgcatcgtgtcatgccacaccagccttatgtaagacaaggatctcacctcttactgacgtgatgcatgagtactatttggaggagaccatataaaacacgtctttctcaccttaggcccactcccctcaatgtagttcgtcaagaggttctatgatgccaaagtccgtaaggcatacacaagcttggatgagagatgtgtggaggataggtcaaaaacacgaccacaacgcctacaaaagatgtgacaaaagagtggatgtacaaggatgtacctacagtacaaggtatttagaacatgatctcgagtatcaatacaacctgacactctacaacaactatctgaatttcactactctgacttttgtttgaagccattttccatatagtacatggtcccctaagatgctaaggcattcaaggcatctcttgcacattgaagttaacttggacgataagaaactaattatcactacaacataaaggaccaatagcggcgggcccctcggccgctattggtccacaatctggccgctaaagggcaata

SEQ ID NO: 303604 - DNA, 1376 bp, Cannabis indica
tttttaatatctaaatgaaatttctaataaaaaataaataattttttatatcgcgtaattaatattaaaattttaattatttttttgttttttaatcattcaaaatgattttcttaagatctaaattaaatttttaaaatttactaaaaaaaatgttgaacctttttatttttattttgagcaggtacgatttgatagttgtaaaagtttaggggttaaagttgctaattgataaagacatataatcgtttaaacggaatagttagatggaacctacgagaaaaggaccaaaatcaatattattgaaaattcagaagcaaaattactaattattgaattatttattaaagaaaacaaaaaaccataatatatatatctaggagggcgccggtggtgatgaagctgagtatgatcttgtcatcgacttcttaagcagtggcggtggcggtgacagcatattgagcggtgggcctggtagcgttggcagcacattggatggtgatgaagctgagtacggcggtggcgttggccgcgccttgggctttaatactgatattggtgataaagctgagtatgatcttgtcatcggcttcttttgcttcggaaatcggaggggcgggttgatgggcttcaagggataatggctgtaccacagatttggttttggtgaaggtgggggtgatggaaatcttttatgtgcatgaaggggcaaactggtggcaagattaataagcagtactaataatattaagagcatattaataacataggattttcccatgcctgacattctttcacacattaattgtgagtttaatatgcatggttggttgcctatggtcatcaatctatatataataataatattatgagcattgttaaccagtgctgtttagtaccttcttgatatgtcacgttgtgattggctagcaatactctctaaaagttattatattaaattatatgggacccgatacttagttagaccaatagcgatattgacacataggagggtgctagacaccactgatacccttttaacatttctctaatattatctgatgcagtcaactttaaattattattcagctaccatagtcaactatagcttattcaataagttaattagtctactcattatacataaaggagactactaattaaggttgataatcatagcttccgtcttaaaataagtggagtagtcacatttttatatttgactcaacattttattatttaatttattccatataaaataaagtatgaacactacccaaaaaagagtattataattttatttaaattaaataagtgagattttattcaaaaaaaaaaataaaaaaaaaaaaaagtagaagatttaatattaagtt

SEQ ID NO: 303605 - DNA, 1547 bp, Cannabis indica
gtctttcaagttgaaatggtggactccaagtggaaatggtcctcaatgttaacgagttaccggagaaatcaagttctttcaattcagaaagtttttcaaagtgaacttcactaacaagcccagtgaaagaatttgaagagacagacaagtactcgagatgatgaagcttaccaatatcttcaggtaaagtaccattaagcttattgtaagaaacatccaccaatctaagacttgaaagcattgaaaaattgggcaatggtccttctaattggttagaattgatccataattcttttagattgacagggaatgctttcaaatcaggaaaggatccacttaattggttctcctcaaaatccaaactttctaaagaatgtttagcacaaccactaagactttctaaaacatcagaaaatgtagcattgaatttattgttcaacaatactaattcttgaagattacaaagattccccaatgattttggtatttcaccttcaaatccattcgaagacaaatcaatgcgctcaagaaatctcatgttttcaaaagaattaggaataggagctttcattagattgttattaagtttaagagtgagattaactagattggtactaacatttagcaaccaaggaactgcattatgaggtatgttaccataaacaatatcaagattggttagagaatttgaagaatttttgttggagaagatgtctaaatctattgctgttggtggaaatacacagctatataatgccaaacttgacaaagatggtgctgttttaatcaagtgaaaccagtttgtggattttgtaagattagtgtaagtcaactctaagaatctcagagaagtgagatgagaaagccactcaagattagtactaatctcataagaatctgaatcaacaccagctagcttgagaaatttcaacctggtgaggttcccaagctgggaaggaatgaatgtgatagaattgtattcaaagataagagatctaaagtctagttaaagagccaatgaactcaggaatttcagtaaaagcattgtaactaagatctaggtacctcaaatgttgcaattcaaccaaagaatgaccaatttcaccatacaattgtgtatcatcgtagttagatttaagatcaagagcgataatatgacgatgagtttttgagttatcgcacctgatacctctccatgcacaacaatctcgcctactacttttccacgaggatagacgattgccatcatcgacaaagcctttcttcaagttgagaagagcttgtctctccttctctatgcaatgatcatcagaagagcttgtactactccatacataactcatgactagcaccaacataagcagcacaactttgatcatactgagaaaactttaaacttggtcactctagtctatatgggttaagtgcatgcagatctagtcaattagattatgtatataggaaactataaaatactactaaaaaacaactcacaattccttttaattagcaagaattcaaaagtcaataacacaacccaatgataa

SEQ ID NO: 303606 - DNA, 1731 bp, Cannabis indica
tggttggaggcaagcaaaagagttgaacttatcgaaagagattattcttctcaccttgatttgattgctaaagtacatggtcccgagagggctgctaagtacattgagacaattccaatttcttttagaggagagttagtttaccgaaccctcttggctaactatgtccaagctggcaatgtgaaaagggcagaggaagttttcaacaaaatgaaagatctggaatttccgatcaccacattttcttgcaaccagttgctgctcctgtacaaaaggactgacaagaagaaattagcagatgttttattactaatggagaaagaaaacgtgaagccctcgctctttacgtttagactcttgatagatactaaaggacaaatgaatgacatatcagggatggaagaacttttggagaaactcaaggaacaaggttttgagccagacattggtataaaatccattgcagcaggccactatgctgccgccgggcttaaagaaaaagctgaagctgttttaaaagatatggagcgaggaaacttaagtgagaatcgtagggtttgcggagacttacttcgaatttatgcattgcttggacaagctgatcaagtggagaggatttggaagttctgcgagtcaaatccttggactgcagagtgccttgcagcaattgaagcttggggaaaattgaagaaaatcaaagaggccgaagctgttttcgaaaagatgctaaaaaatgtgaagaagccttcttcaaaacattacactgtgcttttgaaagtatatgcagatcacaagatgctaacaaagggtaaggatcttattaagcgaatggcagatgatggttgcaatatcggcccacagacatgggatgcacttgtgaaactctatttagatgcaggcgagatagacaaggcagactcaatcttgcacaaggcttctcaaaacaaccaagtgaagccttttttcaggacttacatggctgtcatggatcagtattcaaagaaaggcgatgttcataactcagaaaagatcttccatagaatgagacaggcgggttatatgggtagacttcgtcaattccaagcgcttgttcgggcgtacataaatgctaaggcaccggcatatgggattagggaaagaatgaaagcagataatatcttcccaaatcgagatctgaccggacaattagtacaggttgatgcatttaggaagacagcagcctctgatttgcttgaatgagaggcattttgagttgttaatcttggcatggaatggactatatataatgttatgtagaactattaattttttaggttttgacaaacgaggtataataacgtttgcttttctatacttcaattttattattgttcagaaaaaaggcctcatcttaagcttagttagttctattctatttgctttgttagctttttgttctatgtttttactttgaaagtgtggttcttttgttttgtgcataacttcattttagttttccaaattagcatagcatgcagtcaatgtaggcccttggttacataccaatgtctacatcaaatgtgtaacattaaatattaacgagaattatttatatatagttttaaattttttttcttttaaattttacagtttgggttgttttggtaatttttatgtgagttgatatgtgatttaagttgtgattgtaagttgctatgtgagttgctatgtgagtttttatgtgaattttta

SEQ ID NO: 303607 - DNA, 2003 bp, Cannabis indica
aattagggtttggatttggggccaattatgactgaagattcgaaacatccattggatacagtcgaatcaccaccccaaagaccttcaaagttggctaggaccagcgaagaagacgacctagaactagaagaagacgaagtagaagggggagaagaagagtttggtcctgatccccaatccatgacccaaaaccctagaaccaatattcagaggtatttgattgcaattgagtacattgggactcgcttctctggatctcagcagcaacccaaattcagaactgtcgttggtgctcttcaggtccactttttttgttttactgatttcgaagatttatgtgtgtagtgattcaaagagctgttttttatgttttatgtagctcaattctcgttcaataagcatagaatgaatgttattggttgaattatgtaaaacttgaaaagtttatggatttaagctcttcatgttagatagctttgtgggtaacttgagtttgaaggattgtgtagaatctacttgaaaagtttatggctttaagctcttcatatcatatagcttagtagattgacctgggtttgaatggtttctgtagaatctgtaaaaaaagaaaaaattgaaaagtttatggctttaagctcttcatgtcatatggcttagtggattgaattgggtttgaatggtttctgtagaatctgaaacttgtaaagttaatggctttaagatcttcatgtcatatagctttgtggattaacttggctttaatggtttctgtagaatctataaaacatgaaaagtttatggctttaagctcttcatgtcatgcagctttgtgggttaacttgtgtttgaatggtttctataggaggcgtttcgaaaatttgttggtaaacctgtatcagtttctgctcaagtcgaactgtaagtttgtccttgtttgatctttaacctcagtattaattttacaatcacagtatcactaaactgaagaaacaacatttagtttctttggtttcgcttcccttttctgatgaatatgttttttcgctattgcaggatgctggagtgcatgccttatcaaatgtttgtcatgttgatgttgagcgcatgagcaagaggaagccaggggaagtggtatgatgacagtttatttaatactcctttaaagtcctgataatagtttaaggccttctttgcaatgggttagtgcttttaaagtctaattcacatccgaaagaccaatgaggccctcttctcaaatttacacccaaacgtcttagccgtgaagttccttgtcatcaacctgattctctatcagttaagcttatttatgaaactgcaaccatattttacccagcttttggtgattgtgtcatttttgtttgaatgcagttaccgcctcatgaacctgatgtggtgaaaaaagctgtgaaccattttttacaggtacagtctttaaccatatatgaccatcgtcttataaccgaaacagcctcataagattgtgaacagctttggtgaattagctaatcgagcaaccaaatgagttgttaagaaagtttgagctgaatatgtccagtgaatcttgtggtggttgtgtgatcattgatttgaatttaattcccatgatgttaaattgatttaagtctcagaaattttgacaaaagttcaagctggttttgtgtttaagtatacatgcttcaagagatggattaatagttatttatccttaaaatacaacttaaattgtatctgatttaaatgcctattatttgttttgaattttttttaatggtccatgcattcattgaatagtaatgaaattcagaattgttgactttggctcatcagaaaaatgaaggtgacataatggtgattgacgttcgctgcattccacctgattttcatgctagacataaggctcaagagcgaacgtaggtactcatagatctacattattatatatatgttgctataatttataaacgctacgcaagtatacgcaa

SEQ ID NO: 303608 - DNA, 2718 bp, Cannabis indica
atatattttttttacaaaaagatggtggctcatgtaattgtaactttgggcctagaaaactaagattaccataattcactacaaatcagcaaaattaactaactcgtatggaccattttaaaagattgggtttaggtttaatttccaataaacgcagttcattaaaacgatcggacgcctggaccagttttaatttaatgagtgaagaaaattctcatgaagtgaatgtatataatgttaaacagtcttctctccataatctcttttggtcccaaaccacgatatatataataaagtaaatattctctaaagagtagagacaaatcaccattaattcataaaaaggatctactatatatatatacgcagggggcatatataagatggtaagatactatttgacttgtaaaggatttgatggtataatggccttatttacttacaagtattattgccctttaatggttggtgccagcagtagtacttgtacttagctatatagctatgtatatatgtggccaaataaagtgataaggctcaatactgtcaattacataacggccaaacctcttgtcattgtctttcaagtctttgccttaatacagaaactacaacactacccagtacccacggctaaaaaacaaaactaatttgacctaaatctctagcaaataatacaacactacactatttcttcaccctcaagaaataaaacaggaaaatatataaattatagagtttataccgacaaaattattttacaaaagttattaattagatttttctgttttattaaataataaaatagacattatatttttaaaaattatacaaataagactctgaattaattttttgtcaaaataaaacttaataataataattttatctacaaaattaatcatattttttgtatttattcgtgttagaaattattttaattaaaattagttatattaaaaaataaaattattaaaaattaaacttaaaattatgtttttactattttaaaaaataaaaaatacattttatcatttagcatgattcaaaataatatttccttgtggagatttttctaaatagttttcgacctaacaatatattgggtttatagtaaacaagacaaacttgaaagaaacagtgtacatgtgtctttgtggtttaacatttttatatgaggtgccatgtatttattattttatttcaataataattatagaaaataattagctatttaatatcattgatattaggccccgtaataccgtaatgtctatatataatatagggtccttttgttctttttatatatacatggataataatagtttgcatgtaagctacgtggacgaaaagtagatacacatacctattgtagatgtatatacgttggtacgtgtcaagttagcaagatgacacgtcatgcacatttgagtagtgcagttcacttaattaagaaaaaggggttagagattttctttgttacttacgtttacaacaacaaatcaagttgttttgttttgtagtatgaggaaatgtaattatatatagttagaaattcaggtagctaatatgcttggggagcccaacaactaaattggacccgtttggtgccatttcataataataatttcttattaatgtaggtttaagtggctttcaatttattattatttaaagagcttaaatgttcagtgtacgtacctaaaaaaagatattaatgattttcatctttccaaatgggaaacgaaatctccataattatttgagtaaaaggattctcatataattgcaaattgagctaaagttgagatagaaaccaacttacttataactttttcaacctagctattaagaaatgtatgaaattaatttataatgtcaagataaataagatctcaccaaataatatacttaaaatgaagctttcaatgttcgaaaaagtggacttaaatagacttaattgtgattagaattcttcataagtggcagcctgctttaaccccactttattgtataatcaaaataaatactacttaattaaatatatcattttcaggtcaaagtataatataaaatagattatcatgactcaaaatactaaaaattaaactaagattaagaaatactatgaataataaataattaaaaaccagttaaggtattagggtgacaattaattaagctacagaaacacattaactttcaatagaaatctgaggacaccataaataatgaaaagaaaaaatatgaaaaatgcacactgagatactacaagatatagatgtatatttatgaatagtatagtcaaataattattttctttgcgaaaaaaaaaagtcaaatataattatatatcaaaaacactaataatttagtaataattgctcgtcctcatctaaggacaatatatgataatcgaacatagaaaaaaccaaacattttcgaaacaaaagtctgcaataatttcaatgttcttgactcgctaactaagtcacattttcacattcatttgtcaatattacatataaggctcaaaaccaattgttttattgtttttagctgtgctataaacgataattgtcacatttcttgctagatctcaactccaataaataaataaaattggatgccatgatagaaaatattgaataaacttatatgaacaattttaccaaaatataaatccaacttacaaaaaatagttatttttagtga

SEQ ID NO: 303609 - DNA, 2697 bp, Cannabis indica
aaaaaaaaaattactcaaagaaaacaaaaatagcatataacaatttactctgtaataagtgctaatttcatggagcgcctttccttttgtttccaccacatttccattgacaaaaatcactacatgtgacaaagactgaatacaaaaatcgcaccccaatctattacaaaaatgtattttacttaaacaccaaaatcaaactcttatatgttgcttcatctggcttaagtcccatcttcaacatctcatcatgaagtttcatggctttcttaagttcatttaaacgagaaagtccctgaatcatgactgtaaaactggcactacttagcttttggtgtcttctcatgtaatcaaacactctaactgcttcttccattctccttaacacaaccaaaccattaagaagtacattgtatgtggttacatccaaactaaggttcaatttttccatcttatcatgcaatttgatagctgactctatctgtttgctaaaacagtaatgctccaccaatgagcaacaagataatgaatctggtaaaagttctttgtccaatatcacattcaacatctcctctgcttctctccatctgccttttctacataaaatcgccaagaatccagacaaatctgaagagcaaggactaaatcctcttcttataagtttcattaacaactcacatacctcttcagattgctctttcctgagaagaacaccaccaaatgcattataggtagcctcattcaatacaacacccttttcagaaatcagtttgtatacccaaattgctatatctgttctctcttctttagacaatacccttagcatgtagccgtaagtagcttcctgcaatccaatattttcatcaaaagctttcctaaaaatcatctcagcagcatatgttcggttcaagccacaaagcttttgtatcaacttatcatattcacataaaggactcatagaaatgagttctttttcaaccataatacttattattctagcaatcgcttgagaattttcatgtttacaagccccatctagaatcaagctcaaagtactaaaaccagggttgattttcctgtcatgcatctcacttaagcaatcaaatgaagcttcaaagttcccacttttgctaagacaatcaacaagagtgttatatatttcagaactataaacacccaattctataattctagagattctttcatgctccccatttttaccaaaaattcgggctactagggaccatgtaaatagatttggagagaccccatttcgaagaatggcaccataaaatgaccaagccagtctaatctcattccctcgttgaatagcatcaagaagagcattgcagacactaattgaaggggtataaccatgaactctcattttgtcataaacttctaaaccttctctaaacaaacccttccgtccataagtttcaagtacaaagctcaaagattggaacagagaatttctacctttacatgacagagtcaagtgctctacaagaactggtgcagggtagctatgaaccagagaatccaaaaggggcttcacggattgagaatagccagacccaagtgagatttggatgatatgacattgggatttgaggtctggttcgaacccaagatgagatttggcccaatcaaagaaatccaacgatatttgtgggttgttctgagtcctgtgtagaatttggaggaaaagtgatggggtgagtttgaggttttggaggagttgaacccagttgtgtctctgtagaagaatagatgagaccttggaagctagttggtttctctgaacttgggctctccagcattgggaagctgctgaagataatgaaagttgctgagaaaatcggtgagccttctcatggagcatgggtgtgttcactcagtgcgtgtggctaaggaattaagagaacatagactaacactgcagcacagactatacaagctatgcaaaaagtgaattcaaaattttaaattaagatatagactatagtaagactacaagtaacaagtcagagcattcaactaagtatgtaaactagaatctcgatactaaaaaatctgaaatagaattcaccttgcaataagttcttgaaatactaaagcaagagagcattaaagttttaaaaaattaataataattaatttattatattatattcgttttgtaaacaattcacactataaacttttaaacttcaaattctatgaaacaggactatagatatcattgaggagttttatcaaacaggtggtagttattcttaaatagaactatagttttcaaggatggtgagagagagtgagagatttgaaacgtgaagtttatgatattaggagatcaaaatcaaagatagatgacagatgagagatgagagatttcaataagaaaaagaaggttaccgcaagatatataaagccggcaaagatgatcgaaaccagaggagatgggtggtggtggtggcagggtagagactagagaggttgtaatgtaagggaccaaagttatgatggtgataaagaaaagtgtaatcatatgtgcatttaaaatatacacaaaactattaataaagggaaggtatttttcaaggtgatgggatattgttcaaatacattatagctttattgtctatattttgggtagtaattttgtcctatgtaggcttgcgttttgttttccgc

SEQ ID NO: 303610 - DNA, 2346 bp, Cannabis indica
cggtcttggctaggcccccgtggtaccatcgttctcttccacatataatactattgtctccactaaacattccctccatccaagcgattatgccaaaaataataaaggtaaagttgtcattgtcgtcgatgatgatacggaaaatatcaatctaaataaacaatttaaatgtcaagtggactctgaatccttaggagcattctcaaacgttgtcgttctaatgctctccatggccagttggaatcttcagcaccatctggcctttcctctactctgcctgtttccagcactttctcagattcaacagagcctcagactgaaaattcagcggttgttgctaagcaacaccgcgcacagccatgaatttcgtaagttagaatgcccggggtttggggaacccgagtgcagtcaggcatttacgcttgcttatcaaagagcaggctccctatgttctgtttattatggaaacaaatttaaagtatggtagtatagatagtttttgcaataaattacatttcagacatggcttagaagttctgagacatgggcaaggtggtggactgatgctcttatggaaatcccatatcaacctctccataaacaacttttcatctaatcatattgactgttttgtggaaagccaagaagggccatctttgcattttattggattctatagacatccttgtgtctctcagagaactcatacatggactctgttacgaagatgcttagatattgctcctctgtctccttggttggtattaggagatttcaatgaagtcatttccaatgaggacaaagttggaggtcctagacgatgtagttctcaaattgatgccttttgtgctactgtggatagcagtcatctttcccaaatcccttttgaaggtgaaagaacaacctggacaaacaaatgccaaggaaatgacaatgttaaagaacgactcaactatggatttataaatgatcattgggattagacttttcttgctccaacattgcagcacctagatttttataaatctaatcatagagctctcaaagcaatcatcaattctttggatgatcatatcgaaacacctcaatttcgatcacagtttcgcttcgaaaaaatctggcttcaagaagaaacttgtactgatatcatccttgccaattggaaccaaaatgacaacagccctctctcccaatggactgctaacatcaccaattgtgccactgattcacaaaaatggcattatgctacatttggcaatctaaaaagagagattaaggattcacatgaccatgttactgctctgcagaattccccttgcaatgatcctgaacgcttttcagcgcttcagaattcaaaggaaattttggatgaacttttagcaaaggaagaagattattggcatcaaaaatcaagaattacttggttgtaatcgggtgattctaatacaaagttcttccaccaacgagctgatgccagatctgccaacaaccggattaagaagcttacggattcaaatggtaatacccaaaccagtacccctactttgcctgacattatcaccaattattttcaagaaattttcaacagctaggggattgatgatgaagctataaatacaattttggcatgtattccaacaacaattgatgaggattcctagcgcatcatttcagcacctttcacagctaatgatgtatggaatgcactaaattctatgagtgatgataaaagccttggattcgatggaatgtcagtgatgttcttcaccaattattgtcacattgttggctctcttgttactgcttcaatacttgaagtccttaataatggtgttgattctgcaatactcaacaagaccatcattactctcatccccaaggttaaaaagcctaaaattatcactcaattccttcccatcagtttgtgcattgtgctttataagttggtatccaagtcaattgtcatttggctccagcccttcctgccattggttatatatgaatatcaaagtgcattcttgtcttaaaggctgataactgataatgttcttgtggcatttgagttgttacactctcttaaaaatcggaagcgtggatcctaaggttatgctgaaattaaattggatatgagcaaagctttcgatcgtgttgaatggaactatgttgtttaagttatgttgaagatggtgttgggattttatgccctaaataaaaccctttacaatctaatctgatttgtcaacaataaaagattagaaatcatttatgcttacatgttgtattcatgtttatgatttaatttatatatatatacacaaaatctattaagtccagaacatatagtca

SEQ ID NO: 303611 - DNA, 1691 bp, Cannabis indica
aaataaaataattaaatgtaatgtatatgagccatccacgtgttcataaatatgagttaacggaagtggtagtaacagtgtaagagaattgtaacattatgtacttttgtctcaaaaaataaaaataaaatatttaagtgtataaaatctaaaacattaaatatttataccctaatttatcctaataataataataataataataataataataataataaaaatagcttactcttcatttataataaacatatatattcaagtcaatacttgaatatttgtttataaagcttagtacaagatatttggagtcgacaattacattttgcctttcatttttacgacattcaatgtcacataaatacacaattttttagttgttaggtgtgttttttaatcaaataaattattaactttttataaaagatatttgaataatgacaacacatttattacatatacttaaaatgcatattataataggattgttattagaaactagtggtgcctaacacctctagacatgtcgtcttgagattgactagcgatattctctaaaagttattacattaaactatatgaaatttacttaattagaccaataacagtattgacacataaacaaatactagacactattagtaccctctaacatttctcatattataattgacatacattttaaaaatatatcaaaatatgacatatcaaggctcaagagagcatacagagccttgaacctgtaagaatctatattctttgtgggcatttataatttgatatgataaagattagtttggactttggatctcctttgagatcaacaattttttcttaaagatgctacatgcatttttttttgtcccctccaaaacattttgtgagaaatatatatttataaattgtgggccgtatttagggtaggacggctgggatcattgcccaaaacttcttagccaagagattgggagacttttttttttttttttattagtctataaggctcccaaacctttttttcttctaaaaaacagttttagaaaaatatttaaattttattttatttcttaggtcatctccaatgggacactaaaacactaaatatagtgtagtttcacactatatttactccaatgagacactaaacctatcttcataaatggttttgtctacagtgtcctaccaaatttagtgggacacggtagaccacactattttttaaaaaataatttttactaattaaataatactttaaagaaaaaaaagtaaataattatatatatttagtattaaaatattcttattatattaataaaataataaaataataaaaatataaaaatgtagtgtaatgtttggtgttgtggttgaaattgaaaaaaaaaatagtgttttgaatttccctattggagatgccctagccaagaacttgcaaaatattcttttctattgtaaaaataattaccgcgtacacatgtgaaaaatatagtactactgtgtaaaattatgcttacaaagaagtgccataatttaatactgtattttaaaaccaatataaacaaataaaaaatagaaaaaactatgtaaaaataatatcaaaataacaataaaaaaaacatacagataaccaaaaatcaataacaaattaataagattacaacataaaaaaatgtattttctataaataaaat

SEQ ID NO: 303612 - DNA, 4668 bp, Cannabis indica
aagatgcatttgtgatataagtaccaatcaatcaatttaagtttttttaactgtgtgtagtctcataccaacaccgtctcaaaattatcacacttgacctttctcaaataatgtgagattgcacaacatacctggtatttctcttacgaatcacaggactattgactgtcacatatataaactattcaactttttttagaaaatttacaagttgtcaaagaaagactaacaaattctcctaaatgcttaaatagataaaaggtatgccgagacactccaaatttttcctgaaattaatacatatttatacattaaaaacttcttcacactttctaacctgcacattttgaatccccaacagacaactgctgcatgtgtcaaatgaaatctttggtaacatctgcatttgtcacataacaacaatacaatattaaaatgaaattaccaaactaaaatgaccattcattcattaactgctcttcacattacataccatgtttcatacttaaacaagggtcttgctcatctacatatccaatcacctttgctggcattcctgcaacaatacttggggagccaaggaaatgaaagattactttataaaaacccaaacacaaccaatgaagacgcctatcaatctcggctattagtactctttacctgtgtggaggaacatccttcaacacaagagaaccagcagctatcatagaaccatgaccaatctttatgttgccaagaattgtcacacttgctccaataaggacaccctccccaacttttggatgccgatctccaacttctttccctgttccccctagcgttacagcctgcgaaatatcaaaaagactcttaaacatgccattgccacaaaaacgaataaataggatttttagctaacctactgtaatttgagagtctagacaaaatataattgcacagatagtactctaacgataaaatttggggttgtgagtttgtaattttagtgttaatgtttgaatatttaaaatcattatacttggttccaactaaagttagttaggggaaatgcagcgatcagggtaaatttgcaattattttcatagttcaagagattctttaccaaaaaataattcagaagcaaatactacataggtcatagttcgaggagtaaaattactattcattcaacagaaaaagaaaactcaaaggttttcagataaagccacatgaattcccagttatctttttaaggctacatttcaaagtctcaaagtcaatagaaaaaagatgcaattttgactgaaaatgatgatgattattcagtccagcttatgtcttaacatgtcaccaaacgaggatattgtgagaaaataaaggtaaaaagttcactataacttcaatcagtttccttttttagggaaaagaccaatgcatttgacataaacataagtcatgacaactagtactagaaaaggaacaagacagaaatcgagttacctgcatcatagacaccctatttccaacaacagcagtttcgcctataacaactcccgtcccatgatccaacagtattccctcaccaattattgcagctattgatatgacaaaagggagaaaattttgataaaggttagtactacaaaaggcgtttactttctcagctaaaaccgaaatttactgctgccatcaatcgcccccatcttgaaacgaatcataacagaaaaccatcataggatgttatgaatgatgtgaaatacaaatgaagttacctgggtgtatgtcaactccgaaaacctcacttattctactttgcagtgccaatgctaatactttccgtccttgactccacaaggcgtgagctactcgatgaacttgcaaagaatggtatccctgaatgcattatagaatgattgacaagttaaagctcaagcataatttgtaagccagcctaaaccaaatcaagaatcatgaagaacaacaacagagaaaatcgataacaatgatagaaacatggtaatccatcgatgaaagttactaatagacaccatattaacaattcaagtaactcaaatagacattaacgatgttaagtgtcaaattggctggttatgaactttgtgtgtcgattttttttcgagatcatttcactcttgttacttgatgaagtgaacactatttaggcagtatattgacatttttagcagtaaggtatatttgatgagagttcattgaatacttttcatagagaatttcaataagctcaatagagaagtttgagtgggatgctcaagactacgtagatcttcattgacatgtattacaataatagaaaaacatataagaaggaagcttttaacttggtttttctaagtaattgacatttacttgatgatcttagtgaagtacactacaaaaattgaatccaactattaaaacttggtaaacacaaaaataggaaaccaactttcaatcctagaacagaagagaataataccttgagatataacagtgctgaacaatatgacaaacaagaaggatccctgtccataaatgcctaaaaaagaaggttgaaagaaactatcaacacaagaaaaacttaatagtttgtatacatatatctatatatacaaatacaatctttgtaattgtaataaacaccatcaaagttttacctggacatcaagacgaattgagcgttgaatggtcttactatgtgtcattacatcataaaatatgtccataagctgagttgccaaaagagttggattttggagtcgatttgcaagaacaaaaccaagtgcttgctctaaacaatcatgggaaagtatgcttgcatacaagaaactactcaaaattggttcactttctgcctgcaacaaacaacattgtcaagatctctcaaaagcttcaactttacatgatttcataaaattcccagaaaacttgaagagaaagaaatagaaaaaaaaaaattgtcttggcctctaatcccaaaagaacatgactttacataatatcacagaaatcccagaaaatttgaagtgaaaagaaataattttgacaaataaaagaaggtttattcctttttttaagagaattagatagataccactagcttggcctcttgtctgatggcatcccaaatggggtcttgaggggaattagaaaggtgtgagagttgttccaattgagagtgattagacttggaaatccccaatgcataaacggggaaaaccttgtctaatcttttgggagtagatgatgagttggtggtagtggtggtggaatccatgaagctttgtttgtcatcttctgagagcattttagagatagagacaccccaacacctctctttgctgagacaggccattagaatggctctgctcttctatgctctgctcagttgtttgttaagagagggccaagtctttttataacactagaaaaggtttcggcttttggtttttggtttctgagagattttagagtgagtttgtgtacagttgacaactctgcaattgcatgcttttgctaaaatcaagatgacatgtgtgtctaaaaatgtgacattatagataaagatgctttttttttccctgcacttttcaaatgaattaagaaagaaaaaccccataattctataattatgtaatgtaattcatatacatatgcggttgataatagaagctgaagaagttggtaatagcaggaaccctacttgtacttattcgaaaagacatatcgttaattaattatgaaatgtcatttttaaaaagtgttaagcattgctcaatatcgatgcctttattcaaatggggtggtttattccaagtttcataaacaatttcaatggttattatatagtggcatgacatgaattaatatgatgaatgatacgactctcttatgttacttgttaaaattgatttatctattgttttataatgaaactacaaagtaaaggtgtttgtagttttcaagtcattatagtaattagcttttataaaaccaaaaacttaattgattaaacacacatagaattgaaccatcaaaagtggtgaaaagggatagtagagttacttaagtagagtacttagtttatataaatatgtaataattatcatgtaattggctgtattatatggaacgtgtgagagtggttttgataacaaaggaatgaatgtggtccaagtagacgactagaaacattctctcaaataataatattatgaatgaatgaaccatatgctttgctttccaatcattattgatttgatccctcaaaacaaaaagtatttgtatttattttacagttattgaaatgatcaaaataatatataaaataaaagtagtaagagaataagtggtcaagcatatatcaaagtctgactcactttttcttgtcttaatttgctttggccttatgacaagtgaactactaaacaaataaagacaaaagcaacagaaagaaagaaagaaagaaaagaggagagataatgattatgtgttcaaagttgtaatcttatgtaaggtaggcttattgtattctattactatttgtgttttaaaagtgtaacaaacatttacatttactttgtaatcaattaacaaaaaaataacatcaaaacaataataaaaacaacatacacataacaaaaaatcaacagcaaattaacaagagtacaa

SEQ ID NO: 303613 - DNA, 1314 bp, Cannabis indica
acccctattcgatatggtcattttggattatatacaatttgaacggcatatataggatatatatagctcgagatccaaaggggccattcttacattattttttgctcaaaaatatataatgaaaatgaaagtaagtgggtctcaatttaagttgcgacatacaaaacataacacataacaatcacaagtactaagaatatacacatgaagagaatttaagaaaaaagtaggagatgaacctttagttccccgtgctccaaagtgtcttttttttttacatatatattagcatacttaaaaagttttacaacaaagtcatacatgtctctcttttctatataatataattaaattaaacatatatcatttttattcaacgttataacaattaggttttgaatatcaccaacaacattacaggaataataaagatcagttatcattaaatatattaaattgttttggcatgaaaattattaattattttaacagcaatttgcttaactttgaaattaagaagaaaaatctttcggaatatatatgtatattattttatttgttgggcgactggtatgtgtagaaaattggccaatgttcaagctccacgtgtactaaaatatggtacaagctaacttgcaatttacgtagccgacctatcaatataatttttccccgtagacatgaattatatggtatgattattatctctataaaatcttgtcctttgattaaataataattattattgatttttgaaaaggattaaataataattatggaaaattaaaacccaccttagcccttctttatttaaccctttctccctagtttccacacgactaatcaattgcgtcggcgatcggaccttttgacttttattaaacaattgtaacgaaaataccctcagttcgttcagataattacatatcaagtcttgaaattaagaaattcaacgtgtatggagtaggggcattttggtcattccgtagactcaaagtcacgtagcacaaaaataataagggaacagtgtgccccctttaacctctatgatttcacatacaattcaatacaataccccgtttgtattaatgctcttttgggtcactgtccccaattgaattttgctccccaccaccaccatcccaactgtcattcttcaacacttcatccctaaaagaaaaaaatttaatattcatatgaaaattacatcaccgtctgatcaaaaccagagggtgctgatgtaattaactatgattatatatatttattatatagattcaatttactatacatatatatatatgtaataaagtt

SEQ ID NO: 303614 - DNA, 2136 bp, Cannabis indica
attaaaaatgagattctaagtagggcttttacacccaaatttttaattattttacttttttattgtggggtagaagttttttaaaaaatacgtgtaaattttatactgtgtactgtattaagtttttactgttgtttcacagttatttttcaattgttctgttttataattttgcagatatttcataaaaaataatatttttataaaaaatttcgtgtgacagtaaaattataaacttttaatcaaaatttaatatatttttttaaaaacctttctaaataatataacattacacaaataaaattcaggtaatagtccagcttgctcttctggtacgtccacgtgtatttacggcatccaatacggcgaccaatccttctccgttggctacttcggcaaagaaacactaactctgtcatcttccgccgttatagataacgtccttttcggttgtggccaaaacaaccaaggcctttttggtgggtccgcgggcctattggggcctgggccgaaacaaactctcaataatcgaacaaacggcccaaaaatcaatcgctcttctcatattgcttacccagtacagccagcaaaaccggctacctaaccctaggaaacggcggctcggcttcaaactcagtcaagtacacgccactctccaccatatccggcggtgcgtcgttctacgctctccaagttctggccataagcgtaggcggaaagaagcttccgatttcagcttcccttttccagacagccggaacgatcatcgattccggcacagtcattactcggcttccgccgacggcttacggcgctatgagctccgagttcaagaaacagatgagtagcttgggttatccgacggctccggctctatcgattttggacacgtgttacgatctgagtaagtataagagtgtgacgattccaaagattggattcttcttcggcggaggaacgacggtggatcttgatgcgacggggattctttacgcttcgaagatttctcaggtgtgtttggcgttcgccggcaacggagacgatggtgacgtggcaatatttgggaatgttcaacagaagactttgcaagtggtttatgatataggtggagggagaattgggtttgggacacgtggctgttagttataattaattaattaaataataattatgattaattaagttgagctaataattaaagaaaagaaagaaaagaggaaagggtattgagtttattattagctcaaacttaaataagtttagctaaaccatttttttttttaagaaaaatgttttaatacacatttaaaattgaaatattacaatcaaggcagcgagatttccgatcattgattgtcatattgagatttcagatcactgtgtaaaagaaattgaaatattacaatcgagatagcgagagtatcgatcattggttgtcttattgtaattttagattattttatctaaaaaaattgaaatattagtgaaaatgtgttaaatgtaatttatatatacatatattatatatttatgttgttgttggtggatgatttgtaattgtgaaagtaacttataaaccaatgaaaagattatcttttgattttttgagtgagaagattattgtttgtagaaatgaatcatggtaaaatgataattaacaagtaatgtgtatttgtaatgtttgaaacttatagataaatatgaaatttattaagatattaaaggagcaaaaagaaaaatggaatcaacctaatataaggaaagtttactagaacaaaataatctactaatgaagtttttttttgtaagtttttttttcttttctttttctatttttgatgggagaaacctaaatgggaagtgaatttattctagttttttatatttttgtttgattataattttaaatattattgggttatattaggcttgagtttctcattatatatatatgggtgactattcaatggttacatttttattataaccatatggttacattttttttaacttgtaatagcaggttacttgtaatatcccgataagttaaatggtaaataattagggtttatattgatattatgaattaatcaggtaataagtgggattatgatcctactaatttatttcagcata

SEQ ID NO: 303615 - DNA, 2794 bp, Cannabis indica
gaatagctcatggaccatttgtaacggactgaaaagtttaagggccgacataattatgcatatgttacagttttttttttttttttaaaaaaaaaagttggctcgtaccaactttagattttaattgagcttctccatcaatttttcaataagttgttttaattgtttacgaaacacctttttcattaatttttaactttttaaaaagttatgccaaacgagtcctatttcttttacctctgtctttagtctttatcttatcatgaacaaccaaccatgatataaaactatgtttaagaatattcaatcttcaccctacttcttgactccattaattccacttgtatgaataaatgagtatctttttatgatatattcttgaaatgttgcagcgaattaatcaagcttttaaacttcttttaacttttacactcttcttccaatatcaatttgctatgcatgagggttgtataataatcccaccaataattaatcttcctgcatgcttgatatatacatcgtatacttattttatccacaaattgtctttcttattctcaactattgtccaaatatattttccaatggctgcagtgcaatactattttttaaagtccaatattcctcctcacttatcttctgtgggtatattatcactaaaattctcaaatatagcaacaatcaacattgccttacaaatggtaccccatatctcagatcatatatatattgagctgatcagcattactatataggtgcactttggtgacgcgttctatataattttctataactattattaaagtaaaatatatatgtgagacttatactgaattatactattgctgatattacacagagtggtagacagtctaacttctctattttatatatttgtgatatatgtgcctatacctacatagaatattctaaagctagattctagtaatagtacgataattacctttttttcttttactacttattatgtttacttttttaaccctttgttgtcgatgtatggttaaaaactactgaataaaggtcagaaattaatgaaaacataataataaaaaggtacttttttattatttcttattttataataatttccctctgaaaaaggaggtggatgaatggtgcggttcatctcagggatttatcagatggttggggttggaaagtagttgatattgtctggcctaaattcgtggacacattctaatttgaccagagatatgaggatgaggacaaaatggttatgggaaacttgatatggtgggggctcagaagctcatcaacaacaattgtcttccacattctattgtttctccaaatatatattatcaacaaacatcttcacatatagctatacctgaaatatcatctagtactttattatattagcttaattaagggaaagaaaaaaaaagaagaatatatatttatatatatatgctttaatgattccaagtttgaaaatttgaatggctgtcaaatgagccgcagaactagttttcgaacatgggttgcactaatatctttctctcacttgtgtatgaattatatatataataaattcatgttttaaaatgaaataataaagaagaaaactaaataaacggtactttgcatggcccatgcaacctattggccacggtacagagagagagagagagagagtatccacttgcgcttattttatatttgggctgtcagatcgataacatgcatggcgcctatataaatagctgccatgatgaagttaaattcataacaaggcaatttgcaagctcatgtatatttgatctcctttatagaaaaatctagctatacctacatatagagcttcctatacacttaaactattattaattatacaatatttataaattataataagtctctctctcaatatatatatatatcttttattaatatatatggcttcatcgatctgtttgccatgtttcgttttgttatttcttactattttcagtcacggaatttccaatattgatggaaggtctttgatgaacttagctgacaataagagtacagaaaccacaaaaaagctttcttataataataataataataataatggtgaatcaatgaaagctgacgacagagccagcaaagtggtgacgtcatcactagctaacagtgccaccaggactgatcccgtcgccccggtgagtggtgaggtagtaattattggtttctcatcgtctccgccgccatcgcaaccgccacctgctggccatgactccacagacttcaggccaaccactcctggtcacagccctggcgttggccattctgttcacaattagaatatatatattttaagcctaatatatatatatatattttaagcctaatagctagctcgtgcttctatttgatgtaacatattaattaaatcatgtcgaattaattaaaattgtcttcaattataacgatttctctgttagctgttaattaattagtgtttaattaaataattaatgtattaatatataaatgctagctaaatatattgatctccactcataagatgcatgtgtataatagtatgtatatgagagttgatgcagtcaattactttgtgtatccaaatacataatattgtatatctaattaattaatgagaaagattaacctaagtaatttaatataaatgacatttttcttgaatatattgtattcttaattaatagcatggaaagtcaagaacatatatttttgagtctctgtcgcaatattacaagtgatctaattacgacgtaat

SEQ ID NO: 303616 - DNA, 2077 bp, Cannabis indica
tagacagttgaattaatattgtctttgtcacaagaagataacgaaagccaatagatcttatctttttgtggaagaaaaatatggtatgatagtgatgtatacacaattttagaccctcaaaacgtttttatcctttggccaatattggactatgaaagttctcactttaggacaacgatagctaacaaaactaataagattctgaattatttgcctatttggtatattatcactacattgtgattgtgaatgtgatggtcttctacaacattttgtagcttgccctagtaagtaaccaaaaagtttagttttattttcaataactactcatatagactaatatccaacacggttttaattttgttggtaaccttattgacttgtgttgattcttattttatttttatcttgaaatttagaaaggaaaatttttcttagaaaaaatataaagaaaatatttttcatatatttgataaaataatatttatacataagttttaatctttgtagaaaaaaaagttcttaatttattgatttaattcaaacataagaaaataaaattcattattgttttctttctcttaaaatccaaacaagatcataaaattctcacatcaaaactttcttcagaaaaaatctaaatatatattgataacttatttattgtaatttgttagcactctttttttcataataaaatctgaaaaaataacaaagaatgggattttgattatgtaatagttctcaatccaagctggtgtattattagatgcattaacatttctgtattaatacaattcaagatattttttagatgcacaaatgtaagtgctccttaaaatataataataataatatattttacatggccatacacttctttttgcggtggtctttttttaatattattattattattattcattttttaataaataaaaaatccaatggactagaacctttgtagtcgctatcagtatgtatatgtgtataattattatttttacaatcaacatgaaatataatacaaaaagaaacgatgaagaaatattcatcaaaactagtttgcccaactagttattactgtttattttaagtgtatacattattaattcacgagtaatttttaattgacatcaaatataaattagttacgccttagaaaaaacaaaactattttaaaaaaattataaaagttataattggatggatattaaaggttgtcttttttttggtcaggctcaccggttatttttgagtttattatgtgcaatttggttggagttgtgttttcaatttttggtgttgtgattagtcttgtctctatggcatggttttgagtattttagtcttgtctgtgtaatataattttattttgttttgttgttggttctttgttattcatcaatggctcgcccttaatcgctgttagtggtgtgaaataataggtcttttacaactgaaagtattgttagtagtgtagttacgaacctgacacattattatagactcaagctacgaggttgaacttgctgcaacaatctctatgtcttttgagcggtagatgaaacagaatataaatgctcttaaagttcactgtaatgttgcaatttttttaatctgtttttattttattttttttgtcaaatgatctgagaatcagacgactaattatttagttcatttttatttaattctaatcttaatcgtgtctctaaagaaaaaaatgtttcaattgaattgtatattattattttagttaatttttattaataagattcgataaaaaaataaattaagtgacaaatctaacattattattatagttaatttaaataacggtaaatctcctaattaaaaaattaaaattaaatttaaacattagttaacagtaaaataagacataattttgaagatttgaactcctcaacggctgaaataataataataataataataataataataataattagcaatttagaagggaaatttgattttctatacttagaaaatcaaaaaatttgatttctaaaccaataattaaaccctaaaaaactatacctttttttctaaa

SEQ ID NO: 303617 - DNA, 1282 bp, Cannabis indica
tgtatataattgtttacatattattttatgctctattttgctaaataatgcacatccttttttttagcaaaaacaaaataaataatgttatatagtttgctagttcatttatggtttttttttatacatgtaattgttagattaatataattaaatctaaagagatatgaacaatagctagtaacgtatagatatataaatataaatgcaaagaaaaaaaattaaatatgcgtacctcccgccgtttcctaaaaatcagaatttgagctgtgaaatatttagtaaataaatctgataataattaaaataattaatttgtaacttataaaaacaataatgagttaaatataataataaaataaggagtggggttcaattatttttgcatataaatgatagcagaaagtatctggatgaggcagacaacataacccttctatttcattttcctttcttcttgtttttggtctctctctctcttccacatacaatccaagtttcgtgaaagtacacaaataagaaaataacaaagatttataataacgtactagataggtttaatatatagttataatctgatgatgatgcggaaagtgatggcttcatcttcttcttcttcttgtttttattatcgtcacataataataacaacaatagtattgttattttttattaatccatcgtggggtttgataaagttaccgccaaatcagacagttccggcagtgatcgtgttcggagactcgatcatggacacagggaacaacaacgctcttaagactctggtcaagtgtgatttcgctccttatggtgaaaatttcaggggacgagtacctaccggcagatttggtgatggaaaggtcccttcagatctaataggtgattattccaatttaattcattatttattaacataactatttgtatatatattcttctactctactactattactactacgtactttcatgtttaccatacattcatctaactagatatttatcacaataatctcatatatttattttgagtttaatattgttttagttatggaaattataagtaaatataaataagtttaattaagagtatttatttttaatatagattatttttttttatttcgttatttatcttttaattatagaaaaattattttatatactattttttattattattttttttaaaatatacagtttagttgctccaataatttttatttggaatgctacgtatatttttgtaaaataataaaaaaaaaaaaaaacttcttaatta

SEQ ID NO: 303618 - DNA, 4118 bp, Cannabis indica
aattagctaacaaataaaacaaggttttatttcataacaacttaaaaatttggaaatataattccataaaactaacttaaattaaaaaaaaaaaaaaactatagatttaagtaaaatcataatttctccatatttatcaaacttttttaaaaaatctatattcctcttaaaataattttctccattatagtttttgaaatataagtttgtaaaaataaatttttttctcaaaaaattattttatggaaagattttaataaaaaaaaaaaaaaagagcataggtatcttcaaactcgaacaaataaaaaaaatgttgtcaaaagttctttttttactttttttttttaaaaaaaaaaacaaattaataaatttagacttattctagatattaaaaccccaaatttaagttgtggcatcttttactttgtccactaacatatatgtttatacacaataaataataaggatactcaaatttgtgtcaacttcgaacttttatctcaaaaacatttttttttttcaatatataaacatatacatacaaaacaatattgatgacatattaattaatcatgaatgtatagattaattaatcaaatattaatgacaagtccatcactaaatggagaaaggaacaaaagacttttctttggttcataagagcaaaaatactataaaacaaaaatgattagaatttttcccaaattaatggccttaataatgcacacaaaacaaaagttacacctatgtatttacaactatttgtttgaattctttacttaaaatcaaaattgtcaaacaaaataaatataaaaaagggttaagatgagattgagattgagagagcaataccaaaatcactcattttggcagagccataaaactcgaactcgagtcagtctcctcctgctgctttgtccgaaatctaacctatcgagactttgatttgatatctgcacaatcagctcattagatattaaatgttggaaggaaaaacttggaataggaggagatgttaagtgagcgatttgccagcccactctcgttctcgtcgtttttgctttgcttgcatcttattgaacttctcctttcctttctccaaaagtggatcaacaacgacatagtcattgacgtcttccttcctcgacatgtgatcctgcgaatgattcaatggacaaactctttacgagacaatgcagaagggaaatctgaataatcagctcaaattgtggcattcgagtgcctcttggacacatacatagcaatttcaaatgaacgagacagtcttattagcgaaatttttaatgacatgcagagtatgagtccccgttcttctctgcagtatctctaggcaaatgatcatgcagatgcaataaagatataccagaagcttaccttgctatcgggagcgaattttaaacgaacagctttccaatcagaaacgtcctcatcagtgccaccacttccagttttactacttggttctgcaggtttctgaattacgttcttccggaacttctctagtcttgctagaacctaaaggaaacataaccaaggtgtagaaaaattaatataaaataaccagagaagatattaattataaattcatttagcaaatgatgctaatatcaagagctatgcatctaattattttatatgtagtgatgaccaattcaaaacattacatatatacctcatcttcacgtccaccaagtctgcgcttcttctgcttttgcaattgccttcctctttcagcttcattcaatagttgtaagtctagattcgcattggccatacgctcagctctcacgtctgatcctattccttttttcttcatagagagcttctccattttaggttgttcatcatccgacctggtgatataaaaatactagcaacagtttatatattgcttttttatttgaaaaaaaggatcctttgaatgtaatgcaaatgactcagaaacctctcatactatatttaggagaaagtcccttcatatctaaacctaatgtgctgaaccagttcatcacaccgatgctccgaagaccattacagtaaagtgattgtattatgcagacaaacaaactttagatagatgtttttatagaatgtctagaatgccatacctagatggagatactgcacgtccctttggcttagaacctcctgcaaaagcaaatgatagaggcatagcaaagattaaggcaacagttaaaaaatgggataaggatatgtactacaatgaagagacatttcaaattactttctaatttagataacatacatgaatattcttttcaaggatttgaaattaaaaagctcgattctaactcgatgtttgcctaggtaagtagcacaagaaaacatgcgtgtgcaactattaaccgattccactttgttatgaatagaaaatactaaaaccagatgtaagttagtgagatgtttggttcaatatttgggaattatagtactggaaatgcactgttgactacataccatttcgcgattttggcttaggtggtaaatctcccaattcatttcttttctttattattttctgccgcatccgagcatcaaagtttgcctcatcttcatcttcatcatcatcatcatcatcgctaaaagatttaacttttgaatccttctgaaattcctctttctttgagtttagagcttctctaacagataactgcacaccccttcttacttgtttggcttcagaactctgcacgtgaaacattggttacgaaacttgtcctcttgatcattatttgcttacttaaagcaaggatattatacatacatatctgagattctgaattatttcatgatatgtagatgtaagcttgcaaattcttaaagtgtccatacatgtattatgtatgaatcacaccaagccaacacattttcatcttaaccatattaacagactttaaatgtaacattgtaagaaaataacagcaagtgcatcagtgacctatagaaagtagatagttaccaattcatcatttggaatagcatccttcagaagacgaggatcatcgagtacatcatgactgctcttgatttttttcttcacagctgctaattccttctcctcttcttcagcttcttctccaaatgaaagtaaattcaactttctgaaatgtgcatgtaaagagaccacatttagccaaataatttgcacaagacactctaaaaggggcggacacaaataaacacttacttaacagcttttttctttgtatccttattgtcagtatcgcttgttgaaagatccttagattttacacgttctcttggtacaatatcatcgaatggattccacaatacctagaatataagtatcgaaggagctcaatattcaaaaacacatacataaacgatcaaagggcaaaatgaacagatatagaactgtccctaaacttacctcaattgataatatctttgggggtggatccaatggacgatcatccttatcagtctcaacttctcctaacctcgttagattataaattgaatccccagtaatctagaaataacacaccaaacataagaaataacatcaaaacacttaattcacttctcaaagatgaaactttaaaggatttagcaatagaagtaagcatcaccttcccgaaaatggtgtgctttcggtcaagccaatcgcatcggtccaatgacatgaaaaactgactcccattggaattgggtgaaccctcattagcacaagcaactagtcctctatgcttaaatctcaaacgcgaatgaaactcatcaccaaaaacacctccatatatactctcaccacctacaaaaaaagaataataaaccacactaagaaaaaacctcaaaaccccttcaaccaattgctccaaatcgcgaaaccctaatcacggctacatcaagtcaaataagcatacgtattcatatatacagagccattttatccaaattgagtgtgcaaaaacctcaaaatctcttaaacccattacaaatcacaaaaccctaatcaccatcaagtaaacaaacacacacacacacacacacacacacacacacacacacacatatattcatatcagagccactttatacaattgagtgtgcaaaac

SEQ ID NO: 303619 - DNA, 3642 bp, Cannabis indica
atttatctttaattttaaaatatttttttttatatatttaaattaataaaattatttaggtcaataaaaatatgtcacgtgcacacatgtgtatacagtggcaaattcaaatggcacttaagagctaaatttaacaaagatatcaaagttgtaaacaaaattgaacataaaattaaaatatatgggggttcgccgcaaatttctcattttaaaaataaaaaactaattaaaaaaatattaccaaacgtacccctattaaacaaacactgtttttattatggcatttttatttttgttcttatcctttttattaattgaaattttaaagtaatgatctgtttacacataaattacacacaaatttgacacacccttatgtaacaagtaattttaattaattatcttcatttaagatgtgtctcatctattaaaagtaacttgggacccaaatcgtctatctaaaattgctgtcaattttcctatccaaccaattaaaacactccacattctcaaagaattaacagttgcaattttcgtttgttaactgcatgttttccttctaatgcaattctaaattttaatacttatttaataataaatgctaaaatatttttaatacacattaatacagtggaacccatttatattttttttttaaagacaagatatattgcaacattaataaaagcgataatagtacaagttacaatatatttaaacttaaatttagaatatttccattctaaatgacctctctctcatgtcctaaagctgttcttgccaaattgtgagagaaaacattaagatgccttggaacatgatgaacagacattgaaagaaaattagagataaaggaaacaacctgatccaccaaatcagacaaaattgacttatccttccatctatgcttaaccttattgaaaagaatttgacaatcactttcaataaaatccaaagggaaccttacagtcgcacaccagttaaggacctagaccaatgctttagcttcagccaaaagaggagacactttgccatcaaaagaagtagacaaagcagccactacttctcccctatgattcctcattgctgcttcaatcccgatcttatgtctgcggtcattcatggcaacatcaacacttaatttgtaacaacctggtctaggaacagttccaacaaactcgccagtatcccaaccaatttcaacaccatgcaaaggctcgactttatgatcttgagcattgtcaaagccttgtgatagagccaaaacctgaaaatgggcaaaggaaataataaccttacgttaaacaatttaatattacgtctattccaaatttctcaaattatgtcgagaaaaattcgaagttcttctattgacaaattttcgaagcctctgagaatgaattccttaatatcatcgcacttattagataaatgaaaagctttaaatctaaagtctctccactcattcgaagctctggaacactctattaaagcatgagaagtagattcaatacacttagagcaaaaagagcaaagaggactaggcaaaaaattttgatgaaaaaggtttaaggcagtaggaagagcatggttaaaagccctccaaataaaatgtttgattttctaaggtatttgaagattccagagaattttctactagagaaccataaggtaattattagaagaagctaatttggcaaggtgatatgctgaatcaacagtaaaagatctagaatagtaatgctctcaaatgaggaaatgaggatgtcttccagggaagtatcacaataggaacaacaagaatggaaaaacaacatcatcatcaaagtaattcgacaacctatccctattccaacaacctgttatcgatgaaaaaggagacagtaggatcagggggtgaaacattatctttaaaggaaataaatctccaaccaggaatccaataagaattaagagttattgacttaccgtttactactttccacaaaagacctctcttaagaagatccctaccccaatgcagactttgcaaagtaaaggaagcacagtggcctttagaagcagtaagaaacgaattttgacaaaaatatttagctttgaacaatttggcaacaagagaatcaggcatggtaagcacacgccaagcttgtttagcaagaaaagcttgattgtggtggataaaagaacaaaacccaagaccactcgagaacttgactgacataaactatcccaagctttctagtgtatttttcctttgtttcccaaagaatcccaccagaaatgagccataaggccttcaattttcctataaactgaaacaaggattctaaaacatgacatagcataagaggggatagcttgaataacaactttgaggagaacctctttccctaccttataaaataaaagactattccatgtactcatcctagagctaaccttttgcaaaatataagtgaattgattcttcttagacctgccaaaacattgaggaatacataaatacttactgataaaaggcttatcctcaagaaccaaggtagtaaagaaaaacttagaatcagcaggggtagtattaggagagaaaaggacagaagacttggaataattgactaactgactagtggctttatgataatgatcaagggcatgtttaatagctaagcaagaacaagcagtagtcgtagagaaaattaaactatcatctacaaaaaaaaaggtggcatatagtaggggcagaacgacaaatagcaataccttgaaagtgatgattcgattcttgaaatctaatggcagcagacaaagcttcagagacaagaagaaaaatataaggggaaagaggatccccttgcctaaaacccatagtagaagtaaagcaatctgataaagtaccattaatgagcaacctaaaggaaacagaggaaatacatttaaggactaaagaaataaatctagctagaaagtgaaaatgatacataatagcctcgacaaaactccactctacacggtcaaaagcttttcccatgtctaacttaatagcagcctaacctactttgcctgatttcttatggttaatggcattaactaactcattaacaataaaaatatatcaaaaaaaattctactttgaataaaagtactttaattaggagagataataacatgcaaaacactccttaatatattagctaagaatttagaaacagctttatataaagtagaacaaagacttatgggtctaaaatccctaatccaattggcattctttttcttaagaataacaacaataacagtctcgttaattaaggaaataccaacattatcattaacaatagcaagaacagcagtacacaaatcaggacctacaggtaaccaattcttttgatagaataaggtgctcacaccatccatacttggggatttatccctagccatttgaataagagcaactttaacttcctcgacagtataaggctcattaagcatatgaaaatgaaattcattaatatgattgtgaacacaactcaaactttgctcaatcgcctcagaatcagtacctttagaagtaaacaaattgctattgttatcccaatttttgcactctaacgtggcatcacatgatggtgacacgtggaatcgact

SEQ ID NO: 303620 - DNA, 2675 bp, Cannabis indica
gattcaacgacaagatgaggagactaagagattgaaacaacaagggtcttctaatgtaccttcgtctcaatttcccattgcttttattccggtgttctcagcagcacagagagtggctggtaaccaaatagaattatctgatgggagttttttgttgcaaggaccttcagttattctgaaaaatctagatgagatgaatattccttcagtcgcgtacactacagagtttgctcatgattctcgagggactctagctattggtgaggtcactgttcctcctacctctcgtttaggaagagatgggagtgagttattaattaatcaaagtaacaaggctccatcaatttcagggggctcgagacagagaaagaagttctaaagaaagcaaacacgggggtggccatttgagcatccctgagagttgttatacttatccaaagtgtgtccattgcaggaagcatcatctgggagagtgtaggcgtggaaaatgcttttgttgtggccaggtagaacactacaagaaagactacccatggctatagaagaagggaccaaattaggggaagaatcccctccttgtttgggtggtagttattacccaaaccaaagttgaagatagcttttctatggtgttaggtcagtttcttatcaactgttttattagaccttatgttaattaactttgagactgcacgttagtatgtggtagacaaggtgattaataaattggataaatcttgaaatagttgtgaaatagggtttggaactcaattacctagtggggaattagttgtctccaaagggatagctcaggtctatgctgattagttggaaataggaagttaatactgacctcgtagtttttggtgtagtagagtatgagatgttactcgaaatggaattattatttaaaccagatgctggtaacaattgaaaatgaagactcgtttgtattatggtattaaggatggggttgttaagctccagttttcacaataataaaagataatatccatcatgggatggatgtgtagggtctttagtaatggtgatagatactttcaggcagagataattcaacctctagacattaaaatagtataagagtatttgtatgtattttcggtagagcttcttaaattattattacaacaagaatagactttgttgatgttttggtagttagagcagaaattgttttaaggcattttattgaatggccccaacaaaaatttaggagagtaaagtgatgatttcagggagcgattaatttaagagttacttaaactaggacaccaccatggaaattcctgaggttggttattatgaaggaagataaatcaattatatgaatgtaactatcaaatattatgcaagttgctaatcatgataaataccccctgatagggagtttgagtgattcatttattttggaaaaggtagatatctttaagaatgatccttgctcgggttatcattgattgagaataagagaagaagcatttctggtagtgtatgttaaatatatctttgagcaccctttatcaagaatgatggaagggtaacatctatggatggttctaccagataatgggatcataattaacatggggtaaggttgaattgatcaagctttgaccaagattagacatcgatgtcagaattgaagttttccgtgataggttagttatggtattatgatttgaaagggttattttaagatttcaaacttacaatagagcagattaaggggaagtagtgagctacgtggacaggcaattgataaattggtttccaagagctgaagttatagttgaattcaaccttaatgttaacatgactattatatcaagagaagttcttggtcttttgtaaggtagacagaaaggatgtggagggtgatttaaagtaaattttagcgttactatctattcaccttgtcaattgacggagtataagcagtgatacccaaatcactatctggaatttgtgaatagagattatgtaattttgtgtttttaagtaggaattagggcttattgtcaaaaataagtctaggaaaatattttttcaatttcagagatatatttgaatactagatggattaattatgttatatgtgaatttttatgaatttcatgttttatgctcggtaacagtggaatgcaacgtgcggcctatagagtaacttgggtgttgtttagaagttttgattttattgagtatgtagtggacatttagaaggtcgagagtgttcggtgttatggttttggaccataatacccctaggtcttaaggttatctttattttaagaaagggggtatttaggtcatttcatgttagcttgtaaatgatttattatttgaattaagattatcaaattcctagtttgtcctctagtgagcatatgttatgctgaaatagggataggatttgattgagaaattaaaaataaattaaagaaaatacaagtaaaccacttttctctctctctctctttgggggtcggtcacctagaagttttgaagcttggggaaatttcttacttgtcttaaacaaaattagaagggttttggtgagataattcttagggttaggaaacaacagctcttggtaagcaaattctctttttttcctttgaatttttgtaattaagttggtgttcatgaaattg

SEQ ID NO: 303621 - DNA, 2284 bp, Cannabis indica
attttttattaaaaaataatttgaatatacgtggcaaattacttcatatttacataacaacgtttcctagtgtgaaaaataaatgaattgtggtagttaagtttagtatgaacaaaactttgttaacttcaatttcaatcacacacagcccatcatgtcttcttcttcgtcttctccaaacatgttcaacaatggaacacctcaaccaaatccatgctcatacaattactcaaggcctctctcgtttcacctacatcgccagcaagctcttagctttctctgcatcattatcatcatcaaactccggccacttaggttacgcccagaaacttttcgatcaaatcaccacacccaatgtcttcgatttcaattccatgctaatgggcttctccaaaatctcaaatttcgaaaagggtctctccctttataccaaaatgagaagaatcggcgttgaccctaattctcgtaccttcacagttttggtcaaggcttgttttgttgtgagtttgcttggtcaacttcatggtcagattgtgaggtttgggcattgttctgatgcttatgttactagctctgtgatcagtacttattccaagtttggatcgatggagttagctcgtcgtgtttttgatcaaagtgttgataagaatgtggtttgttggactagcttattgagtgggtactgtaataatggtttgattagtgaagcacgtcaagtgttcgatgaaatgcctatgagaaatgatgtttcttatagtgcaatggtttctgggtacgtaaggaataattgtttctatgaagcaattgagttgtttcgtgagttgaagacttgtccaaatgtgaatctaaaagggtctcttttggttagtgttcttaatgcttgtggttcagttggagcatttcaagaagggaaatgggttcacttgtttatagacaaaattggtattgaatatgagcttgagctatctactgctttgattgatttctatgcaaaatgtgggtttattagagatgctcaagaagtatttgacaaaatgggttataaagatgtaacagcatggacagccatgattgtggggttagctgttaatggcgaaaactatttggggcttgagcttttcagggaaatggaagagaagggaccgaaaccaaatgcagtgacattcattggtgttctcactgcttgtaaccatgaaactttggtggacaaagcatggctgtttttaggacgaatgtttaaagtttaccgaatatcgcccgagatcgaacactatggctgtatggttgatctcttggcacgttcaggaagagtaaaagaggcagaaatgttgataaagcatatgccaatgaaaccagatggagccatttgggggtcaatgctaaaagggtgtttagtgcatggctatgtagagttaggagagatggtgggaaaggttttgattgaattagagcctaaacatagtggaaggtatgtagttctagctaatatgtatgccacaattggtagttgggaagaagtgattagggtgaggaaaatgatgaaggagagagatgttgtcaccatctctggttggagtttcattgagattagtggtgtagtacataaatttgtagctgatgataagtctcattctcagtcaaggaatatctactgtgctttggatcaactgaaaagggagcttaaaagttcatccatagctcaattttcaaccatgtatttttagtttataatagtaaagattattcagtcccgtatagagagaaaacaaatgacaaatcatatgattcagcagcaaaaaatggactttttacaactcaaaataaaacagaaatatcttactataatataatacatagggataatgtacgttgatcggtttatgttaagtacaatgcgtctaattaagaaaaaaaatagaaaccagtctaataaaattagtcgaattagttaggttaactcgttcaaaccgatcattaatatttattttttaaattcaattattatattttaattagatgtaataacgagacaaatagatatatatttataaattggatttaaatcaaatcaacccacaaaaaaacataattttaactttatattttttaaaaattcatataaattatatgatatataaatatgtatatacataaaaatcttcttaattgtgttggttggattagtaagagttgaataggcaggttgatattatcttcaatccacccaatataaagattaaacaagttatattttcattgaatttttcgatttgtattttttgtc

SEQ ID NO: 303622 - DNA, 4985 bp, Cannabis indica
ttaaaattaatattacgtggaccactaaaaaaaaattgccacgtgtacaagtgtgtccacgtggacagtccactgtggcacttaactgtgatttttggacagaagtgtgcacagcaaaacggaactaggatttaagtagtttagccgccaaaattttgttttttgtggttaagtattacaaaccgtaaagttcaggtggtttagccgccaatatccctaaaaaataatatttaatcagaatcaatttaataatggagtgtagttataatttttcggggtgcaaatataatctccgcacaatgaatatatgagctagaaacataccaaaaattacatttacaaaaaaaaaaaaaaagaaacataccaaaattgttgcttttaaatttgtcacaataattaataatacaacattaaaataccaatacaacaaatataaaaagaagcaaaaaattatgcccgccgcatttttgtttaagaatatgaatctgatctatcgaaaagatcacggtaataaattttttaaaaaaattagataatgatagattatttatctaaaccaaaattttgaataaatatttggagaaagtgagcataatctgtacatgtgctctcttcttccaattaacggccaacatacatgaagccacataagccctgcatgagaaaatccacatagcaactagattagtggattataattcttagtacaaaatgtaaatgcacaagtcttacctaacttttcctgacaaaaaagaaaacacaaacataggagtctaacctcagtcgcgaaatcattggcaggtgctgttttatgatagaacagaatttgattgtagttttgtctgtactgcttcaaggcaagcctgaagatccttgtattcttccatgtcagagaaggccaccgcctaaaattccataatttattattcattagtcttttgttctttaccttttttaccctttcatagtaagtaatatgaaaagctaacttacctgtttaattgtgttctttagatgcatctcagctgaaaagagctctcttcggctgctagtagatgaagaaatttccatgtaaaccttgcaaagttccaaggaagcatggacgaattttctaaactggtctcgatcattccatatgtcagatccctaaaagatataagagaaaagtggggtgttacataaaagaagatcacatattgattacaaaaccagcaagactagtaaactaagctgcggttatagaacaccaacaaacaaatataacaatacctggtaggatctgacttgcttgagaagggcttcagagcacattgtgagatctcctttgagcttgtgccacctcgcatacaagccccagatatccactccgcccccacctagtactgcctacatcagaaagcaaatttaatgaaggaaaactatgcaggtgtggttctacacataaccactccactcccacctagaaatgccaacattagaaagtcaatttagtgaaagaaaactatgaagggtgattttacagatttccttgtatgatcgtggactctcctatcagatcgttcctacattaatacaaggttttcatttcttttaccaaaattaataataataattgttatgcgaagatatttaaggggttatatcaacatgatgagaagtataatacaatgtccacactatagtctatacaattctccagtttaagaagaaaatacagaagaccacacatttatacagttttttgtatactatataagcataatatcttgattacttttccgatcaaaatgtccatatgtcctctggactatgcagttgttcagattcaaccctcactacaaaattcaacacatacatagaaagaatgcgggagactatctagtttacttaccttctgtaagacttttccaagaaaatcgaccagctgctcagtttcccgtgatctaccctccccagattccatagttggctcattctcagcatctatgctagaatcttgattaccataatcatcaatctttgtggaagacaggctaaccgaaacccttttctctacttctgtcacagttctttccagcagttcgacagaaactcttttatttctggttatctccaacaccatcctaatagcttctagagcctaaaaagaaaagggaaaaaacagcttaagaaatcaacaataacaaaaggtcaaaccatttatttagttatgcaccacaaagttaacaccataaaccgaaaagaatgtgaagttgaacataagatattttgtcccaaaataataaatagaagaacaaaacaaaacaactaactgtgaagttgatgagtttatatagttccaagaaaaacaatttataaagtacggacagatttctataaaactaataatatctatgacctgtgttaaaagctcacccatatggaaaaagtaagctctgcttgctcaccatatatccatcacttcttataatttaatttatcctctcccataacttgcttagcaggcccagattcaaaactggagctccacctaccctataatttatttatttattttttttttgaaactaaggtccccgcctaaccctctaaaatacttgggaccaggaactatagcaattgctatgtaggatccctataatgatttaaaggagcaggaaattataaaaactgcattttagttttctaggagggtacttgaacctcagatatagcaattgtggagcaaacatcaagcctaatcacttgagatatcctattgggtcatttatcgttttgtaaatatagttttaaaactcctttcactataacattatataaatactttttcgagcaatccgtgtgagataaaaatatgaatagttctctaggatacaataaactacaatgaaagcatgtcatgtagatatacgcaatgacacttcaatcttcgaacatgagaagtatcaatcacatttgagaatgtggcaaaagaattaacaatgcatattgcattttaacctaaagaaaagaagtaaagagcgggtaagccaaattggtcaacacatgagcaaggcaatgactcgtgcaatgagtagctttatattaataatgcataacatgcagcaaaaatcaatggcctagatgttctttgcatgccaaagtatgtcttacaggacacaaagggctaggagaactcaatattcccaaaaataacaaaaggcgggcaaaaagagaaacttgcctggcttatgttcttcagatccaaagcaacttggccaaagttctcccacaattgccagctgttgcgtctgccaagtcaaaaggtttaaagtcaatatatattttaattgtgatacaaaagagaatttctgtttacacacacacagagagaagagagagagagagtatggtaatcaattgagagaggacagaacttaaacttcagggcctctttataagcaatgaaagcctctttgcttcttttccgtaacaaatgcctgcaaaagttaaggttaagattatttaccaagaaacatagtagcataaaacattctataaatgtttcccataaatataatcacatacacgattcttatatgaatattaaaaaaaaactgtaagtcatcgtcacttgttgataatttgatacaatggaatggcacatgcaaatatgaatattaaaaagcgataagatataacagaaaaacagcattaaagaatccaaaacaattataagaaaaattaaatgtttagattgacctgaaaacaatgtcgcgttcttatcctaactcttaactttctcatctggcttaactgattgccctaaaaacagacgcttaacatgcatgcatttttctgtttgaccaaaatgaataaaaataaaataacttgtcaaatagttcaattggttgggctagtcattgactcagggttcaagtttcgtatccataaagaagtaaaagaacaaaggctgcattcagatactaatcctatcagcatcaaccaatatctcagtgcacaataaaaacatcactatctagtaccctcacgggtacctacatatcaattaatatagatacttgttcctcaaatgttgtagaagaaaactaggaacctagtttttcctcctaaattcctatcttgtattatcacaatctgctatattaagatgtcaatacaatatcaagtatcaacgttgagtacaaagactagctttactgtaaagacaaggaaacatacaaacaagcaatattattccatgcctcgccgttttctggatcaagttgaacggcacgagtaaagccatccaatgctttctcaacatccttagcctgtaatttttattcagcaataagtcaataaatttacgagataatagcctaaaaaaaccacaaatatgaaaaaacaataatttacctttaatgcagcagatcctagtgcaaaccaaccatctggatacaaagaatttaaggccattgcagcctccctgaggtatattcaagtaaacaacatcgtactcgtgtcataataataaacaaagttaatcaaatatgcataaccagataaagtggaaagctgtttgaaacataccaaagaaccactgatgcctcatactcccctctattatatgcattacgtgcgagagagcgctgtaaaataggatacataaagagagacatacaaggtactcaatagaaagttaatttagaaatcttatcaccttagctcgagcagacctattacttgaaacttctaatgctttttcatagcaggcatcatcattcgtaaaatcacccaacgagcacctaaaagttaaatgattgtacaagtcaaataaattgctccttatgaatctttcactggttgatgcaagcagacaacaaataaaaggaactttagaaaaatctgcactgaaatgaaacgtcaagacaaactaagaaaaacaaatatatgtatattatatatatatatatgtatattatatatttgtgtgtgtgtgtgtg

SEQ ID NO: 303623 - DNA, 3639 bp, Cannabis indica
tttttgtgcaacaatatctataagtgtagatagagaaaccaaaatgctaatattttctcttacagcattagagtttaccaggtcttaaataaaaatcttgaagtttatgactcaaactatacttagtataaaaataagaataaattggatatttatcctccaaattatccatgtagagttttacatgaaatactttcttttcaaaaaaaaaatcccctcaaactatcgcaactattgcatatcttccccttcgacattgtggttcatgtttctaaacaatttgatgatatagcattatgtgacgctatactagtagtgcaattcaagaatcagtaaaaaaattcaaacataaatagcaatctaataacaaattctaacaatatatatatatgcattcttagagttgatatttgtatgtttaatattaataaattagatttcaactaccttaaattggttaaatagattctcgtactataactatatgtgtggcccatgactgaacaagcaaattgttttaaaaaatgaacagaatgcaagtgaagggggaagttgcaatgattttatagtttcggggattattttccaaaaaaaattgcttaaggggaaaaacattgggatgatcataggttagggagttaaaatcttatctattcttaaaaaaaaataaaaataaaaaggtaacaagtagattaggtaacatgacattttcagctttttaaaaggttaaactacttaaacattctcaaggattccagcacatgacatcaaaacataaaatctttgcctgtctatatcgatgtagattgcatgtctaatcattaaacatgtgtggtttcagatgtaaaatagtgataagattttcacttctttttacttgggatattctacatgggcatcatatgaagcatagggtaaaagaaaatctccttgttctccttgtttaaagttctgcatagttcaaagactaggccttttggttatttttcaagatagaatcttgtacaaatccaaagttgaacctaatggagaagacttaatcattggactaacaaaaattagacatgatctcaagaaaatcaaaacaagaagtgggtatcattatgttattgttatgcatgagtctcaccaagaacacaaaatgagttaacgaggttagtgtgacttgtctcaacttaatcctcttcaaaactgtaaaagcttttattaatcagtttttgtttaatacaagggatagcctttacaaaaggatagggcgagtatttatagacaaaagtagaaggaacaagtgcctaactaacttaacggtcactaaaagatagtaaccaattacgatgtctaactgacactaatattaacagtcttataacttacaattatcaatccatccaaacagcctaagcagggttaccaatactattgtattagtacccttctcatgtaaatgcaataatttgagcttaacccctctttctcaactacttttgaagactttatttgggattaactaccttgattacaaatttataatacgtgtccaggatcaaccactttatccaaattacaacctacagaaacaattaacattaatgattgttttttctttttcttttcagatacacaaaaatgcctcaaactcgcttagcgggcctaagttcaaaactaggttcattccctaaccctacaatatttggagagtgtgaaactataacaattggtatgtacacggatccagaaaggactccaacttcaaatcttgtggcagcaaactacagaccttatcattggagctacctctcttgggtatgattgttctatttatagctgaagtatgttagaacaactaataataagttagatattcagattaaacaaacttataagtacacaatcaaggttgggtgtgaacagaaaaaggacagcccatattgtcatggctcatgggtgtgtactcttcatctcaatgaggataatcatatagatatacaaaaaatgtggagcttattgaacttatattacatggtcaataaataaataaaaagaattgtgaattacaccaatttgttctgatatgctttagaataccaaagcaagtaatatatgatcgtgggagagtaaggaaacaacacaaaaagaaaataaagataaggtcattcttgaattcaaaggtaagtagccaactgcagaatatgggagaagttctactcacatattatgatagccataaagttgaaccgagaagtacagattataaatttgtctcagggtgccactttatgctgcatccaacacttatacacaggataaaaatttaattagagcatgtagtcaaaggaaaacagtgcatatccaatggaaaaactagaaacagagaactaactaaaaggagaagatacctcggtttctgcacggaagacactggttgcccactaagaacacaatctatagctaggcttaagtcccttgaagaagtaaataaagctaatttaccatcagaaagaaataaacatgaaactgaatttagcagaaaaaacaactgtgtccaaccttccagttacaggaacaccattacttggtctggaatcatcaaattgtccatgatacacaagctcaaatggtctccgaccatcctgttagatgttattgttatagatggacttaataaaatgcatgcaaaaacaagtaaagaaatttctatagattaccaaccaaagtctttaaaacacaaaaacaacaactaaattatgctaaaaatccaagaaatataatgctttattaatttatatttatataaatcctcctgataagctaaaagtaagaggtgcacttgacaaatcaacttttcgcatctcagctcaggtcacctttttaaacaggaaaaattcaggggtgcaaactgccccaaaatctcttgcaacatcttgtgtctgcattaaaccacagaaagacatgtattagaattctatgcttcagtcaaaaaataaaagaaagataaacaatgataataaccatgaatacagactacaagtataatatgttagggttatgccagtactaggtgcaatgcaactcatcctaattaattctgttttatcttcttcaccacaacaaaattatatcacaatcaactataaactctcctcaagccacctctggttcagatagttcgacttgcaacacttatgtagaagtagatctcattcccaaagcactagcctatgaaaggaggatgccctggtggttatagaccaccaactaagttcatacaaagtcaacgtggaatcctaacaatacgcctctaaatatctcggcacagtgtaggcttcttcatagtccccgtcgttcataatcctgtaggtggctttgctcaagtcgccctttctttggcgttggtcctaatagagaatgttggctctgataccattgtcacaaccacttaggtgaactcactactaagagactttcatatgagaagaaggtgcctaaatgatttaaaactgcctccacttatacttaggaaaagttagtaacaatagcatattttagtaatatttgttttacatatggatttccatattaaggatattgttagaatattagctgtatattaggtgtaaaagaattagggtaacttgtatt

SEQ ID NO: 303624 - DNA, 743 bp, Cannabis indica
caaaaaaaaaaaaaaaaaaaaaaaaaaaaaaaatagcaatataagtttatctattttagattaggataaaatacttttattctttaaaagaaaaataaattaagttgtggaattttagtgatttggtagaagaatagaatgaccatattttctatagtttttataaaacagaaacgaatcatcaaacatgccataaaatctgctgttcaacttataatacttaaaatcaatattctcgtgctatcttcccaaataaatgaataaataatgtagaagtggaaccttgctttcttcgcctgtcttttttggactggctatactacatggtcaatgatttggttttaagttttttgtaggagcttcgtcaaattgatgtggaaattttacactattttactttaagacacattaaattatatacaaaattgatatataccaaaatttatggtgtgagattttgaatctacactagtcgagtgttaattttttttttattctaacctttattaatttatgggtaaatactattttagacttgtattttgtaaaagttaccgattggattctctatcttgttaaatgacaaaatagatcttatattttctaaaatagtaaaaataggactttgagcttaattttgactttttttttaatataaccaacttgaagacaatttctaacacgaacagatacagaaaatgtaaacagttttatcataacacctttcgatcagattattatta

SEQ ID NO: 303625 - DNA, 2875 bp, Cannabis indica
ataaattagtgacaacatgtatttaaatactatattttaatcacaagtaattttgtgttgtaagtaaatatcatacttagtagataaaaaaaattatattatgactgaaaatttatcactaattaaaggtagttttttttagtagtatgacatttaatggtagtattaatcactactaatattttttaacatttctccttattaaaagagaccatttctccttattaaaagagaccattaaatatgtgtcaagtattcagaacaaacaaatgtgtgttaatttcaaaacaaatgataatttaaaaacgaagaaaaaacaacttaagtcaagattattcaactatggaaaacatacaattgtacccttctttcttaatccatatcttatatattttcgaataatatatacctcaaataacactaactatatatataccaatggtttgcaataagcaattgttaaacattttttcttttcttttatataaattgagaacatatcaattttattacatttattcatataataattattgtatgcccaaagcgtactaccctatctagctacaaattaattgaaaaaaattgatcaactatagtaataatttatagattaattagaatttttcactctcgaactttgacatgtaccaaatcatattttatttttttattttttatgtcattaataattttccaaatctattaaaattgttggatttaaagactgtccaattttattaacggaagtctgacatgaattcagaaaggcacaatttgatatgaattaaagttcaggaagacatgatttaatatttacatatatttaagttttggagacacaattaacagatattaaagtttagggggtacgttttaatacatagacaatcattgtgtttgtaaaactgtatagattttgacagaaatctataaattcaacaatataatatatctcaaaaattcaagagaaaagtttaaactgtttgaaaaaattcaagaaatataatttgtacatgttaaaattcagaaataaaaaatcataattagcaaattataaattatatgatttattttccaaaggaacatatttaacaatattttttatcagaggattacgtggtgcagattctttctccatcttttcggtcatattagcaatcttaagaaccacgtgttagttaagattctgatacctcattcagccttaaatgggtcatggtaactaccttacgagtttctatcacacagataataccacctaagttaagttgtagccttcaaaatagtcaagcctttaaaattcttttccaaaaaaattatgatggatttggaactcttaacccaaacaataaaatatatcaataaaagcaatcactaccgctagagacatgatttatttaacaatgtttttggtttggcagatttccaacatgcatgcacaaacatcattatgcttagtgacgtcacactttttttttgagctcaaaatatgcttagtgacgtcacacttacttttgtttggtaagatagaaaatttgtggaaaatttgatagattagttgactattagaaaattctttattctgtacgaataggaagattaaggaaagaggagaccggctggcaaagaggtcaaagttttactagcgtacatttgtagtggctaaaatctaacttttaccagtacatttacgcgctggaaaaagtcaattttgccagcgcttttcattttacccaagtacttttaccagttctaataccaacattgatttgccaacccccttttaccaacacatcacaagtaaattctattttaccagcgcaataccaacttttaccagcacaaaaatattctggaaaaagtgacatttcttgtagtgactagactcgctacactaaaattataaaaggacaaactaaaatttattcaaaacaagtcctaaagaagacttcaacaacatatgattgttaaatttggataccaaattaagacaatcaaactcaaaaataacaccattataaccaaataaacaacattgagcacccgcacttctaagagccaaagcttcaatggtttcaggtgagaaatctccatccaagaaccaagaagctaaagccaacacctctccttgattattcttgacaatcatgcccaacccacaacacccattagacaaatccaaaagggcataagcattggtttttacgaaaccaaacgagggtggagtccaactgagatgatatagaaggaagctgggacacaatggcactcgactcctactcattagaaacaacaacgactttcctttgacacgcaaccaagaaatcataaacccaagttaccaccaattcaaccaattcgggagggatgagtttattattatgaacccatttaaaaataaacatttttaatatataaaaaataaaggctaatttgaattttaccctctgaactttgagttttgattgtcactacaacaaatttcattattaccggcggaagcatccgccggtaataagtatctaggccgccggtaattattaataccggcggaatccgccggtaattatccgccggtattaattggtcgctaaaaatggttattaccgacgaaagggggattccgccggtaataatattaataccggcggattaatagcggtggggtccgccggtattaatatttttaaataataaaaaaaaatattataatcataaataccggcggacccatccgccggtaataataattttaaatattaaaaaaaatattattctgattatttaatataattaaattaattataataattattttataaataaatatattaattagaaataaaatatcaaaattaagaaattaaacatt

SEQ ID NO: 303626 - DNA, 2643 bp, Cannabis indica
gtggttaacacttaaccaccaaaactgattttttgacgacaaaacctaccaaactcacattctgttttgctttttatacttccgtctaaaactctcaattaagtaccatggtggactgcctacgtgtacacaagagtacacgtgataaaattttagtggtctacgtaattttaatttttaatataataaaaataatttaaaaattatataaaaaaattagaatttttttttttctctttttctttttctttttctttttcctttgtcttttattttctttctatttcttctcgaaataggccagaacccccaacccaacttcttcttcttcttaatctgccattaccatactttttcgaatgatggggtctgctcctactcacatagacggagcaagtaataatcaacctctcttcaaactccaacaagccttgagaaaccttcacaggtcgagcaactaaatccccatccctcttcttccagtgcacacaaagactaacttcgtcaaaattcaaagacaacccttctattgaatgaacttgaagagaaaaacaacagttgaatatgtggtttcgaatatgagaaagtgccttcaatggcttccaattccatatggacttcttctccttgcgagatggctcatcaatggcatgtttcacgctcaaatttttatcgggcaggtgggttatttgttcttcagatagaagggcagagccttgatctagagactcttcctctgcttctccttcaacaacgagctcatctttctcttgaacgatgattttagcataaacttcttcttctttggtgtcgaatacctaatatgtcctagtcgacctgtcaaattgtgaaaatggtggtcatgaaagagtcttataattaggcaacccttgcctttttaatctcgactttgtcatcatcagccaccttcaacatttgcttgtaagaaaagggacacactttattttatacataatataatatgttaaaaaagtttattaaaaattgatacaaacttgtatttttatagtgttaattataatttaaaattaaaaaaaaaataagaaagatttggcttcaatggtttgttaggttttatgtcctaaataacaccattctacgtaatctcatttatttattcaataaagaaaataaaaaatcttttatgatagagtcaattaattggttcacacattttatttaacgtgattatatgtttaatatttaaattctttaaaatttagaatatatagctattcacaattattatgatgtcatcagagttaaaaagtattataattatatgattcaaatattttactcccaagatttatcaatactctgaatttacattgacatgaaaatcgatgatgcgatctatttgcaccataaaaaagtggtatgacttttccaaggcattggtaaaataggcttgaattagatatataggtttatattggattgtatcgatgttaatagaaaaacaaatatgataatcttacttttgtatttattcttagtcaatatcacttagtttatcatagattaattaaatctgaatactgacataattaagctttaaactaatcgtgttattcaagttctttgacttattcgttaccatcttaccctaaggtctaacccatacttacatctctagaagtcggtataattgagtgaaagtataagtcatagatatagacatctataacttctaagttagaagtaaacaatttcctttgaacttggttgaagtatttaatgatagaccactcatttagcaattaaattagtttactgaaatatcattgtaccaactaagtgttttagataaaatataattaaagggtataatggtaattttagttcctatttattttaaattgtctatagaggatcgttgatcgatatgatagaaatacaagttttcatcaatttttaacatgttatatcatgtagaaaaaaaaagggaacgccccctctcacttacaaaaaaaaatacgttcccctcaacttaaatcttgagtccaccactggttattattgagcaatagaaataaccaagagttagatcactgaacggaaggagtcatattcgctatgcaatatatgtgtaagtattctatactcaatatgtgaaattaatgttatagaaaattagtatttatgttagatattaatttatatgaaaaaataaactgattcgttaagcatatgcattcccaatatggttaaggtactaaagacaaatcttgttggtaatgattcaaattgaatataaccatttttttgtaaaatgtaaagtgtaaatgcttccaaaaaagaaaagtaaagtataaatattgagatttaaacctttgatttcatgactatatatactaagtcattgttacgttcattacacgtatacttagttatatttttagtttttatttttattatgtgtatttttaaaattttataaattaaaagaaaccacttattaatttttaattttttttaaaaaaaataatatttaaagttttaaaaatttaagaaaaataaatataaagtttaagaatattaaaagtgaacatactcctaatattaaaaataacaataaaaaaaaaaaataatgttacatataatatattaatatttata

SEQ ID NO: 303627 - DNA, 2268 bp, Cannabis indica
aaaatctgtacttgtttcttcaatattctccagtttgtacttgtttatatgagtgtatatttcccaagagaatagtaattggtttttgtaaatatgaaattctgcaagaaataccaagagtatatggaaggccaacagagaaagcttcctgctgttggcttcaagaagctcaaaaagattttaaagaagtgtagaagagattttcactctcaaaataacgttaatcgaacccttgaccttcaaccctgcccccaccaatgttcaggttaatatctataaatatttattgtagatttcttgatttttcatttttggtgtatcaattttcttttttaaattctgggttttaattgatttgtttaatagttgaatcatgaagattctcttctctctctctgctgattactgacccataaataagaaggaatttgttgttgtttaaaagaatctgataccttatattaaaaacagagttttaggggcaactagtctaaatttgaattacttgttcaaaatgaattgcatataaataattgaattcaatttggtttttgcagtatgtgatggaaccttctttccttcccttctcaaggaaatgtcagatgtagtggggttcttcaatgaacgtgctcagaaattgcttgagctacatctggcttctggtataagaaggtactatttctggtttaaaggcaagcttcaaggaaaccatgttgctttaactcaagaaggcaaggaacttgtcaattatgctcttatcaacgccattgcaatgcgtaaaatactaaagaaatacgataaggtaatgcaataattcaatactcttttgttttaggcttcttctctcttttgtttgatgtgttactttcttttgagaacagattcattactcaaagcaaggacaggcttttaagtcacaagcccaaagtatgcacattgaaattcttcagagtccatggctttgtgaactaatggcttttcacatcaatttaagggaaaccaaagccaaatcaaagaccaaacttgcttttttcgagggatgttcccttgcattcaatgatgggaagccatctctcacttgtgaactctttgattctgtcaaaattgatattgatttgacttgttctatatgtttggtaagtcccccagattatttctctttagacccttattacagatttcatgatatgttttcatttgttccaattccttttttgtgtttcataacaggacacagtttttgatccggttgctttgtcatgtgggcacatattctgctacatgtgttcttgctcagccgcatcagtaacgattgtagatggactcaaatccgcacagcctagagcgaaatgccctctttgcagacaggtaagttatattttctagattgaaagagatcagtttatgatataacaataagtgaacaaaaattatggcccaagtagagagttttcgagattgaaagaggtcagtttatgatatattgttttactctattcagggaagagtgtatgaaggtgccgtacacttagaggagctgtgtattttattaagccgaaagtatgtcttctgtcacaagccttttgtgttagattacttagtttaaagccatatttctgttttttttttttcattctaattggtcctttattgaacagctgccatgaatactgggaggaacggcttcaaaccgaaagatctgagagggttcgacaaaccaaggagcactgggaatctcaatgtcgagctttcatgggtgtctaattggacccctctctctctatatatattcatttgatgctggcaattgtagaaagtgtttcacttaatttaaaacttgttattgttttggatgtttcgtgccttatacaggccttaatcttagaataaaatgcagtgtatgttctagaacatagtaactctcgaggtttggtggagaaagactttagcaagggtagtgtacattttgttctaatatgctttattaaatttaatcttacgatttcatccatgtattcatgtgaaccttctaacacgatgtcaaaatgatctttcaaaatgtttgtaatagtgtgtaagtgttcatgtcttcatgattagatgagtgccccattaaacctaaagctggtcaacagatagagttctttctatttttcttgaagtgattgtacaaggccacataaataatcaaagtccaaagatacatgaagttcgtgaagctcgtttttatttttcgtaatagcctttttttataagctacgaattgta

SEQ ID NO: 303628 - DNA, 2853 bp, Cannabis indica
ttatcaatgatattgtcattgttttcaaaaaaaaaaagtactctaataaccaaaaataaatagataatagtatttttaagaaaataataaatcaataattaaaaaaaaatgaatccaaaatattaaatttaatttgataactaccaacccataccaaataaaaaattaccaacatttataaattattctgaaagtagtaaaataataataaattattacttttcattcaaaaaaataaaaaatgaaacacaatacagtcctttttttttaagaaatttcaatgttattaaagccgataatcgttcacaataacacagaaaataggatttggaatttcacccatccaacagacatcttcatccacctcgagagcatacttagctaaaccatgtgcagcttggttagcatttctcttaacatgagaaacagttactcctgagaaaaaggataaaagataactaaaatcaactattaagtcattaaaactagagagattccttgatgcagaatttagggccgaagaaacacgcaaagcatctgtttctatatgcgtaattagaagttgtaattgcagcgcccaattcagactatgaaagagcgatttagcctccatctcatcagatctaaaacatccttggattggtttagagatagcgattataacgtttccatgatgatctctgacaatcgcaccacacccaggattttcaattctgcactaacagaagcatcgacattcaattttagtccttgattggtaggtggtgtccatggagtagctctgaaatgttgctgatttgttgcagccgtgtctgcatgctggaacgttgctgatctgttgcaccagcaggagaaatactggtgcaggaagagagttgttggtttttcgatctgtgccgaacaaatttctccaggtgcgagttggcaaatgttgcaatggttaggctggatcgtgacacacctccatgaatcactttatttcgctcatgccagatagcccacattgtacatacaatcaattcaaaatctggttttgagtgaattgaagataaatgtattaagtaatcaccattgtgcatattttgtgcatgtacatggtctatggtgaactttgtatctctccaaacctccctagcctttgtgcaattgaacatggcatgacctattgactcgcacgcattatgacacaaggaacaagtggctgaatttatgacttttcttcggcatagtgcagtagccatgggaagagcattttgcatcactctccacggaaagattttcacctttgatggtagatttagaccccaaaatgttttccaccaatccttatgtgcgcttgaaccacttgaatttcgtttctcagctatattttcagccaaatggaaacctgaatttacagagtaaagaccagttgtggtatgatgccatatgtatgttaaggaaaaaaattagaggaattgtaaaaaatttatccacatcaatcggttgaaagtatgcattgaggagtggtaggttccaaaaaggtgttgttggagaaatatctgtgctttagtagtcggctgagaagagaatttggcatttcaaaaattctccacgcttgttttgctaggagagcttgattgaagtgtacaaaggaccgaaaacccattcctccttcaaatttcgacttacaaagcaattttcaacttctccaatggatttttgagccatctttgtttgaaccccaacaaaatttagccatcatggattccaattgattacaaaaagttgttggtaaacagaaacaactcattgcatatgttggaattgactggaccacaactttcaagagcacctcctttccaccaactgagaatagtttttcattccatgcatgtaatttttgccaaatgcgttccttgacatcactaaacatttcttttttgtctcgctctaaaaacgcagggagtcaaaggtaacgttcgtgacattcactgattggcattcctaatgtctgatggaagaaattctttgctgcttgaatggtgttaggtgagaaggacataactgactttgttgtattcagcaattggcctgatgctttgtgatagatatctaagaccttgttaatggcatttgctgaactgtttgtagcttcacaaaaaaggagactatcatctgcgaaaagcaaatgtgaaattgatggagcatgacgtgttaaccgcaaccctctgagattgtgatttgattcttcgctttgtagcaatcgtgataggccttcagaacagatcaaaaacagaaaaggtgacaatgggtcaccttggcgtagccccctagtaggctgaacatgaccaacatcttctccattaagcatgaatgagaaacttgtagagtgtaagcaactcatgatcagagaaacccatttatgatggaaacccatctttcggataacctcctcaatatagaaccactccactcttcaaactttgctcatgtctaatttgagtgctgagtagcttctgttcccccttgtattatgcttcaaatgatgtatcaactcaaaggccacaaggatattatcagtgatgagtcgattggagagaaaagcgctttgtgtttcagagattacaacaggaagaacctccttgaaacggattgcaagagtcttggaaatgattttgtagatgacattacatgaacttattggtctgaaatctcccatgccacgtggaaccttaatcttaggaattaacgtgatgagtgactgattaaaggattccatactacagccaccatttaagacacccaaagcaaccttcgtgactacatccccaacaatgtgtcagtatttgtggtaaatgttgggttttatgc

SEQ ID NO: 303629 - DNA, 1908 bp, Cannabis indica
gtcaattactttgtatttttgataccgatctaatgaatcttatctctaggcgtggccccgtggactagtaacaatctgaaaggattgttgaaaccacgtaaaaaaatcttgtgtgtttttacttttatgcactgtttatttttctgggtttctctggagttacagagttgtattctgtaactacggaaaaattgttttcaataccagtttcattattccgcatttaattaatcacttaattaaataattaaactgagaatattaaaatacagaatttcaaactctaactcacaaaggttcgactctaaagagtctttgagagaagtttgtatttcaaaagtgaatagtgaagaatgaagaaaagaatgaggcttatatagtttctggaaaattttctcccaaaaaacttaatggggagttaatgccacaaaaataggcatctatgggaaagagaaggccaagagttgcaatataggaagatgtacaaccaacacacaataacttcccacattgatcaacataacacatagcatgacacattactctcctccctttcaaggagatatattttacattcaaatataaacttaaaattcacatatcaaaatatctgacatatctacattaaaaaatattaaaatattgctttgaatattaagaaattataaataatcctcaagtcgcgaagtttgttatcctttagaatctttctaaaagcttatgtgattttgatgaatcccgagaacctagtgattttttatggactagaacaagattaaggctttcaccttgcttgagtgaaccaccttcttactcttgaaagttgccttgaggtatctcattctaccctgttcatattccactcaaattgtgtcccaatagggtttatgatgatactttgctcgaatcttgggacttggtacaagtttgatttgtgttagactcccaaatggtgctaaacccctaactttacttgcattagtcgaataaggttaaccctattaccttgttcaagcaactaggatttaagcatctcccttttgcttcatgttacttgaacagagttggtcatgccaccctgttcgagtggctcttcttcaaaccctagactttgtctttacatactcgaacaaggttgaacaatataccttcttcgagatttctttctccaatttccaacatatactcgaacaaagtaaagcatgatgccttgttcgagttgaagtcttcaactattcacaccacactcgaataggctagtcttgacactctgttcgagtttgtctcttgatcttgcatttattgagtcattccacgtattttatgtgatactcgaacaaagatagcctattaccatgttcgagtacttcattgtgtactccatcctcttactcgaacaaggttaggcttgctaccctgttcgagtatgtacatgtgtcatgacacgtgtcactcgaacaagggttcacccaacactctgttcgagtgttttagcactatagcattagtgttttggtccctgctttatgtcacttggtcaaagcattttgtgttgacttttctaattttcaaaaattgggtacagcatattgttaaaagaaagtttttctttagaaaataagtaaaaattcaaaatgtgaaaaaagtttattttagaaaataagtttaaatttatttatggtgttatcgtctttttgggtatatatttgctatatcattagactctcattaataaattggtcattatattaaaaaatatatatttaaaataataaaatcaaagtattaatatattataggaaaattctattatgcacccctttagaaagttgcactgatatatctctatctgttttagtatccgaaataattttttggtcaaattttttctcatggtcatgtaaatta

SEQ ID NO: 303630 - DNA, 2582 bp, Cannabis indica
aaaagccacctatagacgctttaaaattgtgccttatagtactgggtacagtttttagttctttttagcgacagttttttttcgtcgttacattagaaaaatagaaaaaaagataaattttctgcaattttttcccaacattaattttaaatttttttacaaacatgtatagtcacaataattgaaaattagttataaaaataaatccaaattaaatattattttttgggaaaagaaaagttcctttaaacaaaaaatgaaaattagaagaaattcaggactcctttttaataaggcagtttcaatttcaatttctcgaattctaggccctcttttcgggatcttatcactctttctctctcttccttggttagttttccctttttacccttttaattttcgaagcaaattttcttttctgtatctgttatggtaattttgttattcttcatataaatgtcgaagcattgatgataccgaaacctaaaccctgattctttctcccttttgttcttcgttttctaattccttcctcgattgcagaagctttgccatggccaaaagttcgtttaagatggagcatcctcttggttcgtactctctctttttcattttgaattttgaaacgtgatttacctttcaattttagtaattaagaaacggtttcatccagaagatgatccttacttggttcttttggatttgatttgtggttatagatgcttttagggcgtgaaatatgcatctttcccaaattttcattttgggtatttttcttgtgtttgttattctggtaattgtttaatattttttgctgcttagagctatatttgcatatgtatataaaatgtgtatttatatataaatgtatatcaaatatgctaatgaacaaaattgttattgaaatgcttcaattttatgcaatataatgcttgtgaggtagaaaattgtataatatatctgcaatgtgtgtgatatgcaatgggttcaattttgattgttatcttctttaagcactgaatacactcttgtcatttctcttgatctgtttacttcagtgtataaaaatatatattgaaagttcaattttttttctttcttctaaaccagaaaggaggcaagctgaagctgctcggatcagagagaagtatccagacagaataccagtgcgttttcccttttttatttctgtgtcttttaaccaagaccgctaatttttgactctcctgtaatttcttgcgttgatgcaggtaattgtagaaagggctgaaaagagtgatgtgcccgaaattgataagaaaaagtatgaacaagtctatgcttttttttttgttgagttatatcttgtattccaaaatgtttgttcaatcatttgtatggagaatcggattcattgtttggtcctttctggttacttgttggaaacaatatcaaaatggactctcttatgcaaaataattgggttttgcttttctttccttaatatgacttttgtacttgtaccatttataatttgtcagtcatgctatgcattttgtgaattctgtcttaaaaattgagtagccattagagatttcccctgcaactttcacagtttcagtcttctatcctttgttttcatcatatgaattctatgaatgagtaattgcataagttgataattaaatcttttgtgttggattgtttgtgactctaggtatttggttcccgcagatctgaccgttggtcagtttgtgtatgtggtccgcaagaggatcaaactcagtcctgagaaagccattttcatttttgtcaagaacattttgccacctactggtgagattgattgctttgtttagttgttaattctgttaatagttatattcttttgattcgttcatgagttaaactctgggatcttttggttgcagcggctatgatgtcttcaatttatgaagaaaataaggatgaagatggttttctttatatgagttacagtggtgagaacacattcgggctactgtgaaacatttggtgaaagccacatggtctttgtgaatataactggggaaagaagagagtaaaaaagtgtggtgtttataaattctcgttggtctatctgatgtttttagttgcgaaccacttgattgagttggctaccttatgtttatttcaataatttggtaacttctattatgttggtaaccttttcagtatatatacttgacttttcagcttcttactgaatgcttatgcttggatgttctataatccattccatctgtgcactaactttctttctctcactcaacttatccggctttttatatatacctaacttgtgtgtgaaaacctcaattcattcttattattcaaaacttacactttaatataacaaggatggacttataaatatggaatcatctccaatttttcaccaatttggattaaggtggtgtttggttggaggtaatgaaattgaatggaatggaaagaaaataagttttattttattcttttgtttagttgcatttaaaattattagaatatcattatgatggaatgacctttttattattttggtaaaatgactattctatttt

SEQ ID NO: 303631 - DNA, 1637 bp, Cannabis indica
agagagagagagagagtcttggttttatatgtaatgtgacatttgtttatgggtggaatggaagcccatagaaaccagacatcacataattgtctatagtgtacccacacagacctattactgtttgacacgtgggccacgcatcaatatgataaaaagttaggaacaaatgccatactaatactagagtgctttcataagctaagacacacattttatttccttgcattgccattggatgcattaatgagagattacaacagaacccctcattttcacttctatgcttggatatggacaattggacatggtaataacttacacaacataacttcaagtaaagtgagctcaacacaaagtttaatgaaataaaatgaaatggggttattataggaccatgaagggtggggtgggggccatccaccttttgctgacccgtgagagtgggtcggcaatactattattaaacttacaagcagtggtggtgagatagcataagggttgatgatggagctgatcaaaaagaaaagagatggtgagatgagatcatatgttgggcggttgggttggaaaatgatcacgagaccaaatttagatcaatccaaaatccaagaaagtgaaaagggttattgcttttccactcatcatcacttcactactttccaaaacaacaaatccacacacaaacagtacaaaaagacacctcctttcccttcaaattaaactctatttctctctaagattcccttgttcacgagctcatgtcatctgtccttttaactcatttatttactcttcttctctttcttaatataattttcatcttaaaaagtacagaaaaattggttttgttacacttgctagtctatcctcttatatgttttttttttttaatgatagcattaaacattcttgtggtcttcgagatagtgattatttaatggccaaagataatgtgttattatagattatgcaattacttaatgagtttctcaattattagttactgtgtcaaataagtgcaatgcaactgtgctttagcttttaatgtatctcaaacagtttcctattagaagaaacaatcttaacaaaatcattttgtttcctctttagtctttacatttaattagttggtaaacagtccatagtcaagtactaactgttgaaacttgtggtaggagaaatctttaaataaaacaagaagatgcaaattatgtgacaataaacaatttattatgatataactcaaatgcaaattatgttatgttgtccatatatacactaaattttcttgtttgacaaatgtaatctgtaccatactaatccttttacaatatcattaattcttatatagaacaaagataattgtgatctaatatcaaagataagaacaatgacttgttacatatttgaaagaggttaattaggatttttgcctcccgaactttgatatgtaccaaattatgccctttgaatttttaaggtcgttaaaaataccccttgaactattgagattgttggatttaaggacttttgtccaattttagtaaaaacaaatctaagatggatgaaaattcaggggacatgatttagtacataccaaaattcgagggacataatttaatagatatcaaaat

SEQ ID NO: 303632 - DNA, 2052 bp, Cannabis indica
tcctaaaaaaaaattaaaaatcaaaaatcaaaatcaaataatatcataattaaaagagtcattgatattaaacaccttaagctacttatcactatactaacatgacatgtcgtataacgagtggtagtattttttttttatggttctgattgactgggcttataaaaactggttttgggcttctgaaactccaaaatcacttccactagttgggtaacgagtggattttaagttttaactctaaaaagctttaatgtaagtagctttctcaaaaagaacttcacaaaatactaaaagcagaaagcaaaaacaaacttagtgcaactaagtattaagtgtcatataaattaattaaataacttttagagtactttgtaaaatttttttaaaaaaaaacttttaaaaatatgctaattgcaaggtaccacctttaggtgatgctagaaattttccaatatcaatgctcaccaaaatgtgtagatctgatattattgatataattaatttaaaaagtattaatggtttctatgatcttcctaagtgttatactgctattgattctatcgaattattgatataatgaaatcggttttcatataaattaattaaattataagatgacaccgtgtgttacaccttttttgaaatagtgtagggacttattagtaatttaaaaatggtgtgaaggcctataaaaactttagttcgattgaagtttgacactgtcttaaagagtgcatttagagtttggcactgacttaagttcatctctcaatgaaaacaccaatgatagaatatagttctcttggaaacatgacaaatctccaaatgcactcttcaattgaataaaagttctattttctcgtttcatatttcacaatagctacacaattactagattttcatacctttttcaaattactaataagcttcttctacactagacattactattattgtccaataacaatgctccacaccttagagtagctcttatcatttcactaattcaaatgcaatgatttcattcataatcattaacattaacaaaaacaaaaacaaaactcaatgaaagcatttgatactaagtactaaccccaacataagcagcatccaaatatgaaacattaatctcaacagaaacaccagtcatgctaaccccacttgtcaacattacacctgaaccaatcacatccaccagcgccgccgttgcaccgccgtgcatgaagtttccggcgttcttatacccaccaaacaattgaattcactttatttgatttgctataaaaaaaaacccaaaagaagaaaaggaaaagaactcaccagaagacgatttgggactatgaaagagcagagaagacgacctggctcaacaagttcgagttttaggccatgactcactaatggctcgatgaatattggaggaagtgagtcgatttcgattttgttctctttctccaaaaatctctttgctgcttccataatcttctttcccaaaattcacaattggggaaaaaagatccaatttttagggattttggtcatcaaaattaaaattaggcatttgggtcaattcacaaagtcaaacttttatatatagaaattttcaaccaaacacatcacaaatttgaaaaaagaataattaagatgtaccaaatcaaattctaaaagccttttaaaaattttgtgaactgatgagtttgttgaatttatgtttttttttattttaataaaaaagtttaacataattaaatgaaagttataattagttagatattaaaatttgaaaagtataatttaatacataaattataatttatgtattgaaaagtataatttaatacataaataattattgaattattaaaattaaataaaattagacaaaattttttaaatttaatatgtttaacaatcaaaaaaaaaattaaaagcattatttatcatgtgtcaaaatttaggtgataaaaattttaattagtcaaaaagaaaatattaatccagtgtaatttatcattttcacggttgagttttttatttataaaaatatat

SEQ ID NO: 303633 - DNA, 2006 bp, Cannabis indica
agaattacataaaaaaaaaaaaacaatcacacttaacagttttcattttaagaaaataaacataaaacaaaatctttttgtttcagtacttctcttcagctactctgcaactcaaaaataaataaataaataaagcacatttcatttagatttaaataatatgtatatttatatataacttaattataagggagctactagagtgttgacaacttgccaaaacggtaacatcaactaattatttaatttctggtgcagatcattaaattaaatgattgttattcataaacaaatttattatttatttttaaaactactgataaaaataataaaaaataaaaactgtaaattaatcagtacacagagccgccttattattacccgtatatctacgtgttagagtttgcatgaaaatgtcaatagtgaagtttaaatcgaaataggaaggcaattttgtcatttccactgtaatagaaaaaaacaggtttgtaaggaaaacccaaaacataaccagtttttctttcatctcactggtttttaaaatattaaattcaaagcactttttcttgaaaataaaaaaaataaataaattaattagtctgcgcgcttattatttttgtttttctttcggaagaaaataaggaaataaagaagagaagactaattgaagagaaacataaaaggaaaagaaagaaagaaaaataaaaaagcttaaatccttttgttgttttgcattgagtttccactcttatctttctctctgtcaagctcttgttaagtttataaccgaccccttttctcctctctctctccttttcaaataacttatttgtttctctttctctctctcttttatgtgagtgagatgaggatgatcatggagctgaaatatgatcatcttgaagaagaagaagaagaagataagtatatatatatattaaaaaatatatagactaaagtcaaaagacggtttggagatattaatggggttttcaagagctggtaataatagttttaaagaagagaaatttttagtagaccaagctgcagaggcaacaaagcttttgggaacctctttcatggcttccagcattaaaggaaacaacaacaacaacaaccaaacaagtaatagtacttctgacgaaacaccactactattccaacaccaacaccatcatcatcagattcaaggccatcatcatcaacatcctaatcagattccttacaacatgattaatcaatcgtcatcttcctcttcccttggaaatttcatgtaattttttttcttttgtgtatatttaaactaatagtttgtcttcttctttcaattatatatatttaccatttctcgtcttaatttatggttatttcttgtctatgattcgtattagtaatatttggtatgttttcttcttcttttttcggttttttttattatcagaagcaaagacagtaatagtactagtggcgcttatgatttgggggagttggatcaagctctatttctctatttggacggtcaagatcatcacccttctaataattttcaagatcaacatcatcatcaccaaagacgtaactaattactactctctccctccttctctcccttgttaacatatcattattacttttatcattaattttaatggaaaataatttagggttttttgagcttccatctctctttctttacatgatatggagagattctactctgaaactgtcgttggggatggtcacaggaaaagtatgttcaacagatcaaaatctgctgcagtactttttactttgaccggatcctatagccagaaagtaaacttttttattttttttaataaatgtacgaaaagtatcaaaatcttttttaataaatttctcaggctgttggatttaaaaataaaaataaaaaaagagagtagagaattatttgtctctatttaaatttttatgtaacaaatcccacgcatatattgttctcaaaaattatggtatgggacttctct

SEQ ID NO: 303634 - DNA, 2263 bp, Cannabis indica
aaatgctattaagtctacttttgtgaaccttattggagggtgaatctctctccgggttctatcacgcaccaaatgataaccttccagacctatctatgcgaatgtttttggagcctctatttggtcttcactatcttttggctctgcatcagcttccgtctgcacactaccttctggttccacactagcttccatctgtgaactatcttctgggagcttcgttctgtaatccacttccatgcaagtagtgttcttgtttcctattttacctgcattacatgcagacacactacctttcccggaggtcaagtgacactactacaaattacactattcacgttggtcaacgctactgttcatagcgttgaccgacatgaacactgcctaaataattggacctgtctgtttagaaacgacactaataatatggtatttgtatcttttgcttaaatgacgttaaaaaacaaaccgacgaaaaaaatttaaaaaattttaaaaaattacttctcattttgcatttgttggtaacactcgcctattgtatttgtgaggttttaaaaatgacgtaaaatacaattgtgagatatggaaaccgacgcaaaaacatgtaaaatccccagaacctaaatcaaatgcatacttttcacacccctaaccctctcgtcatcttcaaacttgctctagcgaaacaagcagctttaaccctcgatcgtcctcttgaaactgtgcccactcgagcccctttcattctcttcgaaattgggaagcaaagagaacccttcaacccattctctttctcctcttcttaatcaggcgacgaccccctgatgacctcctcctctcttcttcatcttctatttaaccaggcagtgacccaaccttgacagcctcctcctctcatttttgtcttctactatatcgggcggtgacctaatcactgtcttcggtccttctccaattagtttttagcaattatatttcttttgtattcaaatgtcttttttttttttttttattatgatgttaccatttacattgagtcaagatataatgtaaaaaaatgataaactgatgacccttatggagcttgagcaccagttgaagcatataggtttagaaataaaaaacaattgaaatctgtgaaatcgattgcaataataaaaaactaaagaaaatcaaaattagccaaattgggacaatgagtgaattaccaaattttttaggtagatgaataatttcggttagcattattgacattttgacgattgggaattatattatgactataatgaacacgttttgtaggcatggcaacatattgcacaatataggaattcatgagctttttcttgtaggtttagtacttaagtctagatttgatcgtcttggagtagtactaacatatgattatttagcaatagaaaactgatcaaaactctagtcacaacaaaccccatctctcttattcatattggttactatttacacaaactgatgttgggtttgcagctcatatccatattttcactacaagctatgatgataagcaagttttagagtttctcaaaattaatattctgccttgatgaaatccttgcttcgctcttagatacatcagagatgatataaaaaactttcatttcatttttaattttttggttctgaaatagattgataaccactttagacctccagtaagaaagtcattttccatgatgtaaaggatgtagtgtgatgtgatcaaaatatttatgttatggtctttaaatgatagggctccttccccagctgaatttatgttaggcactagaattagtacttagtaaggtgtgcaatggattgagtaaaactctttgcatcaaaagattataattggatgtctgtttattcaatataattttcctactgtttggctattaatttgctactattctattcttgctattatattgtgctatttgttactggtttggttgatagaaataaggtctcatcaattaattctcatgttgcatacctagtcactcagtcaaactatttgccttctccttcgagcttggcctggttcgtttgggtgcctcggaattaagggtgcacatgggtcaggttttcgggttttcggggtttcgagttctggttttcgggctttgggtcttggaaatgcacaaccgaacccgattttttggtatacgggtgcgtcgagtaccgggtcgggttttttcgggttgggtgtagttggtctgaaataaaatttaatttttaa

SEQ ID NO: 303635 - DNA, 2321 bp, Cannabis indica
ttatgttatgggtatcaaaagggtattaaattgtcatagaatgaatgtgtagatagcatgagttaatttataatttgttgagggaccaaattataaataccgaaatctcattctaagatgagtctataaataggtagtggtctccttccccatcagagaaaatactttagaaaatagtgtattcttggaagatcaaaaccttctttgcaatctccaacaatggcttcaagttagcgcttccgcttatcttttgtcattttcttcttctttaatttagcaaaagttcgataaatttatgatttagggttttctatattaaagcacttttaaaaatatatttaaatctgtgatatatatatttctatgttttataaaccctaacaaaaaatatataatatattatatttgttttttttacaagattattatatttgtcaattatttatattttgttattagttatttagtttatttataaataataaattgtggtgaaatttcgttggagtaaatttatatatataaattgttttgataaaagattggagtaaaaatttagtcatacctaaaaatgaaaatatgtagatgtatatgttaattaattaaagtatgtttctcaaaaagaaaaaataaattaagtatgttaattgttttgaatatttgctattgttattttttctttttttcttttttacttaaaaggtcaaaagaggttgaaattactataaataaaggttaaccaattaaatttagatctggttcctgtatatacctattagttgtagtctaatggtaatttaattaatttaacaattaaaaaatctagagttcaattcccaactacctatgtccctttaaagaaaaaaaaaagtaatacacatgcaaacttttaattattagatatttagttatataggtaaatatttggttaaatatagtacaggaccgaaggttgacttctatagattaacccatttatgaaatttttattcaaattattattatataatttttttgaaatttaataattatgagttttcaaacacaaatttagaaaataattaattatacgtgatgatcaagattatgtactagtgttattttatcagccagtttcagaaaaaacaactatgactcattatgttattattcacaaagagaaaaaaacttgactatgactcattatgttattattcacacacagaaaaaaactttggctcagtatattttattgagtgctcttataatgtattctcttattaaaaaagatgtactattctatcttctacatatttttgtatttaaaagaaaatgtctaattttttttataattcgtgtatactataattatttaaaatatgttataaaaattttgtagaaattcaaaataatttacaatataaaaaatactgttaaacagtctatttcacatgcgtataaaataaattagtcatgtgtgcaacatattgtttgaatcttattttaatatattaatttttctaaatttcttaaaattttgcagaatgtcttaaacaactataacgtccaaaaacaataaaaaaaaattaactaaaaaattatttcaaataccaaaactgatacggtacatcgatacatgtattaaaaattttcaattttattttttctcatttaatagtatcgtacttgttttaaaaaaatggcaagacaaagatgttaattttattcatcgttaaaacgtgttgcacatatatgttgcttccgaaactcgatagatttattcaattgtgtaataattatatattgatgtatctatatattaatttcaaaacctcacacaataatgtttgttgtgcatgatcgatcaacttgcatcattatctaaaaacttgtgtaattatcatatgaaattgaaatagttacttgatatttttagataatggagaaaatagctaggaccattgctgtgtgtgatattaaataagaaaatcaataataaatagtacaatttatactttcccttgttgtatagtcattttctctatatcttgatgaggcattaatgtgtgtgatattaaataagaaaattaataaatagttctatcttgatgatgccaccattttacactttcttcgtctattactgtttatatgcattaatgtttaaaccttcgttcacacactttagttttttcatctatagttaacataaatattgtttatatataaactaatttaggacataaatatttaagttttactctcgttgtaaataaatacttaaatttaatttttgacagttattatccacgtgttatttttttattgttatatttaaatta

SEQ ID NO: 303636 - DNA, 1506 bp, Cannabis indica
taaaatataaaattcacacttaatagaaattaaattgtatcttggattagatacacccttattcattccctaattaattatgtacacaatttttatctaaaaagatatatatgtacaattatcttatcataataaagtgttgaaattttatttgtaaaatgttgtttattagaaaaaattctctatatccttttgaatattttcatggatatatatccgaatctaattggctggatctttcatatattttataaacagtagaaaaatggtacccattattggtatattccatacggtcatatcaaagtagcacgtgacaggaaattaaagtaacaaataattgactcgtgtttatgctaaagttagctagtacagtaacagtagctacataattattattatgaccgaaagttttaatttgagattagaaacacgtacttattaaaagccgataaagatgtactagacgagcagtactgcactgtgtaccctcacacactagctatgttataaatagtaaggattatgaaaacaaataaagataaaagatccattcagtcaagctaaactcgacagacctaatccatcaattaactatactaacatctttatcgtcaatgagataaacttaattattagctaaagtttctctttagtcaataatttgtccttattacaagtagtaggcaatatgctctaattaatctgctataattaaaataaaatttaaagtcaaaatttaccaagttttaccaaacaatcaaacaacattattcgatcacctacatcactatatataatgcataatgttgactttaactttttcctgatccttttcttataaacaaaaaaaaacagtaaaaaataataagttaataaacaagagtagcaactacatggaatggaatgtaggtgagcgcatttttatggggcacgaaggttaggtaattattgttatgaggcatgtaatgtgcctattgctatcgtgaatcaagatgttaaggcaccaaggtagctagcactaggtttggtcgtgaaatataataggtaataccaaaaaaaaatatttttaggcctttattttaaaaaaatattatattttttaaaaattagtaaaaaatatataattctaaaagggtaaacaaatttgagcttctaagttaggtgggctttagacacaggcttagtctacttatgccgagaaccaagcctgcctagctagcactactatgaggtgtgtcatcttataattagttagccatttattaaaatatttattaaagtaaaataagtaagacctaatattaaattacacttaaatattatacttcacaaaagtattaggcaatatatgagtatatcttttagcatttctcaaagtaggtttgaagtgaggtattttattttctaaaaacaaaaacgaggataaatatatttaaagcgaataatatctttttattattattttttttactaaaaaaatatatttctattattatttaaaaa

SEQ ID NO: 303637 - DNA, 1805 bp, Cannabis indica
tacaaataggaccctgaattgattttttgtcaaaataaaacttaataataatccgatcgagagatcttataacaaaactagttacattttctatatctgttcgtgttagaaattgtgttaaagttggttatattaaaaaataaaattattaaaaattgagctcagggtcttattttaccattttagaaaatataggatccattttgttatttaacaaaatagaagatccgattaataatttttgtaaaacacaaggtttaaaatagtatttacccttatatcattccatatcttagaaagataataaaaaacaaaggaaaaaaaataaattatttacatgaatttccatcaaattagaagaaaaaaaaatgtaaatagacaaagaacatagaagaaactctttccacaacttaattggtaataaagaaatatgcactttattaaattattatgtttttctttgaaagagaaatgtccactttagtatataaaaatcaacctgaaatccacctattaattgtttaaaaaacaattcacctattaaatatgattttttttttaatgtgatgcaactacacaaagaaaagagaagaaacaagaacacaagctgcagcaacacaaagaagaaagaaaaaattaatctctcaagatgaagtcctcatctcgccgaagggcttccctagaattttggtgagcttctttgttatcattcctgggtatatgatggagggaggcattagggaaatgggagggactgactgatcaactccacaagattagacagggcaaagttatctttccagttgctgttaactttggttattagctggtagcaatcatatacaataaggctcggttgaagattagcagtcttgcaccaggttaaaccttccaggagggcttgggccttagcatatattggcgttgatgctcctggtttgggtatagagaatgctgcaaccacttggctagaaccatttttaacggcagctcccaaacctgttttgagggctttaaaatccaaagcagcatccacacacaaacaaaggtagttatggaaatggcaggggtaatgatagtgcttcctatggtcttatgttgatgccctgctcttgagggttcagaatctgcattaaaatgttgagcattcttgtaatcctgcaataatctaataacaaaatcttcaccatcattagttttagtgtaaaacaaaatcttcaccatcattagttttagtgtaatagttattaaaaatgatttgttacatgctatcgaaaaaaaaattgttacattaatgtttgagtaatttatgtgaaataacactattttaaggccatagatattaaaaaacaaaagttttgggcaattatttattaatttgatttgttgataagcacttcagcaagtgatgtcaaacacttcttgacgacaaattcaagtttatcgatctccttgaagaggcccatcttcatggtaaaaaattgagattatttcataaatacccaaaaataacaaaattgttcgcggtgcaggtgatgcggtttatgaccattttttcaaactaacctgcacatgcagattttctaatttctcaaaccattctagcaccgtgaaactaaaaaaccgcgaaaaatcgcaccgcaaaaaatagtacggtgttgtgcggtttttacagtttggactatgaccaaataattaaactatcacaaatacagcaaagcttgagcaacacctgtaaaaaataccataaggcttgaaaataaatataaaaaaaagtttcaagcttcaacaatacaataattagt

SEQ ID NO: 303638 - DNA, 3539 bp, Cannabis indica
ttacattacaggtatgttttacatgactctctgtgttgaattgtatgcatttggtttgtgtttcctcttgcttggtcttaattgcccatgtgggtcaaggttctgagattgcattcattgcttaatatcattaaccagtagcttatgctaatgatattcatcaatcccattttctgttttctcaatttgaaagcagttgttgttttgcatgccaagtgttcgataaaatgtcgatgaactcatgcattgtgctgcttcttcaaccttattatcttagttattttatatgtttggttttttgaatgggtgggataacatggaaaaaagagtgttttataaaaatagtctttatggaaatagcattgctattaggtacctttaaggtgccaacattatgccgatatggttcattgtgatttattaaatcaaaatgtctgggattcaatattaaattgtactaaaaacgatataccacctcttgtaatgcttggcaccttaaggtgccccttatcatttctctaatggaaatttttattagcataataacttcctaacaaattttattagcaaaatgaccagtcgcacaaacaactaaaatttgcactatgcgaccataaaatgactattatggtccttttgtgaccataatagtcgcacagtgtaagtttgatgtagttattttgataatttaacattttcatgttgttaattggtaaaactccccattaaaaatgattaacttgttagtggttcgggtttcgtagataatggcgtcctcttgtgctatggtgacttgcacaccatatgagcttccttcatgtactactgttggctcatctaggcagaataccaatttgttgaaagtttacagtcccaggagaggaatatgtggtttgtttttataccaaaagcactcaaatatgagaacttttgctgtggagtcaaaccaagtatcctcgttgaaacctcaacaggtagcttgggaagaacctgatgatggcagtgatagtgaagatgaagatggtgaagaagtggaagaaaatgacttggattttgaaagtgattgggaagaggagaagaatgatgctatggatacaagtgttagtgtacagaattcacaaagggacacctatgaagaagatcttgtgaaaggttataaccaacaaactggacagatttcattcctaaattgtatgactattttattcttacttattggttatctttgatttacagaggttgaacaactattaggaccagaagaaagagcaatcttgtatcagtcttcaactcctaacttggaaaaaatatcaactgtaattaatttaaagtttttcactttcctttgtctgcattttctatgtgagtttctgtggaaaatgtttggaaaattttattcacacacttttctttgtcttcattttctatttgagagtttctctacaacataagtttcaatttttaagcatacacaagaggagatgaatatgttatcttatctaattttgcaaataactatgatcaaatttctatataatctgttaatttgaaaaacgtatacattttatcttccttttatgttcaagtatagtaatatttttttctttcccatcttaaaccaattttagttgaattataaaatatttgatcagataggagttaagacttgtgtattacacacaatcaagctttgagttttgcaagattttctactactgatagcaactaaaggtggtttcattgattgcgtatggggtcatcagttcactaacattgaacaattctttgatcaggaaaaatggtccccgttgcacactcttgcactatctggacagattccgttcatggacgagctactagaacaaggtgtagatattgattttgttgataaggcaagaataaaactcgatttagttttacttttacttggtttaacaagtttaattttataaatgctgaaattcctctgattgtaagtcctcatggaatcttatgaaataggatggcctaactgctcttcacacagcaattatagggagcaaaatagctgttattagccatctgttgaggaaaggtgcaagtcctcatatcaaagatagggtgaggagaaatttagaaattagttctttatttctcacttcttttctcccaaattgttgggtcataattatttttctataacaggatggtgctacaccacttcattatgcagctcaagttggctccatgcaaatagtgaagttactcataaaatacaatgttgatcttaatgtagctgataatgtaagtgttaattcaagtttcctcaactctaaaaggtatatatcaactgatctagttttcgattatgcttatatttcaggaggaatggacaccattgcacattgctgtacaagctagaaacagagatatagtgaaagttttattattgaatggtgcagatgccaacagaagaaacaaggtaaccttctcaaaacatacattggagttaaattagtgcttctggttcatgatgattaaactgagttgagtcactgtgttcaggatggtaaaacagctctggatttgagcttatgttatggcaaagatttcaagtcttacgatctcgcctctttagtgaagattataccagcaaacagagagatttgatttgcagggtgttgctgaaaattacaacacttacaaccttcatcgtaaatatcggatatatagtaatggtattggttaatgctgcaatcttctcataaatttccatctgggaattgtcttgtggtcaatttatcttcattctgaaccagaatatggaggatctgtaattgaactatggattttgggttgctgcaaaaaaaatcattatcttgaatttcatgcacatatggagagatctgaagcacattgagaaaggtcaaaaaagatctgaagctctttccttttatgggtgctaattttgtttatggatgtctctcctgacaaaaatacttttgtttctgtaaatattccatattatagttagtatcttgtacttcaatcttaaaattcccaatgtttgattttcaattccagctcatgaaggaaaaaattgaaaaaatagattcacaattcgtcttatcttttgtgattatatcaacaatgcataatttacagttgcttgcttgtttgaaattacagaaaaaattagacagtgatactattttaaaagataatgagttccatctgaaataaatgtgattaattataatatatgtaacgtcttgtatataataatttggtggacatttcatcactcaaaaaaaaatattattatgttaatgtaagttaagttcttagtaattttaataagaaagtgaggaaatatataaagagttgatataatgtagttttttttttttatttttgggtcgtttacttccattcatctcagttgtcacatgcataaacagtaaaaaaagaagaaaaaaaaaagttatgcactgctccattgatcctctactgtatcactcaacctacaatttatataagcaaatgaaacaataaacaaa

SEQ ID NO: 303639 - DNA, 3284 bp, Cannabis indica
aatattttattaataaaaattaaaagtcacccatgaatttctcataaactaagaatttcagttatataggtacactttatatagaatagaaatatagaaagcagtccagtttatactcagtgcatactgtctaaataatttaaatagcctaataattaaaactaaaagtttaaattatctctaaaaacaataagtgaaaaatcaacaaatttggtcctcataaaaaattattatactttaacgataagttgaaatgtttcgtaattataagttgggagttggagcaggtggtgagctattctggtgatcacaaggaattatactagtagtaaaattgaaattttgactttgagagctacttaagttgataatagcattattactgatctgtgggtcatcattaatatgatgttgtagagtaaaagaagtttcatctctagtaatcatttggtggtgtgatattgatgatccaacataatttgtagattgttgatgatccccaaaaggaattattactttattagaatccatatataacagttctctttcttcaattcctgttttatcaattctcatcatcataaaatgatcaataataatacttaatttaagattgaataaagaaaatagtatatactcaaaattaaagcatcaaaagaagaacaacaatacttattatataccattttttaggaaatattacataccattcttttgattgaagttgttctcgcatcctatgcatttgcacttcgtagaacatccagcttgtcccttaatacgtacataaatccaacaaagttcatgacataattagtaactctaattagttataaagtcaaaaaatgaataattaattataataagtagttaattatgaagagtacattgaaacatttgcaatattttgttgagcagcctttctgacaattacatcccttgatatgtgtagctaaattagtagttgcatttactacaatctgcaaaatttaaatgcaaaatatttaaactgtgttacttcttgaatatgaatattcataatttttttaaataaaattggtgacatatattgtaacaatattgtgagaagaaaatatacttactttggacgtgaaagtatatgggtcacgtgatagatattctttctgtttttgtaaaacattactttcattgctaatggtattggaacaatttcgacaatgacaagatcccgaacaaaatatacttgaagcaaaacatttgcaggtcctaaataaaaaattatggcaaggaaaagttatatgagaataatattaatggtgccatattttctagatatattgtaaaatattataaattaagtgacaaatttaccacataattacttaatatttttattttgttgtagtatttttttattcacctttttattttattgtgatactaatattatatttgtaaaacagtcattttattattgatgctcccttaaacatgccaactccagattgattgattgactcaaaaagaaatttacatgaatatctcagtcaacaattaacaaaaaaactaaagaatttataaatattaagtgccaatgttgccataaaaacaaaatcaaaatactaatattgagtatctatgccaccaatgtattacactataattatttattgtacaaatttttaatgcttgttaacattttatttaatctaaaagttaattagaaaatattgaaaatagaaaaaagagtactatttatatatgttttcaaagtagtaatattttaattaacttacaatttcaaacaaccattcttcttgcaattacagtttttgcaagatgtgatctctccatcagatttagatttgtgcctaaaaataagaaatacatgcaagagaaaagttatcttaattgttacattcaaaagtctattaaagtgaaattgataaagttaatagtatttgtgcataccttttatttatatgagtactaggacttacaatatcaccttcattggtgtctcttgtatatttagtttcaagaagagaactagatggctgaaaatgattgagcaaataagtataatatatataccctaaggtggcgtttagctagaaggaataaaaatataagaatagaattgagaatgagaatatgaatgaaatgaaataaaattaaaatgcataaaaaaattaataaacaaatcattaaatttatattggaatgatctttccttctttttataaatagaatagtcattctactaaaatggtggaaagagcattccaatactttaaaatgcaaccaaataaataaatagaatgaaaattattttctttccattccattctatttccttacctccaaccaaatgtcacctaaaaagtgtagaaagaaaatatagcaaaaaaaatcctaacgagctttaaaaactgtaaaaaaaaattatatatgtatgcaatcaatatattgatgaaatttataagcccaaaaaagtaatacgttattacttaatacttattacctggaatgtggaattaatttgagaattgtttgtactagtactaaacttatctctgtctccatataattgaacaaggaaatcgaatgtttgaaaatcctgatcaataatgaataaaattttgttaattagtaattaatggtatgtatgtgattgaaatatatatgtataaatcaattgaaacttgtaaatttgtaattcatatagcaataaatattactcaaatttagtaattattgttttattggagcattctcataagtttcttttttctattctttaaaatatatcatcaaatataattttttttttatttcactttaaacttttacaatacactatacatgtttattatcattttaaattaattaaataatatatttttcattgtatatactatcatgttataaaaatatgaataaagtattatttttatattgatttagtatttttttaaaaaaataaaatattatatatataaaattgaatattgaaataaaaagtctaattagtaacaaagaaagaattaaaaagtacatattaattaatttattgagaaagcaaagtataatcgtatattgagaaaaaaaaataagaatcaaatcaaaatttagaaactacctacctcgggataaataacaaccatcttttcctttcctctatcacccatcttttcctttcctcttaatcttgagtatggtttttttttttaatttttttatttgctcctaatcttaatcttttgagtgtgtttatatttttttatctcactttggtagtg

SEQ ID NO: 303640 - DNA, 3566 bp, Cannabis indica
agcttgggagagaaagaaaggtccttaataaattgaggagattaggttacaagccatagcaatatcaacttttatctgaccctaacctaagtctcacattataagcctaataaaatctttttgatcttgggtctaaagctagactatattagtagagagggttgcactaattcaacttatggtagcgaaaaattttaaacttgatgatcgaggttagttataatagagattcaaaggttttagtgggaagtatttgcacactctattgattaaattactcgacatgggcattaatgatatctataacattccaaacttgattctatgaatgggagcatttgagacaatattatcaataaagcagttgtcttcaaatgactcgcttcacagcgagattcactttacctcctacaagtgaatcgatcgtctcttgaaccaaaatggtgtgaagaattcatctataggtcgagaggtccatcgctaagttatggtctctacactgttagtcgaatagggcatcaatgtagcagggatcaagtcagttatttctaataaaaatacgaatttatgaatgctatttctttttttctttttttcaatttagctataactatgtaattgtatttgatttttgatgaataaaaatgttgaaatagtttttttggtacttcattgttattaatcaagtatagctcacagacacacgatactctcaagagctgaataaagcttatagagttggtcttgaggtaatttcagttatttctttaatgagttaagcactgccaacccacaaatctctggataagtagatgagtgttgaacatgtaacagctcctcaagactcatgataaagaaagtccaatgagatttggtatagaaagtgaccaatatgaacttttttatcacttggagggcatatacaccctagtatgtttacatgggcattcaaaaaaaatacacacctgagtaatactttcatgggttaaggaaatgttgacattacacccaataatttagtttcataagacatgaaatattgtacaagtgttaaaggtgacctggtaacggataaagtaaaaacaaaaaaatattggaataaggtttaattgaattggattaatttataattaaattgcaacaaattctggtaaagtttttataaaggtatatctacattaaaaggtcatccatacgactgactaaaacactaaagttaaataaaggaaaaggaaactaaaataatgtcctaattagctatctaattcttcaatagctccttgatttgcgatgttttttcccttggtgcatttttgagtacatcaaagtttgggtgatcagggttgtagctttcatcccttacatcatctctaacatttagagcatcaccattcaagtaaaaatcaatatcgtgaagagcttcatcattcgcacgatgttcatattggcttgagaataactctatcttgtcctttgagaagttttcccagttaaagtcagttgcccctccattagccgaccaagagttgtaaatggcgtcaaaacagtagccctcataaagaaaaatatttgcaactgcctttgcctctagggctgcccttggcccttgagacaacgaacttgaccttccaattcagcaacactcaaggtctttttgtcaagggacttgagaaaggactcttctacttcgaaagtttttcttctcacagcagaaagctcttttttcaagctctttcctggtcctttgcattatttgtggcaccttaaagatctgagacgctagattcaagctcactaactacattctccaagtcagtaaccttggtctcggcatcagaaactctttgcttagtagatgaaaacttccctgcaagttcaacaactttcttatgcttgttgtccatagcataagaaaaccccgcacaagcctacaagtgacgaaacaaggttagaaaatgactttgacaaaaaagagagaaatgaatgcgagataagatattcactccgaagatgtcactgaaacccttctcgagaataacatgaggaggcttagtataaaccaacttcccaaaggtttaatctccaccttgaaagtaatcagagcctctccataccctaacaaaagtatgcctcacacacgcaagttgaccacaagcaccgtctcatgggagctctactcagccacatcaatttcttccaatgaaatagccatcaaggaagcagaaggctcgtcctcactttcaataaccttctctttccctttacgcgtggatctcttagtggagaagaagcttcagtcattataactttgtctctcttcctacacttcttcgaatgaatagaagaagcggtagggatggcttgtacaacctcttgagcaagaggtttgtcaatcttggttgcatgtttcttttacttggactaggttgccatggcagaaagaaaccccatattatctacgggacaaaagaacaagtgtttagtacctaagagaaatacaaaaagcaagacaaacaatcaagttaatgatggctttgattagtggggcatcagcaacctactgattccccaacttcctcaggcacacaagctttagtgcaacctgaaggttctatttcagtttgatctttggaaccaactctatcaccactttggtcgagagacacagatttctcctcaaataatctgggtcattataaggagaaccatcatcttctgatattagttcggacctaatgacggtaccgctctgtccactttcttcatcttccagaggcattgtccaagagttatcagcaaagcaagcatcaacatacatttgttggcaagttgctatcagccttacgcgacagaagttgtcatcagtgaacagcatggcatcttctctccgtttcatgtcaatcagcaaaagtaggtcttttaaaagagaaagccttttgaaaggtaacataccttgaagaaatgatgggagtataaaaatactctttataataaaggtcccagttacttttagtgatgttagcaatatacacactaaactggtagagatggtagaagcctttttctttatgagtggcactccttttcagatcacacagaaaattgatctaagatcaactaagtgatattgacttagaaaagatattattgtaagtttatcatatctttttcattgtcaatatcggtccagtccaatgtataccaaatacatctgatactagtatactttgcttatgccctggaaaggacattccatatatcattgtgtaagtaaactttatcgctgatcatcaccttagtgtaaatccagttcactgataaatcatgggactaaagactttgaagcatataatcacaattactttctactgtgatgacatcactgtaattgtgaataattgtatggtttggatttactaataaatatatattaaaactataatcatgaaaactacatgtaaatctaaataatttctaatcttccattgatagtaaataagattatattaaaatgagttttatttagagcataaatgtaacaccctaatctatagggacgccacgtg

SEQ ID NO: 303641 - DNA, 1211 bp, Cannabis indica
ctaagagagtgacacatagttttacttacaacaacattaataatagctaacagtcttgttataaattaatgtatgctccataaaacatcatcacatcatatcccatcatggcaatgtgtaagctgcaaaagcaatttcaatcatttctcattgttagtaagaagctctgcaatcaaactaaacttatcataataacattctaaatatactcacgtccacatttgtaccccactgggcgattttcgaagttgcagcgttttgggatagtaatggctatttcaggcttgataccagagctcttggcagtattggaaagaagaacagaacagagacaagaagggttctgaccaatcttcttcacttgaagacagcaactgtcagagacagctgctttctcatcttgagcagccacagcacaaggagccaacttcattgcctcattgtctggactggactttccacaagcattgtttgctccataaacacttttctcaatcccaaaagcactcacaaccaccacaaccaaccccacaaagtagatgaacttcattgttgttttccccttctttaatacttgaaaaaagaaataagaaattatatttgtgatgatatatttacatattttatcattttctaagatgggtttttataggccttcaaaagtgttctttctctattctagaatcaaccattgaagtggagctagcactacaataccatgcgtgcgtatgtgtcagttttggccaatcgaggctggtttgctttcggtcattgttttccatttgtggccattagagagtagtagtaatggtggtaatgaagatgaaaaatctttcactttggttttttataagtctattaccgaccaacattagaagagcccaactaccaaatcccataaaactggcaaaaaactcctttcttattggcgtattaggcttcaattgcttttagtagtgcatcaggaatcactctgcactgagcgagaaattaaaaaataaaaaaaatgaaaaatttcgccgttgccggggatcgaacccgggtcacccgcgtgacaggcgggaatacttaccactatactacaacgaccttgttgattatgatattttctaaattttaatataatcttattactgtatctcaataaaataaaataaataaaacaattaatgcactcgctcaaaaaaggaaaaaaaaaaaaaaaaaaaacc

SEQ ID NO: 303642 - DNA, 2806 bp, Cannabis indica
ttaattactaaaaaaaatttacatgttggtaatagctattatagtctataaggttaacaaaaatatttaaataatttatatttgttatgatgtaaaatttacaccacaataaattcacttattttttcatttacatttatgtcatttttattattttattaatatatttaactatcccattaaaatatgaaatacttaaattatttttttttcttgttttacatattaaaataataataaaattattaaattttattttttaataaaacattaatcagatattaaattttacattaaaattttacaactgcgcattggagtacaaaactaaaatttggtataaatttactcacaaaattaatttgtgtgctaaataaaacataattttacatctcccactagagatggtgtaaggagtactcatccataatttaacattttctttattagtttgctcgtgacaaaatacaactagtttttctgttaataaaatccaagtcaagatattataggaaataaaccccatatgttgtttttattcttacatcatttgtcgtagggtcccttcttcttatcctcttaaccaactaataataatgtaagtaaacttaatcttccttaataaacaccttcaatactctttcctctcctctcttgaaccaaacctctcctctctctttctctccctcttctcctcctcattcttcctccatggaatcccaatctcactccccaccattgccatcaccgccagtcaaaacctacgaactaacagcctcatcaatctcctacacaaagtcaacaacaggtaccataacatcactcccacccttggatctcatcttcaaatcatgcaccaaaacccctccaacccacatactcagagatatctccttcaccgccacacattccgaaatcctagccgttgtcggtccaagcggtgccggaaaatccactcttctagacattttagcagccaggacatccccaacaaagggcactcttttcgtcaactcttcacctctcaacccttcatctttccgcaagctctcatcctacgtacctcaacacgacgcctgtctacctctcctaaccgtctccgaaacattcgccttcgccgcccgcctcctcttccccaagaccaccgacgtaaacgacatcatttcctccatcctcaccgatctaaagctcagctatctggccgatgttttgctcggacacggcctctcgggtggcgaaaggcggcgcgtttcgatagggttgagtcttcttcatgaccctgctgttttgatcctagacgagccaacctctggtcttgatagtacctcggctttcaacgttatgcaaatccttaagtccatttgcgtttcgcgttacaggactgtcgttttgtctattcaccaaccgagttttaagatactctcttctattgataaaattcttttgttgtctaaaggaagtgttgttcatcatggcacactttcttctcttcagtctttcttgctctctaatggtttctctgttccttcacagctcaatgccttagaatatgcaatggaaatacttggccaacttcatgagttaaaaccggagataactactactccatctccaaataataataataatataaattatagtactcataactcaaatatggtgaggtataagagttcaagaatacatgaagtagtgactttgtactacaggttttggaggatcatttacagaacaagacagcttctattaaccaacacattggaggctctcattgttggccttgtcttaggaaccatttacataaacataggcttcaacaaagaaggcatcgaaaaaaggtttggtctatttgcttttactctcacattccttctctcttccacaaccgaaacacttcccatattcataaatgaaaggccaataattataagggaaacatcaagtggggtttatagactctcatcttatctcatagccaatacccttgttttcttgccttacttgtttgccatagccgtcatttactcaatctcgatctattttttagttggtctttgtgcaacatggcaagcctttggttactttgtcttagtcatttgggttattgttcttatggcaaactctttcgtccttttcttaagttcattggccccaaattacattgctggaacatcactagtgactatacttttaggggctttttttctcttttcaggctattttatttcacaagaaagtatgcctaagtattggctcttcatgcactttttctcaatgtacaaatatgcccttgatgcccttcttataaatgaatatggttgccttgtgtcaacgtgtttgatgtggtatgaagaagataagaaagaatgtatggttactggagccgacgttttacagcagagagggctcgatgagaggcaaaggtggactaatatttacatcttgattgggttttttgtgctttatcgagtgctttgtttgctggttttgatcagaagggtttcaaggtcaaaaaagtgaaatatctcttcatggatataagaaaatttcaagattattatatattatacatattaatgtcaaactttttgtaatttttttttcttcttttcattggttttaagagctaaaccaattcctgtgatatatattttttttttttttttttgtatcatcaaactgtgtcctgaagtgaaaaaggtagcttgaaaaagacaaaacagagtcattatacaaaagaaatgttaaaggattaaggttatcttatagacattacttattactagtgtaattaattatcaggtct

SEQ ID NO: 303643 - DNA, 2166 bp, Cannabis indica
taatcaaggatgcctttttgtatgattctaccgtaccatctgcatgtaatctcttgtggaaaggtattataacgagtgaggtactttttgtcaagcgctaacgtgcatacctggtcatgcattgctgtacatggggataataagctgtagggataaactgagacacattgtaggttgctcaacttgaaagttctgaaggcctcaaaaatgtcttttgaggaacccaaatggaaagatgatttctcgacaagattttggggaatgagaatggggctgctgtgaccaacaacctcaacaaggtggagaacgcagacagcaagctggctatccacccttgggttaaatgcttctaggatgttgattgtggtatgagcaatttcttcatcaggcacacacaccagcagccggagttgagattttgattttgaatccataacacttcttctcttgtaaactacatatgttcttgaaggatcataaagccgttttatgacggggacagccaaaccactaacgatcaacattgacaggtacatactcacaaaggtgtctgtgtctattgactgcaccatattagcactgttagaaaatttgagaaaatattccaaggaaatataagtgtcaaatgatattaagaaaaggtgtaaagcataccttttttctcctcaacatcttgaacaggcctagctcaaggaggccttggttggtcatgagaaggccaagcgtgatagcatcagcaattggcatattgcagcctcgacgggaggtgaagtaggctcctatgaactttccaagtgcacctactatggccattaactgtacaatcatatgagaccttggcttaatttgaaatatgtttattattaaaccatttttgaggaagaagattggcaaaaaaatccagtaggtaaacatgtggagcttctcctcaagcccaggccctattggcggccctgctggtatggtgatcccgagaataagagggccaaagtgagtgtgcaaaccaatagcctggccgaaaaatccagtcatcaaaaccaacacaactacaatgatgaagtggtttgtgttcaatgaagcttgtaccggtctatgctttaacagccataaaattaaagggcggaccatgtaaacaatgaaagttacaaaaacaataacagaaccaagtctcggtactacttgttgattctcatcgtgatcctggtttattgtatcaaagatggttgatatgatgaaagagaacaagctgcttactgcagaagaacacattgccaccctaccaatctccgatttcatgatcttgagctcgacaaggaggttagcaattgtcgggagcgctactaatgattcagcatgtcctaccactggaagaatgttggtttcgtcgggattcatactaagtatgcgtggtaagagaacagagaatgcctgattcattgcatatgggatcaacactgtagaaattccaataagaagactaatcttgttgattttctttaatacagatggattggtatgcactccaatgaggaagaagtacaaaataaatcccatcgacgaaaatataaccaagcattaggagacctttgagggggagaaactggacatgaacaatgaactctggcccagaaccgacggtcctagtagcagaccaccctgggcaagcacaatcgaaaaatgaaggtgaacaaattgacagatttgaaccattgtttttctaattctttacttttcggaataaaaagaaaaacttaccaaaacttgtactacaaggatggattggcgcagaggcttgaggagcaagtaagttaagagaatggcaccagtagaaagagagagttgtgagagtagaagagggaatgtatagttgagtggattgtataggaaaaatggcccataagggtacatatttttcagggtagtacaaacatttgtcaaattgttgaaattattaacttgatcataggtaacagaagaattcacatccaaggttcccatgatttaagagctcttcttttttgcatatgaagaatcaaatcaaatcatgggaagaagaagaagaaagatttatatgatgaatgaacaaaaatgtctgctgaaactgtgagtttattagctgcactctctcaccttttatatctaactaaattgttgggtttttttttt

SEQ ID NO: 303644 - DNA, 1479 bp, Cannabis indica
aatagaattgtagttttaatatatatgggttttttttttttaaaagggcccaattttaaaattttacacgagacccccaaaatgttgaggccggccctggtcacaatagtacggattagtatttaagaggtaccgagaatttttatagatatttaagaattatgagtttatgtgggaattacccttttaacctttaatttaagtatatgtgattttgtgagtaagggcattttggtaaaagtccataggtagagaaatcaaaatttggaaaactttctctttcctaaacctccttttaacctccatagacaagaccaaacccaagaattcatcatctcttttcaatcaattttgttcaagaattcaaggggttctatggagactgctaagtaaaaagtttttagaagttttgaggtatgaatttgagttttataccttaattttatatgtatatatgaaattggatttgttgtgaattagtgtatgtggttgttagttatgaattaaagatggttattctcaattttggggttggaatcatggttggaatggtgtttagttgtaagaattattattattattattattattattattattatattttgaaaaaatagcctcagaaaacactatcatagagtaaagaactcaatggggccgagagttaggagaatcattgataaatggcatcagccaaaataaagtgtctaatacaatgagcattccaggccactaaactgtatttacagttgttgatatagcaaacttagcaagagtatcaacatcaatattaatagttctggggcaaaaagtaaaactcatagtattaaaaagattacaagatgttttgatatcagagaggactaatttcaaggatgaatctaaactggaggaatgattaagcttatcaaccaagtctttgcaatcaaattcaaactgaatgttgcgaaaaccaaaatgattgcattgagtgaccgcatgacgtagagcaagagcttctgccatttctggtacttccaaatagtagtagccaaaactaccccatgaaaatctcgagacaccatactcaaaccacaaatgtcattcacgagggcattgccatcggtgctacactcggaggtggagcaagattcttagccctaaattgcgacaattgaactggtaagaagccaagaaattggagacccatggtcctactaactgtggagggagaatggtgttttcatgaacttgcttgtttcgacggaaccaaatacaccaccaagtagggatggcaattagggctattttcgcgggtcgggcctccggccctacggggcgactttggcccgaattattcgggcttttatcgggctcccaatccggccaggtatatattattttgggtcgggcctggcccaacccaattttagacaaatcaagattaatacaatagggatttttttaaaaatatacataaaatacaaaataattacaaaa

SEQ ID NO: 303645 - DNA, 1300 bp, Cannabis indica
aattttattccattctattcctattcctattctcattcctatttctattcttatattttcattcctcccaaccaaacgccttaagtgtatttttgattttgtttgtaattcgatcaaagtaatttgtacctatattaagagtatggtatagtggagagtgttaagttttcaaaagaacaagttgtactaaaggtgatcaatatgtgttaaatgtaattgagggttggtattaattatttctgtgttgttgttgttgattacatttttgcagtagcttgtttgtactgtgttcgattttgaataaaatatttcttttgttaaaaaaaataataaaaaaataattaactaaatttcatttagcttggtatatatatattaaaacaataacattcactaattgctcaaattcatctaacatatcaaaaagaatatgaaaattttgaattgcaaaccagtagtagtaattacaactcgaaaataaatttgaattccagtaaatcccaatagaaatgaataaataatgaaacccaatctatctttgttgttacatattgcttgattaattaaccaaagaaaactcctagaacgccaagtatgaggagcaaagtagtgatgaaggcaagtgttgagaaagagttaagaatatttgcactagatggttgaatatcttgcgaaggagagggtgaagaaggggtaggagatgccacgtcatcaatatcaggaatgacagtaataagaagcttttgatttcccacttggcagtgttgaggaacaccacaaatataccatttccttccgggagttgtcaatgtaatcacatcgtttccactagttaaggccgatgtatcatcagctggtggcacacattctttgaagccaacaccgtcaactttgaacacattgtgatctccctctcgatacttgaacactataaaaatattttatgagtaaaattggaattatataaattattttaatttcaaatataacttttcatttttcattcaaatatttggtatgatttttataattctaaaaaatcaacggacaagactagcttatatttattaatatacgttaaataaatataaaacacatgcaaataagacaaataaataaggccataagttatatatacatacctagtttgtcaccaacatggaattcctttccttgagcccaagtctggtagtcaaagttgatagtccaacctttctcatctcccacccacatattcaactgctgatattgaagggacaaaaattgctataataattgcaagactaatgaatagttgctt

SEQ ID NO: 303646 - DNA, 4002 bp, Cannabis indica
ttccataataatggggttgaacctctataacatatcatattcttagttttgctaactaataattatattttgtttaaatctcattgatttcttgtcgcttttaagacttaatgtcattgcccgaaagtgagatcaataatataaattaagctcccaactgctgatgcataaggataatttctcatgtcctccatctccttttgagtcttttgacaatgatccttgcataaagaaattccatgtctagactgtaattgtcctattcaggtaacaattttttacgtctgataacctttctatcttatttccaataagtagaatgtcaccaacataaaaaactaggaatatcactacattacctttaatgtatttctatacacaggctttgtcttcattttgttcgaatccatacttttaatagttttattaaaggttatattccaagatctagaggtttgcttcaatccataaatggatttcagcaatttggaaacctttttatctttctcttattgcacatacccttcaggttgttccatataaatggttttttccggattgccatttaaaaagtagtcttaacgtccattttccatatctcacaatcaaaagtggtagctatggataaaagaataagaatagatttaagcatggccactggagagaaggttttgttgtaatcgacgccttctcgctgtttgtatttttcgactatgagcctagctttaaaggtctctaccttgtcttcaacatttctcttcttcttataaattcatctccatcctataggtgttacaccttcaggtacgatttcataattacaggctttgttggtccgcatggaatcgatttcttgatccattgcatcattccacttttttgagttagggttatccattacttgttggtaagttaataaatagtccttgtctatatcaaagacaagaacatgtgcttcatgttcatagcagacaggttgtttgacaatcctcccactaagacaatgtactagggttccttttcggaactgtggcaaccgttgttggtagttctactgatggttctaaagttgttgatttagaagtctgctcttttcttttttcctcgataaccacttaattgtgtggtttgtgacatttcatatagttatgttctagaaatatagcatttgtcgatacaaattttattttcttcatgacaatagaagtatgcacctgtagtttcctctgaaaaagtaaaaagcatacacacttcaaacctcatagcagatttccatgtcttcagtttaagaactttagtaggacaacccgaaagacagaaatgtttcaaattgggttttgtcccattttataaatccattggagtctttcttatgttcttcgagggcactgcattaaaaatgtaagtagctgcttgaagtgtgtatccccaaaaattcactggcagtgatgaggagcacatcattaatctgaccatgtctaataaggtctggtttcttctctcagaacactattctgctaaggtattccaagtgttgtaaattaagaaaagatcccttcttcaaacaagtagtctttgaattcagaatcaaaatacactccataatctaattgaagtgtttttaatgatttacctaatttcttttcagctaaggctttaaagtctttcagttttccgaaagtttcaaacttcttggctttaagttaaatatgatcgtatcttgaataatcttcaataaaagttgcaaagtattcatgacctccttgtgcttgaatattaattggtctgcacacatcagtatgaacaagctcaagttgttctttggctctattaccttttgcagaaaaggacaattagtcatctttcctttgagacaagatttgcataccgaaagagttccaaccattatttctctcaaaggagcatcatttgttaactgagttgttctgtgtaggacaatatgaccaaaatgtagatgcgacatatacattttatcatcattatttaaatcaatttttcactaggtctgagcacataaagtccatttatttgttttgcacttcaaataggcattataaacttaaaattaataatttcattattaattaacaaatgttaaaagattgttcgtgtgaaagagataaaagaaaatatattcttggtacaatcaggaataaaataaacattgctcaataataaaatcatattgtcaaaatttaaacagactttgccaatacacttggtagacgcttgtgctccattcccaacctgcatggtcacctctccatgagccagcacccttgatgaatcatgtatctgcatagaagaataaatatagttagtgactctatcaacaatccataatgatttagatggatggcctgtaaagaattcattattttagatgcgttctctagctgttcatgcgtcttacgccaaacgttatccatgcaaacaagcctttagaatttggtcttgttgttgtattgaatccaagaatcatatttgtcccaaatatttttcagggcattggcaacaggctcttcaggacgctcctcagttaagataaatttgtggttctcacaatccagcatcaaattgagactagatttctatttcatgaaattttcactattcaattttaccaatactaatgaaaagtaagaggatttggagtaatagacatgactgaaataaataaaaataaaaaaattaatatacttcaataataaatatcattttgaaatgattgtaaacgtagtgatgcatgagcgcatacaattaattaatacacataaaataatgtttaacttattctacaacaaaaatctttgacaactgatcgtcattgtagggtcgagatcgagtcaattttattgagcctatgagatagttctcatatttataattttgaaacttaaatatctcatatttccttttcaaaatatgaaatatttctttttggtcaatttaacaactaaccacatggcttagttacactttgtgagtgtggcccattatttaagatttcacaagttaactttgtaactctgtcttagggttagtatcgcattaaaacacatcacttcctcctatcttattcaagagatgaacctgaacaacagtatagaaaaataaatttcttagggagatgaaaataaagtcgtcgtgaggtcagtctatactcctttagtgttgacaattaatgaagaccgtaagttacattgacatgtactctttctcccactcactttttaagattaatgtgtttaatttattaattctcataactaatacatagtaacccttttaataattatgattaatttatttataatagaattcttaaattataaataaattttccatcacaattattaaataaaattttaaacccttttaaattaattagagtaatttaaaattaccaagttcattctaaattaatcttagaaagtttacatgcttttaattttaaaaatagtaaagacataaacacataggacaatattttaatatatcatgcttctactataagatacatgataattaaactatgtggggtttttatttatgggttgttattcactaatgcatcattaagttattaattaactattaatcaacacgtatttaaaaagcagtaaataaaaattaatgatgaactagttaaaattttgggtatttataattttacaactcttagaaaaatagaaattaaattacaaaaactaagctatatcaccttgattcacttcaagggaaattttataaatttgtaggatcatctgttagacatttatatgtataaactgaaatatatatgtttatctataaaatgcggaattaaatcaaacatatatatattatgaataaggatcgaaatacctccagccattgattctagagcttcaaacccacataagctttgatctgcaaaggaaactggttggtgtgggtaatcgggcttcctcgctctctcaactctctttagatggattt

SEQ ID NO: 303647 - DNA, 2563 bp, Cannabis indica
aaaatatattccaacactaactgtaactaacatgacaacttaataactaacagtatctaagacaaccccaacattcacaaacattttattcaaaatataatttaatatagccttttattgtagatgaatatcatgttatatttgtagattaaaagtatataattattgtttcagtatattaatagaattagaaaagaattaggttcataattgttagtgttggaacctcttctagcctttgttgcagagcttcaagaacacaataaaaagaagaagaaagaagattgagaaagactatattgcattgaaatgagagtgttacactagtttatatacacaagctcaaaagaagtaaagcataatagaacaagtgtaaccgaaagccaacagaaataacaaacaccaaaaatagttataactaactgtcttgaaactccctctcaagcttggaattggtattgggaccaataccaagtttggtcttgaatagagaaaatcgagcaatggaggtggcttttgtgagcccatcaacattttgatcaactggaaggacatgttggatgggaactagtttttgagtgagctgttctcaaacaaaatacagatccagctcaatatgtttagtacgagcatgactaataggattagttattaaaagaatggtgcttaagttttcacacaagatacaggggctcgaggaagctgtatttttagtttagtgaatagagaatgcatccaggtaattttggaaacaacttgagaaggactcctgtattcaacttctgtgctggatttggaaactatatgttatttcttacattgccatgccacaagattggaaccaaggaatattgaaaatcctgaagtggaccttctatcatcaggatcactagcccagcttgtatcacagaatgcagtaacatcaagttcattgggcttctgaagagttaaaccatgacacacagtgccactaaggtatctcaaaattattttcactgcattccagtgatgatgaaaagtattggccatgaattgacacactttattcacacaaaaggaaatttcatgtctagtgatggtcatattgaagggcaccaacaatagacctatactgttgtggattctcaataggatcaccttgatatgtagaaattttcaaaccacttgtcattggtgtaggggatggtttggcatcttgaatttgagctttacataatagatcttttatgtacttcccttgagaggcatgcaagccattgtcagtgtgttgaacttcaataccaaggaagtaatggaggctgccaagatttttgagagaaaatttattgtctaaagcctaaatcagtgaagatacttgtgcagcatcacttccagtgacaattatatcattaacatacaccaatatgagtatcatagccttggatgtatgttgaatgaagagattgtgatcagtcttagaaaaaacaaagccaaaagacaatagacattgctgcaatttatcaaacatggcccttggagcctgttttagtccatatatagccttatttagtttgcataccagatgaggagcatcaggtaattcaaagccaagggttgtgtcatgtagacatcttccttcaaatcaccatttaaaaaagcattattaatatccaactgttgaatgcactagcctcttgttaaggctagagataaaacaatccttattgtcactggtttgacaacaggacagaaagtctcaatgaaatcaaagcctagttgctaatagaatcaccttgcaactaatcaagctttgagcttattgatcgtaccatcaggattgagtttaatcttgtaaacccaattacacccaattggggttcttccatctagttggggaacatatgtgtaggcgacatttctttttaatgctccaatatcatcagtcattgcatttaaccatttttcttgttgcatagccattttaacacatgttggttcttgaaaatccagataaacctttggtttgtaaattctagatttggctcttgttttcattgaatgcttgtttgttataggacaatgaggttgagctaatgattgagtcacatgcattggttgagtggttgtagggataggtgagatatgtgatggtgtcatggttttagtagaagcagaagcagatggactgtgtgactcttgtgtataagttgtggatactgttgggctttatgccctaaataaaactctattttaatgtaatctatattatttaaatatcaataaagagacagaagtattttcatcacttatttaatatgtctttttgttcatgttatcatttaaatgttgttccatctaaattagtccctaaaacaccgttagaattatggaatggtcgtacacctagtttacggcattatagaatctgggggttccctgatcatgtcttaagaaagaaagatggcaaacctgaaaagagaactgaggtttgcaagtttgttggaaattctaaagagactaggggtggactattttataattgcaaggatgataaagtgtttgtttccacaaacgccactttcct

SEQ ID NO: 303648 - DNA, 1566 bp, Cannabis indica
tagtttttgtttgttatacatgttattgtgcataactagaataattaataaaaatctattttgaaaaaagaaataaataaataaataaaagtctgtagtcaactttgtatagtagatcatgcatgccccagtcctaccccaaaagttctacatgtccctgttcatttcattctcttatatggcccctatcccttgatacttgagaaactaagaaatactggaaattaatttattaagtgagagagatgtgttgggggaatcagaaagagcagacagcactaaatgcactcacatggatatgagcattgaatcaacctaatcaacacctcataactcgttgatttaaatgatcatactttttattaagtaaataataaatatatctctctattttattaaataattccttttcgaaatcaggaatgacaaaaataattaaatgactagtaagtagtaacttcatcttcatatacagcgctagtagtgaaaaaagacaaattagagctaaacttctttttctctcaacattacttataacttttctcttattgcattgtatatattagtgctctatatattaatatgtgcgtgtatcgaattcatggcatttatgaatgtagtcacctacttttctgaccagaaacaaagtaaagtgctaaaactggggtaatttaataccatgcatcttttttgcttctgaacacttaattaatatagtactcatcatttttgtcatttaccacgaaaatgattacatcaaacagaaaaagaagaagaagaagaagaagagtcaatacacctaaaactaaacctgtaacacaagtcaattcacgaagaagaagaagaagaagaaagtgagatactggcctgcgtatataatgttttcccaggacaacgatgtgatttttcattgattagaataaatttatgtttaagtacttcatcaagagaactctctagcttcttcgtttgttttccaagatgattgatgagtattgttgtgcttgaattgtttaaacaaagttgggctgttatatgtgggaatatttaaatcaagaatacaatcattttttactttgaaagtgaactttgttaataattattgccagaaagaaaacgtttgtcaaagagacaaatttcgctctaaactctaaagtaggtacaccgagtaaaagtaagaataatttatatatataggctaactaatcaatgtttacatctttattatattatatatattattttttctttccacataattagtaaagatcaactttgagctccttataattttcgtatttatacatgtaagaaaaaaggtaattaaggagaccaatcttatatttttaggtatattgattgttaaattttactattcgatcaaccgaattaatttaagtcatttaatcaatttgtttaatttgagtttatgcaatatattttagactttaatattttttgaatcagatcgaattcatctaatattttaagtctactatgtattacattgcactgcatccatctaattcaaaaaaaaaaatagtaaaaatttttaatattaatttt

SEQ ID NO: 303649 - DNA, 3244 bp, Cannabis indica
aaaaaatttacagttgcaaaggttattagcaacattaggagcactgataactttcaagaaaagtccacattcaacatcccattgtgaacaacactaaaatattttgattcatttgatcagccataaactttggtatttacgccgtaaattactcttaaaaatattctactccatccgactagtttcgggggttcgaatctttacctcacatttctatgtgtagtgctttagtgtaatttgtatccttttgtctgaaaatgtgcttatatgtataataactagttcatgaaatgtgttctcaatctttcaaaccacatgtcgtttatttgaagagttctgtttcaaacattctctacttctgcaatgagagccttcaaaagaaaacaagagcatatcaatcaagaatacaaacttcagactaccatttctgacggcagagaagatcgaatacaagacattgacgagtcgagaacgaaatcttaaactttcatttataggaatatttatgcacagaactaataattttacaatgggggggctggacagttaatattactacaagcacagcacaatccaaggaaattgacaaatacaattatggtatatttttattatgtatatataatatatttatatagttcaattttgaaagaagagagcagctccaactaaccctaaccatagtgccaaagctatccaaaaaccttggctcttgtccaatcccgttggagggcgccacaccataaagtcccctaaaaagtctcttgaggatggaacctgattggttgttgatcccatgtttttgccatcattgtccttgtttttatcggtccacgttcctgcatagctgaattcgcagataacaccgcgtttttaaatcattttaagcgaaaaacaaattggcaaaacaagactcaaacctttagggtgtgtttggaagtaactgtataattactaggtagagtaattactaaggtagtaattacacattttagactcttgtaactagagaaatggatcggtacctgtcataactagaaccaatcaatggtatggtcaccatttcctcttgggatatcttgagctttggagcttgcaaaatgtagcgaagttcagcagcttggcgtcggatgctgacatagggatgtttcgcctctaattgtttgtaaagagagatacaatcggtgtggcgactattagcctcgtatgccatggcaagccatatttgaatctaaaaaaccacaaaataaccaaggtttatacttaatacattggtttgttcataataagaaagaacacaattttcattagtagtagaagttaacaaaaaccgacctcaccgccaaatagcgtcggccctggtatgattgttagcgcaccttctaagaattcaatggcgcgcccatacatgcccttcccatatgccttctggcccaattcaaacatcaattgtgctgtttctctccgttctgcctgctctttcgctacctattcccacaacccgaaaaaataccaacaaaactttatcttatgatattatcagtaaaaacaaatcccaaattcacatcatagttactcttattctagcattaactgctacttaacaatagagtggcaaagaaaaatacccaaataagaaaactttcactttcaagtaatcaaaagcttaaaatccatcaaataaaaagcttgcatttacattcattcatttggctgagcactattaagccaataagaggaatttgttagttagttagttatatctgtttgagttagttagatgctgtttagttaagagttagttacaatttatagctacaagcttagtataaatagcaaagctctgtaattcatattcacttgattaatgataacaattttcttcataatttttttcacatctgataacttaaaagaacaaattgtaaggaaaaaacacgaagttcaaaactttcatcaaaaagacacaaatttccataaaaaatttctagtattaactactcttctacttaacaataattcaagtaatcaaagcttaaaacccatcatataaaaaaattacatttacattcattcaattggctttagaacaaattgttaacgaaaaagaaaacataaagtccaaaaccttaatccaaaatagacaaaattctatcaaaaacaacagaaaaatctcaccttttcaagttctttcctaactctcatccatttctctaatattgacaatattattattcaaagcatttagtaatttaagcattccaattacatcataagttgtaaaatgctattattcttcatttattccattacatttctccgttaaattataccgattaacatgccattagtataaatagtatagctctgtaattcatattcatttgattaatgataataattactaaaaagaacaaattgttagagaaagaaaaaaacacaaagttcaaaacttcaatccaaaacatacaaaattccatcaaaatctaaccttttcaagctcttttctaactctcatccgtttctcttcctcagtctcctccacaccatcttcaccaccatccccatcctccaattgactctgcaactcctcagctttcttctccaactctctcttctcttcaatctccttaactctcatgcgcatttccttctcccaatcaaacctatcctcttcccaatctccgttaccgttaccgttaccgtcttcatcgctcgatccggcatcagaagaatccacaccaccgttaaccttagaattcgcttttccacgaaccaccactctctggctccgaatctctccctccgattcaaaacccttaaacgaactcaacaacgcgtgaggagactctcttctcggcggccagtccaaagccaccatcggacgaaccttacgatcaggtaatataggacgagaagaagaagctgctacgtcgattgagagagctaagttgccgaaaaccaccaccgccatagtcgccggagagtgatgagaagaaagagaattagggattttgtgattcccgctgaaaagactgttatatatggttgatatttttttgttttatgacgaaaatacccctctactttattgggtaattatatccttatttattttatggaataattacataaggcactatttttagtaaaatttttacattttatgtttttttaacatttttacggtttttcaaaaaataacacgaaaacaacataaaatcaacaaaaaaataacataaaa

SEQ ID NO: 303650 - DNA, 4274 bp, Cannabis indica
ttaatgttgatggtgcacttttttcaaatgagaagagctatggtattggcttggttgctagagacagtaatggtttggtcattcaagctaagactctgaagaaggcgggggacttacaacctcatgaagtggaagccattggtatcaaagaggctctaagttggattaaggacaacaattggcctaacgtgattgtggaatcggattgtcgtcgagttgtgttggaccttcaaggaaataaagatatgacttctccttatggtcatataattttagattgtaaggctatgttagcctctgttacggatgtttcttttaattttgttaagcggtctgctaataaggttgcgcattcattggcgcgatcttctctttttgaggctgaccgtgtttttagtggtgttgagttacctactgtaattgcttcctttgttttggaagatttgatttaatgaaatttcattattattcaaaaaaaaattggaataaattaacagaggaatatgatagaataaatagaaaataattaaaatcaatatttgtaatatgttatttactaaaattatttagaaatagaataataataatttatcttatttatttatcaaaacacataatcagaatacttaaattgactaaattatcatttatagttaaactatactatacggtagttattttgtaagacatattttaaaaaataaaattctcattgtatatttaatattaaaaaataaaataaaataaaaataaataaaaatcattactccttagtgacattcttaaaaaaaatagtgagaaagtattctctttctttttatctcatattagataatgttgtctcttttttaattttagtaaaataaataaatacaagaaaataactatcttaccattaatttttttttatttattagtattcacgtgatatgcatacataatttatacacaaacttgacacatatttatatggcaagtattgtcaaccaatcattttttatttaaaacgatcacatgtattaaagtgacttattatataagtgtttgttatcactaaaaaaaatagctacatttagtgacaacattttggtcacaatataaatttttcatgactaactatgacttttaatcacaacaaaaaaattatttgtgactaaaatatagtatttaaatataacttgtcattaatttagttttagtgacaacaagcattgtgattaaaaatatatttagtcacaataaattattattgttgtgactaatatttttagctacgaatattttagtcacaataagtgatgtggtgaattctgtgcaggatttctttcgaacgggcggtttgtggctgagttaaatcgtacttttattgtgatgattcccaagcgttcgaatgcagctatgtttgatgactacaggccgatcagtctgtgcaatactacttataagattatatctaagctcctctcgaataggattcgcaaggtgttgcaaaatctgatttcgcctaatcaatccgcgttcgtcaaagggagatggatagccgaaaattccattatagcccatgaggtgattaactattttcgtcatctgaagggcaacaaagcttatgttggaattaaatgcgacatgtccaaggcttatgatcgcctggaatgggatttcattgaagcagtctgcgtgcgaatggttttgatgtgagatttgttaacatgatcatgtggtgcattcgctcggttaagttccaagtgttgctcaatggggggcttaccaaatctttcgctccaagaagagggattcggcaaggcgatcctttgtctccctatatcttcatcttgtgctcggaagtgctttctagattattgtttgccagagaagagtccgggagtttggagggggtgaaagtctcgcgccatggtccagctatctctcatttgatgtatgcggatgacacccttttgtttgctaacgctgaccttcagtccatgacctgtttgtgggagtgtgttaataagtattgttcttggtctggccaatgtttaaatctctagaagactaagatcaccttctctgataacagttgccaactccttcgctcggagattgttaattccttcggtttcaaagagatgaatgaagatgagcagttcttgggcaatcctctttttattcatggtaattgtgtgagtaaattcaagaatgtcgtggataaggttgcaagtcggcttgaaggttggaaagctaagctcttgtcgcaatcggctagatcggttctgattcaaaacgttcttcagacggtccctttgtattccatggcggtgtttaaacttccagtggccattcataacgagcttgacggcatctctagacgtttctggtggactagagacactgggaagagtcgttacttgtctctagtttcttgggatagtatttgcaaacccaaggcttgtgggggtctcggattcagaaagtctggccacaataatatttgtcttctggccaaattggcgtggatgcttgctaaggaaggtgatgccctatggataaaggttttaaaagggaagtacttccctcagacgtcctttcttgcagctggtaagaaacaaaattcctcccttgtggctaggggaatatgggatgctaaacagttaattaaggatcatgccgcttggagggttagttttaactcttctagaaatctgtgggattgtgattgggtggtctttgatggtttgaggattggtcagggagatttaaaccccctagaatcgaagagtttgtttatctctgatcttgttgatcgggctaatggggcttgggacttgaattcgctgtcgtgtccttctctccaaagactgtggtgaatttccaattgatttatccttctgatctcgcctcccaggactccctggtgtggactgcatctccaagtggtgagttctctctgaaatcggcctattgggctctcaaggtgtttgttctccactgaagatcctatatataagcagctgtgggagagttgcttccatcctagagttaaacttttcctttggaaactttaccgagatgcattgcctactggttttaggttggcggctatttttggcaatgagttgggcccgtgctgtttgtgtgattccccggatgctaattctactgcccatctttttggggattgtgatgtggtcaagaaactctggtttctctctaagtggggaattagaattgaggcctttgatttgagcgatggaaggaaagtgcttcattggatgttcaacgctccgttcatcaaggatttagaggctcgggcggttactgagtttagattatttgctgctgtgttgttctgtaaagcttggttctttcgcaaccaagctttccataatggtgggtctatgccagtggagttgatgtccaaacttgtgggcagggaattcgactcccagtggagtcttctttcgagcaatacggatgcctttccttcgcaccaggttactatatgcagttaacagcacaggagtggagacaagcatacatacgacaaattatcttttcctatgaagagtactggctccacgtggcacttttcacgaaattgtatttttatttttagataaaaaattcgtactataatagtaaataaaatatcaaaacaaactataataatcaaattataaaacaaggtgagagaaaaataatttcactcctctaaaagtctatttaatttttatcaaatgaaataaagcagcgataaatttactacattgaacaattagtgatgtaatctccttcttcttcttttttttttatatatggatgagatcctttaacttaagtctaatcttataaagaggttaattaaggaatttttctaaaaatactaaatttttggtaaaagtttataattttactgttacacggaattttttacaaaaattttatttttttataaattaactgtaaaacaacaaaataaaacaattaaaacaacaacaacacttgaacaactaaaaataatcgtagaacaactgtaaaaacttaatatattacacagtattttttaaaagaaaaacatagtattttttttaaaaaaatcagtcttacattaaaaaagtaaaaaagttagaaattctaatatatggtataaaaacctcttaattaatggggttgccatatttatggaatttttttttcatttttgtataaatttagaattatttttcaactaatatatatctttatatattaaaagtgtctatctaacggcatttctt

SEQ ID NO: 303651 - DNA, 6393 bp, Cannabis indica
tagtcacaataaaaaattacttgggactaaaatatagtattaaacatagtatttagatacaagttgtcactaatttagtttagtcacaacaaattgtgatttttatgactaatgtcttggttactttttagtcagaaaatatgaattattatatataattagttacaatttttttacttttactcacaagttttgttgcgactaaaagtgagattttttgtagtgtaaaacatgacattttcagaaagttgaatttcaaacttgtaaatattatcattgaaataagagaattgctaaaggacactcatggtgtctagcactcttatgagatataatatagttatttgtgtaattcaatattgagtaccacttattttaatttaataaaaattatagaaaaccgctaactgattataagatgacatatcatagaagtactaagcattttggtgtcccataacaatactcttaaaatatgtaaaaaaaaaaaaaagcaagtgttgggaatttattcttgaatccatacacaattcactgaactaatcaagacacacaatgtagatcgaacttgatcttgcaataaaattcacaaaatctattatcaaattgcataaatcatgtcaattgaattgttaacttgttaatgttaattaaaactataattttgatcaagaaccacagtccaactaatgaattaaagatgcaaacaatcaatctttgacataaacatgtaatgcaataaaatagaaattaaaagatgaaataaaccaaaaaagtaaagatcaaatgcaaaaattttggcaaggttctacctaagcttagacagttacaaaaatagtagagatttctaataattagatatgtcacataggatttatttagttccaactgaagtgtctttaattatgtcttgagtgatcaagtgtgcaggggctcatgataagttgtccttgcttatgatggagttcaattcaacagagttgctaaacaattaatttcaacaacatttacacaaagacttttggttcaaactagaacaaattaagtgctataattgtctaaaatttagaaacagtgcccaatttggttttttgttggtcaacaagtctaagagaaaagtcaagtaatacataccagaagcttgggttgtgtttggtagatgggaaaagtaagaaaataaaattttagagaaaagtcaaaagtgagtgaaaatgagtatgtttgtttgggtcaatatgcatggtcaacaagtcaagagaaaagtccaataataaatatgtggtatgttatttttgtaatatgcaagtaacaagtgatacaatttaaagtaaaatttaaacattaaagtctaatttaaagaaagcaaaaataatggtaactaatgtgataatataaagtgatgaaaaatatgagttgaattactaaattcaactcgaattttgttaactaagaatataattaaagcacaaattctaaaagttgatgcaaaactaggtaaatattacataattatatcttcactaattgcaatcttataagataatagctattcattatttcagataaaaacatagttcactacactatactataatagatttatgagatgaaataattatgtaataccataattatagctttctaattgagtagtgttaatcacacattatattgattctagtatttattattgtgcatattatggctcttgtttattcccttccctgctactattacgctcgcttggtctcctcttcctaaagactggataaagattaactgtgatgttaaagtaaggactgggactatgtgtgtgattacacttttatacctcatgaatcctcattacaattacttaaaatgactatcttactcttactttatactttttcttactcttactcttactttatactttttcttactaaagtatggataattttgtcaatttactatctattctaatattcgttccaacaacaaactaaatatagcaatcaattcctattacaaagacttaatccattacattactaatactattacaattactgttctattccaccaaatcaagcaccaccttaaaaataatcttataaataatattgcaacgactaatgagttaaaactcctctaccttctttagtttgttcacttttggaataagagacatggcaatatcatatttaaggtttccaacctcatctatcttcattcgacaccttatgagtaacaacctaataacataatttttcacatattccataagttgtggtaaaatagagtagaaaatccatgatggggtcgttgtttattagttaatcactttattcgtaacacaaatatgattaataaaatcaaactatgagtcattcatttattttgaaattagcaacttcaacgaccatctctaaatctttattactaggttgagaagagctaaaatgttagtaaagtattcgataataagcttctcaatatttatttttgatacaataaattattatttatcataaatggagaaccataatattgtatgtatttttgttttaaaaagactaattaagattcttcccccttaaattttgacatgtactaaattatattctgaatttttatgtcgttccccaacaattgagattgttgaattggagaatttctgttcaattttacaactagacatctaatgtagcagatattgttcatgtattaaattatgcttcccgaacttaaatgtacagtaaatcgtgctacctaaatttttatccacatggggtactataagcaaaattgaataaaatcatacacaaatttttgaatccaacaatctccttagtttaaagggaattattaactatttaaaaaatgtacataacacaatttaaaacatatccaaactaaaaaaatcctaattagcaattgaaatatatgagttttctagtttaaagaatgttcacaatttcaatgaagtgatatttttcttgtgaatttcttcccattgtcttccttaatttatacttttttgactcttactttacaaaatcttggagtagaatattctaaaaggtctttgttgaccaaaagagcttttctgttcatttcctcgaaactacgtcgtttctacaacgaaacgctaacctgtctttcttacctcaaactcaacaaccattacttcgaaaaaaaaaataaaaatccaaatctttaataaaacccaaaacccaaatcttttcccagaaaattgggcaccaaattttcccgagaaaatggagaattccacccaagaatcccatctcagacccgacaattcggtaacctatgattccccttacccaatgtacgccatggctctttcctcaacccaaacccaaacccgaaaccaccgaatcgctgtcggaagcttcatcgaagaaatctctaaccgtgttgatattctctccttcgacccagaaaccctaaccctaaattcccaaccttcgctttcctttgaccacccatatcctcccacgaagctaatgtttcacccttccacactccaaaaatcatccgacattctcgcctcctcaggcgattatctccgactctgggaggttcgtgataactcgatcgaacccatctctgttctcaacaacagtaagtccagcgagttctgtgctcccttgacatctttcgattggaacgagatcgagcctaggagaattggaacttcttctatcgataccacttgtacaatttgggatattgataaaggagtggttgaaacccaattgattgctcacgataaagaggtttacgatatagcttggggtgaagcaagggtttttgcttcggtttcggctgatgggtcagtcagaatctttgatttgagagataaagaacactccacaatcatctatgagagtcctcaacctgatacccctttgcttagattggcttggaataaacaggatttgaggtatatggcaacaattttgatggatagtaataaagttgtgatcttggatattaggtctcctagtatgccggtggctgagctagagagacaccgtgctggagttaatgctattgcttgggctcctcagagttatagacatatttgttcagctggggatgatagtcaagctcttatttgggagttacctactgtggctggacctaatgggattgatcccatttctatgtactctgctggctctgaaattaaccagttgcagtggtctgctgctcagcctgattggattgccattgctttttctaataagatgcaacttttgaaagtttgagatgaggtgaggtgagcttcctttttctttcatcactcttaagaaaagttcaacttttgctgctaattttatacatgttttattgctatagtaagtgtgaaaagaatcttaggttttattggtgatcctgttcatgttttgaaatgcttttatttaattcataacattgaagtagatttctttttaaccaatagaggagtgtcggttttgtttcagttttaatgtgagcatttttcaaagaagtttgcattgttttgttgatacattaagtagattttgtaaactctttaaagtttaaacttgactttcgcttactagaaatagaatagggctgtaatgaggaggacagcaagtatattcctgagtgtgtttagagggagattattggatggattttgggtagattggttgttttgaggaaagaaattgttaagcaatggatttaaaatcctcaatttttaacttattttcatttcattcaatattagagaaactttagagtgtaaccgatcctatgactaaaatattcatatttccttaacttctttttctccttccaaaggtagcctaaagttaattttcggaactcaatactaatgaaactaaaaccagattttgaatgttaatcttaaattaaggcatgtaatcttgggctgtaatttagtctctagttacattatcttttctgcataagcataattgagctagcatggtcatgttttgaaaatctaaaacttcatacgatttctcaattctatactccttgactgtttcatacgatttgtgagcctgttgtatacttgtattattctggcgaaagcttattctgcgtatttcactttaatgcaggctctaacgggggattgaagatgatgttgttgacatatagaccaaaccaagccggtatttagtaaatatttttcattaatcggtcagatatgttctaatgttttaggaagaagagttgtagttcttgcacgtagcttgtcttcgtggcgagttatatttattgttttattacactatttctggcttggttttgtaggtgtagttttgtgtaccttatttcgttcttcaccacaatctttgtgttatatgtaggcttgcctctcctctaatctcttttgtctgcgtccttgatagctcgaaatgttttacctaaagaaaaagaattaaaggtagagagtaattcagtgaaagattaagtctagttaacattcttagagcatgatcaagcaagcaaagagttgcttgttttagaattccttcaattttgagttagtgacttgattctgttaattgttctgtagttatttggattgagtttctgtctggataagactcactaacatctttgcaaaatgctaaccgaatgacaatttcattttcggtagagattatgaaaaaaaggattagttcttgttgatgtagtaccacttttgcttttgagttttgtttgtggagaacttattattgcttgggaaagtttggaaagccaaaatgaaacaaaaattatagtttggtgttctttttaagattttacatcttatttagtttgttattttaaggtttttgaaataatattatagtaaaatgcaaattttgtcaatgaccataattagcataaggtgtaaatgttataaaaaaatttaatgtaaatgtagggttgaatttggaataaaaaaatgttatatttgtttttgtactccaatatcatttataagttaatagaacattgtttaaaaaaactagtacatgtttacaattagaaataattaaaagactcaaacaaaaaatgtactttattttaaatgcaaattaatgcaataagtataatatcattaataattattaattaattaatggggttttttatggaaaaggtttacaaataaatatatatatatatagggatatgattttgtcccgtgatgtactttcacggaatgtattccgtggtacattagatgggtctcagggtacattaaatgagtgtcagggtacgtttttattttttaaccctaattactcctagatcaatgtcagccgttagatcaaataactctctcatttgacggctgcagtacattacggattacaatccgtgaaagta

SEQ ID NO: 303652 - DNA, 1013 bp, Cannabis indica
ttttgttagtgatatctataactcatttgcaaatttgttcaacatcttcctcataatgaaattgaattgatcttcacgacttggtggaggatttggtgccgtagaaacaaatttgttcacaaaaacaagttgcttcctccggatctcactgagttgtgggttgcagactatcgctaggcctatcatttgagaacgccaatgatgctataggtcctctttggaagcaaccgaatttggtgattgatcttactgctagatggatccccttcctcttaccgttgccaaaatcaatacagatgctaccatcgacaatactaggagacttgtggtcttggcatggtcgttagaaattcttttggagatgttcttgcctatgctacctggttagtgtcatgtattgtctccccaaagattgttgagaaccttgctatcaaaaagtcttgtcccaatgcgtcactcttggtctcaccaatgttcaacttgataccgactgtaagagtttagttcacaagcgtaataactatcttgttttagattttttgttgggtttaattcttgatgatattagatcgctttgttcttatttttctgttgtgagttttaaatattgtccaatatttgtcaatattgttgttgattgtctttctaaacttgctttatctagtactacaagtataatttggaggcttgactaaccaagttatattagagatcttattttggctgataccttgaattaatggattcccctcgctatcggcctctttgagctttcagctcttaggtggagttctttgagaatttttctcaaaaaaaaataaattatggcatatgttttattaaaaataaaaaaaataataataaaaattattattataaaattgtgtaagtaaaaaaaataagataaaaactgaaatttgtcaagaggaaaagattcaaatgactaaacccaaccccagaaagttttagagattttattacaatggaagaaaattaagatattacaactctat

SEQ ID NO: 303653 - DNA, 2297 bp, Cannabis indica
ataaaactcttccacatctgcaaaaaaaaaatcaaaaaataaaaaaaattatacagagaaattagaaattcaaagcaaaaatcttaaattgagagaagaaagaagaaagttaccgagagtgagagccttaatcattccagctcttcgacctttgaaatccttaaaaacctcttcaactgttcttggattgtaaggctctgcaccaccgtccatggccacaacctgaagaaatcaaaaacctttcttcttcactgaaaatccaaaaaccagagagaattttagagagagaaagtagaaagagagagtgagatttctagagagagagtataaaaggagggaaagaaagattttgacctcactttctctctctaactttctctctctaaaaaaaatatagaagcggatttgaaaaaggattaattaattggatttaataatgggttattgagtccgcaacaatgggatgacgtggcattttgtggttacctttttgtatatattcaaatgaagaaatttattggttgaggttgaatcagagagttttgttaggggcccactttgatgtgggcccattaccggcccagtagtatctctcgtattgtcctgaccattttgcagaagaagtgaaaaataaaatataaaaattttgggtaagtcttaattttttttaattgcataggttgaatttagtattcaatgatttgttaaggttgaaaagttaatgatacaaagggctaggagagtaggagttttttttttttttggtaaatacaattttagattctattttgttaagattgtcgatttgattttttgttttgttaaatgatagtttagactgtgtttctcaaaatagtacgaaatagatttttcgtcaaattaaaatctaataataatgtgatctcgagatgtaatcaacaaattatttacattttgttatctgttcgtactaaatattagcttcatgttatattttatattgtacttttgttattttattattagttttttgttatttgtatattattaaatataattgaacacaataaaaattttaccaaagtaatatttcgtgaaaattttccacattatgagatttttctctcatatttttgttataacctttttcttttcattttttataccattttataatgtgatagtaattaattatccatatgaaagtagttttcatgtttggtgatatctagtaaccattatcaaaataattctttttagtgatgtggtggtaataccaaaataacttgtaaagctaataggaatgaaatctaaaacttaaacaaaaaaaaatggactaaacctaaactaattttgatgataattagttacttagcaaattcgattaaaaaaataaaatcaagataatagctggtgacaggaggtacaacctgtacaacttttttcggtggttagcataaaaggattaccattaatgtaagagaaaatagaaagtcagtatttcaaaatatataaaagaaagagagtagattttgtttatgataattatttttttataatttattgagttactatacattttttttttcactggacttactatattttgtagcataaattttattcccgcaaacatagaaattagtctttttttttttcttgttcatatttttgtaaagatggcatgacaaatctactattaccataaaaaaaaattaacagctaatattcagaaatatgtgacgagttactatatatatatatttttaaaaaaaattatcgtaaagcctgtaaatgtaggaagtaatttcttcttttttttcccatatattttgtaatgaaccaataatgaatgattgtaaaggttatggaggaaagaaagaatgttaggtgtgttgagtgtccttaaaaaaggcattgtttcacacaatacttaagtttaccaaaacaagaaaacgacatcatcaaactaaagtgacttgatgtcgtttgccatcttgattataaatctcaatgtttgaggacaaagaaatataatttgaccatctttctctttcgtagttttattttattgaataagcaaatctttgggattaggattaaccaaagctattagagccattgaagaatcaaaatggtcaagctcacaaaattgtttccttgaaaacttaaaatttagtaatggattcaattgtctctttttttcaaatatatatatataataatatttgggtaaataccattttggaccttgtgttttgtaaaagttacagattgaccctgtgttttgttaaatgacaaaatggaccctatatttt

SEQ ID NO: 303654 - DNA, 4379 bp, Cannabis indica
atcaagacaagattcattcaatacaaaatctctattattcattttctggttttctctgttcttatcttcaacagtgtcaaaatatgatgtaaatttagtacatagtaaatattgtactgaatttgacacaatatttgttatattacaaaatttgtacatcaacgtaaatgcaaatttttttatttatttgcttttatgttatttttattattttacagtatatttggtgataacaatattaaattatggactaatatttattttttctattattatacataataaaatatataaagttgtatttatttctttttatatttttaataaaaatattaattaaattaaattttgcatcaaattttataattgtgtattgaaccataaaaattgatgtaaatatattataaaatcatttttgagtcaaatgtagcacaatttttacatttcatatagtctaaattatcactattttaattttaactaacaacaagtacatttagtcactaataaattataatttaatcgtaaatttttagtgataactttagtcaatgataatttttaatcatgatttttttacttttttagttacaaagtttgttataattgaaaaaaaaaaatatggtgtcttttttggccttggacggatattatattaattttattaagtttcctccaagttaagggaacctaaaataataactagataatatttcagtcatatggtaactcatgaaaattgatcctaataagttagtggtccttaaattttttaatttttttttttaaatagataggactaggacccttgtaattaattatatctctctgcaaatacctatatgttgttattgttctgtgaattggttcttctttacgtaattaacattaacttggttcctttgtagagtccctgtcttgaagtaccgttgagaagccactaatgtttaaactttgaagggtagatgagtatatggttgaaattaactgatttttttttttatgtgtttgttttaaggaagagaaatcagtatatatatatgcctctattatatgtttcaatttatatttcgctaattaattaaataagtgattcacaactaataaggacttcatttattgtgtgttcgttttaagtgtgcaatttgagtgtttatctacatatgactctatcctctcagttttcctaatattctaataaaaagcagcttaatttccaactactagattccttaaccatctaattcctttcaacttaaatctcccacaacaccacattcttggctttcaacttaaatcattcaatccaaaaattaagaaaaaaaagggtcttgaaatttctgtggtataattaatggctagtgcctacaattcttacacataccaaaactcatcatcatcagcatcaacatcatctcatagatcagtggccatgatactagctgatgtaattggtgcagtagtgctttctcctttatacagcgttaattggaagaaagagaccactccatattatgaaacgaaatggagttcagggtttgttctgcccatggctctagcatggcttattattgccattagaacaatttcaccatcactttcatcattttctcacattgtcctaaataaaatatgtggtagagtattgaattatatataagaatatggacaattccacttatgaccaattaattttaagatagaatcttataatcttcaatagttaattcattctctcttgatccgttatggtacttagaattgggagctcataatggggatcgctgggctcttaagtcttaatcatgctcatgcttgtgctttcgtggcaactctgttcaagagttcttctagagatgaataattagctcgtacttgtgaatttgactatcaaatcattattcatggtgatttgtattaatctcataattttagtaccttgttacgtaaaatgataccataattgggaatggataaatatagacgtatatattgtttttttacttatttagattaagaattattgattaataagtgcataacttggacaagctagcttgtacttttgcttaagccaatttcaagttgtaaggcaaatttcaacatagctgaaaaataatgagcaattaacgttaaaagacaaaaacaatggaacagtcaatagacaaaaaagaaaaaaaaataatcgtttggctttggtcgttaaacagagtttgttaacagagaaggggaagccggccgatgtgatttggttttcaatttaattggaaatgattttataatcttgaaaatgcaaaacatatggcccctacacaaatcatggactaaaatgtgcattttcaaaaatttgtccaaatacaaatttcaattttagcctaaaaataactatgcaattcgtgttatccctacatccaagttgtccttcatcaaatgtcactcacgagtcacgagcttgtcgttcttcaatttctagtcatattatagaacaataacagtgtaagaagcttgtttggttcaccattatatattgtataaatattacattggattgtactatattagttatatatttaatataaatattatgtttaatattaatttgtcttaatagattgtataaaattatattatctttactataaatttgactccaatcttaatcctgacctcggccagaatcttgggttcgagatttaagtttggtttgaattcggggttgagaccccaattctaagttcaagtcagggtttgggtacgggtcttagatctcagactgggtttgagtccgggtcaaggttcaagtccagagtcaaggttctaatcaagggtcgagtccccaacctccgctccaggtccaggtttaaattcaagttcagatttaaggttcacgtccgagcccaaattaagataaaaagtttatttattaactttgtttttgtgtaattttatataataaggttcgcaaaatttaataattttttttaaaagaatctatcattatttgatattatgattttaaaagatttgaattgtattatatgaatatgatatttattcaatgtaatgtatgaaactaatctagaagtggggcgaaatccaagttaacagcaacaagtgctttagacaaaatggggtgagcttattttatatagaaatagaaaacataattaatataataatgatggctatacagacaatgctccaaagaaaattaacccaattttagtgtccccattgtcctcaattggaattcaagaatgcatgcgctaatttgaattcaaaatagatgtgtttggtgatcctattaattttgtttgttgtttttaattccctgttttatttttgaatggttatctattctactattttatgctattaataatggtaatttgtcacccttctattggatcaatagaagttatagttcttattttgagtgaagttggttttattattctcgtttattttaatttgaataaatagggtgttttcagaaaaaagataactctgctgaatttttattggaagactattgttattaataagtataatttgtcacatgtttatttaagatgaaaatctaatatattttttacattcttttgatacttcacaccatttatgggttatttagttgaaaatagtataagtattttttttttatttattataaacaacttaatttgtctattattgttgattatgcacgatgaactatatctacatgtaataaattatgtctgatttaactatcaataaaaattttcatttaccttttataaaaaaaaattcaaaatgatttttttcttcaataattattagaaatagaattttgctccttcaattatcaccacatttaaatcttgcctcctcaaattttttctattgctaaaaatctccctaaactatttcccttataaaattttgccccttcagtcacaagtggccaaaagaaagcttatgtggcatttttggagcttaggtgacataccagccacgcgtctaactaaataaaattaaaaaattatttattaaatgatttaagaaaaacatatattaaactctaacaaaaactaaattctcactaatacgaaattaaattatatcttagcaatatattttagagtttaatatatatatatatatatttaaaaatcatttaatatatattttataaattgtattattcagtctcttttaattatttgttagattagagttgtatatatagcaatagaggagattttaatggttacatcaaatatggagacttaaatataaaaataaaattattaatattaatttctaaaaagggtcttattaaatatttaaattaaaaattaattattttattaattataattaatttaattctaaaa

SEQ ID NO: 303655 - DNA, 1344 bp, Cannabis indica
tatatatacataaatattatatactctctatatatatgtgaaatagattagagaggaaaaatgtgtactaagtattacaagattcgttttattattaattccagtgcttagcacgacgagaattttcttagttcagcaaactagctaataattattagaagaaaaaataaggcaaatgcatgtttttcatttttgatatcgatatatattatatagactagctagggctgcatatatacgttgatcaaattaaaagccaagaacattcaagctaaattttagacgtaacttattattattatttaaatattacttgttgtataattattattattatttgaaatatatataggagacacaataataattaataatatcttaattatgacattcatttacgctttagttgttattagccaaaaaaaaaaaaaaaaaaaaacacttggacgaggggttaaaatataataaagcacatatcacctcgatggagactagagaatacccattcaaaattttaatataaagaaaaattacacataattattttgataagaatatttaatttgtatagttataacatcaatttgtccagtaactcttaacagatatataataattttacattggtcaaataaaatcctgggtcttcctaatgtactaatatttttgcaaaattaattgattaattaattaagtataattatgtatattaacctagctagctttgactgtttgactattaaattatatgaccgtattcaaagtgtgtgtagtgaagtaatttgacagtgctaataaattaaacagttagttatttaactatactatatatatattaaataatattacaaagaaaaaaagtgacttcatttgttatagcttagctccataaaaaataataatatgcaatataatcacaatatatatagttgaagcttaattactataacacccttcgctaattgacgagagctggtcaatctcataatacatatgatataaaaattataaatcagtacggatgatagtgaaagcataactagaaaatatattacaatatattttttgttggccaccacaacacgtgaaaaacgtaattactttattattgtaaaagcaattacaccaagacttgaacactttaacttgaccacaatacacactaagcactcactcttttattttatcactagacacctttactacacacttgtgtataactcacacttttgggatactttgtctttagacacttattaagaactcacacactttagactctttttctcacacttgaactctcttgctcaaacttacatcttaagcacacacctcacttatatt

SEQ ID NO: 303656 - DNA, 1544 bp, Cannabis indica
aataaacaaaaaattctttttatcttatatcaactgtatatttataaaaaatttaaatgaacttaactttttttaccttattttttttctgtaatactttttttttaattatttatttcaactgatataataatacggacccatataacataaaataatatatttttaattagataaaaaaattaaatattaaaattcaaaattttttaataatacacccattaaaatggtattggccatatatatttgatgtacataaaaatatgaaatatatataattgtttcgtacttattagcatgcaaatcataatatttttttagagaatgatcagaattacattatggtaattatcgacgtagaagaatattttcagtcaaaaaactcattgtctagctaaagatatgcaaagtcataatatgagttgctacaaatatttatataagattaataagttatccctcgaaaatttattaaacaaaacaacttgagaccacctacaaggggcatccgctataaacaatcaaatgaaccaaaactacctacaaaaaaatagatatagaaaagtggagttccctatacaattataatattgtgaatttttaaataaagaataaaatacaattattattttaacaaaaaacttagcttggaaaacttttttcactcataatgttactatggtatcgaaactaatttgttatgttcaattattaggctaagtcttcaaatgtaaaaatatactagtcaataaaatgtgcattattcatagatttgagaaattaattaaaataaattaaatctcaactaaaattagctatttgtcacaaagttcaatttgttaacaaataaatataaaattataaaaaaaaaaataataaaaagaaattcccccaaaaattattaaaataaaattaaaaaggcaagatttgaaatttatgtgtgaaaatttatagtaacacttttgaagttgaatctatgagtaaacaatatactgtatactagacaaaaaacaaaaaaaaattatggtacaaaatagttaaataaaaaatagcacgaactagaaaaaaaaaaaggaagaatttttttttttaagcaaatcatacatttgattaagaaaggtagtatcgataatattaaatctaattattaggtgtttgattggcttagtggatggtttcagaatgattagttggttagatatttgagaatgtaaataagcattaataaaaaaatatatatatgacgttgactataaatgattagttttacatgttttaaggtgataatgaagttttactagttttattgttcgaacatatatagtacgttatatataagttatgaaagttataattattgataaacgaacgtgagtcatatattatattaatttgccatatataattaataatccaactttaatcatataaactcatgagaaaagtggaaagaaaaattgtaaaataatgtagcttggtaattgggaaaactacatatctatataaatatatatatatatatatttatatatatattatatata

SEQ ID NO: 303657 - DNA, 784 bp, Cannabis indica
tatatatatataaaaattaatttctcacgttggatataaaaattttgttaaatcaactttttttcatataatcttttttcatataaaaattgtgtagtgcgtttaaatattaggtcccatataatttaacataataatttctaaagaatatcactaactaattataaggtgctagacattattagtgtccaataaaaatattcttttaaaaaaattacatatacgagatatttttatacaaaatgtatgaattattgactcaagcctgaagtgttttaagataagggagagccgtaggtataggcggtttaggctcgcacttaggacctactcatattaaagaatttaaatacaaaaatattaattatctttatagtaagaatctaatttttttttttaccaatgatccatcaaaccctgtttgggatcaaaattcaagaaataatgtttattgattatatttatttattgttttgtcatcaaagatagaacataatctttctctttacttgtttttgacgtgggatacaaaaaaaaaagtgcaataaaaacaaaatcagcttaatttatcaagaaattgaagacaataaaatggatgtagtgtgcattattgactactcttcagactactttgtctagtccaacagatgcatgaaaagactatacattaagtgaaatataaatatcagtaatttgtggtaaaaatacttaaatttaattcagttataaataaatatattagtttaatttttgacggcaataatacttaagttatatttttaga

SEQ ID NO: 303658 - DNA, 1043 bp, Cannabis indica
caatgaaggtagctaggccaaggagaacagactgataggccagaaggagagtgaagcaacaccaaacacagacaataatgctgattccagtcaaaatgtgaatggcgacgaaggccagagcaacacaaatggcaaagaaggtgcgggccaaggagagcaaactgatgcaaaaaaggataatgaagcatctccaaacacaggcaacaattctgattccagccaaaatgcaaatgagaatggagaccagagcaatggaaataacaatggaggtgcaggcacaggagaacaagctgaagtccagaaggagaatgaagtagcctcaaatgataacagcaatacaggccaagatgagcagcaagtcaattcttcggattctactgtatctcaagatgagaaagatgcgcgaactgacttgggaactctaccagatagcaatgacaatgaaaatacagctgctgagtaacttcttgtaaaagctgtttgaatcatatccccaatacggcccttatcattttgtgatcattttatttatttaatacctcgagtgatcaggtaattacatgacgtttctctaattgttgtgtccttaatgacataatggtgttgaaatcagatgtataatttttaacgttgcagagataatttgtaaggttgtaagatcttagttttgataatatctcaattgggtttccagctgttgaaagttttggttagacaaaatggtagcaatcttttctcagcatacaactaaaatatgttgatttttacaccctcaattgccaaaatatagacaaccgacctcgtcttacaaggaagatgtttgcgtttagttgaccaaagataacgaatacagtcttatatcatatgctaacttcagatcttttaagcttctcaagtgaaatagctatttatactattttggatgttttgtaaatactaccgatcggcctattaaatgacaatgggtctacaaaaaggaacataataatataatgagataattacataaatcactatttttttttttaagaaaaaaaattaca

SEQ ID NO: 303659 - DNA, 2343 bp, Cannabis indica
tgacaaattttaaaaccataacaacttttcttttcatttttttccatcacttgacaaaatagcgatgactttttgacacatgacaaggcaagactcttagagaagaaattttggaacaagctcgggagaaaaacatagccacaacgctttattgcattgaattttaaactttgtatacattaaatttcatcaattatgactaatatgtgtgtgtatacatcggcatgtacatggatggatcgatcatgcccatttggccatgagagacatgccaccagcacccaaaaggaccgcaatgtatgatttaatctgaagattaatgctgccttgaagttttgggcccatgaaatctgctgagagaagatctaccaaagccatgtatatcaaaagcccagctgatgaagcattgagtaatccaacggctatcaatgcacttgggctattttctttgtatatactagacattcctattcctagggcaatgccaaatggagttgtcactgagaagaagaacaccataagtgccttctttaggaacttgtattcagcctgttgtcaatgcaaatatttattaatcagatattattataacgatgagtattttccttttcttaattaatgataattatgatacaagtttgacaaaaagcaaaatttagtactgttatttgaaaattatacgtacgaataaataagaaaacaatgaagtatgtggtaggtagctaattgaatatttatattctataaataaacagttaagaattaagcgttaatctagcataaaccccaaataataatgtgtataataaattattaatgtttttaaatttgatttttttacctgtaaaatgcaaccaccaagacccattccttcaaacatttgatgaaagcaaagggcagcaattagacctttgattgagcatgtgttgtttgaagctccaagtgataagcctatgactactgaatgaacaacaattccaagttctaatacctgcagcccccaatcattaaatttacatatctatgttttatataatactaatgtacagagataaatttagatatcaatatcatatatagtcacaaaagtctatgcacttgacccccacatgaataataaaaaaatgttaatgatctcattactactaacaaaaaaaatataaaatatcacatgataagatcataacgtaataatcaatttttaaaatcaaattgttttggatcacaccactctaattaatctaatcaattgttaaagaaaaaaaaattactaatatatggatctcaccattgcaacaactcgataacgaagaagttgagtgtcgaaactctctcgatccttgcccataccatgatggtgtccatgaaaatggccggccggcctcggctgtggagcggccaccatctcttgttctcctctctcaacaacagcctcctcatcatcttcaccttgatgatgaggtgcaatagcagtactactgcttttcttctggttgctgctataaattgcagtggccatggaatctaccatcaaagtaacaattgcggataacatggccacgaaaccggtgaaagggaatttgtgccagggattttctttaagacaatccgaccacaacatgtcgaaggagtctggcaaaacgtgcatgaatcctgtggcgaggatgatcccggctgcgaaagccttgacgatcacaaagagattcctgtccggatgaagggcaggaatctttttggtgaagagaggtagggtgacgccgatcatactcgtcacgaggatcgagacaatggcgatgatcttcagcggtagcgctgcagatttgtcgttgcagctgttgttggactgtgagttgcattcgttggattgtgcatgggctttgggagtgaagatggagatgagaaaaattgaaattttaatgaggttgagaagtttggttgtaatagtggccatgttttgatgagttttgggatttaattagtagctaataatttgtgttttggttactcaatactcggaatgtgttggctttcagttatgcctagactttgatatagggcatgtatatatagtgatttccttacataatgttaaataaaaaataattattaaaaaaaggtagatcttagccattagttgggttgagaataaattaaaaatataaaattgtcatatctagatattacgaatattattattattattatatttatataaatgctcattataattaatttgccatttacttactcctacactaaaataatgttgcttgttatacattaataatattgatatataaattagagattaatttaacaataataataaaggaaaattataat

SEQ ID NO: 303660 - DNA, 3979 bp, Cannabis indica
ccttttgatcgtgttttgaaaatataaccccattttgtaatagtaattttgtgatgtgatgtaaaagtttataaacaaaaaggggatccctgaatttaatagtattttgaatgaaatctaaggttttaatttgaataaattttatcaaaagttttaatttaatcacactattcttaaaccaatagtttatatataaacaaatttataaaagcacacacgtggcgtccctgtggaaaagggcgacacatgtgacctcagtaactgtcttttatcctctccaacataaatcatcatgggtgcgatttattctaagaaaatttcatcactggttggtctggaaacgtcaccatggtcagaggtctagtggttgttgcatcaagctcatttaatacactacccctattttcatggcttctagcatctcgacaaagatttttttcttgcaagtttgagacgaagtttgttggtgataggcttcgctccactcatttgacctttcaggcactctagggggctttccttgcctctgccatcgtgcggtgactttaacaggggtttccccttggccacgatattgttctaagtctggggagagttttttgctaaggatcgtcgtacccatgagacacgtgaatgcctttcaaccaagctaaaaagtgattttattacctctcgataccacagttgcacatacaccacatctctgggcctcgcacaactgactaaatgggctttcaagtccttcttttgcaaccgctaggggtagctttggtgggtggatctttggcatgtacgcaactcttcttaggtgaggtcatgggtttattttcagtgaaaacttcttaaggtcatctttccttgaggccactcttcccaaggttgacactatagtttgttgtggtggcctttcttgccgtcaaaggcttgaagcttttcctcattctttttcccggagtatcttcaggtacaacctccacctttatggtcttcttaggtgtaggtatgacgacttctatctgctaagttgtatgttcttgtaggcttcaataatgtccatgttggtcatatccacttgggttttctccaatgaccaaagctgagaggtttcttatggtaaccactagtcggttgttatccaaaaaatttacaacatctttgtcgtgtcgagaatgccttggcattttgaaactttgattgatctttctaggaaaaacgtagctaaaaccttgtcctttcgagagatggcgccaaactattaacgacaagaacttgtcaacaaagttacggttggaaaccttagattaatttgctaattagcttggatgattatgagatgatgtaagtaaatgagagagggagagattaaagatgaagcgaagaacatgtcttcaaaatctaaaatgaatgatgtgttctgtattcaaaaaatggtctcttaatacacaaggttccaaccccctctctaatggagtggagaggtatttatacttgagctcaatgggccatgtttacaaaataagatgtaagtggtccctgtggggaccatgtactattatgatggtaggtggtagtgagatgtggaggcattgttgttcaggtgtcaggtgatactgacacatgcatacctctaactagttgtacccaacggtcgtccactactttgtcacagcttttgcaggtatcgtggtcatacccttagatccttcctttcttagccgtctttatttccctttggaattcctcatcatatcttaaggtgtttgctcctccctttaattctatctccaatgaattcccctccaattctcacaaaaaaaatcactttcgttattgaggactccctcatggaggcatttcccttatggaggcgaggcactcatggaggcaaggctcttatggacgcgacacccttatggaggtgaggctcttatggaggcaacaccatttaggaggcgagactcttatggagacaacacccttttggaggtccagcgcgtcacgatgaccagcgaggcctttttcttgtggctcttccgctcttcccgtttctctttgtcgtgacctcaatatatttacttagttaattctgaggtaaaaaggggccatgagatagtcacttctttggttcacttgcctccttgggatgttctaggatgaacgccaatggttctaagggagttttgaggctttgagctagcctgtggggccccaagtcacttatggggatgtgcgggcgcgttgtatcgctgatggggtgagcctcctacatttctctcgctcggattcctcctattgcgtagcccctattatattgaccataactttcttaaaataagtaataattgggtgattcaagctcccccagaaaactgagaaaaagatctacaattttcatgttttgctattcatcttgtttgcaatttaaagatgcctaaaactactggtagacacgccttacaactttagtcatcaatcatttcgtgtttcttctgataagtgccaaaggcacccaactgacttaaactatgtgattaacattcaaatatcaccaccaagggaaaacctcatagtttttaactaatccactcatcataacttcgagattacaccttgtgaaattttggagttaatagctacaatcaacattattgtgcaacgctagggttttaaggtaaactaaccttaaataagacgatttttttttctaaaaggaaagctttatttacaaagaaagaaactctagcaacgacgagtcatcaaaaaagctgcctacgctcacaacatgacaacgacctaccaagaacaacacatgaagaaagaaatggcatgacccataaaatttgtctcatgaaaagaatgaaaacaagtcacacaatcgagtaactagaagactatttaatggatgcaacaatcagtgtgtggtgctcttgctgaagggccaaagcaaccacaataagaacgcagaacgaaatgatatagaaacgatgcaattgaagctgatctgccaattggaactaagctccttacctagacgaaacaatagtagcttaaaaaagagcctacctatacacagtagcagaagcaaccactaacccacgtagatccaagacaaaaatgcataagccacaccccaaactagcctcccgaagagcagcatcatattaatcagcaaaacccaagtagtaggcactgtcgaccttttgccaaggtgaacacaagcttaagagaaaccgccatagggcgaggaatccatttatccttattcattttaatgttattctcgctttacacctaccatcgaatattggcagccaaaacatctctaccccataacaagctacggcaaacacaagagctgtatgtactcgtgctagcctccatagaatcaacgttaacaaaataacgagcttaaagaacttgaggtaataaggaatgaggctaatggataatctttgacccatgcttagctaggagagctaaattaaaatcactaagatgctgaaaacccaacccctttctttgtaggaaaacacaactcatccctagagctccaatggatcttcctcttcgcttgagaagaccccccaaaaaaatgggcagccataaatgaagcttgataataagttttttgggtaacaagaaccaactcataacataccaaggaatagcttagattacagctttaatgagcacctccctacccgcataagaaaagaaactagctttccacccctaagcttattccacacttttcgctttatcacggagaatacatatttctttcgatgccccacaacgccaagcataccaaactatttagggtgactagccacccaacgaaatccaagaaaccgataagttctttgttggatagaattaaccattgtcattacacaataggatagctaaaattcttgcagaaactttattgaattgatggaaaaaattaaaaatcacaagctttcgagaggcttgttct

SEQ ID NO: 303661 - DNA, 4664 bp, Cannabis indica
acacataagcttcccaccaaaagcttaaaggcattttagcttgggccaagagagtcaatcctacatccacaacatgcctatgttcgcgttcaacccgtccttgttgttgatgggtgtggggacatgaatttctaagaacaataccttgggcaaggaacttttctttgagaggagagaactcctttcctaaatctgattgcacactctttatttttaactgaaattgtctctcaacaaaagcattgaattggttaaataaagaggatgcctcagatttagatttcatggggaaaatccacacaaacttgctaaaatcatcaacaaaacttatatagtatttatatccttccatagaagggtaaaaggaaggaccccaaacatctatatgcacaagttggaaaggaacagtaattttatttattgtaggtttgaaactaaattggtgcattttgccaatttggcatgcatcacagaagtaacattgttacatttgagatttggattaatatgagccaacactatagctaatattggcttggaaggatgtcccaacctacaatgccaagtggacacaattttggacttatctaggaccggattactggatgtagtacagttaaaagctgagggtttgttgctggtgtgcacagcagcagactgaggcaatcttgaagtgtggacatggtttcttgagggctggacttgtaacttgtataagccttcattgagagtaccctttagaagtacttgcctcgttttcttgtccttgataagacaacaaacatcattaacttcaaggatgacattattatctttagtgaattgggaaatgcttaaaaggttcttggtgacattaggcacatgtaggatatcttttagaataaggtattgatttggaaaagaagtagggacatggttagatccaatttgaagaataggcatagaagtaccattacctacaagaactttggatttgcctttgtaatccacaggattttgcaggtgttgattttctgacgtcatgtgattggtggccccagtatctagaaaccaagcccctgagatatcacttgagattacagtttcggctagatttgcttgaggagaatcagttgcactttcattgttgttagactgatttgaggatgaatggccattaaaggtaatgtcaaacctatgatagcatttctggacagtgtgtccagctctgccacatagttgacacacaagtttgttccccctgccaccacgattgctggtgtagccacgacccccgctatagttgcctctgttactgttatatcctctaccattataacctcctctgttggagttattgttgttgggaacgtgagcaagattggcttgaacattgacaagagtttctgtggtgtgttgattaattcgaagctcatgactgtgcaacatgaattggatttcaggtaaacttagaggcgtttctcgtgaagtaagatttactatcactgcttcatattcttgaccaagacccccaaggatgtaaagggcaagatcatcatctgatatgggctgtcctgctgctgcaagggcatctgcatagctcttcatcttgaggatgtaatcttcgattgttaaagaccctttcttagtggcctgaagcaatccacgaacttgaagaactcgggctcgagatcttgatgcaaacaatcgtgagaagacactccagatctcgaatgatgattggtaattgatgatatgccccaacatagattcagatacggaattcatcagccaatgcattaaaaattggtcgaatctaagccattgaagatattctgggttggcaatgttaccttcaagggtttgtggtggagggggaattgatccgagtatgtagccgtcaagattgaatgccctaacagctgcaagaacaagagatcgccagaaagtgtagttgtttctgtctaggcgaaggttgagcggaagtagattgttgtttgggaaagctgcttgaggagcctctggtgcagcaaggatcggctgagcagcgttcggaggagcagtgtctctgtcgacttgtcctccattgttggacgagtgtgctccagtcgacgccatgggagctctgataccatgtaaggaaacgagagaaagaagaatgaattggattgagtgaaatgaaatgaaaaggctcactgaacaagtgaagccagccactgtatttatataatgaatcaataacagagtttgttacagagtaaagaaaagttagttacaactgtttgaaaacagaaaaaccagaagaagaatttaactaacagctgctaactaactttgtattctaacatactgtataatatatctattatttaaggaactcagtcccacacaccccttaatttgtattacctttattaatgttttataagtaaagctaaaaatgatgactaaaaggtcgaaaaatgggaccacacttacatatttcctattttatttctatattaatcatacaatatctactactaataatactacaaataataataataacaattattattattattattattattattattattattattaatgacttggttaaaaatctctctttagttggtagtggtgaaggttgccattcaaagaatgccaatgcttatgttatgagctgctttaggctcacacaattttttataacgagtgttcatatagtccaatagttaaattttggtgggatattacaaaaaaaaaaatgaaaaattcattagtgtaagtaagaatggttgtgtaaaaggaaggagatagggtcttgggtttaaaaatctaaaactgtttattaacaagtcaatattggcaaaattggtatgacgattgttgcgaaatggtaattctttagtagcacaagttatcaaacattcttatttttggaatggtgatatgttgagtgcaaagttgggttcttgtctgtcgatggtttggaggagtttacattgggggcaggagattattttagatgaatataaatggcatattgggtcaggagaacaagtttgtattgtggaagatctcgaggttcttttttctagttataagcatgtattaccacctaatttttatcatggggatatctcgtgtatctttggtatggtgcttgattcattggaatttgaatatcgaattatttggcactataataaaaatggtgagtattccttgcaaagtgggtatcatgtggcaatcaaaaaaggaaagtagaggaagggtcgaaaatggcgaggtggagaaatggtggaggtgggtttggggtttgaaagctccaacaaagattaaacattttatgtggcgactttatcacgagtggcttcccacttctaatatttagggttgtgatcatattaaaagtttgttgaaagctgctggttttggaaaggccagtaaaaggtgtgatggtgaggatcctatagcgtttttatgctacattgacattttggtgccaaaagataggtttgatttctttgctgtcttagcttggcaggcttggtatatcccaaactgtgtgttacgtaattcttttgtatcgttggtggatcgaacgctagattgggtggctgaatatttatgagttttgggataaaaatggtggtggttttttgtattaggctaagccaaaatgcaaatggaagcctcccgagattggagaattgttgattaatgtggatgttgcaaattgtgatcaggctgatggtggttcgaaatcatgtcgatgaggttattgcggcacaaggtgttagaaaaataattataataataaaacgataacacctgaggcgtgcaaacaagacactgtccttaaggatttacaaaataatcccccaggattcaacaggtcttctgattacaatgaaagaatcaggaaaacagaaacagcaaaaacaatataatacccagccaagaacaattatatatataatatgtactatataaataaattgtatatgttgtatataatatatgtgtgatacggtgtatatacgatactgtatatatatgatactgcctcttgcgatacccttaagtatctatatatatatataaatctatatatatacatgcatgaagagtactaacgtcaaaaaagacgttgctcatatttttgagaagatagtgggtgtgattgctagtttataggaaatgcagtagttcaatatattaccaagtcaaataaaagaatgagctatgtccttgtttcttttgaaatatatatatatgtaatattataaatatacacatatatctatatcttacaacacaaggtatgttcttgaataggccattttctcctattgttgctgagttattagctataaaacatggaattgagatggttggacttttatcatattagagtgttgtataatcttgtcggattgtagtttggcagttgccttgttgggataaaatggaaagttatgtggtattataggtgtaaattttatggtttgagttataaaacttcaagttttggggataaaagagttcctccaatagctgtctttgctatgattgaggatttgtgtctccttatctaatgcttttaatatgttaaaaaaactaaaaacttggttaaaaaggtcttgtcgtatgacatgttttgaaagtttttttctcaacgttctaagtca

SEQ ID NO: 303662 - DNA, 3746 bp, Cannabis indica
gcagccagagtgacgtactcgtgtataagagccattcatttcgtgggtgtaaggacccaatggaggcttgaagcggggacgttacacccgcgaatgtggtattcgcactaatcttgactttgttttatttttaggactttatgaagcttagctttttgcatggaaactctagggtatcctcgagtgctcttcaggagtaggtaatgatccttgaggctgagctcttggcaaggggtaaggttgtgactgaattggtggttcttatccaacagaattgaaacatgatttctagtttagagctcatgctcaacaccaggaatcaggagaatacatcactcgctgctgacaactccaggttaggaactaaactcaggaggagtgacgagaagcggaagcttgcccttgatggctagcaagccataaaggatgagtatgttgacttgtctttgaagctcatctacgagttcaagttgcgcaaccccagagctaatttttcttaaaataaacacatataatttagtgttatactcgtttttggaacaattaatgaacataacgaattatgtgacacgtggcataaattttgtgtttaataataaatatacatgtgaaccggttgagtaattcaagatatgacctatatctagggatagacatttctcccataaggatagggctttcgcgaggaccgccgctaatggggtagggactttttatctaagtggggaatggggtggaacagggtttattttttgtccctgaatattaaatggggcggagacagggatcacactccccatatcaacgaggacccgtttagtattttattttatatttctaataatattttacaatttgtaatttatgtttgcattttttagtgtattagtatcctatttatgatttttaaattgtattttgaataataattaatgtgtaatatattttaatttatataatttaataatttttttattaggatttttcccacccgtctccgctctcattaggagattctctgccctatcctcgataaagaataagtagggatgtggattaaaatctttaaaggtaatggagcacttcccgccaattctcccctcagtgcatgcaatgtttataaattgaagtatttaaacctatcaagctgagatcattcatacaagcgttcatacagctcaaagaagcatcatattataatcgttcgagatattaagggtgacaatatcatacaactcctgatataggagaattgacttggtcaaagcctgctatttatttaaagagcattgctattagggttaaatccaaggggaagagggacaacaattctagcaccagtggtgcttagcacctttgcgacatgtcgcgttgcgattggctagcgatgtccctaaaagttattatattaaattatataggacccatacttagttggatcaatagagatattaacacataaaaaggtaccagacaccattggtgccctttagcatttctcttatttaaatattggtagttatttgtttaccaaaaatgtatttaatcaatcgtgtgaaacgtaggtgagactgaataattgctatattatttctttaaatagggttaaatccaaggggaagagggacaacaattctaacttcacaattaatgccgaaacttgtattcaccctaagaatattcctaaataatattaatgcaaataatattaattcgtacactaaataaatttaactgttaaaccacgatgttgcatttttataattttattaagttattaattatattcatattcacaaattcagggcatttattatcaaagtctcgtttatagttttttttttttttcggaaaccaagtctagttcatagttgatgtctcaatatttaataattgtatcatcaattgtaagaaaaaaaatgtatgagagtagaacatgaatttaagcatatataaggaaatagatcctgaataaagtataacatgaattcaaaagcagcacaatacatctcatatttttttttttacgacacaccacaactcatatttaaggtacactacatattttattgcactaaaataatatgtagcattttctatagctttactagaaatggagtattgatttgttggaggaagcacttataaaatgaatggtttaattagagtaattaatattatgaaatgatttataaattaataacatttttgttttgtttggtagcattaattaggtgaattaaagtcattccaaatttacatttaataatttaattattattattattattattattattattattattattgtgttgcttagcaatataagagcattgttattaggtgttacgtaatacttttataggcggcgccttatgattagttcacaatattcatcaaatattattttcttaaattatataaaaactaatacttaattacaccaataaaataaaatatgtaaaaaaaaaaagtactaaccacccctaataccttttaacaattatgctaatataaatatgcatgccaaagattttgtcttagctttgattgccactcgaagccaaaaatttgtaatattgatatatacatctctttaaatctagtccatgaattactcatggacattcaccatatcccacttattttatatataccattaataatgtaataattttatattaattaaaaagagcaagaaaaagactagcatgactttataactttaattcactataatttagttaaattttggtgtataaattagatattttctatcggtggatcaaattattaaactccaatcactataaaagctcttcatgagtctagtctcacataataatttaatggttaagttatttgaccacatccatcagcacatatatttctcttttcatatcaatgttgttaaaaagaaaaaaaaaacaccataataatggatccaatctatagcctgtttgattgacatatgtatatatagagcaatcacgttgatggagttttcaattatgtatataaatatgtgaaatagactcttatcaagcaatattaaagtgtcttcagttgcttttgtcaaccaaaaaaaaagtgtcttaagttgcttgtgaaattggtatttcttgtgtttgatttagtttcaatatattacatttacacattcttacacaattggctaataaaatataagatttgtcctcatgctatttgtatataagagctttagaatcagagtagttaaccttaaattctgagcatgaagcatgccttatatttctcttcattagtttataatatcaagtagttagttaagacagtagtgttttccattataaatcattcatacgttgttaaatacttatcttataagctatgttgttagatattattattattattattttaaaacttaattacgtcacagtaggatctaatcatgttgtaacttgtacggcttaatttaagaaaagtgaaaattacatcaaatttggaattttattaaaaagttgcaaaaatatagtatttttaggtttgtcattcttttatggtatttttttacatttaaaattttttatggtattaaatagggtaaataccattttggaccctgtattttacaaaagttatcaattggatcttctattttgttaaatgacaaaatggaccctgtattttctaaaatggtacaaatataacccttaacttaatttttgacaacttttttttttatataaccaacttga

SEQ ID NO: 303663 - DNA, 2311 bp, Cannabis indica
gtaattctttttattatttttatatttttttattttatgtgtatattttatttagtattataatattgtttaagttatgattttgtctttgtattatttatcataaagttataatcttattagtttggtatttttgttagcacataacaatttccaacacatgattatgattaatgtttcgccaattataatatataactttaaggaatcttattctacataaatctttcatttcatttgtttagtgaaattatatgacagagataaatagaaaaatatcattattaagccataataatatggcttaatattttaattaatatatccacttaactttatatattaataacaaacaaaatcttgagtagtaattattacaaactaccctcacgtacttggatggatctaaccccttttgttgcgttaaactattttatatttttgtcgtttataggcatttaggggccaacatataacagctttaatttgagcacagtgggtagttgatcgataaagacgacaaaacacaaaaacagaaaaatggaagcacatcaggtaggggccgggcttaagcttccatggctaaaagagctacttctttttctttatcctatacatttcaaagagataataatttgtgttcaccacatataaatgtgccttttgttaaatcatatatgcctcaaaaaaaaaaaaaatcatatatgccactcatcctaaattaattggcgtttgacatagacacacatatatacatgttcccaattaattcactatcctggccataggattgaattttatggtgaacttagttatacatttaatataatcaaaaataataaataactagctcaatttaagtagaatgatggtttaacagcatttcttatatattctattggtcataatttgatcctagtttgaactttatacttcatttatttttttaataaataaaatgtaaatacatgtagaaaaaaagggacaagaaaattcaaaacatgatcttctatataaatttaaagtattttaaccaattgttatatttaattacgatgtatgtatgaaaataacaattgtatattaatatatttttaaatctcaggatggagtaatgatatactgttgattcttttagctctccctcaacgcctttaggtccacctatgtgtcacactacatatataaaatatataatataggaaaaaaaaacttaaaatattaatgaaacacacactatatgtatacgtactgtaaaagatccgcgaaatccaaccataaattattagaagggagaattaaggtaggtaggtaatccaaaagagaggcaaaaagcggtccactatactacatagacacctttgtgattagctagtattcccatcctttccctttaggtatttatatatatatatatatatgtaaagctacctagtttaggcactaaacattaatgtaattttgtttgttatgaaggtcaactatgcacccaaaagtgctccatgcactcaaaaaattagcttcttataaacataatccatggcgcgtgccttttaatttattaattgttcttagaactagtggggaactaggacctccacacaatgatactactaaaaaaaaagatacagcatcactcaaaacgtcggtcaaagtaatatattgaacatcggttttgaactaatgctgttttgtgtctattttaataaatcgacacttaatatttttgcgtcggttttaaaagtaacacaaatcggcatcagttcaaaataaatgctgaaaagctaattaaagataataggaattacatgaattatgaaaaaaatttaaaaatttgtttttttatgacatattttttaatttatttagttataggtttttagcaatttttatatttttatgggtaagtgtatgttatatttttgtaaaaaacatttaaaataccatattttataattttcaacatttctctcactctttttcactttcacctgagacccgaacccaaaaattacgagccagctttccacatctcgcgcctaaaccacctcaatcaccttcgcctctaaactcaggcgtcaactaaaagggaaaagcttgttgatttgttgcaaaaggagtggattagacctgattttatgttggttaagcattattgtggacattgtcccacatggaataaatggtagagaagtgagccatatataagaatattggctactccactcattgccagtgacgaagccagaaatttagttgagtgagggcttgaataaatattaagtcaaaactaataaaaataatgataaat

SEQ ID NO: 303664 - DNA, 1845 bp, Cannabis indica
aaaatatataatttatttcatatgtataatttaaattttttaaacatccgccgcgaagcgcgaattgtttactagtaccataaaaagtagtaaacttaaaagtctcatatttttataataaaatcttaaaaaattataatgaggcaattttctaatttaattttaataaaaatagaaagctaatatgatattattagtattactccaagaaaataaaatctctattcgtgcgattttttttttttcattataattttcttaagagaatgataaatccatcaacaaataaatgagtattggttttttaataaacaactttatcgttatatagttagtataaagtgtgattatttatgacttattttttttttttaagtttttgaaagtgtttaaattagatattttatgagtggtttggtagattgtattgtataatattatattaaattatgttatatataatattatgttaagtttttattttatgtcaatatattatatatttatataggggcttataaaatactcaattcaatccgcacgatcaaatttaaaactatttacaaagtgcggatatccgtacttgtgcagattggattggattgaaaaattcaaattttgcgagtgctaattgcactcttcctattgtgtactcttttgatgttactggtgcttatctgcctttgaactctgctatccctgcttctaaggttcaagctactaaactcctatctaagtctaaggataagactattttaggggctaagagatctgctttcaatacccattctgttttggttggtgaatctgtgaggaagttgtcgaaaagagctagatatagctttattgctaccgtgaccacacctgctattgttgtttctcttgaacaggcaagtgttgctgagaaacccctccctaaaaaatgagtctgttaagttggaatgctcgagggttggggaatccctgagcattttgaaacctctcccttgctgtaaataagaataagcctatatttccttttgttatggaatctaagctcatgtctggtagttgtgaagagcttagggtgaagttgtcttttgatcatgcttttgaggttcttagttaagagttagggggtagtcttttgttgttttggaatcaaggaattaatgttaatattttaaatttatctcttaatctatcgattgtattattaagtttaataataatgttaattatcatgtttcttacttttatggcttcctttatttgcatgaaaaagatcatatttggaccttaataaataggcttattgataacactccctttcttccttggcttattattagtgactttaatgattatctttctattcatgataaaaaagtataattcagatcccctcatatgctattactaatttccagaactttgttaacaattttgactttcaccctattcactttatcgggaattgttttacttggaagcatggttcttctcttaagcggttagattgggttattgctaatcaaaactaggttgatatttttctgaatgctactctctatcacatgaatttttatgactatgatcaaagggtgttgaagttagtccttaatgataattgtatgactagtccttccaaaaaaggtttattttttgaaaatcactgacttactgagtcttcttttcttgatattgtcaataattcttggactaataatgttgattgtggcaatgcaaattgttgacctcaaaaagtgatcaactggcaacgggatcgtatagatatgatatttgccacgtgttatagaaatagaatgaaaatttataaaacacacagatttattatagaggttc

SEQ ID NO: 303665 - DNA, 2210 bp, Cannabis indica
atgccaagccaaattcatagataatcgaaaatttaaatgaaaatactcgaaaattaagagcatggggaaactgaaaattaaagggcacgctatagggccaaatttttattgtgtagattatgttataaaatattaaaaatattgtgaaattataataaagataatattgataatgcgctttggcatgctttttcttctataatatataaatatatgttagatcaaatgaactgcatggaaatattcgtatattatcgtaattcgaggagtaacattgttgttgttgttgttgttgttgttcatgaatatatgaattggaaattatatgtatgtgtacgtagaatctatatttgtattattaaattatatatattatatatatgttttaaaaaagataatattatattaatttatatatatgtatgatgatagattagtactgatcagcatataatttcattcattttaattagtacgtaatttacttatagtataattatacatattgaaaagttagcgattagtactgttttgttgtgtcattgtcttattattgtactatgcataataacaatagtaattaataattatggaacacatttatatcgatattacgttaatactaacaatatgttatcgtaataaatattaattgatcaatatcaatgaagattatttatagtttaacttaattaagaagaattaaacactaagatcacagctttttaaaataattatatgaattaattaataaataagctgtgttgtttattttggtaacatgatgatcatttttatgtatacagattctttcttaatttatattcacttcgacggatgttggtccccctcattatctaaaaaagattattatatgaaatttaatcttatgaagcgtcctaataatataaattataaatataatatttgaccattggtaccatgtacgtagcaactactaattagtactatactttgtctatatataaatttatatacatagtattatacatatattatatatttggaccaaagaggcgtatttggtggcatgaagtttgcaatacttttggtaaaaatatagaagaaattaaaaaaaaaaataccataattatgactcaagaaaaagaaaatttcaaagaaaaaatatatatattaatgagaagaaaaaccaaagtgtcatttttgcatttatttacataaaaaaaaatgatttttaaagctctatacttacgcaagggatcatgaacactacaagcaacacaaatatgtatatatttatataattaattaataaagtgtatatatgtctggcttccatgtgtcccaaaatgacaagaacatgacatttttgaaattaaagtctctcttgccagagaatcatttttgtatagcaatgtcttcttatacatcaaagttcactttaaaccgttttttttttttttttgaatgcacaataataataatttggatgaagaagaagctttttatccaattacaatatgtatatgtgtgattgtgattattggagcacatgggtatgttatccatttggaaattggaatatgacttttacaaatcataactcaacttcccatgtgacctttgttgttaaatgattaaatgaatgagtttttttgcctgtttttcccacctggcatcattctcttcttaatattgtatacccaattttttaattgtaagtctttatatatttatatatttatagtgatgagacttctttcaaattcattcattcaatcaattatatgtgctacactcaatctaatcatctccactttgacaacaaaataaagtacaatacacagattttatgtcaaaattttacagagaaaaaaaaaatcatagaagagagaaaattcattatctcataataatgggaagtatatataattctaaaaaaaaatccattcgctttatgttaatgtttactttgaacttgctatttatataaaaaaaaaatatatatatatatatatatttataccttaaaaatttatataaacactctatttaaatcatttttactttgtacaaaatattatatatctttaatttgttaacaaaagtgtttttttttttttttaaaaaaaaaaaaaaaaaaaagaacttactacttgtcatattcttaaagtacgtatatataaattaaataaaatatatttaaatattaagatagaaaaacaaaa

SEQ ID NO: 303666 - DNA, 1295 bp, Cannabis indica
tctacaggaagaggaagagccgaatggagtttgtgttcctcttcatataaccttttgtacattgaaacctgtgcttacaaagcaaaaaactttaataacagcttgacaagaaagttgctaattatagcaacaagttaaaacacactctagcatctgtcaaaactaattctcacagatgtgtgaagagattcaatcatctgtccttgttcttcagctctctgtagtactgccacaactctagttgcagcttcatcagtatgtttcttgagttccatttcaagtttctcctaaatgccaaagtatgatgttaagaacaagtttgcatatccaagcataagccaaagactccattaaaaaaaaaaggcaaatgccaaacaaactgtttatgtaaaacgtaaagttattatgccaaccttgaattccatctccttattttcaatttgttcagaaagactgcgaacaacactcctgagctgaacattttgctcaaccagtccatttatgtccttgaaggtcaactgttaatgtgacatccaatattgatcctagttaatgtcacttatttatatagtggaaaaaacaaatctgaatcctgaggaatacaaatactctaaatatcatataatcatgcaaaatatcaaataatcaagcttacaagacgttcagagatgacattttcagcatttgaatctataatcatcccaaacggaacaatagaagtgtcgttatcttgaccagaagatccacaacgaatttgtatatcctggcattccttaagaagaactgtaacctataacattcacaaccagaaaaataaggaattatcaaaaggctagtctcccaaaggaagacatcaaatccaatctcaattgtccatctaaaacaaccctaggtaaacctacattgcggacaaaaaattgatcatattctagtttgcacgtattaaccttgggtgtcgattttggattgataacatcaaattctaaattttagcatgttcaaaatgtacaacttttgccacacaaaaaattacaagagtgcagtaccaagctgcttagctaccaaataggcatgcggatcccttcttctaattctaaagaagaggcatttagtgtaagtaagaaagggggttgtttaaatcatttatagctcgtttggaacgccgtattaagtcatattgtattgtattgtattatattgaattgtattttatgcaatatttttatgtacaactatatgtggtaataacttttatggacacctaaatatataatattttagtataaattaaagtt

SEQ ID NO: 303667 - DNA, 4897 bp, Cannabis indica
gtagaaatttcactgttattataaatcaaagtcatttacaacaacagagaaaatatgatagggaatttctcctatccaactaatgtcatcatccaatcctaaagtaaatttagctaaaccatgtgctgcttgattagcagttcgtttcacatgggtaactaatacttgagggaaaaatgataaaagacaacaaacatccataataagatcagaaaagcaagataaatttgtagatgaaaaatttaaagcagaggagactcttgaggcatccgtttcaatatgagtaagagcaagttgtgactgcaatacctaattaagagcatgaaaaagtgcttttgcctctatttcatccgatctaaaacttccttgaataacttttgaaaacacagcaaccaccattccattgtgatctctaattattgcaccaattcccattttcttttgctccaaatttgtagctacatccatgtttaatttaaatccattcaactgtggtggctgccatttgtgaacatgctgaacagtgtttgatcttggcaaagtagctgcttgattgctgttgacagcatcagatggaggagggactttgacacgggtgaaatcttcgtgaaatatggttgtttactgaactatagcccgtggaacaccaccatgaacaacccagtttttatccgtccatatcccccacaacacacataaaatgagctcaaagtcttgctgctgatggatagtagataaatggtgcaaataatcaccattaaacatactttgagcctgacgaaaatcaagttgaaacttggaaaattttcatatggctttagcattcttacaaccaaagagggcatgaccaatagattcccaacttgaagcacaaagggaacattcacctgaatttaacaccttcttcttgaacaaagcagctgctgtaggaagcacattttggaaaactttccaggcaaaaattctgatctttgggggcaaattcaggttccagaaaaattttcaccaatctctatgctgattagaagttgaggaacaatattgttcttcaaaagatgtggctaaatggaacccagatttaacaatataagagccatttgtagtgtgatgccatattaatcggtctgtatcaccaaaataactcagaggtatagacaatatgcgttcaatatcaattggctgaaagaacctattcagcagtgatacattccaaactcgttcctctgtaacgaaacttgaaaccgacattgaaggaggtccagagaaacttacaggtctaaactcattataacccggaatccatggatcatgcccactttcaatatgatttctgttttcgattctataccgcagtcctttaatcaacagttccttgtcccaacaaatgctttgccaagttaaggatggtgagtggccgatgttaacataaagaaaaaaattgtttgaaaaatacctatgcttgagcagtcgattcaataaaaaatcggtgcccttatgtgttttatatttatttatatattttatttttttatttcagattacgtagtttcaatatatgtttcaaattttttggcattattgaaatttcatgatatatatcaaatttcctttcatctgtttccaaatttgttaccaatatcaatatttttactctaatgaaaaaagataataatgggggcatacattttctcatgactttttaattttagaagctaatattgaaaatccaactaaaagggcaaatgatgtcaattgaccaaaactttaatttggttgacaattctgtgataattcgtacctaatattattatgtataccatcactaattatcgtaattacttttcttacaatataagattcataatactatgcagtggtcctcagtcaaaatcattttatggggcagttaatctgtctttaccacttaacaattagcaactaaaaattattttagcaactttcacaattatcagggtttatttttaatgtgatagaaaaataatactggcttctttagagattatagtttaccaaaacatgacccttacttacaaggtttgttgtaccttaagttgactcatctatgattgcacttattttatgtttgactacaatcacacgtttatctgactatctttcttgaaggtttttttcagtatgtaataatggtttattttgttattgcatacaattgagaatttgatatgaaataaaactgaaagaaaaataatcaaacaaaaataaactttggtctatggtcaaatacattattattacaagccgttagtactaatttattgtgatttatgtatatatataaaaaaattggatggaaaatgacaaccacctgagcggaggggtcactctgtttgtgtgctgagaataaataaggcaagaaagatgtgtacggacagccattgaaatcagaatagtaaatgaccaaaatatccttacttttacaacaagcaagccaatgccaatgccttggacaataggatttttaacttttctaaactaaatctgtttttttatgaaaagatttttaaatcaaaccaaatcactgtctacattattcaattttttttaaaagtaattattctttttttgatattttttttacttttaataaacttataatacatgaataataattaaaaaaatattctcaaaacaatatcaaatcaaaatcaacattattcccaaatatagcatttctttccaaatatatatattttgacatatgtgaaaagtgtgtttggaagttactgtgtaattatttatattttaaaatataaagtatgtttgaatataaagtggtaattacatatgaatttctaatatcttgtttggtaaaataattagtaattatatgggaaaataatattttttagtagctaatgtttaatacggaaagttaattatacagtataattacattcaattctcatggggccatcagaattagagagtgtaattacatgatcagataaacatgacaaattatgtaattatttctaattacacacaaatctaattatattgtagctgaatttaaaaattgtaattaaaaaattgatttgaaccaaaaatttaaaaattataattaaattaaaaaattataaacggtctaaattgaccaaactattcacgtccaatttatttatttaatttggtccgaattgaatagagttaagattgtaaattatatgaacaacatatgattttagtagtaattttaactctgaactcttcaaatttatacaaatgagattaactacataaaaaaatgcaaacttcttttcaatgactattctttctaattttgtttttagtaaatatttttacctaatttaggatctttgaaatgtgtgtttagttctataattctcaatcacttgttagagaaaagtagattgtagatagaggttggtagctctcctctgaagaaaataagcaaaaataataacccataaaactgcagaaaatgaatagtaataatatatatatatatatataaatggtcagtggctaatttcctgaattggtcatcatcatcatcactctgcttttcattgtaaacccattttcttcttcttcttcactctggtttttgaaagccattcacagaagaaaaatgacaaaggcagatgagtttcagccctttcccatcaaggatcagcttcccggtgttgacttttgcctcaacagctctcctccttggcgtaactttctcaatctctctttcagcattgctctgttttaacccttttaatgtctttccctgtttctgatcattgctctgtacttttagtctcttttactctgtttctctttgcctgccaatgttttctggggtttctctacacagtgtattatgccattgttagacttatatattcttttttacttttatacagctgaagctatactactaggatttcaacacttcatagtaatgcttgggaccacggtcttcatccctacaatacttgtccctttaatgggtggtggcaatgtaagaaaactcaatggaaaatcttatgcccgattttagcttatgtgattttgttttggtacatttcgttctaacccaattttactttgatgtatggtgaaataggtggagaaggctgaagttattgaaactgtgctgtttgttgctggtataaacacactcttgcagacttggtttggagctcgtcttccggttgtaatgggttcttcatacgcttccattataccctctttctcaatagctttttctaacaggtttagcatatatgcgaacccccgtcaggttggtctaacccatcttctgtaatttttgtaattttttatcccatgaatagccattcttgttatggattagtaaacatgatcataatttgtttaaagttgctgctagttactagttctttttaaatgggatttcagaggtttagacaatccatgagagctgtacaaggagcactgattattgctgcttttcttcaaattctcatgggattctttgggtttgtcagaatttttgcaaggtgtgatggtttttcaaagtttccacctgtatgttcaaccatatctttgtttgctatattattgtttgataaaatttgtccgtttcatgttatgtaataggtttcttagtcctcttgctgcgattcctcttgtgactctaactggacttgggctctttgcacttggttttccacaagtaaggataaatctttcaattttgttatcttcagcacgaactaattcatgtttaagaagccttttcttttgttggtcttgttacttctgagttttgagagttttttttaatgaaccaagttgtgattaactctgaaaaaaaaaaattaaaaaatacacatgcatattataataataagaacaaaaa

SEQ ID NO: 303668 - DNA, 1982 bp, Cannabis indica
gtacgcattttcacagttactcacattgataacacaaagcctctttcggctttgttctactacaatgatggccagccaccactgtacgattgcttcagcaagagaagggtttgtattttccaaaaacataaatcacttaacttatatatatagcctgttataatatgtatcatatattatatgtgttgaaacaaaacaggttactactgaagagtacaggaggaaggtggtagcactattcattacagatctcgaccctgagttgccacgtggtacggaatactcaatcttacaacaaatgtaccatgaaaagaggcagagtgcaacaagggcccagagtcagtacgaggtggtttgggtgccgatttcagactattggactgatgaaaaacaggtgttgtttgagactctgagagaccaaatggaatggcactccatccaccaccattctgtggtgtcatcggtggtcaccaggtatgtcaaggagaagtggaactttgctaagaaacccatgcttgtaataatggacacacaaggaaaaattgcacaccataatgctatccacatgatgtgcatttggggaagccttgccttccctttctcaatcacccaagaaaaactactttgggatgacatgagatggtccattgagctcgttgctgacaatcttgacccaaatatggccatctgggtacgatttctttttcactaataactaataaaatcatatgcatatcttccaaacatgacattctttctatgtttgtatatttagctccaagacaacagacacatatgcttgtatggaggagaagacataaactggatcagaaagttcacaagaattgcaaaagatgttgctatagaatctggaattaccttggaattgctttacgtaggaaggagcaaacccaaggaaagaacaataaagagtgtaattgatgtaatcaacaaagagggattgagcagaacacttgattggaatctgatttggtatttttggatgaggctagagagcatgtggcattccaagggtcaactaaccaagcctgaggatgcaaagaaggaccccatattgttggggatcattgctatgttgagctacggctcaagtgaccaagggtgggctgtgatcagcaaaggtgttggtgaaatggttaagagcaatggggaacactttctcaaggtcctagccgaacatggtcggtggaagatgagggaggaagtgctaggatttgtacctgctatgggtgagtacctcaaccaggtccatcttgaggccccacatcactgcacaagcctcatattgcctgccactggagccatgcctgacactgtttcatgctctgagtgtggccgcctcatggagaggtacaccatgttccgttgctgccttgattgatcatcatcatcatcatcatcatccaccttgattcaccaatattatctttcaaaaaatggggacctaatttgaaaaggctattgggtttgttgtctttctttctttcatttttccaattaaagtacaagtatattatatatactattattgcttgtacttagttattgcttgccactattgctactacggcctattattacactaggaataatcaagacatatccagccttattattaaggtcctcatcacatcttgtgcctggccatgaggattctacttgtgtgcttttcttttttccttcatttaagttgatgttatgtaattcatataaatgagaataataaaggaacttttttatttttacactttaaaatagtttttttttgttgcatttttacggtattccacatagaaaatcctattgtaactagcgctgtaacttaaattgcaacaaaaaattgtatagaaactcctactgtaactagcactgcaactagcgctgcaaccacattagaaatccaaaccgtaaatttaagaaaaaaaaagttaaaaaaatagtatataggataatttgatttc

SEQ ID NO: 303669 - DNA, 1612 bp, Cannabis indica
gcaccaatataaatgcatcatgtgtacaagagtgtacacataaactcatagtgacagttaaccgaatgacactttgaatttgctagttcagtaatttagaggattttaccgataaaatttgagcttaaaatgttaaatgcgagtaaaaagatagttggaaaaatttaaccgcaaattttgtattgaatttgtaacacagagttgttttgtgtatttagtttttatgatgttttgttatatattctattcgttgttgttttagctctttcaaactttcattctattacacttgtaatataatgatttattattattaatagagtattaaatttaaataaatagtaatatttaaatttaaatttaattaaccaattttaaatttagagtatgattaatctcaaaacaccgtaagtattggtaaaagtagtacagggtatcatttctgttctttgaaaataacatcatgagtattttaccataatttatgtcgaatatgcacatattttttgttaattataagcagataatcataatttattcattcatttagaatgttatcattaattaatcaattcatttacacagtactactacacaacttaatgcaatttatacaaaaattatcatatattatttcgttatttaatcatataattgttgtgttaattaattttttttcttttttattttgatgagaatatatatatcatattttgagtatctgacatgtgattcgatcaaaaaagattatttaacatgtgattgatttaacttttcaactaaattaaaaagaaaaaaaaaatcttgatatgtcatcgagctatttattgttaaagtattgataatgtgttgaaactaaataatatatatatatgatgcatggattacttttctcattgccaattaattttgagatagaatcttatgcaccttaccatacacttccgcattctaacatggtatcacataaaatttaattactttgaccatttaaggattaccatgtaatttacttaagacttaatcgttaggttacagaattatagcatatgtacgtattattaccaacaaaattaaatttagttatttatttataaccgagttaaacttagatatttatactgtaaataattcaaataaaaattcattttagatgtacaataacctttagtcagctaaaaaagttgagaatcaataaactagagtactctttaaagtggacaacaaattaattagaattttttaaaagaataatttttttaattggtgtgttggacgtgaagcatacatgagatcgattctcagttacataatttacataaattaatatgtatatatgcgtaaagttttttttttcttttaattcaaaataagactttcttaaaaaaaaattattggcgtctgaatcgtggagtaggttttaggttttacaaaacaaagaaaaattccattgccatttgtatgtatcaatatcatgttgtttatttattccaacatatattccacagaattaatactattcactcggcactagtaaatttgaagaaaacgattattatatataaatatatttatatatatactaggtgattgttacgtgccaagccacgta

SEQ ID NO: 303670 - DNA, 1019 bp, Cannabis indica
tttttttttgaatatcgaaacaatatagtgaaagagtagaattttcttatattttattttgattatttttttaagaataagatgggaatgtcattcctaggcgccaatcacggcttaaggcattgactgcacccttaaacagctttcaacaatttagcttcaaggaaacttttgtttccagcctgtttcttttttttttttaatttttttctaattttgttatttaataataaaataaaaaataaaataaaataaaaaaaaaaaaataataattaaggggttgttgggttggaatggcagcttgaaagtgctttaattggtttgctcagcttttaaacttatgtatgacaatgaaaaatgttgttatttcaatcatgtgatgtgggtagggaaggaatttgtaggacccctttataaattacatctaatataatatctataaattttttcacatggatttatatttttttttctacaatgatagtaatcataagtgttcttaaattaatattatttatgttatggtttttttgatgtaatttttgtataattaacttcaactatacacttgaatttgaatttattcaataataatattttgttagttaataattaatatttgcatagccaattcaaaagagtaaatttctacttgtttttaatgtatatttatttattttcagtcaaaatatgttatttctcggttgtacaagcacaatgtgtggcgtttaattagattctctcagagtgtttatttttattaaaaatgtcacctttacggtaagtttttattagaaaatatttattcaaatttttaagagtaatcgtaattaattagttgcatatttttttagaatagacaaaaaagaatcattttttctttttcagttttgaatagggaaatttgaaattatatgcatattagggattaaaattggtacataatttgtaaaatgggataacttttacttaaacccaattttacccccctcatttctaaactgactctctctctctct

SEQ ID NO: 303671 - DNA, 2069 bp, Cannabis indica
aaaaaaaaaaaaaacttaatgtttagttcgatttaataattagtttgtaaatgatcgaaaaagaaaactattcattatattatgtattgttttacatgttaattaaccaaatttacatagcctcttctcttctcttttctctctatctcagtagttgtaatattaattaatggatgtggttgctgctaaaattgaagaaactgactactacacaatctcaactccactacatatatacaaacaatatagtaattattctcttgctagtattcccttggttccgttatggggtcatttcgacacgtgtgatcaggaatatagtatttatcagttgggtttccaaactttttgtccatttatatatataatacactcatacgtatatatatgtacatatatgtatatgtgtgtgacatggggtagtccaacttgttcatcagacatacatatttatgcggtcaatttaaatttttcttaaacccaacagctagagagattaatggtttagatcagagatgagaatgactgatctctctcccttaaaagcgggcagaaaagaaagtggtgagattccatggcattttcgcaggtatttatataattaaatatatatttatatgtgtaaacataaactatatattaatgatatgtatttcttctcttctcttatatgtattactcatcagtgaacagtgatcgaattatagtgcaatttcacacagagaaagtagttatgatctacagtatatatatatgtgtgatcataaaatcaaagatgtgtgtatatagtacagactagatatgtttgtaggtcaatgggaaattgtgtgtttctttaattcgaagaagtacactagtatgttcgattgattaattaataaaggtgtagatatattaggtgagttacttaattatttagtacttaaattaattaattaactaatctattgataagaaaaaccaacatgtgtatagatttctggagctgaatttggctatatacaaaatacatattaaagtagtagactacttgtagtgtcacaatccgtacttctctagacttattaataattaatatcgatgagggttttatatataacccgtagaaattcactacgtgtacgaacacaatgatagttttgagtttggtatttatatatatatatacattgatacattgatcagttgtccggtttctgttttttgtttatgaaatgaacacacttgatcttactctttattcggagaaaaatggtaccaacgattttgaacgcttttcaaacattatacaatatatatacatatatatatatatatatatatgtatttatatatatgtgtgtaaagacccctcggaaaaggatgtgtccttcttggcctctaaagagacttgaaggaacatatgaacatggtagttagactgacactgccatatttttattttttctcccgtctttttgtaccataatattgcttttatgcttgttatggagagagagatccaagggtccaagttaggtaggttaatgtggtttttaattaggtgaagaaattttcagtaagagcaatatatatatagtgtaataatactgtaatagtatatacaccagtagtagatgtaggatctttaatcacttaatttcagcaataattcaagagtaaagtattgatagatctctcttttactatttattgcatatatatgatgatcaaatatataattatagataagtctcttgtgggccgggctgcactgaattcactggtcaatagctttgataatggaagctacttaataattaaagacccctttaataaactacccaattcataataaaacgtacactcactacaaaaaaaatcttacttatataataatatatagtactatatgcatgccaatttgtgatcactcaatttcctactgagctcttgggatttgagctttctctagcctttatataatcttcaattaaaagtgcatattgtcttaattaatatattaaggttaatcaatcattaattagatcacttagggctcgtttggaacgccgtattaggtcgtattg

SEQ ID NO: 303672 - DNA, 4026 bp, Cannabis indica
tgtaaaaagagatatttttttaattaagtagttaaattaagcatagaaattcaaatatgtggtttcattattcgttattagatcaaaattcgatggtttgatatttttaaaattaatatttatagttaaatttatttagtaaccattcataagtaatacccattaagaagtgtttcatatatatatatatattagaatagcggtatcagtatatttagaattatattggatatcgacgaatgtatgtttggcttaagtactatttgacactatcacattggtatatatgactagagtatgactagcatacggagtataggttgatattgtgatcaatagtgtaacgtatgaacattcttgactcagtaccgtgtgggacgcggggaagggttacggttaggggtatggtcgcctaatcttaatcttgtttatatatctttgttatgattgtgtttttcatactgagtttgtgcaatcacagatattgtttgcatgtataggtaagagcaaggctaaggttgagcaaccgtgagagcgagcagatttggattgtacatgtcggggtggttaggcctggagcgtacaattttgggacaggatgctttattttaaatggtcgctaggtgacaattattgtatcaaatgttttgtattacaattgtaaatattttaaatacgggatcccgatcatgtaaaaaatatttattttcatttaaagagtaatttaataaaagttttaataaatcacaatttttaataacctcgttgaatagcaacagactgcacaattaatataaaatcacgataacacgcttaaactagtggggtgttataatttggtatcacggttgtcaagttgtcttccgaagatcgtcacaacatgtacaatcaacatcagagataagctcgactcacggttcagttgcctttattgctttagtaattaattttagtagtatgttataagaaaagccttatagtagtaacctgatagctgaatatgtgcatatataattactaaatgtgacttttagtcacaataaaaagttacttgtgactaaaacatagtatttagttacaagttgtcactaatttagttttagtcacaacaaattgtaatttttgtgactaattatacttttagccacggactttttagtcacaacagaataataaaatttataattagctacaactttatctataatcacaaatttcgttgtgactaaaaataaaattttttgtaaggaatttagagttttgtacctcctacacacaccgacaattcaaatcccaaaatttctcaactcatttctatgaaataaatgagaattaatccattctttaatatttataatcctataactttgaattttaaaaatccatttatgtgataaatctctttattacacacaaaaatttggtgaccaaaatggaggttacaaagttgttaccacatttgaaaactcaccatatatgtatatgtatgcaacatctttgagcaaaataaaatatatgttaaatatatattttttcacagttatttaatctagtttatattatttatattaataatataacattctttcactatatcaagtattgtgtcaaaacttttgcaatatatatatgtaacacttttatttaataaatcaaataaacattacatttaaatattataataacaagagttagacttaacacatcaaaaagtggtatgtaatattttgataacacttttccaatcttattgaaagcactttttcgttgttttaagcccaaatggctaagatagacattgaggttgaaccaagaacaagagcaatgaaagaagcctttttcaaccatgaaatggaattcatcattttgttgtggaagaaatcaagagctataagatcaacaagagccatgtatattagtattccggaagagaaagagcccaacaaaccctccattatcaaggcgtttgtactactatcatcataccctgtggccgagaataatatcattcccagtactattcccattggcgtcgtaactgcaaacataaaacacatatacgctgtcgttccaaaactaaatcttgcctgtatcataacaaacaaaactccacttattgaattaattattcttcaaaaaatatattaataaaaaaatggtatttaatattttaaggtattcaatattatactatatttgatagtgattcacgagttgttagaaaattagttttttacttattaactagaaaatatatatatatatgagactcagaattaaattacactaaaaataatacatttatatatataacagctctaggtgctattagccactattattagtaccttttaataattatttataaaaaaatgtaatttttaatattatattgtattaataatagtgtagtatttgtcaataataacatgatatcactgtatttatatgttatatttggctatattaatatgattaactatctatttgtctattatttctttactgtattttataactaggttgctttagttgtttgtcaatcggagacattgttacacaaattgtatcctaagctttgaaaagtaatatgcttaaaagtaattatacatatgcttatataattcaaatattgatcaaacaaatcaggaagaaaaagagtgttaagtgtaaccatggtacctgtgcaatacagccgccgagacccatgccttcaaaaatctgatgaaacgccagtgcagccaccaaaggtctaatagtacactgattctgagacattcccaaggtcaccccaataatcaccgagtgaaatataatcccaatctccaacacttgcgacaccagtctctgcttcattctcaccaaatcctcctccaacgtcactccctcagccccacccaactcacccatttcgattctcgactcgaccaatttcttagtctccgtctccaccaccaccatctccccctttgtacctaccggtttgtattcagcagcgtcaccgtcaccgtgcattccagcgtgggaggtggcggtgacgtcgacaaggagagcgactagtgcgccgatcaaggtcacgagaccggcaaaagggaagtcccgccacgggtggagcgatgccacttggcaatcggagagagctgcaaaggcgtccggaaggacgtggactaaggatgtggagagaatgactccggccgcgaagcacttgattaatagtgtggccttatcgtaagctggtttgccttgaaaaagcctggccaatagcaccggacagagtatgccgattacgcttgtgacgaagatgacgaagatggacgtcaccttcagctgcgccgccgccacgccgtcacgacacgccagtgttctagccacagtctctaaggcgcatgccgccgttgccatggtttttaaaatactccaattagacaaaaacaaaaacaactaagagaggattaattgtatctaagtgaagagagaaagagagagtaatattaatctgaaaatgaagtgaagtttgaaaatgaggaacgaaaatctgctgtgtccaagtttcatctatgttgttaaggtgcaaaatgactcttaaataaagtgtcgtgataaccatattatagtgatgtattaactccatccccacttccgtttactcgttaaaaccgtttttttttttacaattgtgtatgtaaggacaacatttaataattaaaaaacttatcttattcaaaataatataataataaatttatcaattagaaaattctaaccgactaattattaatttatttattcttaaaaaatttgtttttaattattaagttgtttgtgccttaagtggaccctcaagttgatgaatttttagttattatttacgttttaggtaaattactaccatacctaccccccttaaaatagatatattgatgcattctaatctattttaacaccatcctaatctattttaacacccgaaataatttttagtcaaattttttctcatggtcatgaacgttatagttatttaagaca

SEQ ID NO: 303673 - DNA, 1971 bp, Cannabis indica
catctctctacaaaatatttctcataattttgtaggaactctctttttctcactctcttagatttctcttactaagaggtattctcactatttttctctcaagagcctcactcttcactcttggaatagcttgtgatagttgtgatgggatgaacaaatgaaagggatggagctctatttataggcctccttggatgtatgaacaagacacaaaaatcaatcttgcattaaatgcatagttaaaaatgtgcatatgcctcaagtcaaaaattaccattgtaattttttcacatggttgaaaaatacaaccatattttcacatagttgaaaaacaaccattacccatcagaagataccattaaattaatttagatgaaaatagaattactattacagcatcattattgagattttttcttcaaaatcctaatttgttcattttcaaaatgctcctttacaattagatcaattgtcaagtttatatttttacctaaaatttaattttcttcgatatatagagtcatgtccaattttcttttctcattttgagctcgtagcatttgaatctcataattttgttgggagtcttgttttttgcgtttgttgagaatttctataatttgttgtcgttcttgtttgatagcatcattaattgctgaagttgaattcttgactggaattggttgaggttgttgttgagtagaacaagcaccaacattcacatcattaggagatgctgatgttgaagactcaaaagcagaagaagaattggtttgtgtaaaaagtcaacacaaaaacaaatcaaatttgatgttttgaatttttataagtattgtgacttaatattatatagattagaatcaaaatttgaacaagtaattgattaccttgttgtgcattttgagactttgttaaccccaattgctcttcactttcgttgttgtgcttttttaccgcaattatacgatgacaacttaattgtttcaaaaaacaacttttaacttttttaaatattgtgccaagtgtatggcaggggagtttggtcgaagttcctcgaatcagtaaccctgaccatggtgaatcaataatagaaaacttttcgagaagaagaagggagaaaattttaaacttttgaataccatattagtgatcaaaagagtgatcctattattcttgtgaactgagtatatatacacaagtaattttgatcttaactaaacaaaaagagaaatcagttagttggtagttacaaccgaaaataacaacctataacaaccaaactattctaataaactaacagacgaatagttttaataaaatgggtcctaattaagtagctacctaatcaaaaatacagactattaaagattctttccaattacattcacataatattgtttataaaacagtgagtgaaatgaaatattaagtagaaggtgaaatgcacatacatatataactcaccaatttcacttgaattttttcccaagtgaaattccactaattccatctaataaaatgctatcagaaaccagttgatttaacccaatcaaactaataattagaagatcattattacattcctcaatgtcattaaaaatattgacaaacgttgttagaagtatttttcagattctttgctttgaaaatactttgtttgttttgctaggattgtcaaattgatccaatttaaatgtttgtgcaaaattgatccatagggccgtgagcacgaaaaaagggaattttacaaaaatactgcttttggaccaaaactttacaattatactgggacacggcaaaaacaacatttttactgccccagcccaatttcattacttttgtactgcccaagcccaacatcatttcatttatactgtgaacagtaaaacacacgggaaacaaccttcttcgtgtgtggggagtcgccggagacggaaatcaccaagaaaaaaccattaaatccggcgaaga

SEQ ID NO: 303674 - DNA, 1751 bp, Cannabis indica
agccacttctcttcacctatttcgaaatcctctatctctttctctcttcaaaactgaaaccctagagtgattagagtaagtgtccacacacatcaagtggtactcaatcatagtgtgtaaggctgtgaagaatccagattcaagagaaggagattcggactcagatcctggtgacactctgctacagacaggatacaagggttagagatctgagtgaaaggagacattaaattccactgcaaccactgtaaggttttggaaactttatataggtttatttcatatcgttttagaagttaatgtttaggatgttataaacatacttgttagtaaatctagatccttgtaaaataattccaacagatctaaacccatttccctaagtgtcctgctctttcaaactttttgatcacatacttcatgtaaccacattaattggtggagtttcatacttctccatgatactcgcacctattccttggatctctcttcaattttcctccttgaggcattcttgggggcttcttgtagtggaccacgttgtgagtttctctaaacacattctcttgagtatccaccagatttgagtactcggcatactttggtttgtaatcttttcttgccttctttaaagtctcactttgttttggacgttttcctcctctcttattttggaacccgctcatgttctgttctagaacatacacttttgattttctaggagggatattacatccagtttgtgacactctataccaaaaaaatgggtctacataggttcttgtacggatgtagagggtccgtagactattgaagttattgcattctgggaataggaattgatgagacgaatctagaagtagaagtagttggaggtggtgccagagggactctgaatgcctgctaatatgcatcttctagattaataaagccttgggcccttaccatgaatttagacaacgtctcaaccctttttctttgcatttctccccattatagggagccaactgcaagtccaaaatacatggccacacatttcatatcattagttacttttttctttctttgcaactgcattcactggatgaagttcttcaaactttcttcttcttgctgcttgacatttgtgatggagcccattttcatgtcacaatcacgggcaacaatgaactgtttctagaaggcagactacaattccttctaggcgtgaattgatccggaagccagtctcttctaccaacaatcctcaacagatttagggagggttaaggagaagcataagcacttgtcatcttcaccaattcttgccacttgcataatttttttatatttttgcaaatgtgtctttggatctgtttgcccatcatacagctcaatttgggccatcttaaagttctccaagggtaaagcttttttgatccttctaatgcatggctctaggtcctcattctcagaatcagtgatgaccccactttgcttctagacaaattttatcagtccaacgattttttcatccaatcttttggtgccattatctaggagatcttgtccctggaatttttcatttaagtgttttctgaggttgttaccacgtggcctggccttcttactttttacttctttgtacttggcatcaagaaaccttctgagatccattgtggacaaactagcattagagtactgtcccctggtcctgttggaatttattttaccaggatcttagatctaatcacaagtatgttgtttgaaca

SEQ ID NO: 303675 - DNA, 1044 bp, Cannabis indica
aaactactaaatgacataaaaatgcatctcagaattcaataataacagtataaataattatttaaatagctataaatcattttcataaataaacatgattaactgctaatttccaaattaaactaagcggtctttacaactcacaagtgtgacattctcaagatcctaagtgttaaggagtgcgaaggccatgagcggcacttaggtaacccctttgtgttcaaaagaagaaagagggaacaataccacttcttaaaagagaaggtgctaaagagaattgaaggatggaagacgaaactactctcctttgcggggcgtacaactttagtaaaatcggtggctttgtcactaccattgtactccttgtcaacaaataagatttctctctccacctgtcgagaaattgatagtgttattcgcaagttctggtggacgggggggtcggaataaaatcgatttttggctttgatcgggtgggatcaattgtgcgcgcctatgcttgcagggggttgggattcagaaagttagaagatatgaacaaggccctactaacaaaattggcgtggcagttggctagtaatttagagagaccatggattaaatgtttttctgaaaagtattgcaaaaaccagtcattctagagtactgatacgaagggaagtgactctgctttttggaaaggagtcttgaggtcaagagaaattttatgcaacaatgtaatgacaatggtgggaagaggagattcaatagatatctggagacaaccgtggataccatggcttgagtatcacgaattcatagctaccatggaccaagttagaaggaaattccctcaacttcgtacggttgttgatatttcaaattcggatggaagttggaattcggacattatttcctcaaatttttggggagagtatgggtgatagaatttgtgggataccgagactcccacaatctgatactgatgtactagtttggaaaggagcaactgatggggtgtatactgtgagaaaaggatatgaagctactcaactaccgagatct

SEQ ID NO: 303676 - DNA, 2901 bp, Cannabis indica
tgaatctaatatatcacgcttttcttaaaaaaaaaaatatcttagaattagcaaaccatgatagttagacatttggaatgtcgggacttatttagggttataatgttggaccattttgcccctagaaggtgatgttacttcctattaaagcagggaagaattgtcttttggcttttatttattagatggaaataagtaattattctagaaaaatctctatgtcaaataagttatgctatttttgaataaaaacaaaatttaagtttaaattatccgaacttatcaacacctttcttcttcttttctctcccatcgggttcggccacaagaaagcataagcaaacccaaccccttttctctaaaattcaaatcaaaatctaaggaagttaaggttttaaggttaattgttgacaatgttaagataaactaattcctcttctatctatctttaattttaaggttgttatatgatttcattgaggattttggggattttagttcttttttgtgttgctaagtttagagcaaagttttaggattttttttttgagtttgtttaagctttagtgagaagctttaggctggtttgttgtgttttgggctaggttagggctttgagctcaagcttagctcattaatggtagtttttgattcaaggcgttttggtttgatttgtttgatgaattatttgagattctagaaagtttgaaaaatattggaatcgttttggttgagttttgaggtttttggccatttttcctgtaaaaatagcaggtcgtttccgggaaaatggtctactgtttttctaggtagaaaacccaaaaaaggcctgccgtttttatagaaataacctgccattttttgggggctacttttcccaaatctcaatttttagtgttttctcaggatttagggtttagtcatgctatttaccgatagagaaatttttagtttcaagtttaagtctccaaaagtgatttaggagatcatgtaccagttttatgtaaattgtgacttagggtcttaaatcgtcgagcagcagcttccacttagggttaccgacacgcttgcatttggaatcaaggtaagattaggataatagttgcatatgtgtatgcatgtttagcgtcatattatttgtcattagaataacatatcaggatatcagtgaggtatacatagagttacattaagatgtctacaaatatatgtcaggcaatcagtagccatcaaattagcatatcaggatattggtgaagtatacatagagttgcactaagatatcaacagacatatgctaggcttcctaataatatgaactaattgctaccacatcagtacaactagagtactgagtataggttggattcataatttgtcatactttcatcgagaacgttcttgacccagttatttgatcgtgattaggtgtatgagtgcttggttacagtctggatatacgtttatgtttatattatgattttcttactgagtttgtcaactcacagttagtacgtgtatgtgcaggtaagaactagaatcgaatcaagatgagtctaaagttaaggatgaagattgtacatatcaagacggttatacttggagagtgtttagggtcttcaggacagcttaggctcacttttgatagtcgatgtcaatgacttttgtagtactaagattttacaaacttatgtaactttattaacgggatcctaaattatatagtttattatatatttaagattgaagtttaattatgaaaattttaattattcatattttttaataaattctttgatcagaaaaggaatgcaaaggaaattaaaattaatagtttgtttaggaatgttatcacatcagattctttgagttttagataaaaacttataaaaatctaaacataatacatcatatttcaacaaaaagacgattttaaattgcactaataaaatataatatatcatatttcatggcatccaaggaaaattaattaatatttaaaagtaacataattccaaacaagatgatccaaagtccaaacattccacgtaaatttatcttatatttattattatataaatacattgatcaaacaataccgtacgtcaagaccttactttgttttcttttctttttttttcccttataaacgtaattagagcactggaaatttatttgacaatttgacaccatattataagtcaaggtcaagatgattaactagaacaacttttcaggcacgaagagctacatacatacatacaaatacatagaatataattatagttacatgtcttttcatctcaagtatataaacatctaaactcaaccttaaatttcatccttaattacttgaggaaggaaaaaagagatatcacaaaatggggttgttgagtaataatcagaacaagtggcaattaatctttttcggcctaattgtcgttttgggagcttgggcctataacgaagcttcggcccgaacactccaagatcaagaggtgtccatgtacgacaggtaccggacctggatggcccaccatgggcgtgtgtacaaagatgaggaagaggagaaaaaacgtttcgagatattcaagcgaaacgtgggccgtatcgatgactttaaccgggcctctaacaagtcttacaagcttggtgtcaaccagtttgcggaccttactaatgaagagtttggggcctcaaggaatagatacaaggcccacgtttgtgattccactagaacgacgtcgtttattcatgagaatgttactgctatcccttcctctttggactggagaaaactaggagctgtcactcctatcaaggatcaaggcgattgtggtaattttcattaaaattgtttattaatagaagattttttatttttacatttcaaaacagttt

SEQ ID NO: 303677 - DNA, 2029 bp, Cannabis indica
tcttttgttgtgtatcattacttactactcttgttaacgttttggctttggtttggaaatgttaagagggaaattgaataagaaaataaataaaaaagagtaattattgggaggagagattttgatttgtttattcttttttaataaaaataataaaaagcgttggagttgatgaggtggcagccacggcagcgaggtgtggtcaattgggaacgtgcatgtggcgatgagagagagttgaatcttgactaggttctgtgtatttttatttatttatttattattttaaatctttctaatctcaagctggaatgttcttattctgtgttttaagcttagaccaaatctgaaaaaattcgcatcatctcgaattaagagattgagtgaacttgatttataataataaagaaaaattaaaaaattaaatagaatttgtgcagaaggttgtatcattaagttgtatagtattgtattatattgaattagattatatatcatattttttataataacatacttgaaaatattgtataaaatataatttaatataatttacataatataatacggtgtaatacgatctaccaaacaaatcccagtaattacaaatttacaattttttattaatttttatgtttgaaattatatattagaatattttttttacagcggtattctttatatttagaatattatttgtgtaaatttttaattttttttaatattttacagtactgaaaacaaaatctaatattgtagtttattatgtgttttaaaaaacttctaatctattttcgataatataaattatttagaattttttaaaaatttataaagatggttgtaactataacaaacaaggtcacaaaaaaaaagattaaaaaaaatatttcgatatatattttttagtataaaaattgactaaaaatttacaataaaaaattgaacactaattattaaataataataaataacaaaatattggacagaaaggaaaaagaggaatcacatggcatagcctttatttttaagcaaataagttcaagtcagattcgtattattattattgcataatcattgaaatgttaacaatcggttctcattcattttaattaaatgtgtgtatataaaattgaattgaaaaaatagtatatcttttgtcataatattataatatatatattttttggtctatgttaataatgtagtaagaattgacaaaattgctcttagcttatgagctggtttttttccatttttttttaattgttttggaaatttttatttgtaagaactttttaatcaatactattgttagagacatgatataatatgatgatattaaatatgtagtaacaccacaattaggttgagaaaattaataccaactgctactcacaggaagggccaacttttatgcaggtgagtagaatacctaatttttggagactagacttctatagacttctaaaaaggattttacttttccattttgtttaaagaaaatctatacttttttttaacaagtcattttcaacagagtgaaacagttttgattgtgattattggtatagataagtttcaataatagaatagctcctatagggctatatttattgtaatttctgctgcatgcaatttggtaaagatggtttgctttgctttataattattatttatttattttattttattgaaataaacatatcattgatataatcaaagagtacaaaagccatgcatgaactatccaattaagtttctcttgttggaaaaatttagacaacaccaaataacgcgaatattcaagcaaaacaagaacacttactaacagttatgagagtacttacttaaaatagagagtattcaaagtataagctacgaaatagacaaaaataaaaacaaaaaaatagagaagataagaggattatagtagctcagttagagctcgcttggtctgcttagcaagtgtcttttaggattacataatcggtcagatcagactatttttacaataaatgacaaaatt

SEQ ID NO: 303678 - DNA, 2126 bp, Cannabis indica
ctccagaattgagaaattataactctaatgcccatttctaacaatggggcccataaataattaaattcataaataattataaaaatatcataaattagtgctaattgcctttactaattcaaattactaaagcagtcattacataattttcctttgaaaataagaaagttgatgatattttcgtagcagctttgtgggctgtcaaggcccaactcatagcttggcttgctatcaacggatgaaggttgcacatcaatgtcctacaagggaaaagatggttggacatgcacctgcaggatgtaggatggccgaccatataatgtctacgggttgaggtctggtcggccatgctcctgccagggtctaaccagccatgtgcctgccaagatcttacaggtcatgtttctatcaactttggcaagtggaggccagctttaggaggtggaggccagcctttggagatggaggccagccgttgtacaccttttccttacagaggttaggcttccttggtctaaaagttgccttttggctggccagcttatgctcaaaccctggcttgccatacaaactcatttggccggcctatagactccccttggccatctagacatgttggtagagctacttgacggctcgcataacttattttgtttgctgcttgacggttttggccatacgtaaggaggctttgttctgctattggcaaggctatattccacatgtactatgtcttggcttacgtggacatgtcaagtcaggtagacaaaatttaggataacaatatgcttcttagtagaaaattagggcttatgaaaataatttctcaattacggagatatatttgaattttaggtgtattatatatgctatatgtgaatttttatgaattttatattttatacccgataacagcggaatgcgataatttgggcattagagtcttttagatatggttaagtatttcagaattagcaaggcgagatagttagacatttgggatgttgggattgtgtggggtaatggcttatgaccattttatttctaggtatgtttggtaacttagggtgaaagtaaggggtgatttggtaatcacccataggtttatcttattcttttaagggtgagctggtggagttagtagaattccctaagtctaagttaatggtaatttaaagtatatgagaaggaatgaaaaagatcatcatcattaactcaaacctttctctctgtaaacccccctccttctctcttggcttcatccaaaactcaaagagattcaaaccctaagttattagctttcaagttaatccaacaaggaaattagagaaagtctgctagtattaatcaaggtaagttcttactctatattttcttgaaatctctaggggtaagcttggtttgaagttgtgtagtgttaggttaggagatgcttagtaaatgatttcagagttattttatggttatttgatgctgtttttgcatagaattgctggccatggcatggattgagctaggtttgagttttagagctcaaacttagctcgatagtggtggaatttgttacatgcccttatggtcgtatttatttgatgaataatgtttattttagcttaaattgaagttcttggcagcttagaatgatttggaggagttttgaggttttgggctaattctgctatgaaaatggtaggtcgttgttgggaaaacaatctaccatttttcttgcaaaaacccaaaaaaaatagtctgccgttttttgaataatttttcttgaagtctcggtttttggtatttgttagaaatttattggggtcacaattgtatatataaaatgtgtgttgggtcatcaaataaataagtcaaatttatgtggtctattttggaataaagtttatgacttaagggcatgattgtcatgattttaatatgtggataccaattagacaatttctaatttgatgaggggccaaattgaaaatagtcaaaaaggattaatttaaacatgtattggtccccattttttgcatcgcttcagataattagtcttgaattcccatcatcaagaaaactaaggttctagagaaaactttggtgcaaaaattggaagatcataccaatcaaag

SEQ ID NO: 303679 - DNA, 1077 bp, Cannabis indica
tgctgcattgggtgcagttggcttgcgagcctcgttcaggatagacgccttaaaattttgacatgcgacaagagtaaggtggtcgattaccatcaataggatagcatgcaatggagtgcgcgtgtgaagtttctagatggacttatcttaagagacttgcttcagtggaggcatgttctgttggtgtcattgggtacggtgtgtttgcaaacctcaccgtgaggggtgcaccatacttagtccttgtcaaaaggaggatgcattggacagttggtgagtgagatactaccagaggatgtgtaagcttcaaagtcaatgttgcaagggatacttggttgacttgaggggcattgtgatggacatggaggagttcatgttagaggaagtattcgagtacagtggcactgtttcatgggtgattttgaatagcaacaatggcaaagattttttgatcaagttcaagagtgggcatgggagatcgtcacctaaagggtggttctacgaaagtaaagggactagtgtagatttaggattcagttgaagcttgaagtaagcttaggcgtcgagatcaaataaatttctctatggtccgtcgatgagggcatcaacatgcaaaactgggggagaatttagtgtgtcgaccaagatggcacggtactaggtgatgtccacgaggtggtcaactggtggccaagtggtggcacatgctggtgtgcacattagtggcatgatgttgcctaatttgtacggtagtgacatttttataaatatcttcaatattatttggatcaggatgagacttggtattcaccatttatttgggcttaggattacaatggcgtaattagatttgagaaattctgagaattagtgtatgttgatgcatatgtctacagagtaaaaatcatatatgttcctattagaaggctgaaagcttagggtggtccttaaggggagaacttggtgtcagctctccaccaccctctagcaccttggtgctaagtgagctactactagtcagcgggactagtagggcgggcatatgaggaccatgagggaactcatatgtctccatga

SEQ ID NO: 303680 - DNA, 1866 bp, Cannabis indica
taatgtaaattgtgttgcatgaaatgttgaaaatagagctaaacattcaactacacataaataattccagagtagttgaattgaatgtattcattgattcatttggttttgcaagagtgtgtctcttacattgaatggcatgtaattaactcataagatcataaaatcattctacttaatgtcaattattttctagatccaacccccataaatgttaccatactaaaattttatactatttaactatcttctattcttatgaacattttacattgtcaacacttcactttctatctgctataacccacttacaatactttaaagactaattagaatttttcctctcgaattattattactaccaaatcgtgtcttctaattttcttcatccattaaatttttttctcaaatcattaacattgttgatttaccacttcaagtctttattgggtccttatacccacataatgattttatacgcgagtacgttcctttggctgcttcatggaatgacgacagatcttacaaaccaatacgagtgtttctagcatgctttgtcttcacacggacacaatctgagaaaatttcttaagaggtcacctattttgaaattatcccaagtgaagcatgcttaatcgtggagttcttttgtaatgagctatcaaaaaataagatgtaccttgttaatataggtagtactaatcaatccattcaagtcctcttcaactgtgtagtcttatacatacacagtctcagaatcatcacatgacattcctctcgatctccccttcaaattacgggattctgactgtcacagttgaaatataatattattccgtttattaccaattgttttaaattagataccgatattttacgctacaataatatctagcaacaaagcgcaaacaattcaatacatgcacacaaccatccattcatgtcggccttagtagtagtagtatttgaggctaacactactaaacattaaaatgtacaaatttggctatgtgtgtaaaacataatcttaattaaaacccagccacaaatttgtgtgggtgtagggaaatgttaatggttggcattaagggtgggtagcaaagctcaacacgactccctctagctatttgtgtagtttgtcttatataataatataatgggtccaattccatatccatatttcatatttccatacctgcatttctctccttgtgtttttaacgtcaccacatacgtattggcacacaccctttttcaatcaagacaaaaaaaatataagaaagaaaaaaactttgtccataaccacaacaatggtatttgaaaaatgaatatgttttttaaaagtaatttccgacgtaaatatctaagtttaactttcagttgcagataaatatttaagattgttttagataaatagtagcataagtactcaaaattttatgtttgacagcggtataagttcaatgtttatttttagtggcataaatatttaatatttgcaaaattgtaatttattcttagtttcgtcagtatagatttcgatttgaatttataaaagaacatttagaagaaactgatactacaagtttttgtctaaatctaatgatctagaatttgggccttatacatgcaatgtttgagataataacaaactttgtactcacgaaattatagaaaaactaaagtacaaacattaggtatttatgccgataaaagtaaatattaagtttatgtcatttacaaaattaaaattttgagtatttatgccactaaataaaattaaaatataatgatcttgaccaattagagacttacacgtgattattgacttgatacttactagtcaagtatctacagaagttctaa

SEQ ID NO: 303681 - DNA, 5817 bp, Cannabis indica
gggataataaatctatttaatccaattttttttagcttaaatgatttgtacctcccaacatagggaatcatcaaaggttttcctagcaaaagcttcaagctttgagccatcatcctgcaataaaataattccccttagcttcttgcggacactaagaactatatttaacagaatgatttgttgattttcaaattatcattgtctacttttttgtggaaaaactaaattctcactttgttgaactaatataactaagagctaaatgaactaccccacttacagtgtgaacttcagcagacataaggccttcaaaattcttcaactgaggtgcaaccattctgaagagataattcaaatcatgtttccaatgaagatcacacaattaaacatctataatattttgtgttaaaagacaatagaattttgtttttgtccagcatacgaaaaggaaactgattgcatttacttgttccttatgtctgcctctctccgaccaagtctaggagcatcaactgtccagacaatagccttaaatccatttctttcagccctttgcaccagctgtgctgatacatcccgtctcttattaacctatatggttgataagatcaatatacttcagtgtaagccaatttctgctatgaaaaaaataacaaaaacagtgatgacaaactgtaataaaagaaggttaaggagggataagtattaagtacgtataactgatagaaccgaacagcattgcagctggaagcaacctcttccacagcacagttagacatgtatgataaaacctaaataaaaaggaagaaacctgaaaaatcaaaccccttccaaatactgattcatttatattctcaaaataagaaaacctcaaatgtgttgggctaattaccatgatggtgtcacatgaagccgctgctctggctgtagctacctcccctgcagtaagaaaaggtcatgttaagtccaaactttgataccaaaatacctcacaggaaattctcttctattgaatttacaccttcagggtgagctaactgatgataagcagttggagcaatcattataggggctgagattttgtaacccaatacagttgttgacatatctattctgctaacatctacaagaactctaggccgtaacctagatatccataccaccaatacaaaccaatcaaaatcaaaacatgagaggagttaaaaaaaaaatgaaaaaaatgctaccactagtaagcctgagattacctgattctttggtatgcctcgatgttctctcttaatgtattctcatcctcagctcctccagcataataatcaaagtacattttgggaagagcttgcctagccaattccttgaactcattcacgttgactggttcaggtgccatttttctgcctgcaaacaaaaccagaaccatctaatattgtaaactatgatgttgggttcgatccatccatctatttatttatataaatacatacaaggaacctatatacaatcactaaatcagataaccatttaaacttactgaaatattaagaagctagtttaaaatattgcagcaataaattaagaaatacaaaagacatgtaaagaagattatatttacaaagaaaataaaattatgtcgcatatcaatggaaaacgatgacacgatgattacccattagagagcaagagggccataatagatcttgcataacactcgagaaatgatatatatatatataaaactagtttgaacttaccttgtatgacctgttttctcttggcctataaatcgagagaaatcactaccgaagtgaaggttttgaaaacttggatctcctttaaaccagcttatatatatattttattattttctgtgtcagagaaagtatactatgaaactgaaactcttgcttaaacttttgggaccggaaaaacgccaataatttggttttgttggtgtcgccgtgatttgtttagactgtcaaggttaaatttgtcatttgaatttgaataatgcatggtttcgtttgacaacagttagtaatgattgaagatgatagtcgatacagtgaagaagaccaatttcaatcaattgaatatcagaggggtcagattaattgcttcttctgattgacaaattatagaaaaaatactctcttttgtccttctagcatcattgtatgtaaactatttataggaacccatcgaccacttggaggattgcaaagtcaatagagtaatgtgagtatctataataaattgttcaattacaataagatgactcatttgaatatgactttacttgtttagcaaaaaaaaaaagaatatgacttcacatatgaatcccatactctaaaattaaggaaaaaccaaaatcgtttcctatagtagaaacttgtttttggatatgaatcccatactctaaaattaaggaaaaaccaaaatcttttctttagtagaaacttgtttttggataggggaccatacaaaacaacaaaacattgtcctatgtcggtctctcaaactctcccccttgggtcatgggaccatccctggaactctctctgctcataagaccacctctcttccctcctttgaccaaattcctccctcatatcatgagagaatttacaggtatctccataatagcacctgccttgagcataataccggcatagcttttgtggcatttcgttttgcttccttgacagacacatgggaagataggaataatagttatcagttacattttgtcttcttgatggattcataggatgatacttttcaattccattttgtctccttgatggactcatgggatgatagttatcctttccattttgtctccttgaaggactcaggagatgatagttatcagttctgttatgtctccttgatgaactcaggggatgatagttttccacgcttgttaatggctgcctgtgattaccgctcttcagaggttcctttgtctgattcatacttgagcatgcatatgtgggaggttgccgatcacttatgtgatgaacatcaagaatgtcataatgtgttcttgcttgattaatattccctaccaaattcttggaggcatgctggttgatagagacatgattgtcttgtcttctatttttcagaaacagggttggatttgaggaaactttactaaaattagtagttgagcttgcatctcgagctttagtagctgccgcaggtttcccagaatcagtggacaacctcatcggttccttttctttgttttctgaactgatagacgaaacaaaattctctcgtggaattgcaggctttgagtaacgctgacaaggctggagacctgcctcattttttgaaatcctgaagcataaaagaattgatcatgtaacaatacaagaaacaaagggtatataaacaaggaaatatttgataaaataaacactatttatccatatcattcatattgtttacctatttccattttgcatttttctatttttcttctcaagaattcgtgtttctctatcagatctagcaagagatccccttgagtgcttctccatcaaaatcttttgccttgtctcttcattttcccatttctaaacacacaacaatacgtacaacttaatctctctcagagttttcaagaaacaagaatacaacttaagctatacaagctcaaaccagaggaagaaagatcatgcaaaaccgacctgtctcaaagttttcaaccggtaaagattccgtcccttaattaggaggggatgaagtgggggaagtggcttctcccctttgctccatagtacttcaatctggtgggattgaccaaaaaactgtatattaacatctgtgataaagtatgcaaagttcaacatcattgtcaacttgatgattttatctatgtactaaaatcagcatgcgtctagttgcattacatggatcactactactccatccatgctcattattatcttacagtgtcatctaatttcacaccacctaaaaaagaaataaatacggaattcatgtgcacaattcttttatatccaactaaaatattactcctcaactcactgtgaatgtatgttgttgctttgcagcaccatagctctctttcacaatacgaccagcaaccattcttgtgccacaaggaggaccgctggctctccgtgatgctacattgaacctgaaaaagagtttcagaactctaagaaagctaaatggacgtattattgaatcagcaataataatgttttacttgtaagtgaagagcacaatttcttatcaactagttcacagcagagaaaacaaagatttactatttgttaaagcttacatgtcataaacattttgttcaaacaaaactacatcgccagtacatgcatcgcctgcacaaaaattcgccaattaaggtaaaaaatacaagcaaagaaatattacaatataacaaatatgactttgggaatcaaaatatagaggcgtgggtgtaccaaacttcacaattcccacatcctatctagatgcatacctttacaatttactacaaaactagatacaggatacttcttgtccccttcaccattcacaatcctgaaaaacatttcatttgtatgtaagaaaaaggaagtaaaaacaaacgtttcttcagagttatacaacaaaggtagataaaagtcataaaattactcaagatgctctttaatgcgctgaaggagtgtgcttttgttccctgtcagtctcaatccattcttccttagataaatcttacattggtcaactttcaacttctctagctgccccgctgccacaacagaacgaataaaaattattcgatcattataattaataaagatcaattctttcataaatgaatagttatatgatatatataattagttcatgaaggaaaaaaagagaaacccttttctgggctaaccttcaatctttctttggatttcctctaagctcttcgcatctttttcatcaagttcttcaggatttatataactcccattggggtgctcttcgttagggacatcaatatcatcacaaatactattgattccccatgaaaacacaataacaaaagtaagtctcaatccattatgaaaaaagacgagaaagaaaagaaaagattttagacacaaacctagcctttgttttcttcttgagtgaaagtttggaaaattttatctgagtttcttccataatgctgtaacttggatcctcgtccgaatcatcggagccgttttcagagtcggattgtgatgcagttctaaagaaattttcctccgctttttccaattccattgatggatttcgggtggaaaatcaatttaaacagattatcaataatatggaattctcactttcaattcacttccgatgccagcttttgaaaagagaaaaaaaatgaccgttgagcactgttcaaacttcaaagctccatatggaatggtaaacgcctcgaagtaatatgggccaggcccagttgatatcatgtcatggatgtttgtgatgagcccaaactataacacattttcatcttgactgagaaacaacccatttttgaggaaaaagggaaaatgtaaaaaaaaaaaaaaaacttacaaaaaagactagaatttaggttaacttttacaaaaaataactgtcacacggaaatattttaaaaaatactgtgcttttaaaaaacattagtagaacacaaaacagaacaactcaaaataacagtagaacaactaaaaaacaccaatagaataacagtaaaacttaaacacagtatactgcagtatgaaacttataaaaataatacagtaaaaaataaaaaaa

SEQ ID NO: 303682 - DNA, 3303 bp, Cannabis indica
gcttgagtggatatagaaaaaggctctctttgctgtttctttataattaattttgtttgtattttatggtgcctcatccaatggtggagcttcaatcttgtgctagcttagtcaatacatcagcattatgtgctatagagcaagaagtcaaaggagaaaatgccaacgttatagctcagatttcagctgagttgcaaaaggaaagacagaaaaatgcagagcttatgaaaaggatatcttttcttgaagctcaaatacaggaaagaactaaggagtactctctttgcactaatcttcaagtaagctaattaatcaccctttatttatttattttaatattttgtttacttatttggagtctctattcatcaaagggtgtttttgcattggattatatttcagggcagttgtgctaccccaagggaaaccaacttcaaaaagttcaaaaagcagaagatagaggcagttagtaatggaactgatacagacaagaccataaaaaatgaagactctttagagaagaatcaagaagcaaaatgcttggtccaaaatgaccaaattctagagaaccgtttagtgaactggatgagcatggatgagacacagtttttgcaatttgaaaaggtgaaagatggtgattcaactgcagattgtgatgatactgatgagagtgatgatgaagaggatgattatcatgaagagcatggtattaacaatgatcacagcaataaagaaaaagaagctaatgaaatcacaataacttcacacattgttgtaatagagccatcaaatgaagaactacctgaaacacagcctatttctggtttggtctctgatcaattcaatgtgatcagagattataaatccccacaaactagtattcttaatatggggaggtatactaattgctatgcaggatcagggagcatatcacatagtaaaaagcctccaaaagtggctttctgtcctagagaagtgaagagaataattgtgtctgaagctcttgagcaaaagaatgctcaatcacacaccataaggaagatcattgtgtttgcatcacttgggataaggcatggatgtgaagatatgtatgagttggattttaatcactttagcattttgaaaaaaggagagtcatatgagtctccctctaatccaggggtaatgtaatactttcataattcttatcagcattgacataatttttatcttgttactgattttattcataattttgttttaggagcatgttctgtatgagaatcctcaagttagaaggaaagttttctatccaaatagacagaacccaacattatgtcctattcaggtactagaggaagaaaaggctatgcgtccatcagattctagctgcccatcatgcttatttctatgcataaagtatggtggaaggacaagaaatcttccccaaaatgagtaagcaccattttagcatgctatactatccaacacttaggttgcgtttggttgggaggaatgcaaatatagagatagacatgggaatgaagtaaaatttgttctcgtcttgtattggaatagtctttctttccattttaattttatactcaaaagattattgaacatgtttacttgttgtagatatgttcgacagcgaatgggaaggaacaagctcaagtctttcggtccactcatatgtcgaatggcaatgttagctcatgttcgcagtgggagcttcttcttcaaagcattgggaattacacttctcttcatggctggttttcctgatgatctagttcaaagggaaaccaagtacaggaacctagacttgcttcaaaagtattataggtaaagtgagaaagaaagtgcatactaataagatgaatacagaacaaaaatggccttaataattcatgcatagcttctttgttacaggacagatgaggaggctgaaggagaagagttatttctccaacatccaatcgtttctgattctgtaagcttaattacttttagttttgccatatgttaaaaatctcctggcttctaactttctatactgtgtgcttttgtttctccatcaggctagtcctggttcccaacaactcactgggaaaacttgttctacaaaaccaaaggtaaagaaacaaaccaactccaactccaacagtaagcctcataatcacaacatacaaagatcttcaactcttccaaaacagacacatgtgaattctggacctcctgctcaatttggactaatggggtatacctccattcatacacaagcaatgacagcatatcatcatcatcagcagcagcagcagcagcctcagacaccattagaaatctctaactctgttattcccaactctgctactaatgtcattttcccaaaccaaaccccatatcatcatcatcatcaccacacactctcatcaccgcagccaacaaatccatttgtgccagctttaatgtattggcctcctccaaacacataccctcctgctacaccttacacaccaacatatggttatcatcaatctttcccttcagctggaaattacatctccattcatccacaaccttattatactcctttgataccgaaaatcgtagaaggtgatcccaagattgacacaggcttaaaggatgatgctaatgattctgatagcagttcaagcagtacagaaccaaagaaagaagattaggaagttgtcacagaaaagatataaaatccacctagtctagttagttatatgatccaatgtgtatgtgtgtatctcatctcatcatgtatgaatgaatacatgtcaaataatgattctctactattctatatatagatcctttgatgcatttttttgggcctcttttgctcagtgaaaatatgtaatgtaaattacaaggtgatcatgttcatgtgttaaattatagcttcaaagtggatataatcacttgaagcttggaaaatatcatactgtttgtttctttctgtctctataaaactgtcgtttttaactggtttccttaactattgtcgttttcctaaactgttgtcgtttctaatctgttattgtttttcaattcttcgaagtgtgtcgtttggtgattattgttttctggtacatttccttaactgttgtcgttttcctaaactgttgtcgtttagaaaggaagtgtacaaagtgattttgttgttgttgttgttcttttcaaagagtaactttgtattgaaactataaaaataattaaatgggcattttacaattttgtatacattattttaattaattacaaaatatgtgcaaaaaaacttattatcatttt

SEQ ID NO: 303683 - DNA, 5151 bp, Cannabis indica
aacagacagatagaaagggaaacacaaaggtcaaaagggaaaacacaccaaggtcaactaaagcaagaaaagaataaaggggagactcttgtcttaaagttagttatattaaaagaataaaattgttgaaaattgagctcaagatcctatttttactattttgaaaaatattgggtctattttatcatttaacaaaataaaaagttcaattggtaagttttgcaaaatacagggttcaaaatgacatttactttttttcctttatattttaaagttaatattaaaatttaggtgtgtaattggatatctaattaaaaaacgtatcaaatttaattagtaattggattggattggattatgattttctaaatccaattattgattggattggataaaaagaggaaaaatgttggattggatggcatacccaccccaatctcaaaccatacccttaaaccctttaacccctatttttacgaaccctgctttgtgcgatatcaactcagccctcttttgagctcagaacagttatggcgggcagctctgcggtagcacgtaaatccccgctcatatcccgttttgtgggcttttctcctagacccatctcgcctgcttcttacgcgactcgaattccggcaagcacatatcaggtaaaggaatttaaaagttgttccttgtgtcactcctacgtgacgaagcctgtcgaatctattaatggtggcgctctcaaaaaggattttagtttcttctggattggtttgcggccattgggtttcgacggtttccgagtttctgcggtttcaggtggtgggttagatggagctggcggaaatggcggttctggtgatgggcattatggtggtggaggtgaaggtagtggtggtggtggtggtggtgagaacaattggtcttttctttcatggtagtcttactcttactcttctttttctaaagttctgtcatgttttatctttgtttttcttgttggagtttgagtgtttcacctatctcagctggcacttccgctgacacaacatttttaataactcttaatttagtgttatgagtgaattgtatagcagatacttatagaattccttgctttggcattcatgctgctgtttcattcaaatagacatatcaaatgccaaatggttcttcatgtcattgtactttagtcgacttctaaacaatttgtggtattggtatgaaatgtgttcttaatagttgcttcttctttatgccaatgtgttgctaatttttgtatttaaaaaaactaaaattagatcctcattctgcatttttaacttggaacttgtatcgttacaggtacttgggtcttcttgcaaaatatcccgtggcaacaaaagctgtgacatctgcattgttaactttagttggagatttgatctgccaggtaaattctgcagtgtagaaaataatattatttggtttttcaaggtgcacttttttttcttcttccttccgttgctatcaatattactgtgtgaatagactatgttactgctctttagaagatggaattaaatacactagaatcaaaattctcatgtcattcttttcaaatttggataggttactgtttttttgttcttgaaaatttcacattagtctttttgttttaatatatatatatatatgtgtgtgtgtgtgtgtgtataagctaccttctgctaatattatcaaagtagacaagggtgtggaaaatctacactaatatcacttgtacaaaacatgatacagccacaaaagaaccagagcctcttagtatactgtcagtccctttttcattttatattcctaggaggtttacaaaattaaaaaaaaaaattatctttttgtcctaattattattaggaaaattggaaattagaacctgtaaagatttaataattagtttctttgagcatggaagactaaagtgcaatcatataaaaatcaaaattttaaaaaaattatctttttgtcctaattattattaggaaaattggaaaatagaacctgtaaagatttaataattaatttatttgagcatggaagacttaagtgcaatcatataaaaatctaaatatagctacaagtctacaccgatgttaagtttactccttgacactgttgtatttgtatgagatattttggtagacaaatttttattgcacatgagagtatctataacttatggtcaaggttttgtttgttgattttggaaacgtcacttgtaatgtaataacaaatttgcacgatttcttttttcctcagttgattaatgttttataatttggctaggagaatatgctttaacttatggtccaggtgttgtttgttggttttcacttgtaatgttttataatttggcttggaatcctggttttgctgctctactttgcacgagtattacatgacttctcgagtaccctattgtttgaatcagattgcaattgatcaagttccatcactggacctgaaaaggacgttcttgtttactttattggggcttgtgttagttggtccaacattacatttctggtaatgctccagactcatgtcttgtatttgtaattttatgtatagttgtaaccagtttctactgcatttccctaaaatttgctgctaatctacagttcaaatgtcgtggttgattaagaattgttatctggacatatttcttttgtaatatgttttttaaccttttagtttttattattactataggtgacttggtaaaaaattattcagttcattatgtacacaaaaaatgcatacatagtttggtaatttatgtaaccccaaatgtataggacgaaaaccaaaacctaaatttggtctagtgcattgattattatcatattggctctgttttgattaattacaattttttttgatctgttgattacttactattgacatatatgtaggtatttctttctgagcaaatcggttactttgcaaggaggatcaggagcacttttgcggcttttacttgatcaggttatcttctaaagtactttggtatggtcaacaaatgacaataaattttaatcattaatacggcctttgaatgtgatgcatctttcttgcagttccttttttctcctatatttatcggtgttttcttatctacattggtgacactagaaggaagacctgaacaagttgtacccaagcttcaacaggtgttgccgacgactttttatactcaagcagtataagtactttttttttctagtggtatatattcaatttacttgtgttttctaactattccttgcttgtgtggattttttttttgttgcaggagtggttttctgccgttgttgctaattggcaactttggatacctttccaatttctcaattttcgatttgttccacagcaatttcaggtttgaatggcgcttcacattcataagtttttccctttttcaaatacatctatgtatacttcctactaaaaatatattcagacttaataacgatgcaaatgatagtgggtatgctattgagaacctctttttcatatgggacttgaagtccttaacagtgatataattggtgattgttccaatggtaatagtttggtttcaaagaaaaagggatccaaggaggtacaaaatctgcaatttaatattaattatggagaaggtagggccgtagggggtaggggtaataggggaagaagataggtttatcatgaagatcttgactagaatgttagaggcagcgtctttgcctttaagagaagggcagtgaaagaagttagtgtaaggttatttctgacattttattatagtttagcaagaaaaatagagaaggtgattgacaaaaagtttacgggaaaaaattgaggctgtttgttaatgtctcaaaggatttacaatttgttcccaagcaattcaagaagcttggagttctcccagagtaattttttacctaaaaaaatcacaaattaattctttgccttaaacaaatgattagccttctatttaaccatccaaagaagcacgaaattccaaaaatccctcactatactctttcactgttttgttatttcaaaactcaagaaactgttcctgaagtgatcccttgctagtatttatgaacttattcaataaaagaagctcaagtcctcccataaaacgatcggctaacacgtcaaggattttccctcgaagatggtgacaatcccttctgccattttgtcattactgaactgttagaaagcaaagtatttctcacttggagcaaccaaccatcgaggtcggtgctgtcaaatatggatgactccaattgacagagtcagaaggcacgtcgatggtcaaaaatggagtcggaagttaggttttgttgttgctattttccctagtccaccatgtttcgacctccccgagagcattgtagtccctgttctgacaagcatcattttcctggaacctgtcgcctatttctattgtgcaccatttttcatggcacctgaactacgaagattgggttcaacaatgggttctacgaacttggcttactcacttccttcttcttgtttgtcgataatttggccaagaattaagaatcgacttcacttcctcccaaaattactgcatatcttcccatacaaagtcgacttcacctttaattgtgtcattttcatccctaactgtcgcacattttagatttggatatgatggtattttgacagctaaggaatcaagaagaattaaggctattgattctttggtaggccatctttccatacaaagttgacttcacctttaattgtgtcgatttcatccctaattgttcgcacattgtaggtttgaatatgatatgtggacgtgattgttatatgtagagaatggtgaatcaaattgtgttgtattctatagaatagtatatatttatatacaaaattaggagactaaatggaaaactactaaatacaagttaccttaatttttacatttaatattctaatactcctcaagctggagcatagatgttcatcattccgagcttgttacaaagataatcaacccacaccctattcaaagcttttgtaaaaatatctcctaattgttctccggtcttcacatatcttgtggagatcaggctttgttgaattttctcacgaacaaaa

SEQ ID NO: 303684 - DNA, 1256 bp, Cannabis indica
ttaggtagtttaaattttagaaattcctttccttgaatttaattattttctaaaatttcaaaatctcttataaacatcttatctatttctggttcaaaactagaattttcaaagttttttgaatgggaaagcctaaaattactagattttctattcaaatcatgacctaaacatccaaaaacaattttagaaattaatgataagaaagttaggttgtttaacaaaaacttgatcgagaggataattctgtttgctctagacgctttattgatgagattattgagggaaaacgttgtttcttacgagatgcagcttggccaaaaccccttagtttaattgtgtatccagtagcgagtccattatttttatccaaagttactgttgcttttctcaggtcaattagattttgagatcatgcctccaaaagaaaataagtctaagttaccctaaaacccctctattcaatccaaggctcaattatttgagtctagggttaggtcactcgcttcctacatggaccccttcttaaagtcatgcgacattaagaacaagaagggttgtcaaagtcgttcgattaaaccaggtgagttcagtagttttcccccaactcgttaaatggaaaaacgagagggaggttgcagcacaagtggttcttcagggataggtgcttggagcattgaacatatcagagctggggccattctccctttaaattaatatttcaaggattttgtaactacctcggggtcgcgccttctcaagtcgtccccaatacatataggatcttagcatgtttgaagatgctatatcatattttgggatgggaatggccgacactattgaaaattttgtgttcttatagtttaaaaacatgccctgttaggaagaattgcttgggtcacttttattatctaggtactcattccaaagataataagattatagtcaagccccctaacaaaaaggagtttaaagagtgatttctctgggatgattttttaaatttattttgattttttaaatttatagttttgattatttcggtagtttttatgtaaattttagtcacaatttatgttttgactaaaatacaaaataaaaaacttctttaaaatatacaaatttattctttaaaatataaaaatttatgttgttaattttagtcacaatttatgtaaatttatgttgttagttgttatgtgaattttcttaaaaatacaaaataaaaaattgctttaaaataataaaaaaaaaaa

SEQ ID NO: 303685 - DNA, 1547 bp, Cannabis indica
acattagagattttaatccaataccaaagactttatatacgagtaacactatagaacctccaagttcatatgttacttaagaaagtgaaccatcaatatgtaacttccaaaaacgcatacgtttagatattaactaagaacaatcgatattgttctctcatttattttgtaaaagttttctagcttaataaatgtaattaatattgtaacagtcttgtctgaccagtattgtaattcaaataatcactcacttcatatataaatgagtgatctaattaaaaataagaataatcaaatctcttataaaagtggactaagcataccaagctctgattgcaccactatacttttgtgtctttctttatatatatattgttttggcttagttatttgttatttcattttgagtatttgccactctagatgtctacttgtaattctgtaagtgagtgattttgttcatctcaaatattcgattgtggtgttgtttattttcttccgataataatatgtaatttatttattttttaaaaaattgaatataatattttataataaataatttttaaatgatatagaaaagttatggggtgagctaaatgtatgagataaaataaaaaatgtaatttggtgaatattttaaacaataaagtagagtgaagctatgagtgctcttatgatcattttgagatgacaaactaatcgaaccaaccatatacgacaaaacagtcctttagtttttttttttttcccgctaagaacctttagtttgcatttaatgtcattgactatccttggattcttctatgtccaaaatatatccatagagaagtgctacaatatactatagtattggaacttgagggaggtggttgattaattttgtaatagtatcattctttaaaataataatcctatcctttttctactctactactctacaacggtaaaatcgtgaaactacgagactcaaattgccagaacatttaaagttccatataattatgtgaaagtttaagtaaaaagacacttatacacatgattttatggcatatttatatacacatgttggaatttttaattaatttttcttcattaaacattcaaaattcaacaaccctaatccactcatctgttcaaaaaatgtacctttattattattatttttaagtatcaccaactatacatattaaaagttttttcttctagttttcaaattcaaaaatcaaaatatttgtcccttctccttaaacagcattatatgaattaatttgaacagctaaaaatgtagatttttttaaagagacaatacaaatatacgcaatgaactgtcgcaaaaggcaatgtttttcataaatggttgtagaaatctgcatgattgagatttatatatacatttttggccttccaacttttcctaccaagtttctaaaatttggagtttctttatttgttacatcaaagtaaaacatggagtttcttttgtaatgacaggtctagttttttatctaaccgaatgtatttcaaaaaaaaaaaaagtaaaacaa

SEQ ID NO: 303686 - DNA, 712 bp, Cannabis indica
aagttcatatttagggtgtcaatcaacatacttgtgagtagatctaagatcctggtaaaataatttccaacacagggtacgaactcttttatcctactgttgttggaccgaaatggtgtaatggggtttggagtagattaaatacccccaaacatagtgtgattttgtggttagcaatgttaaattgattgaaaactaaggacatgttgctcaagtatggaatgcaaataaatgcctactgctgcttctgtgaggaacaccatgaatctgtacaacacttgttttttgattgtgctactactgtgcacaaattataggaaatcaaaagctggctgtcatggaaagcggtttcaacgaaccttcccaccttacttaggtggattgcaagagcaaagatctccaagtttcggaaaaaggtttataatgctgttattgctagtctggtatataacatttggaagctgagaaagaacataatttggcagggggcagctctatcatcaaaccgaattgctgaagacacaaaatggtgtgtcaaaacgagagttgcattgtttacaccaaagaagatcaaagatatagataaggaatggttcaatgaactataattgtaaaatatatagataaagaatattgatatatagattgattgggcccggctgggtgctaataggttgtaaagaatgtttgtgcaatataatgtcttgattta

SEQ ID NO: 303687 - DNA, 2725 bp, Cannabis indica
agaacaattacaatacaaaccaacatccacaagacaacaactaaccgactcacttacatattacgaataaaattaaaaacttgttggtccctcttagagagtttcttccgatccacaagcaataacctagtttttaacactactctaatcaaattatccacataagggatcataaacactttttactcaaaaatacaagtatatattctggttccaccatatgaagtatattgttgtcgcacaagcattcacaatatcactatgaagcaagctacgagctcgttttgtattcagccacatcaaccaatatgggtaagactctggccaaatgacaataccaagccaagactaaataacctgcaagagtttcttaaagaaatcgacactaaacgaaaaaatgagtatgccaattatctccaatatcacacactaggccaaatgaaaagtaacagtgatacctcttgtcatcaggtgatgtcttattaacaagttattatggaaggcttgccaaatgataaatttatattttggcatggataagcgacaccaaattatttaacaattatcgaccttaacataaggagcgagaaaggtttaaagcttgcttacccgaaatctacactcttaattttttagcatctaggattaactctcgtgtgaaaacatctctatggttgaggagtttatgccaataccaactcacatctcctttcttatcaacaacacaaaaatcttgattttttatatagatggtaatgatccatttaacccaaatagcatattgcttcatagaaagagccttaatatacaaagaaatcgatgctttattccacttggctccttcatggaaacctaaactgccatagttcttagatttgcaagcaagatcccacgatgctagatgcatcttactagtattacctttcgcatcccataaaaagttcatgtagagtttttcaatatccttgactaccttctacgggagcatacttatgctcattgaattgcaatagatgcccaacaaaactgaatgaatcaaatgcactctaccagcatacgagagatatcgacttgcccaattatgaagcttcatttgaatcttcttcagaaaatattacatccattactttttattttttggtcttattgtcacactgaggtacttaagaataaaatgactctctttaatggaatcagatcccaaatggccagtttaatcgcttcatcaaccccaccaaagtaaatatgtgacttattcgaattggtttggaggcccgagcagctgctaaaggtagcaaaagtttcttgaattacatgagcaacttttttcgtccttttaattactaaacatgatcagataatcagcaaaacaaaaactaactaactttaaaagtttatacattgcatgatacctaaaatttgagttatatggaagcaaaaaggcacattacacactaattacgtagcaaaaaggtaaaacaacccattttttttcaacaattttcaagatcatttgtgcagccacattactctttctagaaatgacacttcgaagtttcctcatttttttagaaaatcacaattgtagcatatagtggtgcagccatgccaacaacctatgcaatcgcacaactcctctagaagcaaatttttttcagttctcttcatgtttgatcaaatcttcaatatttttacatcgtttccactccaagtcatactaaatccatctaacctgaagatacattgaaataagtataaatccacacaaaataaacctaaatacctaaaacttaacctaaattaacaccttaaaagtgagtctaaaactcatttacatatgcttggttttttttctttggggatggaaatatataatatactttaaatatttggctaaaagaaattaaatgtttatatatataaataaatacttggaaaataaaaatataaatcatttttttttaaaaaaaagtactaaattaaataaaagataaaatattgaaattaacacaaaacattaattaaaaaaagttaataaatttaccattattgaatagtaaggacttaatattgttcaataaataaaagtttaggaactaatttgttaaaaataaaaattaagtgacgaacgtgccaaatttaatatatttgaaaataatttaccaaaataaagtgggagaccaatcgaggttaactcaagtaatcatagagggtatgagggtgtgtgtgtgtagtgagtctgaggatcgagtcctacattatacaatatagtgtatacataaacgacttaaataaaaaaaaaaaactaaaagaatctagttttagtaccccattcatgaagatagggcttttcttcacccaagcttgagcatgaatttggtctgccagtaaggatttctaatgccacaactccaaaaaaggtgaccaagcaacacaaatgaaaaaagttcagtgaaaaaagaagcacaaaacaaagtcttatcttaaagaaagtcttacaaggttcccgcgagtcttgtacttatacgagtcctatcatcataaagttttgcaaaaccgaagtctgacattttcggagacgagatcagagtcaagaagaatgttgctggacttgacatctcggtgtacaattcgaattcttgactccttatgacggtaagctaaacctcttgctatgcctaaagctaaatgtcaaaccatattgaccaattcaaattcaagcttt

SEQ ID NO: 303688 - DNA, 1464 bp, Cannabis indica
ggtgtttctgacaagtcagcgcgatatagtcataatcgagtatttcgggccgaaccgggttcgaggctgaaatacatttttaggattttatgttggcattttataatttattgaataattttaaaaattatttaaatggggtgtgtgattaaatgacttaattgcccttgaattgtgcatatgctatgttatggcctaggggcattttggtctttttgactatttgtttatgtttcaacaaaaatgaattttgactgaaattaaaatgtattttttctggttttttccagcccttaaccgacccttctatctctctttattcttatctctttaaatttttaatatttgtgaattgaatcttgaatcaagcttgtgttgtggagattttggtgcttgagattataaggaacttgaggtagtcttttctaccactttaatttgaattttgtttccgaaattaagttgaagaaatatgttttacttgtgattttgttcatgtatgcatgtgggtggaaattggatgaagtgtggtgttcaatgtatgattaagttgttgagttgttatattgttcttgatatgttttagatgagattctagggtttgagtttgtggttggattctgagtattggccctgttgatggttgtgttcaagcataaagatatggttttgtagttcaagcatttgaatggaacttatgttgaattttagctccagtttgagcttgctttgagtgtgtttaaatatgatttttagatgattatttttgttgtgaattaaagcttaaatctagtgtctatactctctgtttgatggatttaatttgtggaagctaattttttgagtttaggcttgtttgctgtgaattggtgtgttttgtagcctgaattcgaagttagaaatcggggtttcctgggtttggaacccaagcgccgcggccccactctttgggcaccgcggcccaccccctttaaaatcctgagttttcaacccaagtgccgaggccccatgtggggagtgtcgcggcccgccttgtgtttttgggcagttttgaatgagttatttgaatattcgtaactttgtgattcagactctgttttgggtgttctgagtattgttggaaagcttgttccgagctctatatgtttatctggatttgaatgccaattttataattatgtgaaaatagatttagggattaaccctatttatgaatctcagaaattgtgactaggaatactggcacttagtcaggagcacccagggatttagaatctccacgtactcgggacaacgggtaagacagtagttagcacgtagagttaagtgcggtggaactcatgttgaatattatagttgtgattaattaaataaaactaggattagggttattaccctaaagtgagcgattatatggtctagggttatgtaacaccctaactagcataggcgtattacgtgatt

SEQ ID NO: 303689 - DNA, 3926 bp, Cannabis indica
gggcacaaaacccaacaatgtggtgcagcttcagatttctcattatgtcatgcaagtggtcgtcagttgattagtcactggcatatgatatcatttaagtcataccctcacagtgttttaaatgttgactcttaccatttgcgcgcatgctaggagtatgtctagggagacgttgaaatggcagagaatcgagtgaacggatccttcacttaactatcccttttctcaaagcatgccataatggatgttaaatggttgagtcgatgcagtcttcttagctccccatccgtcatatcttcaaacgccattttggtgaatgatctgagttattcgcttcgtgcggaaggcactcctcttggtacatattaaatacccacaacattttcattgtcttttaagtctcaaatttttttgctctttgcaccagagtttttgcatctttctttgctttgcaaagtttgatcaatatagctagtgttgagtgcacactcaaccgaacgtgacaaagtttggcttccccgtttaacaccttcatttatcattgggtaagtatttttgttgctcttgctagttgtatacagcttcatgctcagcgtacctaagcttatcttgacttggtgccatggtgtacgagatttttgtacctttagaatatctgtctttttcgaactttctattacaaagagagggccatggtgttttgaccaaacaatcgtgtgctgagggatcgttcctccttttggggaggtcctcttcacacactgtgaaagaacgtccaccatgggctaacagactcttgtgttgactttattgtcctgaattgactcatttaaccctgcactaactatttctataggtgtttcctggtttgtcgcattaagtttgatggagggggctagttccttaaaagtcgctggtggcagcagtttttacgggaagataaagatgcaagagattcttgttgatactagtgcccccaatgcatcctcctctgctccaaattcccatgaggtccacctccagcaatatgggccacagttaaggcgaggccagccttgtccacgctgaccttctgctcttcctaaaattccatctgtgggattcacattccccacaaaactattcctctaaatccccttgcaatgcagagagaggaggggatcataagggcgttggaagaacgcctcgcctcgaagtagtgaagggatttttacacaaacaggttagtgtgctttaaccatgaggagggctgaagtctcaaagggccttcatgcccgaactcgagtcagggcaacagtcaaggtggaggtgctagagcaacatctggcacccaaagtggggagtgaggctgcaccctttgcagcggaactcctagactgggtggcaagtaatgcctccaagttgcctttggagtcttgggcaacttgcagtagtattgatgcctttaccctagctcatgccgccaagaaataagcagttggataaggttttgaactggtctattatgacttctgccattgtatctagcatttttatatttccttactgcaacatatagctctattggtggaaagagccataaaagaggttggtacgtttgtcatggagcttgagcatgtcaaggttgataactgtaaattgcgtaatgccaacgagactcttgttatcaaactcgtagaagccaagactcagattgacagacaaaagaaggagaaccagttcctggaggataactatgccaagaacactcgcctcatacggggtatgagagtcgttcatgatctttacagagagaccactgagaggaagccaagggtaaattcttcccatccatctagcagtgccaaatttgcgtatccagttgaggcagtggttcttcccaagtccacaagcatacagttgttttaagctctcccccactttaatgttttcatttcacgaagacaatttaattatgccctaactgcgggggccatttgtaatcactctaggtttttatccttttctttgaagcttcaattatgattcacaggcttgttacactgttttaatggctatcacaataggttgttttgaagtgtatggctccaacgactagcacttcaaacctttttaccagtctttgatccttcagttgatttaggaagcatctgaagaaattaatttcctatttttaggtaggatcactactgccatagcccttctcagtcagtaccatatttgactaattcaatatgctgacatcacaaactgatctttaccctactcccgcgcaaccagatagatgtagagccttagcactttttgcatgccttcagtagctaattatcaattcagtatttttcctcatggaatgctagactctaggaattttcccttgtccaggaatcgagctgaaattgtgataatagttaagcagattctcttatcccataccttaacaacacgagcctctatcccctataaccacacatatgttttgaggtaggcttcacacctcatggattttaggcaatattttgtgcttaagatagggctaaaagcacatagtggttcaaatgaggcttcctcacccttaccttgcaaaagcgcaacaaataagatcttaaaaaatctactgaaattattgagaaagaatctgggcaaattttttcctcttaggaaattttgccgaaaatgcatctcatctcaaggtttatgctaattttttaattttgagaagggattcaagcgtgtctttccctaaggaaattaggttaaaaacacctcttgtttctggtttaatatgcatggcgcactaagaactctgataaaataagtgattatgatgaactgttggttttcggggcatacgtagctaggaacgacatgcgtagctaagcatgacacccccaaatgagctaagaaatttgatgcctcgaaattctcagtcatttggtcaaaatgtaacccgtggcaataatgcatcacttaaggtaattgagggggagatataagcgcaagccaaagttttggctgggctcctttttgggaggcacaacctgactcatgctgatacccaaatcgtgtcatctccatctagtgttgtccgtgaagggatttttgcaaatgatattgaaggacaggttgaatttaacagtggtgtcacgacttccacaagggatggccttcgttacactttcaagcgagggcttcactttcaaaactgtaggtgaaagctaagttgggtgctcaataaaccctaagtggttcctccctctagaagggagggttgaagacacgtcaaacccccaagtaatgtcttcaaccaaaagtttcaaaaccaatccgttagcaagacacaaactgcgcggcaacagcacacatacctgtggaaactttgtagagtaatgtggcggactttggcttctatgaaagaaggctaaagttgcactaaaattcaagcaattatttcacggtcaagaccaacggtgtaaaaccccactgggagtgtgatagacttcaagtagtccttcgcttcggaaggaggattgaagacgtatcgagcccccagtgatctttcatatatggaaaaactcacatgcccgttagaaccatgttgaactttatggaagactttggctttcgtgaagaaaagctaaagtcacagtaaaattcaataaatggtttcacgttcaagaccaaaggtgtgaaaccccactgagcatgtgtaataccctagagttatgaaatggattagaaaaaccctaattagataattatgaataattgacgaattatattattatatagttcaatatatgagaatttatttgattaattaccccgttggtgagccacgggcattttagtaattatgacccgagaagggtaaaatgatgaaattaatttaattacgtgcttaatagaactatattattatatag

SEQ ID NO: 303690 - DNA, 2623 bp, Cannabis indica
atataattgtgattatattccattgtgctgacgacactataatcatgaataaatgtatatatttatatgttctggacttaatagaatttatacatcaaacataatcatgaaataaatcatgtgaaccatgcaacatcaaatgatttctgatcttttattaattattaaatctgattatattgaaatggattttatttagggcagacaacccaacactatttcgaccagaaatccaaaatcctaggcaaggaaattaactatttatgtgaactcgcctccattggttgcttctccaataacttccccaactcttggccttaatggtcatgatgaatcccattcatttgaccacaccttgtcaaaatcttatttttctctcaaaggtgtttccaatactgaaagagtgattcttccattgccaactatgaactcttgaacaaggtataggacctctagattgaagaaacctgaggtgctccatcatcttgggttgtcaaaagaaaagaaatttgtaccttctcatctcggtaaaagaacctaaaagaccatcctccatcacgttcttcatccaaatctaaaccaaaagaagaatcttaaataattgattaagaatcagaggctgggtctgatataagtgaggagtatcaagcaaaagagccatatgttgatgattcaggctctgaaagtgaggaacaagcatatgaacctactactgccgaaactatcactgttgctcctcaatagaaagcccaaggcaaacgtcccacggtttctccaaaaagtgctcctcctccaaagagaaaaaggccttctagtatgactcttgaaagcttcaagcctcattctcattattttgttataatgatcatgctagaggtacggaattttataagagaatgagttttactattgagaaaaaatttaatgtgctttctcatcagccattcggggttcttaatctattgaaagaaagacaatggttggatactttgatcagttttgattgtcagagaattttatgctaacatatccaaagagaatattgatgagaactccttcatgtttggggacgtattttctaaaggacactggtattcctttatcgtgaaagatgtggttgatgctctttaattacttactggagttgaaccaaataaagtggagtttgatcagcaaaaagtgtttcggtatctcactgatcataatgatattgagctcttggactctatgcacaagtctcaactcgcctattatcatgtcatgctcatcaggtttgccctgtccaactggtttccatgctctaacccgataaatatttccaatgaacttgctttctttttatataaaatttctactggtgtaaaagttgatttggctgatatgatttgggatcaaattgtcacttcgaaatggcaagaaactaaggcttaatctcgtttttcctcacatgatttataagattttgtctgaccaaagggaattgattcttgaaaatgggtccattgaagcactttttgtttttacaacctttaaagtaccaaagaaatctcctcaaggtaagagtttaaagaaaaaggctcgatatgcatcccatggtgctccaaatgacactactgtttcaacttctacttctacacctatacaaatgatagaattcagcttacgtttggacagaatggagacaagtcaagctttactcctcaagagaatggacaacatatgttctttcaatccaatggtgatacttaagtggttcatttattttttcttaatatctatgtttttttgaactattatgattcttattttatgttttggttgtctttggcttcgtgatagacaaaaaggggaatagtatttattttttgattacaattctgaatcctcattttcggggcaattgtttgtttgtggtgtgtgaaattttacattaaaaagttgtcttcttttatttgttagtactgttttcatgtaagggagtactttttataccctttgttttgtttctaacacatcatgcatgttttcttcttataaaatgtttttcaatcaaagtaccaattttggcatatataattgacaaaatgattttattttatttttatatatttcggctgagttgttgtgtaacttaccatgtacatattttattgaattatttcattaaatgtgaattaagtgtcaagctttctaaattaggaaagtcggacacaattggtaagaaaaattgattctttattgtagttcttccatccatattttccattttattctaatctaatattcattttctaattgattttatcaaatcttgtgtaaagaaaatcgaaataaaactttcattttctataaaagcaaattcgcacttactgctcacgattctataggtacaaaatcaaaaactttttggctgattgaatattttttagggaagtttcttgtgagttttagtattgttcagaccgtatgagctatctataatgtgtatatttattataaatacacattattgtagttgttgggttttgtgccctaactaaaactctatttcaatgtaatcttgaatattcatttatcaataaagaaacaaatttatttcattacttatttaatgtattatttg

SEQ ID NO: 303691 - DNA, 4118 bp, Cannabis indica
tatctaattattaaaactttatcttttttgtttttttttttgaaataattcatctttattatttgcaatccatagtgattacaagattaaaatctagagtaacatcactacttctgataacatgatcaacaactaaataggatgctcgagctaagaaatgagcaacactatttgcagaacatctaatgaaattaacataaacctctcgcaagtcatttaacaacatcgtacaatcagaaataatactcccaaagtatgaaactataggaatagaactacggaacgtttgcaccacagtaagactatcagtttcaatgacaactttcctccaatctttttgtttaaccagtcacataataatttttcttaaataaattcatataatatcaaatataatttactaaagatagtataaatatgacttagtgattctgttaaaaaaataacagttacacttattccaaagacatattttgtattgattatttagctgacaactttccaacttaacataaacatcggataacaccactttttaaatctcaagttttaatgtttggtaacacattgtttggcacaaatacaatctaagacaagaattctcaaacttctcaaatatgaggggtgctatagacaaagacaacactatgggaacaacatacaacacttgagagttttttttgtcaaaggtctggattttcatatataacatgacgtttatatggcttttatgggaaacagtttaaaatatgggaaaaagaaagaaaagtttacaatatggaaagtttgatttcatttatttaagtcatttccatatcaatcttcatcaattgaaatattggtgtgtcctgcgaatttgcccaaataagcaatcaaatactttcaagcacgtttatacaaccagtaagttgtttcatctcttctctggtaagccgtttcttcttcttctaataccaatttcaattttaattgtttcttcattttcttatggattggttgctggtttttgtggctggattgttacgttttctgatcacaattatcggacgaaacgaaaccaatcacgttaatattttggatgaataaagcaaataatagtcacttaagcaacgattttgattaaaatttgttacagttacacatttttcaactgagttgagccacctgattaccgcaaggcactatcattatatatgtgtgaaattacaaattgagaaatataattctagctacaattcttcataaacaaaaaagacgttcatacatgtattatttattgtgtgtggaagtaataaataacgaaaaataatgatatatatatatatcaaattggtacaaaaaaaatacacgcacaaaattacatagtttggtaattagcctactttacggaggcaattgatattattaagctaagtagaaaacatacagaatactaataatatctctcaagtatttttcaaagtgtttctccaaactcactaaagtattttccaaagtttagctgtacaaatgctctctttctcagattttctaagtgaacccgattgcaaaaccaattgcactcagttgctagtgctcttcaacgagctccatatttatagaaggaaaacctcacttcctaaccatatgtaataatatgaggtagcttctcttccaaccatatgtaattaatgagagaaaaaaaagtcaatagctatagcatagtttcattgacaaatgtgataaataataagttccaaatctcttgattattgaaccatatatttgcaacttcaagacaatttgacttttgagccaaaactaacaatctataccttggcgaaaaaaccataattaagctctgcctccacatgcgccctaggcactctaagttcgagagatactgatcaagttcaagttgtgtatttttggccaaccatgaaaaaggattgcattgaatatgtctggaagtgtgaacaatgctagcgctatgccaaggttccacgagctccatcaatttaaatcaccttcatgagctgacaatggcccttcgctgtttggggaatcaacctagtagactctcttccaactgaaaaagaaggagtcaagtatgcaattatcattgttaactacttcaccaaatgagtagaagcagaaccaatgaacacaatcacctctaaaaaggctttggaccttgtcatcaaaaatatagtatgtcattacagccttccgtagaagattgtattagacagtggaaaataatgcgatagtgatcactttactgacttctttgtcaagcatggaaccatcaagagtttcttagttgtggctagaccactggaaaatggccaagtggaagtcttcaacaaaatcctaaagaccacgtcgaaaaaaaagttgcaggcatgcaaagctcattggcccaaaaaacttcctagatttatttgggcataccgaaccacagagtgaacttcaacggggcacactccgtactcaatggcatatgaatgtgaagcagtcatccagtggagaaaattgtcccttctcataggtgagaaacttacgaccctactcggaaccacgctctacctcaagaatccttaaatttaattgaagaacttcgggagcagtctcatgtccaactgaaaatgtatcaagacaaaattgctaggcactttaactcgaaagttaaaagctagacatttgaaattggcgatctcgtcctaagaagaatattctcaatatctcaagaaccaggagtgggggtcttaggacctaactaggaaggatcttaaaaaacccaacacaaagtgggtaacagaacgtaccagctaaaaagattaaatggatcagaaattctacgagcgtggaatgcgtaccacttgcactgatactatctgtaaattgggggtgctcgaatccaaatgtctttttctttaaatatatattttttcctttccattatcctgtatgcctcagggcgaaaaacaatttaaatgaaaccagaggatttatatttggagcataagttatatttgtataaattattttcgatattttttaatacaaaccatagtgtatgaagaaaatggatgtataagcttgtattatagtatttatgaatttatgttgtatagtggtaaagttggagttagggatcgaggtctaagggtcggggtttgggccgagacgaggtccgagtttaagatcggggctgtggttcagggtaaggtttgaggcctagggtcaaagacagtgctagggtccaaagtcagggtcgtgtcaaggctcaagtgggagttagtattacatatgatataactaaaaatatgtattttatttattttcttaaaaaaaattaactatactattttataccaaacataatataattgaacacaatctctcaaaactaaatatagtattatattgctaaaaaaaatatagtattgtattaaaataatacaatataatacaatgtaccaaacacccttataataaactacaatttactgtataaattatgattttattacaaatctccttatgttatgactttttattttttaaggtatgaattactattttaatactttattatgtgttgatgttcataattaaagaacaaatttaaaaatagtatttgattttaggttagtaaaatagtttttttttaattaaagttagtaaaatggtaatcctcttaagaaacatttctctggactttggtagggggacccaatgtcaccatttttatttttattatgtaatgaagttttatatagactgctttctaagactttgaacaaaaacatcattcatgggatccgtatcttcaagaatgcccctgcgatctctcatcttatgtttgttgatcactattatattcgctagagccaacatctcagaagcagaagcagaagcactgattgattgcctttctaaatttgagaggtggtcaaggcaattgtgtagtagaaaaaagtgtggtattctcttctctcttaacatgttcttggctaagaagaaggaaattgaaaaaaaaaaaaaattgttgatggagttgtacagggagcggaatctcatcttgggaaccccttttagttccatcgaagtaagaagttaaacttcgacttcct

SEQ ID NO: 303692 - DNA, 2584 bp, Cannabis indica
cttcaagcattctcattgatatttggattttgaatccccattccctattaaatagtggaattcaaaattttaagtataaaaggagaagaggaaagatgatcatcttttcttatcacttatgttttccttttcaacttaaaatttagatgactccttaagtgaattccattgatttaagatactgtacaatcatgctgacattggaatatcaacatatactctgatcattggttgttgtctgagcattgactctcttgtcacactgtgtttatatgtgaatatagatgtagtctttatcttctcttaggttgtagccttgaagttctttagcattccctccactatgtttcagtgaaggttgtattgttcatctcctcagttttatagcgtaggaggccttcgtcaactccttaactttatagtgtaaaaggcattcaacatcccctcagctttgcagtggaggatgccttcatcatccccttagctttacagtagaagaggtcttgtcatctcctcagcttcacagtagaggaggtcttcatcatctcctcagctttacagccgaggaggtcttcaccatctccccaactttacagcgaagtaggtcttcttgatgactgtcaacgatgtgttgtagtagtcattggttgttctttggtcaattgaggatgataccctaatttaatatacccaagatgggggtgatgtctttcccgtctcaagtgcaccttagagtgattgtaggtgcggtctccattttatacttagtctccattttacaggtatgcctaagaggagggtgatccccagtttgcctattccataaaatccattcgctcatgctagtgttcctagttctatcactactaacaaacattgtgccattagcgtagactactgcattctgtctgacgcctcctacagtttatcaatcgctggtgatggggaatgagccactcgccttgcagttggcagagtttcctttagcgagcagttacttacatgcagcgccacccttcctcttcaacctttcattattacaattctagcttacttcagtattgctcctctccaattggctctaatctgctacataatcttgagatgctttgctattgccttcaaaggggtgaatgatcactttcctcttctagaggagttccgctcggtctacaacattgaccacagcacctctacaaccgagacttattttttccagcgggtgagcaccaaggatgttgaatgcttatcagggatgccctctgaaattgctatcaggacatccatatttttcatggttgaaggcatgcctcctggcatgatcttcgagtttcaatttttaggtgaacatttattgcttagttttgctatctttgtttggcatttcttactttacagcaggcttacacttaacctctttattatagtgacaaagaatattcctaagcttagtgcaaactcctacaaggccttgcagaagttctataacctttcttacattgagaggaccgccaatcatttatttactcctaccaatttgaagaattctgatttagtcaccattttgcttccattttcagttccagcttctatttcaaatcctctacctcagagggtcaagatgttccctatgtccagcttttcactcataattaggagtaggagagtaggaggagagggttactccacgtgatgtttcggctgtgatttgcgagggtacgactttgcccacttgctcaggttgcgactcccatatcaaatgaaagaagaaaaagttggctgactctaaaactcagaaaggagattccatgcctcctcctccttcctggtctagaagccctctagaccaagctacgcaaacatttgactaattctaagaaaggtgtcacgcactccgccttgaagctcctaagttgcacatttttttaccttcccacgaagtcttttctttgcgatgtttgttcatctctctccccctccaattatgtcgggggagtagcatgacggggtggagcctgattttgaatcttctgatatccttgtgagcgatattgggtgaacgatcccatggatcaaggcctgtcgtaagcctatcagtctaaggggatggacgactgttctcatagtggaatgaactaagatggtttgggatatgcgtctaacttctcattagaggcttttagcctagagcttttattctagtcttcttatggtgtcaaccaggctttctctccttcttctgttggtcttgataacttggcttggtccaagtctcaaatggggcattctttgagttggtacaacaaatatcctcctcagtactgggcttggctttacaacttgtctgaagaagactgtcgagaatcttgcttcaacactctatatgggttaatgcctgcactactttcatttgtatttattcctttatgttttctaacttatactctggtttgtcttgcatacttctatcatccaacaatagattcatgcctctaactctaacggtcgtgatggtcttttgtatctcaaaacaactttagaagaattagatgcttcaaacacggagctgttggaaattatttta

SEQ ID NO: 303693 - DNA, 5203 bp, Cannabis indica
tttttagagttgatctgcttgatctcgataatcagaaatatgatcaagcaacgaagccaactttagtagtgaaggaaggtgtaggatcccacatcgactaagtggctgtaacgtaaggctaatgatatatttaaataatattttaaatgttcattcattttattattctctacgtaaatagcgatataattctgcttgaggttgatgctatttgatttttattaataaaatgtactaatagaaaaaaattaacaaaaagaaagtaatttatttttctaataagtaaaaaaaatcaaacataatatttaacaaaggaacgtatatagatatataaatatattagcgtgacatctcacattacaacgacagatttggatagattctttagagcactagaaatctcatctgctgatgcttcaccatcaacgaaggtgatgagtggagtttcgggcggaattatatcatctttcagataacttccagatgttcttagtagctcttctgaacccttaataactactcctttcataattatagttttatgagcgccggatatcatctcttcgtaatcggtgtctccgctttcgccaaggaatacaaacatgtttgccacatttaatttccaacgcacaaacagatacctaaatatcataaaccaaatattttcaaatttcataatctgatcaaatttattagttaaattaaatacaatacacaattaattagttattaaatgaaatatatattagcatgatttgcacaacaagaaggcggcgacttttattgaaaggaaacatttagatgagaaattgataactatgtgttgtaaacagtattttgatatctaagttttttgtagttgtaacttttctaaaatttcaaaacaacttaactatgagacgacaccagatatttttgagactacctcattgcccaaaaaaacattatttgtattaatgtttaaaaaaaagactttcatttatagtttgctattttatttaatattatttattagattaaaaataaatattaaatatttataatttgaactattataaatcaagttgtataaccaaaaaaaaaatcctttaaaaaactctatttattgaggtgtctccaatcttcctatctattagaacttaaaaaatacacatacgtgaatactaagattagaaactaaaaaatcattatcatggtagcaaatgtatgtatgtaattaataaatcattacaattttgtggtggtggaaactgattcgaggatagttatcaataatcttaaggggcactagctctacttgaagtattgataattatatttgtagttgttgacatgttgtgtactttctaatactttttgagattgtaatttttttaaaatttctaagcattataaatttgatgtacataatatgtggctaagtaggccttcgctcaaaacttaacttctatgcttgaggtttcttctataagagagaacattttcgtgtaaaaaccgtgaggtctaataattttgtacaatgaaacactattttcaaaacgaaaggaaaagattaataattttagtaccttagggcttgggctcgagacgcaagtagaggaatagcgtgcattctcgttgagttcctgcaatacataggatgacaacgtattcctcgcatcctaaatttctgtctcaaatcatgtactttcattacctgcaacaaatcatgagctcatcttgaaaatatccaaaatgaaaccaaatgtcttatagaacagttaaacatctcattaagcaagcttaacataacataccttactaggatcctttattaggtaggaaatgcaatgtgaattggttgattttgaatcttcctcaatggaagaataagattgatctgaattttcattcccttcaacagtattcaacaacttccaaacggttttcttcaaaccttcacatccccaacggtagtcaatatgcgattcgtagtctggatcggggaaaagctttccatcttcttcgatgtaagtaccgggatagtatatttcacttccgctactacaaatcaatacatcaaattcattcacctgaatcttccccatcttcaagaattctattgtttctgataccgacatagctgttgataacgcaaaacccgaaactctagcaacttgagtgtctaaccttacagccttcatgatctctttcacaatattaatcatctttttgtcaggatctccattgctttcatagcaatcaagtgctataaccatcaatttacgcctccaccttaacatgggatacttgctcggcacatactcaagatgctttgtcatggcattgccattatcatcacttgatttcggtttctttatcttgcttaacaccttgttcacttgatcatgaagctcggggtcagcaatagcagaagacgaatctaaagatccattcaacgaattcttttctccatcaaccgacagcctaagtgacatgtcttgaacatcaatgagcgagtcattcaaagactcctcctcgtctatctcatcacccggggtgtcggtttgccattgtgggtgtctcatacgacaggctgccacccgagttaggtaagtacgacagtgttctggccacgagaaaaggtgtatgttcttccaaccattctttctacagtcatgccataagtttttctctgataacaacttcagcaatgcatcagcaatttcttgttgatcatggggatccactagcaaaccattatgcagagcctagaattcacaataaaatatatcaattagtacttttttaaatagatagcaaggagaacatttaaatttaagaatgattattacaactaactcgcccaaaggtggggcgagttaggccctcgcccaaggctcccactctgatccaaaaatttccttcgaaaagaaggccctcgaatggctcgagacgagtaaatgtctacaaaaataaacaatcaaaagaaaagagaaggtacaattattttacccgatgaatgtccaccggtccaccgtttttagtagccaccatcggtagcccatgcgcggctgcctgagttatatttcaaacataatcaaaccaaacttgtagacttgtggaaaaaataaaggttcccataaacaaaagagatggtaacttaacaaaaacaaacctcaatcaaagtaagtccaaaaggttccactaatgctggatttatgaaaactccctgccaaattccaaccacattaatatcatcaagttaaaaaattattgaatgaaaatcaaaaagctaacactaacctttgtctttgctgcaagtcggtatatatcaggtacatcagattgtttatgatgctttggatatgctacttgcccatatagatcatatttgtcaattaatttcaacactgtggtaagaacactagcatttccaccagacatctcatcaatatcatctctattccccataatcagtgtctgtatagaaacatgttaattttactcttgacattattgaatgacattttcgaaagcctacttacttgagttactgacgaaaaaactacttacaagattagccagctctcttaacggacgacattcaccgaaggccttcaaaagagtagttaaattcttcttgggatctggccttgataaggccaagatcattggtttatgcgggtttgtaagaaaccgcataacctatgaaaaaagaggttgttgtaaaaggcgataacaagattcgaatgttaacaattgttaagtaacagaaattacacactcacttctgaacatatttgtggaattgttttcggtgaagatttcgtctataccaccggtaagttgtgtaagttctccatcaacttcaggaccgtcgtcttgggttacaacattgctgaaatccatgccaggaggaataacctacacataagctgttttgagtactaataatgtaaaacataaggaaaaattagactaaaattcagattcttaccaccatccttggcataaatctcccatagcaattgacccctcgtctagctcgagcacgcaacactttctcaagccttacattaaagccatcataaagtccccattgttcttcaatctcttgtttagtactagtaataacaagttctgcagcatcaagtgctagctcttctccttcaatccttctaatgattcgatatgttgaattgatatcctcctttgattggcggccttgcttgagaagctgttcaagcttattcctcccaagcgagtgtccagttaaaaccattggaacatttaaagcacccgaaagaagagcagcgctatcccctgcatctgcatagtgcccgtgtatcacataaggccaaattggttggcctccaccaatttgttcagccaaaactttcgacatattgagaatgtgagctagagctccatctacaaactcttgaatataaggccagagtaattctttgctcaggtacttatctcggggaccaaaggggatccgcacgatatatgccccgctgctctctcccgcttcagttccatcaccatcatcaattccagtagttagcatctctgttggctcaccatagctccaatcaacatctggagaagaaatttgacgagtaaagagatcaaccctgtaaaccccgggcatcctagcaagagctctcgaaagctccaccacgtatttgacctgttataagtttcataaagggtgtaaacacagaagaaaaccatgaaaagaatatgtaagcaatagtaccatggtcagaactcagaagatacctgccccccagtatctgaatctcggccaagctccatgttttctcctcgtaccaaaccatgcaaactacacatgaaaaacaaaagtggtcattgtaataaggacttataattgcttaataattactcatgtggcacattttcaagcagcttaggctatgtttggaagttggataggtggcgtttggttggaggtaatgaaataaatttcattcctttgtttggttggaggtaatgaaatggattctattcttttgtttggttgtattttaaagtattggaattggaatgctcttttcaaaattttggtggaaagactattccattttaaataggaaggaaagactattccaatataacaagaaaaaaaatttaatgatttttttatcaaatttttttatgcattttaaattttattccattcctattcccattc

SEQ ID NO: 303694 - DNA, 3493 bp, Cannabis indica
gcatagcccgcgaaagtccatcaatagagtaaccaagcccagttagacccagaagcacgcatccaagtccacaaagaaacctctgggtcgaatgactaatgaagttcagctcagtgtacatcattgatcaaaatgaatagaaatcgatcttggaagacgtcatcaatctgagtgcacgatccaattggggtaatcgtgaatccgtggtgagaattcaaataatcgttgagtcgattaggcttaaaccaactccaattattttcccgcctttaacatagatcatataaattagtggaattgagtaaaaaaaaaaggtcaattctctctctaactcaaatcttttcattttccttctcactagaactctttctgacttgagcattggagaatcttgtacaggaaatttcattgatctttgataagtccaagccgaagatgatagaagaaactcaaagaagaggagaatagaggatcacagcttgcctagttttagcaagtctctactatgaaaattttttacatcaacaattggtgctattcgtggaaacttcttcgatcttgattgagataagtcgtaaaactcgatcagaagattgtgtgaaatcgtcgaacaaaactcaaagattcaaacaaaaagcaccattcagccaactaacaaataatggagtcgacatcacggaaactttcgctcaaatggaaaaacctagggctgaaacacaggctataatcgcaccaatgaacataaggaaagtgacaaaaattactaagatggacaaaataaaaactgaaaacaaagaaatttgtgtcaacactcaaatcgatcagtaaaagttcccctcgatccatccacaaacgcgagacgtagagaatttagaggccaccaacgccatctaaatgctcttgccaccaagcacaaaaattgtgctccatcgaccagttaaacggaaagtgtagatcctattgcatctcatccacaagcttctaagatggatctacctaattttgtctagtagatccctcgataagagatcatcaacattcacaattcatttctagctaattggaagaagatcatgagaaaaaaggtgccacaataattctatcaattccgagtgcaaggcatcatagagttgatgaaactagtgtgaagctaagatatctttattcattgatcaaatccttaggcatcaaaacaaaaagattgcatacctttagttctatcgacattaaatgacatgggatatccactcacactcacttacaatttctttgaatgagggaatttagtgtaagctatatatctacaataacacttacaagaacaactatcgcctagtttttccaattgaagtcaaaatccatatcgagcttcaaggatctctacaaatagttcagtctccaatatggaggcaattgtgaggctccaaaaatggtgaaagacctgcattagatcacaccaagagaaaatgatcactcgaggcaatacatgccaaggtttatggacctcatccattaaaaccatgatgttgacatgactacaataaagaatctcttcctaagcagtctctgagatggctctctgatgagttaaacttttaccatccctcctcctattgatatggaaaacatcttaagaaaaattgagtggatctgtcaagttcataatacaaggcaaaggtttgcgaggaagatggcactaatcaccatctctgccccaaaaaatcttccaccttgatagaagaaagagaagcaaacaaattagagcagaggatgagaaaatgatagcaagaggaggaaggctaagaatgatccaatctcaaaaccaacctttaagttggtggtatacctcaagatctcatatatcaagagaacaatgactagccactatggaggaatccattcaagatcactacacttacagaaaagaaagatcaaagaaaatatattgttgttaacgcacattgtagctaaccaaatttgagtcccataatgataatacaacacagaaataataaagctatagaaaaaatatttaaaattctgcatagtccacaagtgaatcttatacagatttctaagtagtttttttaggggactttcgtatatgagccctccccttttaatcttatctgccactatttataattgcatagtgccagttaattacagagctgaccaaaatatatttacggccattatccctaaaattgtgggatttgattacaaatcaagccaaataaatgaggtttttacacagttgtgaatatctcgcctttattgggccgagatgaacgcataattaatgatataaggtaagttgtatctcatatggatgcctcaccgaggagggtgccaagatcactttgataacgagcagctgcttgccattttggcttctcaagactaatattgtcttaactctaaaagttatactctctggagtcaagaggatcatcctcgcatgcataccatcttttagcgagacaaatgcctcgctgtttattatcttggctcgtcaaactatctctactcagtttgtatatcgtataatatatgctaagtatttttagtgttgtcgctttttctttcatgcagcgaggctgaggcctcatcatgaacgtgtgcaatcacatggtttctcatcaatatataagttagcagttcgcacgtttctatctcgcaaaaggctattcagctagtcgagttataaacataccctgtgagttatatttccaacgacttgttccatgctaggcacacttgtcgtttgcgtgtttgagtttttcccagctcgacacgtgtccccttctgatgtgctcaccgaacttcgggtataacaattgccccttaaaaagtttattttgattgaaaagagctttttaatgattacaaagggtattttcgtcacgctcctctatttttgaacagacgtattccctctgattttggcggttgtgcagttttgaggtacatcagatttaaatgaccatctttttctctttcgcttcgaaccaagtccattggatcacatcttttttgtttttgaaatcgtgattataggtataaataaggaaaaggaaccacctttgcaccattttagaaagtttgagaaaaacctgtaaactttttcgtcaaggaccaccattaaattcgtccaaagacttgcatgccatcattgtccttgacctttttcttacgagtttctttcgacttcattttctcaaagcgatccttgctttgttcgaaggtttgcagacgaaattcccaggcattgccgcaagccctatcttgaaacggtaagttactttcttctttctcatgtttattacatattgtgaacaagttacttgatttgtttttatcgttatcatctcatctggttttggtaggtttctagggttaaaattgttcatactaggattcaggcaacatgtaggttgttttaagacctccaactcattaccttctgctttgataaattctttctaaggat

SEQ ID NO: 303695 - DNA, 1632 bp, Cannabis indica
tttttcttttgtcaaatttcttatcataaggacaaaagtaataccttcattgctccctgtatgtattgtttttcgatacaactctggtagcaaattggagatcaaaaagggaatagacctcttttttctcttaatggttccatattttggttgtatcatataaaatttttgtccattgtgtattggatttttcttttttcttttttccttatgtatgattcaaaatgaagtttggtaatgaagaggtactctcaaaacatatatatagggacaacttacatccaccaacgtgtatatgaagaaggaataaaatattgaggatataaacataaacaataaagactttttcacatctcaacgcagtagcagcatacccatgatagcgaaaaccctccaacttagctacgatccctttaatataaaaatatacatacatattaccttcataagcttctgaattaatagttagacaatggaaagattgaaacaaatacatgtacgtaaatttcaatccctccctaacaaactttgttacacaaagcatgcaattcaatacaccaaaataaataacacaaactacatatcattatattcatatcagctgttaatatataaaggggagctagctaagctctgagaaattaagtaggggacgaggaacgtccaccgtgccttctaacattaagatgacagtcttcatcaaagggcgcaaatcaggatcatcttgagtgcaccaaaggcccactctcaccaatctttctagtgttcttacatcaacatttctttcaccttccaccagctttaacataactctccagccttgtaccaattataaactcgacgatagagaaccatctcttcattctcagaaaccttcacatctgtgttcattttaaaaaagatggtctccaaaagcactactccaaagctgaaaacatcaactttaactgacattactgcatttttctgccattcaggagcagagtacgctgctctttcttcaactaacgccttggacatttggacatggcttggcatcaataatagcctcgagaaaccaaaatcagagatctttgcagtccaactttcatctagcaaaatattttgggatttcaaattgccgtgtatgatatggaccgcgcattcttcgtgcagatagagtacccctttagccacttcctgaatgagcctcactctatctttccatgaaggttgtttagtggccttgaagaggagatctgaaagagagccattgctcatgaattcataaacaagaagcattttagaatcttcaatacagaaaccaagcaattgaactaagttcctgtggtgagtccttccaatggccgacatttctgctcgaaactctcttatcccctcttccacaaacttctcgagtcttttcacagcaatcgctctattttcaccaccatacaataaagtccctttataaactgctccaaacaagcctcttccaagctcatccttgaatccctctgtcgctctctccagctcattgtaagaaaacacttgaagaccaaaatgttagactatatatatagtgtatataatatagcatatacaatgatatgaattgcggaaaataaaatgtaatcatatcaataatatatg

SEQ ID NO: 303696 - DNA, 1690 bp, Cannabis indica
ggctttttatattctagtaaaagttactaatttattttgtttaatttttaaaaaatataaaaaataatattttaaattgaatttttatagtaaaaataaaatattactagtttgtataatgtgacagaaactagaagagaaatgttaaaagacattacagtgcctagtactattctcggtgttatactactattaaaataattagtatgagtctcatataacttttaaggaatatcgttaaccaatcattagacaccacctacatattagaaggtgctgtattagtgcttaataccaatactcaaactaaaaatacatctatttaatggtttttaattgagaattgctaaaaaatattactggtgtctaaaactctctacggtataatacttttattggtgtaattaaatatcaaattccatataacttaaaataataaattttaacttattaaaagtacaaaagtactaagtgtctaataacaaaactacttttaattgtttgtatcgtagagaaaaaaaacgactcaacccaagatttattggatgaactatcaccgcattacttaatataaatggtgcttacaaatttgggcaaggatattagtcttttattttttttttgtgcatgattttgttttaattaatttgatttagaaaattaaaatattaaactaattaaaacaaaaactttattaaaatttgtgtaataatatgtctacaatacataatgtgcaccttgttatatatcatttctataattttgttccataaactcagcccacttcatcaaaactttcatctttttaccataccattcattaccttaaaaaaaaatactatttaggttcatatccgagtgcaagaaacggggtattgttccaaagttgaaacacccatatatacatatatttatattatagatggtttatgtgtgaagaagggagtataatatgcagaggtgagggcctgaggcaatcaagcaaatctccttcctttctttccctcacaacctaaacaaataggcagcccagttagaatacaaatttcattatggcaatatgccacattaagctcatcaaaacacgataccttccaactgcatttcaatatcatcatcatcatcactcttcacttcaagttttcaatagggaaactccttttaaggtccgattctgtttaactcagctgagagtttacccgccattctcataaatgtgctaactcctcttctagcacttccataacagagttcctgaaaagaaaagacactcaacgctcgtttggtaactacttagtatatgatgagaaaacacaattaatctcaatgacaacagaatagtagccaacattcataatgattatatgataaaatccaattacgaacaatgggagcccttaggcccttgtgatgcaaagagttactcaaccttactctcttatatatagtaatttctcactcaaaactaccttcccaaacaaactcatacaacgcttttttcttttttttttaacatagtgattaaaattactaaagaatttacaatgctgacatccaccaccgaactaagatagcttgttatctaaccgaaaggcatgctttgccaaactatgagctgcagaagtatgaaagccacatggaacaaaactggcttcgagaatttagacaataaaactataacgtcctcaaa

SEQ ID NO: 303697 - DNA, 567 bp, Cannabis indica
tatatatatattgtaggaagtgtaaccgatcatctatagacttgacctagaaacctatatctccaaccagattccatataaggtggggtcaatatccatgacccacatcgtgccaaacacagagtaccaccatcgatgtatttatttaacttctgctgtttccccttttattcattgactctctcattttgttcattttcccttgtccttaattttccctttccttgtacttgtgctattcttgttatatatgtgacgtttttcttctgcttttttcaacttcaaagagtcaatacttttgaaacggattctacttttacagataaaaaaaaagttctcctttcagttttttttttttatttaaatacacacataaataataattacagagaaaatcattatatataacgatctagttcctttcaaaaccaatgcaaaaatgtaagtaagacctctaagtagagttcgtagtacatacatcctctaagggccagttttgtggttaaagttcctctgcaaggttggtccacggaggagtcgttaagattttattaaaataataataat

SEQ ID NO: 303698 - DNA, 2835 bp, Cannabis indica
tggtaaaatatatccaacaactactccatggagtcccacgagaaatcacaaacaacaccagggtgcattcagaacaatttctgaggtcttgagcataaagaagtagatgcctcatttaatttccttttcttaaaccgagtagttctttcagtagttttagaagtaggcatgacaccaatatcaccccctaaccgtcgtatctcatatagatccaagctcccaaattatttaagttcttccagcaaggtttcttgggcttgaaaaaaactagatatggccctattctcatcaagacgcgaatggattgcttgttcacaaacagattcaatattagtgcctttagagccatttaaatcactctgcccctgacatgatttggccttagcaagagacccgctcacatatgcatcaccacaatctagatttttatccacacagattaaatcctccggccttatagcaccatcagaaatagatttaggccctataagtgaaacaatcagcactacaccagctggcccttggcccaaattattaaccataacatgctccacattcaaaatttttggcccagatgtaccgttagagttagcattatcaatagcccgtcgaagccaaaacgaacctttagaacaaagactcaggcccacaccaaccaaatatcttaagtcaacatcctcatccttcgaaccaaccaggggagggccttgcacatgctcattctcaccattcacatttaatagacaaaggcaccgtgtctttgatcgccttaaaaggatttgaaatttttgaacaaattgcattgtccaatgaacgatcaaaagcatgcaaccccaaaccagtaggaaaaactgggcctttaaccgtacctccatcctcaaatcgaaccacattagcataaatggcaaccagagacgtggtaccaccagactgcggcatgggaatccacacgacatgctttgacttccccacagtaacaggagatcatcctgtcactttcttgccatgcctcgaggattgagaaaccttggatcccgttcttaacgaaccaccaacaccattgccagtcaccgctggaggggcagagccatgacttcaataatgaacaagaaataaggaagaagcacgactaggaaaaaaagaattcacactcgagaacacatctagatacgatgatgaagtagacaaccacgatccaaatagggtaaaggggacaccattttctttctgaaccgtgactggagaagagaggttacaaccataattatagcagaagatacctaatttctcaaacttgaactgaagtcatttcttgacaccggacaccaagttaaaacagcaacccaagaacagaggtttagcaatatcaatctccaccaatattttaagatgcttgctccaggaggtaggtttgtcttcctttaaattcacaatcaataccttaccagctaggcctcccaagaaatttccattttccatggagaaatattcatgtgggaggttgtgaacctaaaactacagtttcaaactagcaaagtatattttctcttcatctctcggagaccaagccttaagaacatgagtataacctcttgtgcaccagggaccattctccaatgccaagtttctatccttagtaaggtcaaatctaaattcaaagcagttagagttattggactcctcagataaggtcacaacaaacacaggtttatgccaagttttagccacaaagtcaatgactgtggcttcatccacaagcattggggccacaacttttccatagagataaaaggtagataatgacttgagagaggatgcacaaggagttaaagtgacagaggcttcattgcaagaaaagcatttacccttaacagggggtggtagcattaaccaactccattaaaacaaacaaaaaaagataaagtctccaacaaaaagggaggggacaacaaggaaaaggaataaagcacaaaacacccacacctcacaaggccaagatacaacacacaccacaaactcaccacacccacaaaacaccacgcatcaacacagagatcaacacaagacccacaatagaccaacaaaagaaaaggaaaagcaaaaagggatacgacacggcacgacacaggaaaaaaagaagaaagaaagaaaaagagaaagagagacaaggggcattggaaaacagtgaagagatggacacaaaaagacagtagagaaaacactctaaggtaaagaaatcacacagcaccggacgtcaacagagaagagaaccagaacgaggaacatggaaacaagactgaagagtagtaggtgaccattcaattaataacaatgaaggtaatttcctcaaaaataaataatcaccatgatagttttatttaggcccaattaatattgtacctattaaattaataacaataatttaattaaaagttaaattcatctcttttgggtctcgtgtgagaattaggggggccataatagtgggtaaacatacttgttgaccttgcttttagccaacgacaatgagtcttaattgtaagcgataaatgatataatttagatataatatgaaaagataaataaagaacacagagtttttaaagaggttcggccccgagcagttcgataacagcctactctccttaatttatattgacttaagaaaaaagaatataaagattcttctcttaaagctcttacaatgacatctttgagtatgctctcttagataatttttgtcgaccctttgaccagtgagaatatatcactatttatagggctatgtgcttgagagaaggtttcccttttgtttacaatgtctatagttggtaa

SEQ ID NO: 303699 - DNA, 2497 bp, Cannabis indica
tatatatatatatatttgatgaaattaacttaaatggtagctaaatagattggatggatccatttcaatccaatagaaaaccagtcaatgcactcaatggttgaaatcgatccaatataatacatctattagatcgggtaggatcggatgactcaattcaattagatttgaacggaagataaaattcaatatccaataaataattgaattagatcaattgggttcaaatccatttattgtgatgtaatgaaaacccacattttattaacaaattacattttttggatttcttaattttatggtttttaaggtataagtttgcaaaaatatcactttttctcaacaaactgatttttttggaattttaaattttatggtttttaaggtataaaaatgttattttgtggggaaaataaataaaataaaataaaaaacatgggaaaaatgatgtgccattgacgtgacaatgacacatcattgccatgtgtataatttaaattaacatattttcttttttatatttacaattattttacttatagtttgatgaaaaaataaagttgatttcatgttgcaataacatatagtatacgaaaatattattattattttattatataatttattttatacgtaagatcgaactgggcaataaatatatatggttaggatctacaataatacattatttaatttaagtgtccatttgaaacttaggtacaaataagtaacaagttacttaagtagtatttgcaaatatcacattattattaagcatttatttcttaacatatgactttttggaacaaatgacataaaataaaagatacatagtaagagatttaatttagtacaactcataatgtttcaagtatccaactttcttatcttaaaaaataagaaataataataataataaaaattaaaataaagtatccaactttctatttatttatgatgtcgacattgaacaatagcacttaaaacttattcgatttaataaatgtaacaataatttatatgaatcccgtgagctaaaaagggttatttaatcaatcatggttagagtcttagagttagggttagggttagagttagagggtggttaggttaagctaagcaacaaacatgtgatgacaataaaagaatggctttagacaataaatactcaatgaattgaagcctatggcatatacttcttctttttcttttatcatgttattatgtttgagaatatgttacataggatgttgaatggcattgccatatcgtattagtagtgtccagtattatttaaaataaatagtgttattagttaacgatattttataaaaaatttttatattaaattatgtgactcgacacttaattacattaataattatataacatattgaatagtgttaaatatcacttgtgcctttattattctcggtattgaaattagggtaagttgttagtattaattaagaatgttgtaacttcaaactctatcatctttatacaattgaaaaagttataaaagaaattatatttttcaaaagatgcctttttgtgtagtagaataaatgatattctttttttaaaaaaataggacgtttttaattgagggtcggagacacaagtttaatttacttgtgtccagatctactttgaatggagtaaatcttttgtagcgacgacaatcttatgtgtgttgaagttagcgttttgaattttctctattaatttaaagtcttgctatacctttaaacttgacccaactgcgtaataataacattgttatcgtgatgaagataaataaaaatgaatagaaaataaagatgaagagaaaatggataaagtaattttactgttttttaatattaaaaataatttaaaattattgcattttactttatatttcaaaaactattaataattttaaattgtttatattttagagggtatttgttaatggacaaatgttatgactaaaatcatgctcaatctattaagttgatctaatttacaaaatacaaaatttaagctgtcattttaaatttttgtagcattatactacataattgataaataaaacaaaaaataaataaacaagagttgactataaaacaatgagcataatacaatattttccaatatacaaagatataaatgactatttaagtaatataaagaggatcaattggtataaatcattaacttttcttagaatgatttgattcaagcttaatttgcataatggatattgacaaataaaccttttatttttattttttaaggcaaacaaaattagaaagtatactaatgatagagtagcatttttcaaattttgaccaaacttattgacaaagaggtgttcaattcaaacaatacaaattttttctaatgaattacaaaaaaaatgttttaaaacctattttgcactttaatagccaaaaaatgaggaatttaataaaaaaaaatgtctaaattttcaaagaaaaaaaaataaaaa

SEQ ID NO: 303700 - DNA, 1343 bp, Cannabis indica
tctctctctctctctctcatccgttgcatacatctgcctcttctccatacatccatttcgactgtcatctccattaataaaagcccaccacttgtggtcccttttatcatacaaacaacacctacctacaatacccacgaagattatctttaatacagaataaacacatatttttttttcaatacaataaaataaaacaatatcccccatggatttgacacaggctttcagtaatttaattatttattattttgtaacccatcggatccatacattcatataaaactttctgctttatcaaactcatatatgccaattgccattagttagaacctaataaaaaatacccttcaaaatctaatggtcattaatatagtacttattcaagtgacaatcatttgtctaagagaaatgctaacactttaaggtgtgaagcatgacatactgttcttaatgaaattcatgagtatggagtctcttacatttcgatcaaataaataatataaaaaataacaaatttcttacaatcctgccacattaatcttgtggtagatccttaacattgttaattgccatgttcattaaccaatcactttttctcatatatttggtgtcaacattcgaatgaaaaatccccaccaactaatatttaagtggaaaagataaccttaaccactacttacaatatatggacatatatatacctattgagtcatatataaataagaacatatataggttactcactcatcaccaattgatcataaaatctcatatttcttgacatagtatcaaaatcatatatatcgttagcggtctttcaatccacacacttatttagatggttagccaaccgtgcaaggacgtgtgagatcgaaacaaaataaaagcgagcaaaatagaaagacgcctgagatccaaataaaataaaagctagcaaaacgacacgacctatgataaggtgattctagattggtgagtaaaaataaccaccgtcttcgaaaatatataaaaatatgggctactccactaattaccaatttattttgagatggaataccatatttgttgacaatattaatcgaagtttgtaaatacagtcacctggaaaccaacattaactaacataagttcttttgtactttttgaactcaattgttcgtagaacgagagaaaccattgattaaaaaaaatagaagcttcaaattggaattacatagacaaaaaaaaaggaaagtacttcctcaagttgatgaccaacgacaaatatatttagatagggattagagtcgactatttatatatatatatactagtaaaaagttacgtgcgaggcacgtata

SEQ ID NO: 303701 - DNA, 1919 bp, Cannabis indica
atgcacaattctcatcttctaggcaattccttgttcacttggaagatttgatcggagttagacaactaccagatgaacctctcagagactatattagtcagtttatgaccgatgtcataagggtaaagtggttgaccgaggaaggaagattagcaaccatacttggaggagtttttaccattaggagatttatggaaagatagaggctgacagtggggtcaatggcagaatttttaaaccagacagatggattcataaaattagaagaagtagtctggacagttgctcgaagagtaaatttaactggccaaaaacaaattcccaacgtggcctctggtacgtctgttccaagccaagctagaaataattagggtggaaaaaagtcaaatggtggaaacaatcaaggaaatggaaaaaaatagaaagtttaataacattcccaaacaccaatatcctcgtgagaaagctccaaagtttacaacttttctattctcaccgaagatatagaagctatccttatggccacagaatcagtagtgccttgcaaaagacctccaccaatgaagaaggatgtaagcaaaagagatcattcaaagtactaccatttccataaagactttggccatgataccaataagtgcaaaaacttaaaagaagagattgaatttcacattagaaagaataatccacacattcaaaggtatgtaaaggctgaccaggatcaaagggtcacccaacccgataataaccaaaaccacttaatgcctccatctgtggacaggcatttataagttattataaagggcacgtatattgttggagattctaaaaatgcaagagaaaagtatgctcgaactcttcagtataagcaaggtgaggaagttctgactgtagaagagaaaaaatccaaacaaccacgtagggaagatccaatcataactttcagtgatgaagattctaataatgtgatctacccgtagaaggatccctttgtagtggacgtgcatattgcaaacaaaatagtggcacgaacaatgattgataatggggcctcatctaacatcttgttcaagtctacttatgagaaaatgggtcttcaattcaaagattcagtttcctatacgcaattagtttacggattcttcgacaacatgctgcctaccactcacagaagggaaatctccagctacaacaacgatcatggcacaatttctggtagtagacattcctcctgcttttaacgttttgctaggccgaccaaccttgtatgacttaaaagtagtaacctttgtctttcacttatgtacacaaaatgggatcagttatcttagagtcaatcagaagactgcactggaatgttacaacctttctccgactaaggctaaaaaagaagaaaaatcttgctaggattcggagtaaggatgtttatcaaaccgctcaaaccgtccgcacagcaccgcatcgtaaaaaaaatgcggcttgaaattctttacggtgcggttaaagtttgaatttttcctaaaccgcgtggtgcagtgcggtttgtggttttaaattgttaaaatgcggttcaaaccgtaccgcaccgcatataaaaagtctccttttgttcaaaaaaaaaaacttttatatatatttaggtccaatatgtgaagaccgaatccaaaacctactaattattgtattgttgaaacttgaaacttttttttatatttattttcaagccttatgatatttttaacatgtgttgctcaagctttattgtgtttgtgatagtttaattatgggaaatttgaaaaattatccataaaaatctctaaaattatttccctaaatctatacctattaaaattgtccatatatgatagtcacatttgattttttcccataataccctcccatttgaaaaacaaatccca

SEQ ID NO: 303702 - DNA, 2487 bp, Cannabis indica
cttttttcttcggttaggccaatagacttttcttaggtttaggtctggtaaccccttaggtttttgtactgcgattaattttatttttgtgatatgtttttgagtatcttttgtttatgttattgtgaatagtcttgtctatacaacataattgtattttattttgttttattgttagttcgtattcgttgttcttcgatggctcgccatcaaatcattgttagtggttggtaactacaagttctctgcagctaaaagttgttagtgatggagttacgtatcgagtgctcagtgaagggattgaatgaacttgctccaattgtttctactcttgtgtcttctaaatggtggagaaaattaaatgtttgtgttcttaaggttagcactgatactacaatttttttcatctgattttattttagtttattttgtcaaacgatacgggaatcatacggccgattagttgactcgtatttctaattttaaacttggtcatgtttccaatgggagagatgtcccgattgatttgcagactattattttaggtgattaatattaataaaattgcatgatttattaaaaaaaaataaactatgtgtttaagcccatgataacattttggtagaggtgaataaatgttaggtgtgtgattaaaatttatcaaaaacacaataacaacgtgtatcatgttttttcttcacttatataatatcaataatcatctaactatgcctactcacctaacattagactaacacatatacatttcttgtttcgcattaatcgcttcacactaatcacctcattttgccacaattattattaataaagtcatcaccaataccgactactatcactactataaaaagaagtttttgtttcagttttaaagtgacacaaaaacaatttgtatcggttaaaatataactgtagacacaatttgtatccaaccacaataatttgttgtcatggtacaacctcgtttccttattctcgcattcccactacaaggcaccatcaacccatgtttaaaccttgctaatcaactcattcgtgtcgccaatgcacaagtaacctttgtcaccagtgtcaacgcgcaccgtcttattatgactacacacactgtcgccactacttcaaacaatctcttgtccttttccccattttttgatgggtatgacgaaggggtcactgatggaaagggcttccatgatcactttgtagaattcaaacgtcgcggttggcaggcagtgggagatatccttgaattagggtttaaagaagggcgtccgtacacttgtttagtctattctattcttctcacttgggctgctgatgttgctgcgactcataatgttccagcatcgatgttttggatgcaacccgcgacggtgtttgatgtttactattattactttcatggacacaaagaaatcatatgtgccaatactaaaaatcattcattttcattatcatttccaaggattccattaaccatgaaccttaaggatcttccttcactcatggttgattctaattattcttatattcttacaatgttacatgaaatgtacaaagattttgaaaaggaaagtaacaacacgaaaataatattagtgaatacattcgatgaattggagccagatgcattaagagctataaacaaatttaatttgattggaatcgggccactgattacatctaagacatccttttcatttcgaaactacattgagtggttgaacaccaagcctaaaaagacagttgtttatgtgtcatttgggagtattttgattttgaaaaagcaacaaatggatgaaatagctaaagggctattggaatttgggcatccattcttgtgggtcatcaaggagaagaattcatcaagcaaagaaggagttcatgaagataatataaaaaacgagttgagttacaaagaagagttggagaaacttggaatgatagtaccatggtgttctcaaatggaagtcttgagaaatgagtcgttagggtgttttgtgactcattgtggttggaactcgacgttagaaagcatagtttcaggggttccagtggtggcatttccacaatggacggatcaacagacgaatgctaagttgatagaagaaatgtggaaaataggtgttagagtaaagcccgatgaagatggaatagttaaaagtgaagagatcaagagatgtttggagttagtaatgagcaaaaatgaaaataggacagaaattgtaaaaaatgttaaaaaatggcaaaatttaactaaagaagctatgagagaaggtggctcatcggaaaagaatttaatcacttttgtgaaatcaattcatcaataaatactttagtgtaacaaatactaaatctttatgttttcttgtctttttttttaaaaaaaaatgtattaatacaaataaatatacaaaaattgctacattgtttggaaatttaaataaaagaaagaggcataattgatac

SEQ ID NO: 303703 - DNA, 1144 bp, Cannabis indica
tatataatatattatatattattatttttaatatattatctatgtaataaaaataaaatgattagattttaaggtattttttttatttttaatatattatgtatgtaataaaaataaaaataataaaaaataactgggttggcgggcgaattctggttcaacccgaaacccgatgaccataaaaaactaactcatgaactcgttcgaaagtgtatcgggttggacccaacccactcgaacagaacgagtttttttaaattttacgagttgaccaggtcgggttggccagatccgggtcaaactcgatcagtatgttcagtcctaattacaagcaatcatatcaatttttctaccttattctttagagtgtatttattttttaaaagatttagacatttgaatttgaatcttaatgcattagaataataaaatatcatctgtgaatataaatattaaaatatttagactatttatttttctcacatgaatgtgttttatttagtatttttaattttatcatattaacaaattataaaattaaatttattttaaaaaaatatctaaatacaaagcatgattaattttaaaatatttcaagtatcaaattttaaaagaaatttattaaaaagaaataattaaattatcaatgtataaaatgatatctttttaatctttttgttcttatgtttaaatgacataatataatatttttattggtggtctaccacgtcatattaatcatcaaatcttttttttttctggcaagatttatttataatatgtattaatattatcttatctatgtaaatatatacaatattatatataaaataaaaacattataaagcattggaacataaaatgaataatgcaaagactaaaaaatattatatcttaacaaaaaaaaaactattttaagagacaattccacatgtaggtggtttgatggattaagtaaaaataagatgttaaaattaagtaaaaaacaaacaatcttaatgggtctacatctgaactaatcagatttgttgtctcattaaatgtaaacaaatgaagtcaatttttacataagattatatatcaattttctttatttttttttcttaaatttattaaaatattattttttttaatacatataaat

SEQ ID NO: 303704 - DNA, 1151 bp, Cannabis indica
gttagttagggtgttacaaaggccgtcaaaaaagaagcgatggatggaggagtgggtgaggaggaatccagaacccctgcaagaggatgcaaagctggaggttcgctttgctgccatctttctagatggggacactctgggtgctagaacacctggaagaggtgtactccttttcaccttgtctatcctcctcatctgaaagtgcgagttaatgaggcacggctgctttttgacctttactttctggaattagaccatctcagttaccccgttcccaatattttcttaggatagatgaaatagttgagattccaaagcactttatactactttctcaattcattagggtagacccttttctttgatgcactacccaggtttctttgagtatggtagtttcctagctcgggatgacatataactatttccatagggagatgtgaattgcaacaatgttgatgtttaaacctggaccagagtcttatgctttcttgttaacttctttatgcatttcttgttatttctgagtttctaaccctagtctttatttctttagcacggaagccccacagtttgcagatggatattctaaacactatcatcaagaatgtggactcaaggagcgaggaggtgcagaggattgcagggaaaaggaagagcaaggcttctggctctaggccacgaactaaggaggatgtgtcattcaccaaagtggtggaagctactactacagttggtgcgccggctagttccgcctctcttgccatttttgcagttccactatcctcggaagcgccaatctttgaacaataggtgatcctagtcgacaacgatgatgatacaaacgggctagtattctcgctgaagaggccaaatgagaatattgagaggcttagaaagaaggccaaggtataggcagttcaaaaaccaactgtccaatagctggctaaccaacgaaaggtggagagggagaaagctcaacgacagaaagccaaaagggaggagactgagaggaactcacagaagggaaatgattctagaatgcaaaaatccaagctaactattacccaacaggtcatccaaacatcatataagggaaaggtccatcattttgttgatccttttgtagatccctctttccccatcagtcc

SEQ ID NO: 303705 - DNA, 3878 bp, Cannabis indica
aattaatttttctttaaatgaatttttttggactagaatggagggtcttggacgatacctattgtcctatttttgggtcgaccccatttaatatagtgttgtttgaaaagattaaattatagggattttgatttaagaattatgttagatgtgtgaattgtgatagcacacgcaagtatattttttctctttaaaaaacaaaatatatatggatggaagattggtcaattttagtgaaacgagttctactttaacttattttattcaaaatgatatttgcttttggtgggttcggtatcaatgaatcatgttgatattgatgattggaaacgaagttttgaattttttttttttttttaaacaaactaaaacaaacaaaaattggcataatgatcagttgatcactatatggcggtagtttttcttcttgttttcttatattaacaaggtttgccaaaaagtgatatgagctattagtgtaaccatcattggcttagaggatgtagacttgtagtaataatgagtcattatttcttgctacacgtaaaatttacaaaataatatgatacgaatgtgacaacaatgtatctttagtgacttttatttttgaatataatatgaacctatgtaagtatgttgccctttcattcaataaatcattttcttgtttattggtcggtggcacgtttttgttaagaaggttagtacataattgccagaagtgacaatcgacacaacccattgttttccaaaccaaagtatagcgatgccaaaaccaaagtaaataactttttagttcactctttcagcctcttaccgttcatgaaacatttagccaaactaatctagttgttatcacttatcatattgaaaaggtaaggctagcctatctcaaccttagaaatattagcaaccataattattgtagacaaggagggtgagagagagagagagagacctcaaatttgtcaaatcttattgaaagaaaataaaaagggttactaggatttgatacaaaacctattctacatcacaggatggatacaaataatgcctctttacggaaatacattaaaaaccaaaataaaaggataacaaagagtaattaataataacatgcttttaaatctttgccatcacatagatgcctttactctgttccagcaatcttcttcttcaaggattcaatatctgtagctagttcttttctgcttgactgagaataataaaataaaaatagtattagctcttttagtaaccaaaagcaaaagtctagattataaaccactacaacattgttgggatttcaagtttaccttgaagagtaggtaacggtagacaaaccaacccgtgtatcctagccctactaactccatgaccttgggaagctgacacgagaagaaactcaactcagaatgatttaataaaaatttgcagtgtgaaagagtaaacatgcatgaagaatttaacaaaaattataatcaaccaatcaatttttcaaagatttgccatttctttgatgttaagaacagaataacaatttcccactaaagggcttgacttgacttaccaaaggtactgagtttatggcaccaacaagtattgaagagagccaaacagcaactattgctccacctccataaagaagtactgtggacttgttctcaactgcatcccactgtaaaagaaaacatcacaaacaaaaaaaaaaaaaaaaaaggtttacctcgagcctgaaattatatttttatggaatgacaaaggactaagcttatctaaaaagtgatgttagagtatataagctctagttctgaccttctccttcaagtctgtgaaaagttcattagcatcaacagaagtggatgtctcttctgaagaagtagctttaatctgaagcagcaaaggcttccgtgactctatatgaaagaaaaacagcatcagcagaagtagatgtctcttctaaagaggcagctttcatcttaagagctacaatgcagtgaaaaagaaaaagatggaccaatatgaactcaattctgttttatcattacaaaaatgaaagagtttttgtgtaagatgaaaaaactcgattaccaataaagcccaccaacagctcctctaaacatttctcagtaaaaacaaagcaagccattaaattttcctctaaattttcatatctagttgaatgatagtcaaaaaaaaaaaagaaaattttcccgtcaaacaacaaatttcctcatccaataattctcaaaattcagcacagccaacccataatttcaacaaatctcctctaaacagtttcattttcttttcctcagcattcaacaagataaggtacataaaattccataagactaaaagtagaaacctcgaaaaagaacaaaaaaaagttgaacagaagatacttagttgactcaaaccacaactgtttgacgaaatgcctcaaagtagtcgaagaagaagattcatagatacctgaaacttgtttgagagggaaagatgatgaagtagtggaggaggaggagaggcgaggtgggaggagtggcaaggcggagcagcgagtgggctgagaggtgggtcgagggatcaagacggtggtggccgccgcatacgccgtggttgctgccattatgagcgtatgtggccaaaactaagcaattcctatccaaagatttgagtcctctgagtgagtctgacttgggtaatattattattgttattattttatttggttttgttcaaattttcagtgtttggtattggtttatcatccatactggtgcttttgggtggctcattatagatatgacacgtggcacaaagaagcattgttattggttccttctctatctgaaatccacgtttgcggtcttctctcttctcttttccaaccctgtttacaccccccataataatattaatttcataataaatattccaatatttctagattataatttaatcgttttttcctactattaacaaactaaacacattgtactaaacacgaattgaatatagtacaagaagataaatatgtgacactatttaagcaaatgaatttgttaatattatatactagtatatttatatatgacttgtttattaatttatagttaggacaatttaacaggtctactgattattatctgatatttaatcttaatctaatccctgcattgagttgttgactaactaaaacaatattttgttattgttataatattacgaacaaatttgtatttagaaactttttcctttcttttatcatctttttcatattcgtttcattagtatatatatccaattgttatctaaagtcttgggaaaatgataatacacgttacgttattctattgatgattaaaattataaatgtaaaattttcaaaggaaaaaaatttacaaatttttaaaaattaagttaaaagtacttgtttgattaacacctgctatagtttgattaacacctgctatagtttgtttctttttttttttttaaaaaaaaaaaaattaacacctgtttcataaatatttttgaaatataaatcatattcatatggttgatgatgtattttagtttcatacagtgccatttcttcatcattatatatttttttaaaaagagtcataagataaagtataaacgtattgattgcaaatataccaaattatccgtctgtgttttcaaatttacaccacctcataccattttaattcatcgtaattctgaaaattatcattcgcatcctttacatatatataaatatatatatatatatatttatatacactaggtgaatgtagtgccgagccacgtagtgctagtttcatttaagattttggtttttttaagattttgaatgtattttattttta

SEQ ID NO: 303706 - DNA, 1736 bp, Cannabis indica
aaaaaaaaagtattattttttagacaatttgttattatacaattacattttttgttaattgcacacattttttcaaacacaactttattatatattaaggagtattcttattatatatgaaggtattaattatagtagaaatgtcccccacctatcccacttatttttcgcagatgatctcattctcatggggagagcaacaattgatgaagctaaggatttttggagtgcttagataagttttgtgattggtctgatcaaaaagtgaataaactctaaacctcaatcttcttcagtaataacactagtgagggaatgaagagaggaattaaagaagctttgggtatagaaggtgtggtgggaaacatcaactatttaggtttacctctgttcaggtccaaacaaaaggatgcagatttcaactttgtgttggacaatcttgtgtcgaaagttcaagactgaaaagttaagcctctctctaaagcaggaagagccactctaatcaagtcggttgggcttgcactcctggtgtacttaatgcaaacaactaaacttttcaatcgtatggcttctacagtaaatggcatggtcagagatttttagtggagatgtgagaaagaaaatggaggggtttgcttgaaagtgtgggataaactttgtctccccaagtcctgtggcggtctggggtttcgtaagtctttgaaaatgaaccaggtgttcctggccaagtggggttgattgatgcttaatgaccaccaatctatgtgttgtaaagttcttaaaagaaaaatatttgaaagataaactttttatgaaatattcttataaggattcaaactcttagttttgaaaaaatgtgatcaaagcaagagcagtcttggaaaaaggagtgtgtaagatgatttcaaatggtaaagataccaaggtttgggaagatttgtggattactcatggtaagaagtttgtgcctactccggtaatcggtagcgttagcgatacaatctgggtagcagaccttcttctggattttggtgattgggatatgtcaaagctaaggagcatgtttgactcagagacaatcaatagtattttgaaaaacggtaaacataaaggtcatggcatggataagtggatttagataaaggaaaaatcaggaaggtttcctatgaaatcggcttacttagtccaagcacttgactgcgacccccgtgtgaagtggctccttcattgtggaacaaactttagaatagtaaaatctaggaacatcacaaagtcttgtggtggagtattctgtccaaagccctcctgattcgtgctgttattgccaagagatagcaagttagtgaaatttgttgtcctatatgtgggaagggtgaggaacaatggaacacctatttttgcactatgattttgcttctcacctttggaaggtattcccttggggccttattccgatatttgagtcgagtggtcatatgtgggattgggtgcaattcctttggggtctccattctaagggtgcggtggtggaagaagtgtttctttatgcttctattgttgtggacaccatttggcaagctcgtaatgacaaggtacacaataatagtctgtataacatcaaacattatattgattctaacacttaggggtgagcataaaatcgacctaccgaacaccgttagaaccgaaaccgacgaaaccaaaaaccaaaaaaaccgctaacggttaaaaccgcc

SEQ ID NO: 303707 - DNA, 1719 bp, Cannabis indica
aaaaaaaaaaacaaaaattaatgtagaattgttttttctttcacaaaaatatatttagtacaagtttttgggtagggtatatttttggatgtgctaggcaacaaaatttattaattatagagcagttaattggaaaaagaaaataaatatagtcggtggagaactttaaatcttatttaagagttaagagactataaatgtctctcttctgtcttttgttcttctccattcatttttttttcttttttcgataagtctcttttaaggacatccctttctttgacgtacgatatggaaataatcttcgattttcactgttcactatacattttctatgattttgttcccctctctctccttttttttctcttccttaggaggaaggccccctcttttccaagtagtgggttaagaagaaaataaaggacaagtaaacaccaacaaaaatcaaataaggactcccataaaaaaaaaatcaaataatgacaacttggaagttggaatgaaaataaataaataaatggcttacttgcaactttaggcataacacttagagattttaagtgatttttgtttaactattcaattatttgtgttttgtgatgaaaatgactaaaaaaatctgtgattcccatgttaggtatacttatttactatcatattcaatgatcaagagtttgtttgctgtgttttcagttttcaaattttaaaattgtatttttaaatgtgagaacaaaaaataattttttgtcattataaaaatataatggtattcgacacaagttttttaaaactatttttataattttttattaaaaaaaattaatattttaacactatcccatgacaagaacctattcggatccggattcaggtttggtttcgaatctaagatccgagtatgtaagcaaaatgataaatataatatgttagacaaaaaaaaaattgtttttaaaaattgaaaacaatattttgatgttttctgttttctaattttttaaaattcagttttttaaaagattttgccaaacaatccctattagtttgtaaaaattattttttattttttaaaattaaaaataatttttgagttatgaaaccaaacaaccctcgagattttaacattttgtttttctttttgaagagtaaccaagtttttagtttattattctttgtttccggcgttggctatcatatttaatgaacaagtttctaattctctattattagttttatctaattcactatcctcgtccttgaacataaatgtaacgtttaattttcaataatttttcaagatttcagaatgagaaagggatttgcaccacttaatctattttttctaataaaaaaattcatttaataataggaccccaactaaaataaatcctttctagtacttgactaagatttgatcaaacactccttctttattcattgaccaatagtcaaacatttaacaagatgataagcgttaaacaaattcttacatctaatcaaattcaatatttttgtgctataattaatcataaaagtataaataaaaatactttacattttaattattaaataatataatgtattaaaaactatactaattattataaataaagttttgtaaatatacacaatattatccttaataatagaattaatttcacaaatgcacaaaaacaacaaaaaaaaaacaacaaaaatgcagtttcacggaattttaaa

SEQ ID NO: 303708 - DNA, 1186 bp, Cannabis indica
aaagtctcacaaggttttatacagctcagcccaataacaaagaagaccatcccaaaagatgtaaccctaattatcaaaccctaataaaaaaagggtaggagcagtaagaatcaaaccctaacacctctcctcttcactttcgctcttcttcttttcttctaaagaatagcagctgcggttccaagtttttcttttcttctaaaagtagctgcccaacacttgggttcttagtcttcttctttctttctattagcagttagggttcttagattatagggttctaatcttttcgttcttcttccctatttcacagccggataaagctatattctaaacccaaaaatctattatctcatctctctcaactctctcggtccaaacacaaacacacaaacacttggacccagagaaaactcacacactcaagaactcgagctctaacccaaacactcaaacttgaaccatgttccaaaccgaaaaactcatgtggtttagttcctccaaatgaaaaggtctccacaaacattatttctaggaaactgttcactcgttgttgtccatcttggaaggagttgtgtggaatgataattgagttcggaaggaagttctcgaatgactatcatgtccattccaggttcagtcctcaggataactagctcttctctagagttccagctggctagttatctttcctggaatagtagttccagatagctgactttgtagtcttacatcctatctggaagcgtcttcagcaagggtccgtggtcttcgagcccgaaagctcgttcatgatcttggaggccctgatgcttatgttgacgtggagacttcgctaaatgaggagttggttgagttagtattttctaactaacttaacaacctcgtttcttgtagacgctgactttaggatcttgatccaagcctataaaaaccaccttggctcaacttttgaagacacaattgagatacaagtttgagaactctgttcagaggagattgagagagaaaagattaagaggtagagagagaggtgcaatctcccacttgccctaaaagcaaactggccatctcatgtagtcccatattattaccataaaagattttgctggtagcatctttgtgaatggatctgccaagttttattctgatgcaatctctaagactgtcacatcacctctctcta

SEQ ID NO: 303709 - DNA, 1643 bp, Cannabis indica
atatttgttgtgcacatacaattactcaatatttttgtgataacgcgtttttctattggcttctgattattgtttctgcatgcacattgctgtaagatggtcccaaaagaacgacaatgagcccacaagatcttaatgctttctatgtgctagttcatatggtatggaccatttcttttaatattaatttgttggtttactactttttatatatatatatatattattattttcattcttaatttatctcattcctttatacctgcatgggcgtttgtttgtgtgcctaggtttctttcaactcattcaaaagaatcttaatgagtttcttacactaaataatcatgtgtttaattaaattaacattaccactaccaggttagttattacaaaggggtaaaatcatatatatttgaatgaagtgatctgtcataaaagtcatattttgaaaataaaaatcttgaagaatcgatctacaacgaatgattggaatgaaacatatatatctcgatgcttctgcatttaatgcattcgattgcacaccaccactgaaagtgacccatctatctagtacttataatttagtttatttattaattgaatatatatactaatattcaacatttattgaaagttaccctttattggatatttgttcggaaactggtcagaaaggagttggcatgtacgttttcttttagttattatttattattattgtttttctgagtcagttggcaattggcacagtgattaaatcaaaccaacttctccttaaagtgaaaaaattagcatatatatagcaaagactgaaattttaataactataatgtaaatagactttgagacacaattgagagctatttttgttataaacaaaagaagtttacataaaatccttttcaacaaaatgaaaacccaagtgtaagagtgagaaagaagagtcttttatcctttacatgaaatagtagtaaaagggcaaaataggaagaacaaagacaaaccaagaaagggaggaaaaagaaaacataaaaagtattccatctatagccaaatatgattagacagaacatataattctgtttcaaacataatatttttcttttttttctttcttgtgtccaagcctgttatcagacaatctggaattgaaagcagatttttttgacttcaaaccatgtgaactctttatacaaactttcttcacctttcatgagacaaggcaatggagctattttctcacacaaaggtggtcccccaaaatagatcattgaaactctagactgtaacccgtttgccagaactctgtgcttcacactctggaatctactgttagtcatcacctgcagtattcctaaactttttagtttactacaaaaaaaaaaaaaaaacccaataataaccaataataaacccatcaacaaaataaataaaatataatatctttgaacagtgcacattatcttccaagttttctattttgaccaaaacaaaaaacagaggattaagttcatctcaatacttgggaaaccaaagcagccttttactttctttcattctttccattttgactatataatattaaggtggaagttgaaaacggtcaaaagtaaaaccctttttcagtttacacataaaatctt

SEQ ID NO: 303710 - DNA, 2267 bp, Cannabis indica
tgtaatattaaaaaaaaaaattatgttatataaaaaataagagagatatgtattgtgagtttaaatttaaattataatattttaaaaaacaacacttaaatgtagacatagaaacatacagatataatataacatagatacacaaagatatatacatgtatgtatgtatttattaccagtgaatagtaacgtcgtatggagatttgttagagacatggacgacaagggtatcgccctcattcacttttatggttgggccaggcaagctattatttactgctgttatcacttggttacgacatagcttccttacactcacgtcttccacctatatatacaaaataccaatatctatattatatatatatttgtatacaattggatgattatatgcatgccaattgataaatgatagtgttaagaaaatttacttacattgaaagaatgttctactacggcagcaaagctcagtgatatcgaagcagcaactaaaagaattgcaaaccaaatggcaaatcttgccataataattaatgtataattaaggcttaattatatataaatttatgagggatatattttagtgaaagtatagaaattggaattggaattaaaggaatatatatctcaacaaaatgattatgttcccccatatatagagaaaaaaaaataagctatacgttggaaaacaccttggcaattgatcgattacgtgacgatattgctagggctctcattgtttttgacaaaggcaacccaagacttatatttggttttgaatttttttgcaggttttttcttttattattattattatattctggcttatggtcactaatttggaccataaatgctagtacagaaacttcgttgccaaacaattacaaaacaatttatgtttgttatttgaaaggaataatatgattgctgtgttaaaagtcagaatgctgtgtgttttgttcttacaattatttcaaagcaaggagttcgttgttgaacgtaatagatgttttttacgtacggctatccaaattaagacacatgtgccgatatagctagcgatcatatatggagtcaatttataatatacgcattatctattactcaatatagtattttagtatattataaacaataatgattttttttaaaagctttattattattattattattattattatttgacatttaaagaggatttgaacttgtgactttttcaatgtaaaactattactatgaaattttttactttaatttaaataacattaatatgtgtgtaaaagttgaaaatgctgtgtgtacttaggaatatactgcatattttatattgaaatttgagtacacatacctatacctatagatcaaatttttttcctcccaacaattatcactacaacatcatgtctcaaccaaatcacatctctatattcaaatgaattgacatagaaaaataacataaaagaaaaattagaaacacgatttggtaattatagttggggcaaaaaattcaaaattaatacataaatagatatagcatacaatggtcaactcaattgtagaaaaataattatttgtttaattttgtcaacatcatttggttcaaaatattttactaaatgaaggttgcaccgatactcaatattatctcttgaattaaatccccataaaagtcaacttattacaacataactaagtttttattacgagtcacactactacaaattaaacaaaccgttagtgatagttttttcatctcgttaataaaacaagaagcaaaccgacgtcatagagtgtggctggaatgaaaaagacatatggcgttagttattttgtaattatcgacgtcatagagtgtgaaataaaaaacacatacggcgtctattattttgtaataattgacgccatagagtgtgactggaaattaaaaacaatatcgtcaattattttgtaataaccaaaaccataagacacgcttgtactgaagcgtgtcccccatgctgttgaaaaataaccgatgacatatggtgttaaaacactgaaattaaaagagctagcctcatttattcatcttcttcattacagagagcaaaacctgaaaaatccttgccaatcctcgtcatttaacgcccactacaagaattcccctcaatagcggcggagctcctccgccgctaataatggtcgtattagcggcagaggccctgtttggccgctattggggggctgattaattttttttaaaaaaaaaaaattaatagcggcgg

SEQ ID NO: 303711 - DNA, 1572 bp, Cannabis indica
actaaacaaaaaaaaaaaaaaaaaatgaaataatatataataataattatataaatactctaatgtatcaaataataaataggtacataaatatgtgtccactatttatgacatgttcccacaatgaattatcattcaataataactttgttaagagttccatcagcaacaaggctggaaatttcaatatgaaagcaaccaaataatttaagggaaacattaccaaaagaccattcatatgatgtgtacaaatgtgtattattattcaatttgtgtaagaattagtttagtttacactgtaatagtgttgtaagtttgtgcgtgtcgtgttggtccggcttgtatttattcgtattttttaaaaaacgggtcgtgtcgtgccaacatttttaaagggtaggcccgatatttttcgtgtcgtcctcggatttgtgttgtgttttgtttgtgtcgactggtatttcttaaacaagccaactcattttcatattcgggcataaattcgtgctttacttttttttttttttgcaattactaaattatatgtatatttcaaagcattaattatatttatataatttttgagtaatattttacagataattatataaaaaaaatatattaatatagaatttgaatatttacttataaacactcaaatttttatatcacaccttaaaaataaataaatatataatcttagtttttcacgttttaatagtttttattataaaattaaggcagaatcttctcaattgcgtcacctaaaaaactaaggtccacgcttttttccgccaaccaagccttgtaaatggagcgcttggccattaaagtgacccttgcacgagcatcttcttttgcctggtcaaggtctttcttggctttctgggtggtgtcaagcagcagttgtttcagattctcgacctttgccttcaactctttctcaaacttctccaaatctttagcttttttcttaaggcgagtagacttcgccttgacatcattcctttgactagcgagccgctcacgatgttctttagctttgcaaggctccatggatagatggtttaaattttaaaaattattcttgcgacccaggtctgctagaaaagaagcctacataaaatacaaagtcagaaagaaagaaaagaaaaggtgtgatgaagcaagaaaatcaaaaactaatcgattgcatgagctcgacacttcttgccaagagatcactgggagcgccattattgatcagattccactcatttggttataagtcctaaaatagcgacatgtctgagttacatatcgcgagtaggcttttgatccctcgataccagcgtccagaggcaaagggcaaatggggtccaatagcataacctctggtttggctccagaaaatgtaacctggtggatagaccccaaggtttgtttttctgtgctcacggattcaggggtcgaggtaggggcagcaagggtaacattgtccttctctggaacaatgctagaggtagaagaagtgtaacgtcctcgcttcaagcctccattgggtcctttcacccacggaatgaatggctctta

SEQ ID NO: 303712 - DNA, 1061 bp, Cannabis indica
agagagagagagaagggtgatttcatcacatgccatgattggggtcatgaagagcaaaaaccagatgatgagaaggaaaagagagtgggcttgcttattagtattactatctctccttcttcttgttttactacagttggagagcagtgcatgttttgcagaggggcataatgggaaatctgtaagattcagaagtacagtgtccagttctcatcataatcacaggtctcgaaatgcaagagaagattataacaaagatgaagtttttggtgttgagaagagaaaagtgtacactggtccaaatcctctccataatagatgagttagttactattaatcagatcaaaaattacttctgtgtttctcttccctttttatctgtcaagatatgattttttttttctctttcttataaattctatcataaaagaaatattttatgaggcatttttttttattctggttgaggctatggtggctgtataaatagtactgttcacaggaatggttcaagtaatcttacagatgtatatgattttttttccctgtgagatttccggtgagcaaaatatatacttgtttagttctttatttttcttaacaataaaaaattatatatataaactaaaaaacaagtcctacttagataatgtgagaaaaatatatatttaaatatatattccagcagatatttaggtaatgtcatttatgatgtagttgttggtgttataaatatttgtctggttttgctttaattggtaggtaggtttcttctatgcacttaattcatcttcctagttatgtaatatgtatatgtaaatagatacaggattacacttactttgacctcaattattagattatctttaattgcatttagtaacaacaaaaagtgtcatgtatgagtgcatggatatgtcttaagaagatacaaaataaattaacatttgtaataatatacaaatatatatatatatatatataaggttatatcataaaactgtcatcaagtagctaggaggtaataaaattatgaaattttttattattaaaataatttt

SEQ ID NO: 303713 - DNA, 2029 bp, Cannabis indica
aacagggacttagtcttttgaatcatataatcacaatcacataccactgtgttgacaatactgtaattgtgaataaatatatgttttgggcttaacagattttgtgtatatatatgttaaacatattaaaccataagcatgaaaaattcatgcaaaaataaatcacttcaaatttcttaaattgataactaatcagattgtaatgggttttatttatggcacaaaaacccaacacccaggtcctggtgtcgttctgggtttgggttggggttcaggtttgggttctggttcgaggttacaatttagcttcgattcgagtttgagtcccgattcgagtttatgttccgagtcccagtccctagtccaggtctaggtcttaggtctaggtttaggttttggaccaggttctggtcaaggtcctgtgttccggtatagttttagtttcagttttagaaccttggtttgtgttcaggtatgggtccaggttcgggtcctggtctgggtccatgtttgggtacgtgtttgagttcaggtcccaaatataggtctaggtctaggttcgggtcctgggtccaggtttggttcctttttcgggttcaggtttgggtcccaatttgagtctgggttccgagtctcgagtctgagtttgggtcttgggtcttgggtctcgagtcttgggtcccggtcctggtctaggtctgggttagggttcgcgtcccaatttgggtctaggattgggtctggctatgggtctaggtctggctcatggtcctggtctcagttttggatcggtacagttctagttatggttttgagtctcgagtctaggtttgggtttgagtctaggtccgaatcttggttttggtctgggtttgggtttaggttcgggtttgggtccgactcctagatctagacaccgactatggatcaggtccaaacctcgggtccatggtcccgaatcttttgtcaagatttggatcttggtctcgaatcctagtctgcttcgaagttaggtcccaactcccaatttgagtctgatatcaagtttgggtcccgggtcccgggtcgaggtcccaattccacgtccggtttgggtccttaatctaggttcaggttttaggtcccagtctgtgcctgagtcctggtttgggtttagggtcgagtcttgagtcccagtccaggtcttcgtttgggtccaagtcctaatctgtgtccagtttcgagttcaggtcttggtcttggtccagttctggttttgggtctatgtttggatcctggtcctgtcccatgatctcgagtcctggtccaatttcggtttgattcttgagtctaggtttggatccgtcttcgggatctgggtgcccggtctaagtctgggtcttaggtttcgttcttagtataggtccgagtttgagtttgggttcgagtccgagtacgggtccagtttagggtcttagtttgagtcttggtcctagtctatgtctgggcctaggtctgtgtcccgggtcccggtcatagtcttggtctatgtttggaccccgatttgggtatgagtttgtgttttagtttgggtctaggtccaaatttgggtcaaggtctcggtttgggttctattctgagacggggtccaggtttgggtccagttatagttttaggtccaggtcttgctatcggtctccatctagtttcggttctaggtttgggttcgggtcagagtccgagtcttggtctaggtccgagtctaagtctttatctgggtctgagttagggtatgggtccggtccagatttgggtttgaaattgggttcgggtctgggtcattatctgggtctgagtcttgttctgggtttgcgtcagggtctcaggtccaatccatgttcgagtcacagtccaggtctaggttcggttctaagtccaagtgttagtctaagtcatgggtctcggtcccggttttcgtccaggtccgcattgttggaaatattttaccaggatctagatttactaccatgtatgtttcattaacatccta

SEQ ID NO: 303714 - DNA, 1216 bp, Cannabis indica
ttctggtggagtggggatgatgacaaaaagaagatgcattgatgtatgtggtctcagttatgttggcacaaaaatgatggtggtatgggtttcttagacatgtttttttttaatctgtctcttcttgctaagaaagcgacacagttatataatgctcctgattctttggctgctaaggttatgaaggggttctattatagtaatagctctttgctggatgtcgaggagacaaagcgagcttttttcctttggaagaacattttatagggtcgtgatctttggaagaaagggttttgttggcttgttggtttaggggattctataaaaatttgagaggatgcttggattccaaaggaccatgtaggtcaaacttattcattctcgtgtggctctcatcttcaagtggttagtgatctcaagcgggataatggatgttggaactcctctttaattctagagtcttttgataaggtcaaagttagtgctattttgtctattccttgttatctatttgatcgacgtgataggcttatttggcatttttcagacaataaaatttactcgatgaagcgtggttattggagcgcaactttgagtttgggttagggacaagctttaggttcatagggatgtctcgttggtggaagcttctttggcaaattaaccttccaccaaagattaaaaactttgtttggaaggccagtctaaattttttaccgtcctatgtcaatttgacttgccatggtatggaagcgtctaaggtttatcctatttgtttccagaataatgagactactattcatgctcttttgctttgtcattcgcttaattctatccgttattggatcctaaaagagcttgactctttaaaggatgcctcttgcttttatgaattgttgttgggttgtgtggatattttgagtaaacaaaaaatggaggattccattacccttagctggcgcatttgacataggcgtaatacttttgttcatgatcataaatttttacccggtaatatggtcaattcttgggcaatcaattatctgcggagatatcaagatgctaacattggtaggtcctcgacaaatggtaggcctcctactccgggaccgattgaattgcctgctactaacacaaatttggttttaggtaaggtcaacttgtttgtggatgctgggatttgtgatgaagactgtaaaatgttgggttttatgcc

SEQ ID NO: 303715 - DNA, 3396 bp, Cannabis indica
cttgaagttatctaatgaaatttaccacgtatttgcattctagtgtccaggggcataaagaatggataaatgaagtgaactttttaggtgttgtgaagcatccaaatcttgtgaagctagttggatattgtgcggaagatgatgaaagagggattcagagacttttggtctacgagctcatgcctaaaaaaagcttagaagaccatctgttggctcgaatgccgtcaactctcccatggattgcaagattgaaaattgcccgtgatgctgcccggggattggcataccttcatgaagaaatggattttcaggtatcttgtctctcctttttttaattgatttgatttgaaattcttcccttgcattaagaaaaaaagaaaaggttttaatgcttcccttttttatgtctttcaatatagtttttgggagaggatgacccaaaattccttaacttaattcatgcccataggcttgtatactgtggaaactaagttacttctcagaagtaaataatatttggatcttttggttggtgcagttaatattccgagactttaaaacgtcgaacattttgctagatgaggacttcagtgcaaaactttcagactttggactagcaagacaggggcctcctgaaggaactagtcatgtttccacatcagtaagttgctttacagaaaaagtttgttggatccaatactttattggtaaaaattaaatgatcatgtgattggacgggtcagagttctgcttcttgtcagaagctgtttgaattattttgtccatagttaaagatggtagtaccatcttttaaagttggtcctgataaattacctgtttctgaattcttgtttttggcatcacacattttctgacgattttgtttgtatgaacgctgctcacaattaatacttttttctcaaggttgtgggcacggtaggctatgcagctccagagtatgttcagacggggaaattgactgctaagagtgatgtgtggagctttggtgtggttctttacgagctcatcacaggaaggcgggctgtggagagaaaccttccccggagtgaacaaaaacttctagaatgggtgaaaccttatgtttcagactcaaagaaattttaccttattattgaccctcgacttgaaggagactattgcattaaatcagctcagaaacttgcttcattagcgaataagtgtttactaaagcagccaaagtctcgccctaaaatgagtgaggtggttgagattcttggaaacattataaacgaaactacatctcaagaagtagaaattgctgctcaagaagttgttgccccacaagtcatcagcgaaactgaagaaccagaagaagaaaccacagtggaatctgaacctgtgtccaccaaacaaggaaacaattatctaaagaaagtgtttgatataagagaaatggtcaacttaagaaccaaatccattagcaagttggattggcgaaattggactcctgggttggtaagaacttcataaaatctcaagcacaacctggggcagtgaaggagaaaagaagtaatacagccatttctctttccatgcaatggtacatcacacacatgtatccattaatatggtgtatgtgaaagaaatgaatgtgtagatatgtgctattcctcaaaaactcattgaagatgtcttctttctgtcccttactctttgcctatagggttatgtagtctttgtagatattcatatatatgtgacctgtgagcgacttgttttgtttttttgccttaaagagtaatgatatatgcacctaaaatatacataaaagaattacacacagtaacatggtagtgttttctaatgagaatccatgttttatagaacatcaacaagaataatgttttggtacactttttttttcagccatgcaaatacgccttagtagtcgagttgcagttgcggattggttcaattgtacttatagcagatgtagtttactatacagttgatgagtaaacactcagggagcaatgtcgcggagaaacttaattggagttagaatttttagtcccaacagtcctatactataacatggattttataatcgactgttgttcgtgctctgtttttgtctgtaggatcacaagattaggtaggaccatgacgatcttttatcttcccatgtaggatttgaggagattaaatatatttcacaatttttaggttttggttgggaaatttgactttttatgcttacaaatacctaataattttttcctaaacacataacatgtaatattcgtgggatatgacacaatttacaatattcctaaaataccctccatttacattatcccctctcttcttctctttcttcatatccatcgaaccctcatcagggtccccatcggacctgtcggacccaattggggtccccatcagacccatcggactcccatttacagcacatgcatcagaccccaatcggggtccccatcggacccaaaaactatatttttcgcacatacatcgaatctcatcgggccattgtcttccccaaactgcgatttccccaaatcgcagatctgaaccttggacattgttaagcatcgttcgggtctcctccgtgacgtggtgatgagggtcggaatgttgggtgtgggtctcggtcggggtgatcagttggagtgggttctgtggggggttgtgcgatgtgggttcgggcgaagggcgatgatgagggtcggaatggtgggtgtgggtctcggtcagagtggtcagtcggagtgggttgtgtggggggttgtgcgatgtgggttcgggtgaaggggaagaggcagagagagtttgagggaaagagagaaaaagggtttgaaattttgagaggagtatttttggggttttgaaaaagtgatcatatattttcaatgttaaaaagtattagtttagggaaaaaattatcccctgatacatgcatagaaattcaaatttcccttttggtttttgtttggatagataatagtgagttttgaatcttttgatggaatcccttacttttgtaacgtgtagtgtacactacttcatgattagaaaagggtgggaaatggggtggtgggggttgggatcaaagtatgttcaagtatagacagctttcatggtccatcaatgaatctagcttgtttcttctttaaaatatactctgttcttcactattacacaggaatgggtggattggtaccaataccatggtagtgagttttggtttcaacccaatgaatttgcaatagtttggttttaatatttggacttgtctgcagcccatatctcatacttactcatgcacacgtacagatctataataaagaaagggcccattctttttatttgggcatttctttatattctcgggat

SEQ ID NO: 303716 - DNA, 743 bp, Cannabis indica
tcatacagggtcctcaccttttggtatcattaagattgttgaatccctataagagaaaatagtcgatgggagtgcgactaagagaaagaattgggagagagatcaaatgatagctagggctaagaaaatggggatgaagaatcgtaattaaccctaatttgtataaaagcataagaatagacacgagttgaatctatgaattaaccatcaatacttcaagattgttggaatcgtctctctactcccattccctatgtcgatcaccatttcaccaactctctctctctctatctctctctctctctatgttaattttgtgaacgattgataatctatgtggatttacttgatcattgttgaaagtttcttcctttgctccctttctccgaaaatggataagtactagccctcttccaatatgtcaatcacaataggggtaaatgaagaagaagctaaatgtaaattttattttgggatgctagtaacgggaaacattagtcttccttattttatattaaagaaaaattaacgtttaaaaataaaatgttaaaccaattttgttgtatagctacattttatatagaaatatatatatatatatatctattctatataaagtgtgcatatataactaaaattcttggtttttgagaaatttatgggtgacttttaatttttatttaataaaataataaaatattatttatattttgagaaatttatgggtgacttttaatttttat

SEQ ID NO: 303717 - DNA, 3180 bp, Cannabis indica
ggtgctccttgtcaatgaatccttgtaggttgtgtcatatagacatcctctttaggaatgcattattgatatccacctgttgaatgtcccaattttgttgagtagcaagagtgaacattatgcgtatggtgcataggcttcaccattgggttgtatgtctcaaaaaccacaccatagtgtctgctgaaaccctcgagtcaaactaatcttgctttgtttttgtttaccgaaccatctgcatttatatttaatcttgaaaatccatttgttagtcacaatcttcatgtcaagagtaggggaaccagctgccatgtgatcttattttttaaggctacatattcatgattcatggctttgttccactttggatcagctaaagcttgtttgacagtacattgttcctatctgttctgatatctgcaagataaacctttggtttaaaaatgcccatcttcgaactagtgaccatggggtgagtattcttgtttgggggtggtggggttgaatctggtggaggaaaatggtgatgttgaggttcagaagggccttggtgttgagtaacagactgagatgaaggggattcttgtgactcgagttgatattggcttgacatgggttgatgaatatggacagattgtgttgagttggaaggtgatggttgggaattggactgagtgtgattttgaggtgttatgttggctatttgaggaatgggataaactatggtgttgatggcaggaatatgattgttattgctggaattagatttagggaacaaagttttataaggaaactcagattcattgaaagtcacacttctagctatatatatttgaccactgggatgaaggcacctgtatcccttatgagtcatgttgtacccaatgaacagagagaaagagagagggagatgaagaagtgagaatgatgaaaaggctcacacgaaagagatgagcttagccgctaatatattgatcaagaaagggaagagcgatacaactgtcaagtagttagttagagcaactaacgaaacagaacctgactactttttcaactaactaactcatccctaatagaggaatctctcctttgcaggaaggtgtgttctagttaactctgtttttctcactattaatacatattgggctcaaattgttgtttgcctaaaatagttgttaaaagaatcaaccaagtatgtcgtacttctttgtggaaaggcaattcagattatgaaggtcctagtagaatttcttaggttgatgtttgtaaattaatctaagaaccatggtggctcgggtttagagatgtggagttgtggaataaatatgagcgatgataaaatatatttgggctattgcatttaagtaaagataatctgtaagtgaaatgggtgcatagtgtgtatataaaagaaagggattagtgggattacaaaaatctcactacaagtagttggtattaggctcacattgttaagattaaagatgatcttaagtcctcttacttggtcactgagtataattggaacaaatacaatattggagaggtgtaccataaactacatgactctgaagatgtaaattggcattttgtttttatttgggatagattgagtgtgtctaaacacaaatttgtttgttggttggctttgaagaggcttctacaaatgaaagatcgtttactacggtttagaattaagatagagagtcaatgtattatttgtggaatccataatgaatctcatcatcatttattttttgaatattcatttaacatgagatgtcttcttcaaattgttgattggctaaatattggatctcactatttttatcttgcctgagttagtgaattggataaagcatagtaaccattcaagatgtagaagaaggctatacacttgtgcattaattgtatcatatttggatggttcagaatgatgctttttggaatctcaaggtaccaatggtggcttcagtcatgattaaagatataaagagtgaggtttgttatagaattctttttttgaatacaaatatgattagcataagtgatagaaattgggtggggaatatacattataagtaatgattgcttgtaatttctttggtccacaaaatttcagctgttttaaaaagaaataataatgatagaaaaaaaattcaatgaatatgttttagcatacttttataatctaaaatatatatataaaaaataatttttaataatttttcaaattcaaaataaaaatattatttagtaaagaaacataaattcgacatacatttttttctttatgaaaatgctaaactttatgaaatattaaatgaaaatttttatttgcacccataaaacttataaaggaatttaattttaataattttttatataaaatatatatcattgatttgcactaatttttatcttctcttttctcatattatcaaaaatacacatataaaataaaataaaataaaatatttttttatttattaggacaataaaaattaaaatgaaaaattataagaaattttattaaaaaataagaattaaatacattttttttaaattatatatatatatatatatgaaagtaaaattaaaattattattgaaactacacaaaatataatatgaaaagacatgtacaaaaaaaaatataatatgaaaagaaaaatattaagaatattttttataattaatttaaatttatttttataatatataattttgtggggtgaaaattgaattcgccagatttttattagggagttaatacttttaaaaaagttaatttaattacaaaataatgttagtggttgtaggaaccatcctaaaattacactatgggaccctaaaaatgccatcatcaatgtggttttttttttttcttatttttacattttttttccttgcttattttacactttgatgttgatagttgggcgaatttttctcacacgtgctcttcctctcctttcattctagatttgagtttctaaataatgtaatattcactaaatattataatatatttattatcatttttcattgtatgaatagatcaagatagtttgattcagaatatatatatatatatatatatatctttatatattaaaattgcctatctaacggcatttcttggtttaacagaatatacttaaaaataaaagaatattc

SEQ ID NO: 303718 - DNA, 1989 bp, Cannabis indica
ctcaaattgagactgaatgaaagctatttgttctgccttaaaaataaataaataaaaaagatatttgtccttattacgctaaatgacaattgagattgtatttgactttgtcaatacttaactgcctactaaacaacaagtctattttgtgttccccaaaagaaaaaaaaacttattttattttgtatgttaaataaggatgtaggttttttttttaaaaaaaaaaaaaagaaaagaaataaggatgtagtttaatccaaaataaaattcatcttatacaaaatcaagtgcaatatttttaaatttaaatgataatcttctgcaaaaaaaaaaaaaaatttaaataaataaaatggtaatcatatatcaaagatatattaattaatgaatcaatccgttgcccaagaacatggccaccctgttgaaatatctcaataacgtatactgattaaattaaagcaataattgatgatataccaaccttaaatcaactactaataatatattacaatattacttgttgacttacttgtttccttaatttttgcttttgcctataaaaggagtacgtaatatcactaaaactaatactactaattaattaactaccaagagctaaagctgaagtgagatatggcaatggcaggagatcataaaggggaagatgcagaagtatttagtaataataatgagcagcctattcctgtgcctgtccccatgaaagaccggaagccatcatgggctaagctaaggcgattggactctcttaacttggaggccggaagagtttccaataagccccacaaccacactttaggggtatatacatacatacatattatatacatatataattatatacatataacaatataatagattgataatgaagatgatatggggttgcaggggaattggcagagaacgttgttgttagcgtttcagagcatagggattgtgtacggagacataggaacttccccactctatgttatgtccagcactttcagtaaaggaactattcatgaccaggatgacatcattggtgttctttctctcatcatttacaccattgccctcatccccatgctcaaatacgtctttattgtcctttgggcaaacgacaacggtgatggtacgtactttaatttccagataaaagggtcttaccaaactgatcaactcatatgtatgcatgcatgtgtatgtgtatgtgtataggtggaacatttgcactctactccttactatgccgatatgcaaaggtgagcctagttccaaattaccaaccagaggatagggagctttccaactacaagcttgaaacaccctccaaccaattgaagcgagctcataagattaaggaaatgttggagactagcaaattcgctaagctctttctgttcacagttaccatcatgggaacttccatggtgataggggatggaattctcactccctccatttcagtcctgtctgccgttagtgggatcaaatctcttggccaaaacgtggttgtggggatctcagtagtgatcttgatcattctgttttcggttcagcgattaggcacagacaaagtaggttcctcctttgctcccatcatcttcgtctggttttctctcctcacaggcataggtctttacaacttattcaagcatgacatcggtgtgttacgtgctttcaatccacaatacatagttgaatatttcaagagaaatggaagagatggatgggtttctctcggtggcatttttctgtgcatcacagggtcagaggccatgttcgctgatctgggtcacttcaacatccctgcaattcaagtaagtactacctagatagcctagatatataaacacatataatgattgtactttggcagtcgttagacgatggaactatagtaaccagactcatctaatatactctaaaacctatcaaatgtaccacgaaatacaggacaaaatagtgtacctaaatttataatct

SEQ ID NO: 303719 - DNA, 1206 bp, Cannabis indica
ttcaggagcgaagccactcgaacaaatgtgagaggagcatcaggttttttcattgtagccggaggtctacaagccaacggagccagccttgttcaactgtgcccacgaccccgtaagccctcgaggcaaggcgaaaaggaagagatgctctggctttctttggtcttgaactcgctccccgctcgagaatgaatgttggaaactcttcgatgacatcttcctttgagtgtcttagtgccatttccttaagggtatggctcacctgctagagctaacaaatctgcccaattgttcttctattgaagatactctgtcataggaatggtccttttccttgtaacctgaatcatggttattgtctcatctattttagatttggagtgtgcaccataaatttgttctagagcttgccataggcctgcaatagtgacaactctcataacctctgtggttatggtttctgtcatagaattgtacacacagtaattggtcatttatgatctagttttcatagacatggttgatacttgagatacttcaccatctaagcttttcatgatagtacctgcatcaacaaactcagatgggcatttgttagtttcattgagatatatccatctaatcgatggcctctaactgtggtggagactatagttttccacagactgtagttgtgtctgtctagtttaaaaaagaatggctaatttagagtgctgaaatggtgagaaactcggttgtgaagctgagaactggtagagctagcacctaagactgtggatgctgcagcagcggctgtaggttgggttggggtattatttccaagattttgagagtcagtcgacatggtaattttttgctctaatactaagtcaaattttaaagagaaagattttgataaatcttagctcaattgtagctgagggaatccatgcatttatataagtagcaaacataatagcaaagcaaaaaaatgctcaaacatacagctagtaattgccataacaaaaacgagaatattcttacacaatgattaaatcataatttcactctaattgtacaatctttatgagaaaccctaattctaaaatagcaatagaatgatgacacttgtcttttcaagaaccacactataactgaatacacctcagcataaattctttcatttcttcaaactttctacaactaaaatttattggactaattttt

SEQ ID NO: 303720 - DNA, 1788 bp, Cannabis indica
tatataaattatatatatatatagcaataagtgaccttcaattcaattcattcaaatatccaaatatgatctcattgacccatcaatccattaaaactaaagatttgacaacctaaaacgtataaatgcggcaatatatatatatatatttatataatgtcctatgtatataaatagttttattttatatttatatatttaattaattaattgttgttggaaaagtttatttattttctatatatataaattagttcaatatgtaataagaactaaacaattattgttcattataaaatttctataattattttttttatacattattttaaaattaattgtaatgtcaagtgacactctagcactataaaatagtaattatagactcgattcataaatttaaataattacaaaaatatatatatataaaaaaccatatattttcatcaatatataatatgtgatgatgttaaccgacaataatttgaggaagatatatgaactgaaatataataaatagagtataagtttatagggatatgattttgtcctattattgtactttcacggattgtaatccgtgatgtacgacagccgtcaaatgagggagttatttgatctgacggcaaagattaatctaggggtaattagggttaaaaattagaaacgtaccctaacgtactaacactcggttaatgtaccacgtacggaatacattgcgtgaaagtatatcacgggacaaaatcatatccctaagtttataatacactctttaaaaaatataagattatttcggcaaatagaacaattttttggttaatttttattttaatgaatgtatattctatagttatataagattagtttgtaaataattttgttgtaaaaataattatttttttttatatgtttaataagtaacggtttaaacttaattttcagcattctaaactattcaaaattactaaaaatttacaaatagtcttaaataacacatacgtatgataaactcaaaaagttttcttaataaagatagatagatatagtagtttattaattatatcacctaattaatacgtgtacatataaatgtaattaatcattagcatttttcaactatttattcatagatcagcaaaaagatctacaagttatatataaaaatatatgtgataaatttatatatatttctatatatggttcgtacaacgttttgctagagagaattatatttaaatatacacaaattatataccagattgatcaactacaaaatatttgaagtgataacgtatcatttaaagtataattataattattatatgtataacttgtctatttggagatgatataattctaattaacaatttaaaaatcacaaatatgttattaatatttttattaagactttatccatgtccttattattatttcactaaaatcttgatagagatcagagagagatagtgctatatagagattataattaatacataattatctattattacaaaaaataatatatgtatttaatttggtgtacgtacgtataaaaaatgtacatattatatcattaattgtagatatgttaagccatgttataataattcattaaatatttttaataaatcaatataggcaactataacaatggatgacaaattattgaacatatttagtgatcttttttctaatgtatccactacaatattaatgtcattatacgcatatatatatatatactaggtgaatgtacgtgccgagccacgtattgctagtttcatttaa

SEQ ID NO: 303721 - DNA, 2249 bp, Cannabis indica
attttcataaaatataattttttatatatttttatgttatatttttattattatattgttaattattgttatagagctattcctatttcctactcaggggtagaaactaaaatggtccgataccctcacacgtgtgtaacttaataactgaactgaactgaactttgattcttgaacttactgtataggaacttttaaccactactttaatttagtagagctttttatcttagtcttttcaacttataagttttagttattttggaacatttacaaattttttaaattttggtgagaaattcgtaataatttgtattataaaatataatatttaaccagtttattaataaattagttaattacgtgtaataccatttgaacacaatttttagcatgttaaatatttttaaattttttaaaaatattataaaatattttaaataattataatttacataattattataaaaaaaattaaataaataattattttaaatactaaattatataaagatatatcaatgtatttcttttaataggacttgttataaattttttaatcataataacaaatttatacattcaacactttttttttggtatttacatttacgtacttaatttatttagatttacataattataataaatgaaaatatgtccatctttaaaaaaaaaatgatagatacatacttatattgaaataaaatattaaatttcactcttttgttaacgctgttgagttgttttaaaataatacaatacactatacatattatttttttaataataacactaaatataatgtccccaataataaataaatacgaaatctcgcaagtcaataataattataatttattttctcaaaaaaaaaatagtaattatgatttcttgccaagataaattatacctaatcaaattgagtaatcagtcaaaaatatatagagagacagtactgttgtttccttccagttcctaacttatataaattttttttcttaattaacttccttttatttttttatttttttatttttttattttttgataagttaacttccttttatttaatgtgagaaagttgtgatggttctgagaaaacgaggacaagtggcagagaattagaaaaagtagttgaaatgacatgcagaaggctccaaaagtcatgcaaattgtgagcagtacacgtggcacactctcagatgtgtcagcattttgtgcaactgccacatagcccgcacgaaacgctaccgttttttttttttgttttcgctcctggtttttgggaactccattcctttgcaaaaatactgctttttctattattaaatacagcttacaaaacgggaaatcaaccacactaaacttgcgtttggtagattttgagcgaaaagaaaattaaaatgatactctcttaaactttttttcaataacttcattgtttatagtttaacagcacatttagacactcagctcacatacaaacaccttcatcttgttgatagacaatactaaaaagagagtcagaattaacaacttttatagaaagtatgaacaaatgagcccaatttaatcctacccatagagcaaatactttagcttgaaaaacagaattaccatctaacaagatcaaacaccataaaatcagaacaacattaaaacatgttaaaggatttactaagcactaaattagaaaactagaagaaaaaaaaaaaaatcttccacccacttgagtaacccttaaattaaaataaagaaaatttcctattatactattaaaaaaaggaactgacaaaatagaccatactaaccaaaggtaacgccattagttagtgactaccaaattaatattaaactcctataaaacaaaaatctttcgggcccgttagatacgcagtattgaactggattggactgaaaaggattggactgaaaaggattggactggacgggacaagattggattatgttgaaagtaatcttgtgtttagtttaagaatggactggactattttatttattttcttttagaaaaataaaaatacttgaataatataaagttgtttatcttaaacactaatttaatcactaatttaatataaatattaattttttaaaatatttatataaattttttagtaatttaaaaataatatataattttattgtcatatttttttcttagaatcaatttaagtaactattatttaattaataatattctaaattttaaaaacttatgtata

SEQ ID NO: 303722 - DNA, 1824 bp, Cannabis indica
taacagaatattcttttatttttaaagtatattctgttaaaccaagaaatgccgttaaataggcacttttaatatataaagatataaagatataataggcaaatattgtattttataatttatttttgtaagtagtttacgtggggagtatcatttcactagtagtattataaatatcttaaagctagcttgcctagctgccttatgtttgctcatttaaacttcattgtaagaagtctcgattagtaataaatgtcttaagagaattaaaacagagacatatagcacttacattaattctatataatataccatatattgatcattgatgcatgtattttacataattttttaaagcaatgaatagtatttattttttaggtgtagaaaagtattatttatgctctaagtttattttatttattttatatgtgtataaattaatattatagaataaatatatattttaataatatagagaaaaaatacagaaatgaatgtgaaagtttaatgtaaaattaaaaggatgaaattttaataatttattttaaatgataaagttaaaaagtaatgtgagaggctaagagctttgacagtgtaaaaaatatactaattaaaacaaattattggccttgatggcagtgaagaagagtgtgatactatgatgcaaattctgcatcgctactctcggctctcggggtaacaaatcaatctcgaaaaatcagaagtaagtatgagaagctgtatatccaaccgaatgggtcaaaatctcgctagaagattgggggttaaacttgttgctcaacacaccaaatatttggggctgcctagttttattggtaaaaggaagaaagaggtgtttgaggtaattaaagacaaggtttggaataaactaaagagttggaaaacaacgatgttctcccaagccggcaaagaaatcttgataaaggccgtgatccaaagccatcccaagttattcaatgagttgtttccgcctcccaaaaaagctaatgcaaagccttcactccttggctgctaatttctggtgggggatacaaaagataataaaaagattcattggggtacttgtgccaagctttgtaagccaaaagaagaaggggtttaggctttcgaagtctgacagaattcaatcaagctcttttagccaagcaagggtggcggttgatccataaaccccattctcttttggctcgagttttgaaacatagctactatcctaactcctctttcctacaggccaactgccctccgggagcttcttgtatttagaaaggacttacatggggccgacaaatcattagagaaggagcccgttggagagttagaaatggaagagccattcgaatttgggaagataagtggatcccccgcacaaatggaaccatcctttatcgtcacccgggattatctcccaataccaccattcacaagcttttgaatgacgaaggcgattggaataaagagattatccatctttatttccaaaagaggacattcctgttggaaattattttagagtattatcaagatctgaggctgaatgtccttctctttgatttggatccttcacgatcttccaaactataattgaggtaccagtttctgtgtgtgggcactactctttcactagggtatcttgaaattggaagagaaagagaagagatagagggttcgactatagagagaaaaggaaaggctcaattttctgaaagaggcagtttcctgaattactgaataactgcttaactgctttttgacaatttcattctatttctcaaaaacgccaatttccaattactaacc

SEQ ID NO: 303723 - DNA, 1209 bp, Cannabis indica
cttcatcataatcaactgaatttcagttaacagaaacaatgacaactatctaaggagtaattatgttccaagtaaatgattaagatagattaacccatttcaaaactgcataaatcagaatttatagttatgtccatgcctccagcaaatatgatgccaatgatgatgaaacagaagtcaacaaaagaaattagatttaaccttttctagtaaatccacttcattgttcctagccttcctttcatatcctggtggcgggaacggaaaacagcgcgacattgcacagaatcccacaacaaacaacacgaatgccttccacagaagaaaatgttgatatcactttccagtaacactgttccgaaaagggaaagaaccaacaactatgctcctgtccatgcaccatgtccccgcattcatttcctgcattaatattcctccattaaccactctcgaccacttcaacagatgcaaactaccacacagttaaccccccctaactaaaaactgtcacaacaagcagcagcagaaaccactgtaatttttacttcaccaatttaaaatgcaaccacttgatgaaatcaaatacagcactacaatgaactacttcaacaatgcttcaaacccagataaaaaacaaaaactgaaatgctttttactctggtcaagtcaaggactctattcacctatgttaaatccaaaagggtttcctcagaaacaaaatggtccgttataacctgatcctcgatgctgctttctgggccaatacataatcattagctcctccttataaccaataccaaatacaaaattcatccccttgaagaagaagaagaataacatcaaaaccccccctttttttttctcctccaagccaactcttttgatcactctcctatccaattctcttcaattcttatcaacaacaatgtttgtcctcaatttcacaagctcaaacactgcactgtcgaacccctcaactgaaggagatcgaaacctcacttcccccaatctaaagctgattattcaaccaagcccagttcaatcaaaaccctaattatcacaaaaatccccaaacttcaaagaataccacagttccagttatgatccaacgaaaccctaaaaagaatcaccaacacaaaaaaaaaaaaaaaaaaacaagctgagcttacttgtccacacaaaatacacacatacatatatatacacaac

SEQ ID NO: 303724 - DNA, 973 bp, Cannabis indica
gctatagaaataaaaaaaaaaaattgtacaaaaagaattaaaagtaaaattgaaaattaatttggtcaaaatattagatactaagtatattaaattttcttataaaattaatttgtccgcaataagaattgtaggaaagtgtgcctacgcgcgcaagagcaaagggtggaagagagtgagagtgataagaggtacagaaccaatgagatggtggaactgtataaaatggctgtattgaaccaatggatatggaccgaagaaagtttcacagtcccttaccccacgaaaacaaatactacaattaacatccattcctaatagttagtgactagtctatgttagaaaaataaagagattgtagtggctatactttttttaattctgattttacttatatttaatttttaaaattaacagtaaaaaattttaaaataatttttatacattttaaatataataatatttataaaaatatatacatatattgacggttagaaatagattaaattttaaaattgctaataatttaataatttggagaattttatcgttaaaatttaaatttagaagattaaatgtaagtgaactaatacttgaaaggattttactgcaaaatactaaaaaaataaaatgaaaaattttaacagaattaattttgtaaaatattgatttgctatttttttttatcataatatcattactttacatgttataaaaatattgatggtttttaatttataattgtactaaatttccagaggttcttatactatctccaacaattgtattattttagttcttgtttttaccatttagtacaaaaaaattataacttttggtagaataattctaattatttacctcatatatgacaccaaataaaaatacctttctcaactaatttatgcactatgatatgattatgtatgtcaataaatatttatgattatttcttaaataaattaaaaaaaaa

SEQ ID NO: 303725 - DNA, 987 bp, Cannabis indica
tgattttgtccagattcaatgaatataaaatattcatttatcaaaaaatcaattatttatttatttctttaaatagaatattatttccataaatagaaaattcatttccaatattaaaatattctaataaaaaccagtttcgaaccctgtaaaacctgtttttaccgtatacaaaatgataaaaaaacttgtgaactcatacaaaatcaaaacaaaatttataaaactaattacgatcatataaaaaaaaaataataaagcaaacttaaaataaaaaatagacaaccaacctttcaatataaatattatatatacacaattttctattataaatattctattatatttatgcgatcaattttggtggcagaaaattttaattcataaacttattacaaccatcatagataattcaaaaaaatgatcattgatagagaaacttatctcagtcatcggtaggactctcctcgagatagaagacatgtttagtttcattgatttataaaaggaaaaaagaataccaatcaaatttttatagttcaaaaaatttaaaatgactaataagaaaatatttccagttatataacgactaagcaagtcaacattcaagatcattataattttgcaaaaccattttcaatgagaagaaacaaatatttttcaagcttgtttgaactttcataaattatgattctaaatcaaatccagaaaaagaattatgacaataacagtaccaataatataattttttcatatgaaacatgactgaattagtaaaagaggaagggtatatcaattatcatatgtgttacaacctaggcaatttaaaaggtggctcgttctaagacatttgcatacaacacaaaacaaaaatactcttctaaaaaatgttagacaatttatatgtataaactgaaacatatatgattaagtataaagtgcggaattaataaaacatatatgtactatgtaaagtccttttttggc

SEQ ID NO: 303726 - DNA, 1945 bp, Cannabis indica
aatctttctggatatatgtataatttttatatattctctatcatattatagataaataataagagtatatgaaaacatatacatacatatataatatataggtatataaataaaaaaaaaaattttttgaaattgtttcagtcagaggagtacatatataaatatatactgtgtattgtgattttagaacaattcaagaactttaacataatatttattttagaatttggtagagactcgtgctgataacatgttataaaataattgaagagaaaaagagaaagtgaatgagaattttcaataaattattttagtagggtcaacaaaattgaaaaattaaattaatataataaaaaaaaatatgggacactattttgttatggttaaaaatctaatctaattactttcttgagtcaaagtaaacacacatatatacctaccacacatggattgtccaattaagtagtaaacattggagagagtgaaaggttgattattttgacttaagaagcagttggagtatttaatgagaatagactaaacattctttattgcattattattaaatttataacacaagacgtgattaaagacagtagattaatgctagcattactattattgttattaagtattagaggtagatagtatctttaaatatgttattttagaattagttagtgatactatttcacattttacaattttactattttcggaacattatttagtatgtgtcaaaattcaggaaggaaaaatcttaattagttttaaattatatgagattaaatatttaattgaatcaataacgatattaacacataaaaaaatactaagtactaataatatcttttaacatttctccataattaatatagagttagaacatgaagccacgaaatttcagcgacacctcactgaaccataaaacaagctggtaaacaaccaagtacgggttaaaggcatgtatatgactttatttatgacaaaaacccatacaacaaataatattattgtaataaggacgactcttcttttattgtctttaaccccaataattctagtagagtattgacttttatctattttttcttaaccccaataatacaattcaagttatattagttaaaacaaaaacacaagagaagaaaaatgataataaaaatgacttcatggctgagttcacgtatcacccaagtgaagaagggcacatgccaggcataattgaaggagttgatctctcaaggagaagaagctacatgggaattacatgtagatggggccgaatgacaatggaacaggagccggggtattaatgacggctcccaaaagacataagatgtattgtgctataagattccatttcgaggcctgaaataacaaagcagaatatgaagcaatactggcgagtttgagattggctaaagaattgaaaaattacccgactgagaatttttagtgactcacaattggtggttttgcaaatacgagaagagtgtcaagaaaaggggccaaggatggtggcatacttgaccaaagtcaaaaactaccaagagaggttataacactacacaattgagaaaatcccaagaaaaaggaatgcaaatgccgatgccttggccaaacttgcctccacttaggaaacagacattgtagagtccatactcgtggaatacttggcagagccagccattgagggtgatgtaatgtggcgaatggggaatattaggttatttttagtactaattttagattacatttagtatatttttaatttagtttaaatcgtgtttgaagcatttttacgcttgttatcttttatttttgtagatttaaaatagatgaagatttgaaaaatatcaacagaaaaagataaaagatcgcataaaaatatcaatgtggaaaaaaatcagaatcctcctcagaaaaagatatttcgcgtgga

SEQ ID NO: 303727 - DNA, 1849 bp, Cannabis indica
tcaattttaatgtaatcttatttagtaaatcaataaaagagcatagatcattttttttcactattgtatattgtttggttcaaatattactttcataattatataattaatacataaattttgttaaatctcgaacatatagttattcactgttatagttttgtcaccatagtagaaaataatcgtaattatatgcttcatactatttagttttgtgatttatctgtgcataggatttacatagatgtggtaactagtgatgtggtttacttatacttggttaagtggaatgtcttttcaaggtgttatcccaaattctacacagggtgatgtggcatccagtaaggtgacacgtggagaacctcctcaaacttggttagatggtatttccttcaatgtactgattagggtaatttatatccaagaattgtagcctgatgactagcctgaaatatccagacaaggtaaatgttatcacccgggcagcatccagtgtgacagtaaagccgagtactccacgtagggtaaatgtggctgaatcacaattcctcaggatatttcccataaatatttcccacataaatccctattttcatgaaattagcatgcactataatgaataataggaaattagcttagtttctcaatttaatcctatttgttttagtaaacttaattcatatattttcccctataaatggaggagctattctaattattcaggggtacgaaatcttatgttcttgagagattttataccgtcaaacaattgtaagctttttttattaagatttcttaagaaactcacttggccaacttcttgtgatcttgaggattcttcgaagtaatacaaataaaataggagaagtctattaccataatcacggggttgaacctttataaattttgcattcttatttgctcatttatattatttattatttattatcacatcactttaattgactcagcgtcgttagcaaaaagcgaggtcaatactttagtactttcactcagtgcaaaagaacacaatcctgtaaatttgattctccacaagtcgttagaaaaatagttgttaatacaagaaggacccaatccacttgtccaactaatccaattaccatagatcctaatgtgcaaactcttactaatcaaggagatccactagtgataaatcccagtctgcctccatgagctccaccaataggaggacggggaataacaacatctttgacaggattcactccaggcacataggaaatcgggaccaccagtactcactatgctggagcgattgggctgggtatcggagacccatccatcgaagagtcctaagtgaatattggcgatgataatgaattacaaaacctgagggatgcctttggacaggtgcaaaatcacactaatactctccatcataatcaagaggatactcgagcaatcgtgaatctagcattcgagcaacaaaaatgccaattctaagagtggatggataaacaaacagagattgtgagagcctaacaagcagcgattgattatcgatctagataggcaactgctctaattagacagacctatcaacaagccaaacagcaatacgaactagaggaacatatggcctattacattcagacacaagaaggtaggttgtccaattcaaggccacatgatcagactgtgggccacacggtaggctagtaagtactgcaaggtcattgtcttaggcgaactaaccaacacaatttttgtccttaacttgatgcaccaacccagccgtctggaagagatcatgggccagtggctatttacgatccaaatgggcaagtctagtgttagaaattattttacc

SEQ ID NO: 303728 - DNA, 3614 bp, Cannabis indica
gactcttggtaagagctcttagctcatcttttctttcttggctttggacaaagccaagttgtagcaatgcggggcatatttttttatctaaccttaagcaccctaccccatgtcttgctggaaactttatgcataggtggtaaattgacatcactgccttcaggtcgtacaggactgaccagcctatcattgcattgaacgctaatggcacatcgatcactatgaattgagccttcgttgtcctttttgtaggaatttctctaattgtcaaaggcaagcagatgtatctcaatggtgcaaggccttggccaaagaacttgtacatcaattttctacagggtgctagatctatcaattggagccccatcttttcataaaatgtcttaaaaagtatgttggaggaggctctattgtcaatcatgcacctggcgactgtcatgtttcctatttgtgtagttatgaccatggggtcattatgagggaacttgacctgagtatcatcttcttctatgaaggagatgacaggctctccaagcttaagctacttggaatttctttcctctacaaccaagatgtcgcttttatgctcacgacagagattccgagcatagcgcctcatggccttgctggtttcgcctactatatgggatccaccaattatggcctctaggtgacctgcccctagcggtggtattggatctctatttttggcatcttatgcctgtgtttggttgtctttcatataacgacgcagatggggattgttctttctaatcaagaactcaatttctatctttaagtgcttgcactcgttggtatcatggccaaaattattatgaaatcggtagaatttggaggtgtacctcttaatcatttccctccttatgggaggaggcttttggtatggaactatggactttgtagcggcatagactattttaggagttgttgttaaaagggtgaagcatgtaaagctcctttccgtcccctgagagtcttgtggcttagaaaattattaaatttcccctttttgcctttttcttcgccagagtttttgttgccacgtttgcctccattgtttttgcctttggaggactggccagaactaatcatgttggcaggtatgtgggacaaccctcaacactcaagtcttgtcctgatcctgcctattttccacctttggcctatcgagcagcttctttaagcttgacaaagccttcttctcgaccaaagaaatcaaccgtgttttgggttaagtttcggcgaatgtccatctacaactcacttaaaggtagtataccactcatgatggcagtgtaccttcctacctctgtcagattcttgaccttggtggctttggtcatgaatctttggaggtagtctttcagagcttcccctggcctctgtttgacctccactaagtcttctagcctataatgaatttgttgagaagaagagaaatgtgtgtagaactctcttatgaaagagttccaagaatcaaacctttttgatagcaagtttgaaaaaccattgctgtgcagtttcacacaaggttactgggaagatccgacaatgggtatcaacatcaatatattgtaaatccatttggatttcaaaatacttaatgtgtgctaaaggatcttatttccctatgtacattctccaaatcggcatcttgaacttggtaggcaagggcagcgcattaatgcatgtaaagaaaagtgacccttgggtcctgtccaactctaagtcagacaaatttgggccagacaagccttgtatcatattcttgagttgatccacatgtgtttgcactaaaggatcaacttcaggctgtgcttgctcgagcatgttttctcctgccaacccctgactggcgctagtggtgggtggacaagttactggccggccaatccttatatttagttggtaaaattttgtctaatatgccctatctgtggagtgtttaggtgtggaatgtatccatcccgagcacccctccttcgttcaagacagctcgaagatccactctgacatgagggcacattctggcaaacacagactatctgggcacctagccagaacatgtctgatcattcctaggtggaacattgttgttgtgcccagaactttaggctctctgattagtgcattcaccacttgggtgactagtgccactatcatcgttggggtaagactccccactacgagacctgctttggccttggtgggatgtcctccattctttttttacccttgggcaggccatggaatcgatcagccctgccatatgatctgtcaggcaagacttggccatcattggctgacaagatggccttgtatgggacatagttgacctttctaaccttgaggtctgcccatgatccattggacgctgagttccctttgggacgcaaggaccttttccccaacagggatccctgacaagggaaggcttttcaacttgaggtctatctctctcgttgaaagacctaatcaggtcattagcctccttattctggtggttcagctctacttgctgggcttggaggatcgcgacctgctgatccatccactcttggaatttgcgtcttgatgggcaaaagcatcgcctatagcaaagcatgtttcttgttagtcatggtgtaggagattagtatgaccccaaacttgctctaaggcctcttctgtctgacaagattagtatcatcccccaggtccacatgaggctcgatgctagggttgccaaccccaagcctagtctcaccaacatagacacaagctcgccaatgccaagtccatgtatttttgaaatttcttcttaaagttttggtcaattatataaatttttcgagaaagaaggattacgatctcttttttttggttactttaacattaatgatcttttgtactctttaatatttttttaaataatttatgtttaaattttaataattcaataattttttgaaataataaataaagtatcaatgacatgaactaatctatctcaaaaaaaaaaatgacatggactaatttgtcacatgtgcgtctatgtggccattaacctatagctaccaataaattgtaacgttaagtatttttgtaaaataaagtatttaagtgttgtaaacttataaatttaaatatttttactgtaaattattagagaagaaaaaaaaataagccgttgagtaattttttttttccttaactgcgtctgaatatatcgattattatgagtgccccttcccttgtcccaaaagacatttcttttatttcctattaattgaaaaaaaaaaataaaaaataaataaataagagagagacttcctaggaccacaacgttgcatatatcaaaagacaattttaaccctcccatcccatgattattaattatactgacaaaataaagaaacaagttgtgttgtgacaacatttaatagaattgttgtttaattaattaattacatctctctaaccagtacaaattcgatctaaatgttattataaaaagataaataacgacatataataacatcaattgatttcatgcagtcatagtaataacgtaagatatatactaagatatatattatattaacaaccgggag

SEQ ID NO: 303729 - DNA, 1067 bp, Cannabis indica
aaacaaattcaattgagcgctctcatgtgcgcaatgttgattacaatcccaagaagcagcacatacttgtaagactacattttttatcttggtcttatggctgtggttaagaaagttatctaccaccatttccatatgaaattcagactttgagtaaacgcaacatcatttgtattttcttttcgtagtgacctttttttaattcttattatattacttgagccagggatatagtgttgctaacattttattgaaaattatgtacttctaaatgctttgtaacaaaaactaaggaaatatttgctaactcaagttgatgatcaaatgtgactggcaaacaatttccacatccatatagagtctacgaagtacatatttatatatatgtatataatttgaaaggaagtttgtcaaaaatattgatggggtgtaatgtcttccttgcaatggatgtgatcaagaagttgaacagaatttgttgatgttttgaaatttttacagctgccgatggaatgaaataaatattattaatacctaagaaatctatttgagaagttatatgaaacctaggtgatctttttatggatattcttttcttcatgttatcataattacaaggtttgtgatatttatgcaggtcacggcagaagacgaatctggagtgtgcacgtgggatctcaggaagccaaagactcccattcaggagcttcctgggcatacacactggtatatacattttctttaatgttggatccatctctttgtgacctgacgagcaatttcatagtgatttttgattgcctttcctttaatctttgccaggacatgggctgtcaagtataatcccgagtacgaagggcttattctggttgtttctctctccttttcaaattcatgcatgttctataattgataacaattttattttccgcacccctctaaggaaaattcataaggaaacttgatttgactgctgatactgatagggtatagtgataagccatatacagtaaaaggaagacatgaaacaattattgaaatataggcatttctctaaacattggaca

SEQ ID NO: 303730 - DNA, 1474 bp, Cannabis indica
ctaaaattaatggttaaaaaaaatttccataccgacaaggaacttttactaggtcctattataatcttgccctataaatatatttttttataaatgattctaatttttcccgtaatttgtaaatagcccatacattaatgtttctcattattatttgatgaatcggaatgagaccatgaaatagttggcccaactcaacaatttggttgtgtccaagacaattgtaatggcccaactcttttgtttcatctaaagttaccttgtaataatttttatttatttttagttaaaaaaattcttaatcttttacttttgtcctttattttatatgattattgctgctaaaattcttgttcttataatgtctacatttaagtccgcatattttcattttttagctacactattttctttagtatatttaataattttttaattactaaaattaaatacgtgttaagaaataagatttagtttttttttaacaatgaataactttattgaaaaaataaatcataatatcatacaactttaagtattaagaaaccccaacaagaaatctcatcaaaccatataagttctctatccatcctaagagcatgccgagctaatctatgtgcaaccacattagttgttcgacgtacatgaattaaggacactccaaaaaactagacatcaaacttgttaaatcctctaacaaggaaccaagttcattgaggatgaaagagcatttagaaatacatttacaactgctaaacaatcaaactcaacaacatgtaaagaaagaccaacagtaagtgtaataccctaggtttaagagaatggattagcgaaaccctaactagttagttgtgtattattgtgaaattatattattatttaatttaatatatgagaattaatatgaaatatgacatgttaagaccccgttggtgagctaggggcattttagtaattttgacctgataagggtaaaataatgaaattaatatatttacgtgcttatggaactatattattatatagtgtgtttgtgttgtctttttcaggtgtgttatgacaagttggcgcagtatagtcacaaccgggtatttcgagccgaactgggttcgaggctgaaatgcaattttagatgatttattggcatttgatttatgtgaaaataatctgattttatttgagtgtattggtgttatgtggaatgaccattttaccctcgaatgtttatgagtgtgcttaatggctataagggcatttttgtctttttaggcatttggattattagcaaaaaaatgggatttttggtatgttagaaatcattttctgctttgttttgccctagccgacccttccccctcttccttacattttacaatcttgatcgaaattgtggtgattgcttggagttcaagcttgaagtttggaggtgtgaagcttaattttagtttgaacttgaggtagcattcttgttgtt

SEQ ID NO: 303731 - DNA, 2564 bp, Cannabis indica
agtttcgtttttttttttttttaccttttctcctttttcatttatgaagaaagacagtagtcactgggcacaaccacaacacaccacaccaccgaatttttctatcccttttgtcaaatggtcctatgtgtacggtcaaggacaggtgaaattgtacctttttgcagtaacttggaataaaaccagtgcccacctcaaccccacttctgttcttccactgtgtaccactcaatgtaactaaatatattagttggagataaacatcaaagtattatgacaagagatattgaaaagggataatgattgttgtggcaccggctatttcgatcgttgtgttggagtaattagctacgcagatttaatgggcgctcttctatattatttgtacttatattaatcatataaatatttgttctttttcatattaattattctgtcatctctattaattaacagcttaccatcctgctataaaaaatactaaaaggaagagacaagaaatgggtgaattaccttgctaggaatttttatttttaatgaacactgacttagctatgaaaattgttcagtagaaacactagttttgtttttgcggtagagacgtttctattttcagtacagtgaaattatgactcatttttgtttatatgactatgtatagcaaatattctatctgttttcagaaaacatataataatttaaagtactaacttggtttaaaaaaatgaaaattgagaacaaaccaacttgcgaacaaccttatccaaaaataagatttcactactataaaatggaattctcgtcgatcaaaaaattaaattttttcaaggactgatgaaaataaaattgagctacactacaataatagactttagaggctatcattactaaaaattaaaaaaaggaacgacattaagttgttaatatgctgaaggattgtaaccgatgccataaggggtttataaccctccccaacccttcgttttcctcatttgatgagccaatccaaaaacccccaaatgggagaaactcaaaacactttccgccaaccaccagattaaacacctcgatcccataatttacaattttttcaccattttaactcattttttttttttaaatcttctattttttagacccaaaactatatatacccgaaaagatcaaatttttttctcattttaagtgtaatctgaagatagaggtagtggttgtggtggttatacctccaaccaccaattttagtggaaaaaccgttgaatatcaacgtccattaaagtataaatctaatttttactaattttagcaatgtacattgttttatttttgattttgtaaattttttgatgacttttctatattattaagattgtacatgttattgtggttgtgtgtggtggccgaattttggtcggtattggtggtcggattgcggttataagataaaaatttaaactttaatagtatatatgtatatattttgtattgtattgaatatgtattgtgtgcatatattgtcaacgagaatgtgatataagagagtattttatgtattgtatatggtatatattgaatattttaaactaataattttgctaaatattgtgaataagaatgagatatatatgagagcaagttttggaaatggagcattggactaaccctatgactaatatggttaaggtaaatactgatgggactatctttgactcagctgatttttatggtgcaggattcattgctagagacaatcatggccagatcatagaagcagtctcaacaaggattggtcaagtctctcccgaaattgctgaagcttatggtatcaaagaagcgctgagttggataaaaggtaaaaattggcagcaggttgctcttgaaactgattacttggtggcagttcaaggtataaatagcagcgtgcaattaccttcagcatttggtctgctactatgggattgtaagcatctcttgattgagttggaaaatgtttctttgaattttgttaagcgttctgctaatgaggctatgcattttcttgcgcgtaattcttgttatttgccacttcgtgtgttctatgctgatgattctcctttggagttattaaacattgtaatggctgattcctcattctaataaaatgccatttatcatttagaaaaaaaagagaatgagatatgaaagtattaaagtaaagtttacaaattaatttctaaaaaattagtttagaaacaaaagtttatatattaatttcaggctcttttgttattcaatatattaattctcatacaaaatataacttaaaaaattataaaaataatagtaatatactagaaaaatacaaacccattattgttgaccttgcttttagccaacgtcagtgagtctaattttgtaagcgacaagtaatttaatacgaatgaaatatagtaaagcaaataaagacacaagaattttatagatgttcagctccgagcagttcggtaatagcttaatcctcgttatttgtattgacttaagaacaaagaaaatggttccttttcttagagctcttacaataatat

SEQ ID NO: 303732 - DNA, 1576 bp, Cannabis indica
tgtatttaatttcggtataacatgatgtgtaagaaataataatggcgtagaaattgaaagtgtttattaaattctaactttgacaattaatgaaggaaaattataggcggctgccgacacttttgggcttggctaattgtattagggaattaaatatgttggctatcttctcaggccccttttcaattttcaatttgtttttttaaaataaatactcccattccttgaattgaattccttctatatttatgtcacttctgacgctacgtttctttgctgaacagaaaatcgagagagtatataaggtgagaaaaaaagttatatttgaagaataaataattcacctccatctatcctcctacagtcctactcatctacattttattattattattattattattattattgtttctaaagaaattacatgaaatatcatcaaaatcaaaaaccccaaaagtacaatccaaatatattgaaagcactgagattaagaatgacacaattatcaagtgatacttgaacacaacaataaaaaatgaattaaacattaagaaataaaagcgattcaaaggtgtgcggagtgtttacaaggttataagaaaagaatgggccaaggaggacatgaaccaataacttatggtgggctttgattagacaaatgatcaatactgtacaagggcccgtcctttctaagactttaggatggacaagacacacttgaaatttaatatctgcactttttaactttttactatttcaggcccggcaaaaataatatcactgtttaattttctacaatgctcacactcaataataattaagcaattactgagatggtttggttggtattattgtgaagtttggtcctctctgatgtcattaattacctcttatacttttcggactatcatttattcatctgtatgtagtttatcgtcatgattaaaggtatagtttataacatcgtcaaaaagtttatagacaacatgacatataccataaagaatgatcgcaaattcattaagaggatataggttgtttttgatagaatttaaatgtgctatatataaatatatttgtatttataacaccttagtagttctataagtattaagtataggatgggtacaccatgaaaagatttccttagaagaaataaaaaatttaataaagaattatgtactacaaaaactaagaaaattaatcagagattcagagatacctgaataatgtgagaacaaattatgaatgccgtatcatttcacttcatttttgtttcgaaaggactgtgaagtattgtgaaatgtacagaagacatatatatgctaaaatataatatattgaatcgtcactttggctgttgattttcatagataccataaaaacactagtaaattataaaaatcacgagaggaagttgtttgaagtacatgagaagttagtaatttcaaataatttaagggtaaatactattttggaccctgtgttttacagaagttacagattggactctgtgttttgttaaatgacaaaataaatcctgtattttctaaaatagtaaaaataggaccct

SEQ ID NO: 303733 - DNA, 814 bp, Cannabis indica
tttaaattattttacttaacttttatttaattttaaaataaattttaaaataattttaaataataatattaggtgtaccaataaacataatatatgtaaaaatgtgtacacataagccgttcatagtaacagttaaccgaatgatactttaaatttgctaaaagtttagtagtttagagagttttactaataaaatttggatttgaacgattaagtgtaagtaaaacaataattaaaaatgtttcgccgtcaaaaacttatttctttattacatggagtacattattagaaattggttgtattatagagaaatagtcacgtgacaaaatcttatgcttccttgttcatctcagaaaattaaatatttaaaaatttgtgttaacttatagtttgtaatgggtcacacaaattctattatccggaattgatgtatttgtttaaaatacaaatttttcttaggttttattttcttgaagaactttagaatgtaatgatcttttattattctttggattattaaagttgaagttggagtacaaacaacatgtttattatgatcattgatcaatataaattgataattattacgtttgtgtgtatcctacagctttgaagcaaaaaaccataaatttctttacaaaccgaacatttcctatataatttttagtattgtacaattcaaagaaacaaaaaaattaaactattttataacactcaacaaacttaaaataattacattcatttagatgtttggcattgcttaaaattgtgcaagcagacttgaaattccgtattttaatattcccagtttgat

SEQ ID NO: 303734 - DNA, 395 bp, Cannabis indica
atcccttttaaggggtacattatagaatcacccaataaattttaaaacaactcattatatgttcatattttcaaagcatagattatactaagggatactttgaggaaaaaaattaaagagggagatttcacttggaaaattatgtttcaatggattttacaattctatttttgttttcacttggaaaagtatgttttgaagatttgataaaattttgaataatttacccaaaaaaaaatcatatgatacaaattatttgaaaattttattttatggaacctaaaataagttattttgaatatcttaaattaaatgggtgaaaattctaaataattgcaatatatgtaccatttataatgaaagtggattagaattcattcactgattcacgtgct

SEQ ID NO: 303735 - DNA, 1399 bp, Cannabis indica
tcttaccagtcaatgaagctgtcatattccctaaaatccgggaagaacatattaaggaaaggacccactctaacaatgttcatggggaattcttggttgttagagtgcctaactaattggtctaccctatcaatgtaatccttcattggatatctacgaggatctagcttaagaaagaatggtcgaaatccccttagtctaccaacgacatctgagataggccgggggtatgaattacgtggaagggctgattatctcttcctgaagtactcattctaatagtgctcgtatatggatatggtgttgggaacctatcttggatttcctcttcttctatgaggggtttgtgatggtgactattccaggcagcgacaagaagttcctcatctttggttgctttagttattgcaatcgaaaattccatggcagtttgctctttgaggtcgctaagggtctaaggtttacccctgccattaaccccgtatgcgttggaatgtggctatgaggccgtattggcacaatagtttagttgtcaccaagtcctctacccttaactcttccttggaaaaaggctcgtaaaaggtgatccgttgtcttaactcatccgcgagctctgttttgggaacaaactctacaagaaacaaactagtgttaaatcctgaaatggagccatctttcaagccttcaaggagataaaataaaaataaaaaggagtgaaagattatacccaaaattttgaagtccaaggagagtggtggaacacgccccatgggaaaattggttatgaaaaactagtactcacggtggtctgggcaatgagaagaaatgctcgtgggacactatgttggaatctattttaccaagatctagatttactaacaagtatgtttttaacatcctgaacttctaaaagattatgaaataaacacataaaaggtatgaggaaccttacggtggttgcagcagaattaaatggctccttgtgctgagatctctaacccttgtatcctttctgtaacagagtatcaccatgatctgagcccgattctccttctcttgaatttggattcttcacagccttacacactatgattgagtaccacttaatgtgtgtgcgcacttactccaatcactctagggttcggttttgaagagataaagagagagagggtttcgaaaataggtatagtgaaggtggctcaaatttgactgaaggtaagtgtttatatcatcttttccttttcgctacctatttataggaaaccacctagggttaggttagaattatttggcattaaaataatgaaaaaattaaatggtaaattgctcattaagtggtcagccatggatattgggccccactttgcaattttgctatttttctaattattcatcttat

SEQ ID NO: 303736 - DNA, 3186 bp, Cannabis indica
aataagatacaaatagaagcctgtgtaaactttcatgtttctgcagcaacatgacttcattttcttgatattaaatgtggatctgcaatctaatccaactcttttgttaattttaggattattatcattacacatattataagactatatcctccatacactatagttttgcttgcttaagactactccctatttttattatcttgagcctagaggaggttactccgaccaaaacagaacaaaagaactagacaatgatgggtccaaggactttggatgaaataattgataagttacaccgtcctttataatcatatatcatcatgcctagaaatttaaaatctcacataatcaaaagttgcaaaatatatagacataatcaaaagttgcaaaatatatagtttatatatgtggtttctgttgatggaaaacatttacggtacaaattaagttgaaattataatcactaatgatgagtcctcatagaacctataaatggtttctgactacggagttgtataattcgttaattgtttgatgaattgagttgcaaagcaatcacatataaattctaaaattaatattgtcatgacatatttaatcatgcagttgcaaataattagcatattttatttaaggtttccactaacatagaataacttataatattagtatataatttagtatgtcgaaatgagaattcaaacagactttaagggctcgtttgaaacgccgtattaagtcgtattgtattgtatattgaattgtattttatgtaaaactatatgtggtattaaacacctaaatatataatattttaatataaattaaagtttaacataatattatataaaaatatgatatgtaatctaattcaatatatacaatacaatacaacctaatacgacgttccaaacgaaccctaaaactatgaacgcgtgtaaaaatctttaattactaccgaattcaattagatatgaattaaagaaagaattaccaagaaatagctttggtgaggttgcaaactgtgtagtaaaataccaaaatcattgattggaacagcaacacctgaagagtgaaccaaaattgcatcatcaccaaacattgctttcaaatcaattggaccttttgccacttctgttgctaccccatttataaacactgtcatcatatcttcatctgatcatcaaattaataattatattaattaatttattaatgttaattgcatgaatattacataaataataatcaaggaatatatatattgttaattaatacttataaatagttcaattcaatggatcggcaaacacagccgatttgcatacatattttatatgtaaaagattaatattaataaaataaaaaataaataaaggcaaaaagcagcctgaatctaagcacaattgaagaaataatttagtatatactcatgatatcattaatcttaaatagagaatattcttttttatattttgaatattcaatgaaaactaattctataaaaattattgattaattagtcgtttgaatctttttattttaatttattttttatgtatcattaatttttctatttaattaattaattattaatcatatattctaaactagttttttggtttatgatccataaagagaagacaaaatacactttgcttttccaagaagaagagttaggttttcatgtgaaatattttttgcaataaaaaaaaagtaattattaatataaaaaaaataaaatgacaatttatgtctgatatagaacagaatcgtcatgttttcaggggaaaaagttcaactttttcttaattactactaatattattattattattaatattattattcaaattatatatacaaagaaactgtaacattatcaaaaagttactaactttattattattattctatatcagtcttcactcaatttcagcccaaaactaggtacctaattaagtacattcaaaagagaaaaatgttctcattcataagtatatagagattttaagaaattcatgtaattccctttcaaaaaacaaaaattaataagaaaattggataataattaataaggttaaaaaaagaaaacaagaaattaagcaacaagaaattagttaataatttcttaaaaagaaaaaaattgagacattatttagtagttttcctagaaaaccaataatggaaaacttaatgaattttagaaattaattaaatgatgaaacaagaaaaggagaaattggatgatcataagaaatacctaaaaatataattttgtcacatgatcatatataaaatctatcaaaatagccatgcatatatataaatatgtatatatagaaatatatatacctgataattgaaaatgcatatttgagctctctggatggtataaagcagacgttacaagagaactttgctcgatttcagggaaactcatatgaccaaacaacccaccatggccgtcacggccatggtgatcatctccaaaaccaccacaagaattcgaagaagaacaaccgccgcccataagatcaaaagaagtagaattcgaaggagaagaattattcgaaggagaagatgtaagaaaagaataaggaaacccacatccaccaaacccggccacagctatggccgaggcagtagtagtagtatgagtattattaccactactactagaagcagtattgttagcggtggtggtcgaagtaataatattattattattattactttcatactgaattacaccaccaccgctaacagcactgcttccactaccactaccaccgccagagcctatgttgtttagctgagcttgcaactggcgctggcggcgtcttgacctagaacgacggttttgaaaccaatagaagacattggcatctccccacagcccccaaattttctcaaggagtttttcttattctaacagtctcatctttttggaggggtttaccataccactattgaagattgactcaagtataaggatttgttctggctttggtgtccatcttgaccctcacagctggttcaccacccatcattattattattattaacttctgattttgatctgacccattttggactatttgaggaatagtagtgatggtgatgctctgttggcctgatgatgatggtgatgatgatcttgatccatttttcttctatgtt

SEQ ID NO: 303737 - DNA, 1006 bp, Cannabis indica
agagtgtacacataagcagtttaaagtagcagttaaccagataataacataaatttgctaacaatttagtagtttggaaggttttaccgttaaaatttgaacttaaaaaattaaatacaagtgaaacgatacttgagaaggtttagccataaaaaactcttacaaaaatacagtagggcataaccttacttagttagctctttgataccgcgctatggttcgggggattacccaaatttgtgtgagtcttcgtaactcctttttagcagatatgcctatcaatgataatctcattttatttttaaaaaaatacataatataaactaaaattatcaaaggaataataattaaggacaagcaaaacaaacagagaaagttattagtcaaagaactaactacctttattaaaaatagacataaatatatatcttatattggatgtgtaaaatctatcaatacgttaaatataaattatatatgtgtttgtgcgtatgtgatgagatttatataagtgggtggtttaacaaagtgtacagatattgaagaatattactactaaaggttagtgtttatagtgattggtgatggagctaggcgcttataataaatctatatctgaatttaattaatcaatcatataatttccgtaacatatagttttaaaatggtcaaaataatactaagactttcttttcgttatactcttagaagatattatagaaaacaaaagaaatatatttacaaattagccaattagttagctagagatataatatataggctatgtaataggcatgtggaaatctgttaattaatcacgtgcgctaaggcactcgacgtgcatggtgtggtgtgcatgtagatatatggtagtgagcgcacgtgaggtctctagcggcccaaatatttttgattacatgtcttattggtttgggtttaattaaacaggtggtcctcagcccaatttttatgtcctactattggactagctagtctctctctctct

SEQ ID NO: 303738 - DNA, 3023 bp, Cannabis indica
aaatagcaaaagtctcgaaccaaaaaactacattacgaggcaatctgagttcacaacaatattaattacaaacataaaaataacaaatgactatataatgtacaactgttgctaagactatataatgttataaatctggtaaagaaaaaaagtctcattaaatccataatcatttgcactgcagaagtagatgtagattgttctatatgaagcctttttttcctcataattagaattaggcttccttatcatatattatagaatctacttcaccgctcactaacatttgtatgcaactaaaaaatatgatacgacaatatgagtgtagaaaacaagaattttcaaactaaagcgaaacgtttccaagctttaatcaggatttgggtcgagcaaaatcaagttgagtagcgataatattatttaaacatcagatttcacgatatataaagttttcgcatattactctattactgtactttttatagaatataataatctaaaaattggtaacaaaaattgaaatccatttcatcacgacagataaagcatccaattgttcattaccaattcaaaatactgaaagacatgagtctgaagaaccataatttgagcaaaatatgttaagtgaacaaagaaaacataccagactggatttcactttctctacaaattcactattcttgaacccgctaaaaatctccgtggacgagcttctcttttcaaactctttcagccgcgtcttcaacactcgaattggctcccaatccttgaattgtccttcctcagcatccgcctcccccttccactcaccccaaaactctctgaaattcagctttttagatctcctaaccctattaaaatcaataaccccatctccatccgcctctgaaacaattgcattccttatggcagacaaatgatccgaattctcgacctcggcccccacttctcaagaaccttcttactaaaatccggtgacgaataggcccttcgaatttccgacaaattaggctgtagtttcttcacgaaatcgatctccgccggcggcgaccggattgcagggaccgaaaaagtcgaggccgaattaataaaattctccagctcacggtcaaacgaagtagcaaggttcttgaacgagtttgcacgctctttcatcaactgaagatccgcgtccgccgagtgtttcacttcgttccagccttttgatataaacgagaaagcgctagaagacgacgttgcttcaccttcgttaaccatggcatgaagaaacagtagaccaagctagggttttgtacaattttcccgagaaaatggaaatgttgaaagagtttccctttcccggccgaaaatgagaatcaaagctaagaaaagaaaattcgtaaggagaaagcattaggggcttaggctgaggaattaacggttaggattcgggttctcatgttctctggaaccccgtaatacacgtgagcatccacgtaggataaaacacgtgatattaagattgcgggtgatgatatggatgacgtggctgtcaaaagtgacctggcactattttattggctgctatgggttcttggattggaatattcgtgagaatagagtaatatacttgcggcccagatgaagtaatgagggctgtgattgggtgtttctcatggtagccatttgggacgcgtgtcgagttttcattcgttactagaagcatgagcttcctgagcctactgactctgtccacttcgtcctgctcccgcctttttatgggttgtacagttaggccccattgtagaattatcgagcaataaattatggacaagtcaaactcaaaactattttcatcatagactcaaaccagtatcgagcgacgtgtaagtggatgtcgttttatgtcgcatgggtttgggattgagattttcacggaaactagatgacgtcgttttctcacattaaaacgtaaaatcgtattaattattaatgatgtcttaaataaattaaatggaatttgttatgatgtcattatttggagaattgataaaaagtagcactcaaatattactaaccaatctcagctcatgttgagaattataagattatatttttaaaaattaattggtgattggtgaggtaattcatattttataactcaatacttttacatataatttacgtggaatcatgttttcaatgctccattatttaatatatgcatattttgtaatagtgtcttacattatgatgaagtgatattgtgtaatgattttttcatccgtaaaaaaaaaaatattgtgttatcataaattaaaaggcatttacaatattattacaaaaaaaaaaaaaaaagtcaatttacagtaaaaatgtatataggcggaagaatgatctccaaccaactaataatttttattcaactctaaaacataccgagccaaaccgtaaagagtcacattggcattatgtttgacatgagtaatcgtaacattagatgtgatcatgttgtccctattgtgcaaggtgttttatctaaggtcgagactactctctctttgttacttgtgatgaagggtgtctcttcctagttcgaataaccatgtggtgtagtggactaattcgaaagggagtgttttgagtgacaaaatgtgtctttttagatgcagcttgtaggaatttttgagctacaacaagtattgttattaaggactcatgccatttggtgggaggctatgtggctcagcttaaggcaagtgacactttggaagttgaaacccttgctctttctaaggttgtcagtttgaacctgtttcggtgctacagtgattttcatctggtttcgaattgtaaggttctcattgacaatatccattccttcaaagccccaacttggagttttgctgttctttctggtaggcatgtcaaaaagatccatttagttggagcgggttggagctccgacccgacggatcacctctgatccgaaacattctgttgctccagaattcgcccaaaatacgtggaccagtcgagagggg

SEQ ID NO: 303739 - DNA, 1261 bp, Cannabis indica
gtcatagaaaaaaaaaaaaaaaaaaaaaacttgggctcttatttagaaaaaaaaatgtggtattttttcaaaattaataaaaaaattgtataattttaaaacaagataatttttttgttgggcccctaagatgaatcctaaacaaggcctagcctacttataccgagagtcaggcctgcaaaacaaggtgcatggatatataataataataatcgtataattggaaaaataaatatttaataaatcatatatcttacaatatttaacagtaataataaaaatcaaatttgatattcttataacctaaaatttaataattaaaaatattattgttttgcaatatcacacgtttaattaataaaaatatttattaaagcatatatatatatatgtataaattatttattggaagacataaaagaaataatagtgattattacatggacggaaaatggaagggtatagccaaaactctggtggtattggattgcatccatcccaatcatatacaccaagtatctacatgtaaattatagaatatcaattattattttttaatattaatgctatagaaataaaataaatcataaaaaaaacaatgtatatagtgtaacataaataacataaaaattaaaattttaacaatttttgcatggcaataatgtgtcgtatataccaaattaaagtactactatgatatgacgttttataaatagttaacagttttctataattattttaaaataaaataattaagtgggatcatattatgacttacagccatccaagtctttccccaagaggcagatccagtagctccgccatggtgaagaatccattttcgagctcgggcacatgcattttcaagaccgccgttaggcccttctccgagaaggcgcatggcgagatagttcataactgtgcacatcatcatgcttggtccttcaacgtgcactccccatccaccatcttcattttgatgacaatacatataccataatatttctcttttatgatgttcattcagtattatatccaaatgacctgtaatatagacgcaaaatacctatatatatattcatgttagtgcaggccctattataggaaaaaaaaaaacaattgttaaattttatatttgaaaattattttatttataatatatattgagaattaatatggggttctatctcaaaagggaaatttaattttctatgcttatatttgtttaaaaaaaatttcctaaacaaataataactaatat

SEQ ID NO: 303740 - DNA, 1876 bp, Cannabis indica
aaaaaaattgagaaattacatttcttttagtactgtaagtgtaaaccttgcgttgccttaaacctcataaaccccgcaaaggccaaagcccgagtttgcccggttctgactcactctcccactcccaaacacacattctcgtctggtttccatggcggcccttaggctcctcgcggaagctcgccgccattacctagcttccccttcccacaatctacctcttccaccagctctccgatttcacagatttctttgctcctcctcccaaccattatccgaatctgatccaaacccttccccacccgaacccccaatacgatccacggagtctgtaccaatacagcctgtttcgtacgccatcaaacccaaagaccagtctccggccgaaaaagagcatcctcagtcaactccaactccgccgcaacaatcccgtgggactcgccagacgccgaacgaagaaatccgctccaactggacccgcgaggatgcacggttcatgagggatgtgccatccattacgccggtctcgtatccttcacgcacagcgccgttgccggaagataaggtttcggccgaaaatccggcgactgagagcgatgaattgcagagggagaaacagcaaatcgaaatggagaatcgaatgaggaggagagtgtttaaagttctggaggaggacaaggttgtggctcctttcccaatgttaattgatgtcgagaagaaggagagaaaacctattcttgatttaatggaggcaattcggcaagtcaaggtcagtgtagaggtttctctttttttttccctgtttggtttctgagaataagtagtataaaccctctgtactaatcttatatgttattttctagttttcaggctagtgccaaatgcaattttgatgaaactgttgaagcacatgtgaaattgggtattgatgcaaagcgagcggtaagagactcttatatagcaaaagacttctttctagtcaagcttgattttctcttatatgtatgaacaattggagtcttataggtgtgaactggcctgatcgttggggcatttagtttgttataataatctttctatagggttgtcaaatttggccttcagattttcagtgttatgaagtatttttgtgagtgattttaacatatgaatgagtagttggaacttaatttggtaggttcttcataatttaatttgttttaccatatggttttatacacctggacatagcttgtttgagatatctatagaatcatttctcattgattttctttatacacctttttatcttaatatttcagggacgaggagttcgcggtaacatgactctgcctcatggtagcgggaaggtattacttaaaaatcttgaattatcgtttgttgtaacatttgttagccactttagttgcagctgattgccttaaaattttctaatatcaggttgtaagggttgcctattttgctgaaggggaacttgcagatgaagctagagcagcaggagctgatattgttggtggtgccgaactcgtagacgaagttgctagtattgacctaacttccctctctatatgtccaatttaagtttttaggatagataattccattaccctttttaacattatatatagtcctttaaatcatatgtccttgtttccttgttattcattcttagctttggataagtacaggctttcaattataatcaatttaggttatggatctgaaacctgagcttgaatctttgcaggcagtaacaagcttaatgttgataagtgttttgcaacaaatgaaatgattcttcgaatgggaaaggttttctgaaaatctaatgctgttcctagtttgtattagtgattttgagttttttttttttttt

SEQ ID NO: 303741 - DNA, 2499 bp, Cannabis indica
cacagatgctaagcccattaacaattgatcaccaacaacatgggctaacacagcaaagaactatccaatcaacccaagttttaataaaaccaataaaatttaatgtaagcccaaataaaaagtctaacacaagagtgttgttgcacaagtttttgttcaattcccactgtaattttgttaatatgaacatagttggtgatctcgtgggcattatatacttccctaccgaactaaatagtcagttgtgagatgaagaatgaaagaagcataactgagaaagagaagggagatgtccagttgacaatgaggaagaaattcattaaaaagttatacttaagtaaaacaattacaatgtgatagatgaagattttttgtttcaaattacttttagttacttaattgcacttataattaaaagttaatttgattataaaagattgttatttaaatttgtcttgaatttcagagtattggatgagcattgtttataatggagggtctaagtttgcaatttcctgagaacaccgggtagtcagataccgaatggaaagaataagacattgttcctgaaaaatgacatatttaccacaaaacgagatttttgaacaaaatgctctaaaatgacattgctttttctttcttttttttggaaaaaggacatgttcattaataaaaatcaggattatatctcatggtcattacaaataatgtttgttgggatggctaacacttccaccatactattaaggtttttggtaaaagtccatcgagcaacattatgaacagcaaaattacaaagtctagaaataaaaacaaaaatacaacccaaaaaattacacgagagtctattataattcaaaatatagttgtcaatacgctaaaaggaggaagtttcgatcaaagctttgacaacaatctcagtgtcactctcgatcaacacaaactggtgcttccacaccttagtcgtttgaagggagagaagacaagcctccacttcaccaatcggggaatcaacataggtaaaactcttggaagcaatccacaaaacagatcgtgcatggtctcgagccaacgcacattgacccattccccacttaaacgtcactgttgatcttgatccaatcatcaggaggaggagaccaatgtagagtagtcttagcaagagcatgcgagagtaacgaggccccataatcttcataacaatgagtaatagagtcaatataatgtttgatgttattcaaattattattgtgtaccctgtcattacgagcaagacaaatggtgtccaccataatagaaggaaagagaaacacttcttcaacaaccacacccttcgaatgcataccccaaataaattgcacccagtcccacatgcgccctcgtgaatcaagcaccgaaataaggccctaaggggaggccctccaaagataggaggcaaagttacaaaatagaaaaggtactccatcaatttctcgccaaccccacatataggacaactagcgttactaacttgtaatctattggctaacacaaagcggatcgccggggggggggggggtcttggaaggaatacactaccacatgactttgtgtcgctctagtactttacagttccaaaatttgttccacatgataggagccacctcacatggcggggcccagtcaagcgcttggactaagtaagctaatttagtagtaaactgccttgaatgctcttttgtccgaatccacttatcatttccttgcctattgggtgtgctcgctttcaaaatgttattaacagtcttagaatcgaacaactgcctaagcttagaagtgtcccactcaccataatccaagagaaggttcgcaatcctgtcaaccccacttggccgattggccacaggagtaggcacaaacttgttaccacgaacaacccacgggtcttcccagatgttggtgtcttccccattcgaaatcaatttacaactccccttctccaaaatcgctctggctttgaccacattttttcaaaaccacgaatcagagtctttataagaacatttcataaaagatgtatctttcagatacttttccttgagatctctacagcacagagactgatcttcattaagcaatatccatccccatttagccaggaatgcttggttcatttctaaagttttacgaaaatccagccctccacgagatttgggaaggcacattttatctcaagctttcaggcagaatccccatttcctttctcacaactccaccaaaaatctgttggaaaattctcattacaagagataatagaaggattacaatcaaaatactcaaaatacaaataaaaatattttatcaagattacaagaaagctagagaagaagaagaaggataacacacaaaaagcttgaccaaggctcaaggacctttgtcctaaaagtcatttcctccctcatatggacacttagggaaactctagaaatgctcttaaggatttatcaagcctcatatgct

SEQ ID NO: 303742 - DNA, 3637 bp, Cannabis indica
gtcactaatcatagagttcagataatattacctacacaaatatgtgtaataacgatttaattatcaataattttagccacataattattatcgatgttaaatattttcctaaattatgaccattaatgaaatatgagattttcgttaaacaaatagcaatttactccttaatgtatttgtactgtcgtattttaggcaaaatataaaaaaaaattacacttactatgggattttaaaagttcttatgataaatatgacatatttaagtttgatcaatttatatggtatttttttttattttcagatccttttatggtatttgatatgtcatatatatgtaaattaggttttcaaatcccatatttgtcaaggtagatttatttgtcactgataccgaaaaagttgccggagtttgctgtcagtgccagaaaaatcactggagtagcagtcgatgtcgaaaaagtcatcgaagttgctgctaacgccaaaaaatttgtcaaaattagcattatcactaaaaaaattaccaaaaaaatggttcttcatcaacaaactaataaaatctagtaatacatcatatttttagcactattaattgtacgtttgttatattatttgttacaactttttagatgagatttgagatgaatattttaataattagatgacatgaatttctcttggacttttgactaaatattttttttttgaaaactaatagaaggattaacaatatataataaagtgaaacgttccatattatattgtggcaaagtttggccaaaaaatcacaacaacaaatatccgagcaccaagaaatcacaatgtgattacaacaataaaaaaacaatatgagcattgacaatatacataggtatatacattttgtgcttaaagcctatatacttactaaataaataaataaaaatactatttttttcatacaattattatttaatttgttgttgttgttttgtttttttttctttttttgaaaaaatgaaatatcaacttcattaaaattagcattatgaatacaagatggcatgaaggtcagccagaacattatcctcaagaatactacgatcagagtagaatcgagagcgtctacccacaaaataggccactcgatttgctgatcgtttaataaaacgtaaactaatattaggtgaagaagacaataaaattttacaatcattagtaatgataaagccaaagactaaatattatttaatttgttgttaataactaaaacaacacaagaatatttttgatattattcagtgaaaaaaaataaaaattgaccttctctcaattaattctaccaagctttttccactataatattattggttaatgttagtctcaaaagttatacactcacaattaacatttggaatggaagaatctctaaaatccatgtatatatacacatataatatccaaatatcaaaaatatctctcaacaaaattcttaagttttacttatcactataaaaattttatttttaatatgtatttttagtcataatatttgttgtgactaaaattaaattataatatccaaataccaaaatatctcaacaaaattctttaagattcacttgtcattactttttattcacaacaaaatttataattaaaagtaaaaaaaaaatagtgactaattataaattattatttttacattgtgactaaatgtattagtcacaaaaattacaatttattgtgatttcatgtatttttagtcataaaacttattgtgactaaacctaaattagtaacaattgtatctaaataatatgttttagttacaaataattttttattgtaactaaaaatcatatttagtcacaaaaaaattatattgtagctaaataattatcactaaaaatatttttcttaattgtagtttgtattattatgtcccataatttgatagaacacacaaataaatgaaaccacccaccttttagtacctctcaaaaaatatatatcaggaaaagtaattattacttttaaaaaaaatggccttattaaattgtacctattcacactattctctaatattttggtgttagaatctaagtgttatatatagactttacttattattaattggtaccttaacaaaaaagaataatattataccgactattttttatttatttatttgagatgagaagactttatataaataataagtatgattttaattaataaattaattaagatcaaaatattttgtccacaaattacatgttggatcactttggagaaatcacacctatttacttaagctcactctctcgtgaatatttaatctatattctagagtaatataatatatgtcaaaatttgggtaatagaatagggtgagaagacatgtaatttgggaacatatatatttaataatatttcaattctttaatcaaaccaaacatgtaagaatgtgagtggtttggtgccatatagccaatcagtaatcatgacctctaaaattatgatacaatgggcaccaagaaaataaatgtttggattagaggactttccaaattaaacaaaaataatgaaaggtaaatagtactaaatactaattattaattaattgtattgataaattgatataaagtgggatttgataccctcaaaggcatatatgttggtttgaagacagaaagaaagaaaagcagattgacttatgagaaagaaagaaaaaaaaatgtgataattaactcaaaaggcaaaagccaatttgctgacaatagagtctaagccatgcaattgtgccaatatacactatttggtatatgtgtgcacatgcatacactttcattgcttctctaatttatattttttttacatatatattttcaacatattatggttaagttgactttttttttttgggttagtgttgatgggcttttatgaagaagtaaaacaagcactcttatcatcatgatttttcttacaatatttttagtggggtgcaccatgggacaccaaccaaacacaccctaatgatgccaactttaatgtacatatattctaccccataaaaaccccataggtgtacccttctcttctccccaaccattatatatatccctacccaaaacacccactaatttatagagttcatcacaaatttttgtgccaaacattatggctcttattaggatcaacacttctactactactacctttcttctactttccctccttacaatattattcctcattactctttcatcaggtaaattatctatattataatcatcttttattattgtatgtacatattatatataaatattcattattatgtaatttttatattttggcaggtagagttgaagggttcaaggtggccacttctactaatattcccattcaagcacttcaagaggtacttaattatattctatgaattttcaagaaatgtgtttgattatattaattaagttttgctaacaaaatgcatatttttttgtattatttggaaaatgagaagaagggtataattacaaatacaagattggtaggaagcttgcaatgattaaagttgaagctgtacttgattatgatgatgctgaacctaatccaaggcacgaccctagaggagaagatcaaa

SEQ ID NO: 303743 - DNA, 1669 bp, Cannabis indica
ttgtgactaaaaaatcacatttagttacaaaaaatgtatgttgtgactaaaaagttgtcactaaaaatagtaattttttgtagtgccaatataaatgttagggtttttagttgctaatgaattggccgatttgcattgcttctttgaacctattgatgctattttgtgttagtttaaaagtagcattggtcccaatccaatgtatattaatggtaaaacatgaaagagagttctacaatgtataaattattgtactgattgcaacttatttgtgcatcattttagcatcaattgtagtattgcgatcatgtactaatactatgtcaaaaaagaattatgtgttgacttaagattttcaaatctgaaaaaagtcttcaataataaaattgaaagatcatgtactatgtcaaaacgtataatttagtgtgtattttatttatttgtttatttatagttttaggttggtttttgagtcatttaaaaaagcatatatacttttcaacttttatcaagaattgacatattttgtaacatattagaatgtgcataaatgtttaaatttcccaaatattattttgtatttgcttttaattattctttgttgaaatttatgttctttattgagtgttgctattaagtgcaagtagtgcctaataggtagcactgaatgaaatagttagtgatattttataattcctaataactaaattaaaatatgtaatttaattagagtataaaagtatctcgaatggtaaaattttagaggatgtctatacgaacgttgcaatactgggtagaatagcctgaataggcgacagttgaaaaatattagggaacccaacaatttaaaactatcgactatagtcaataatactataggccacagtttaaaaccgtcagctatatttaaaaccattagctatactatagatgacagtttaaaccgtgacctatagtatagttaatagctttaaactattgctatagtggattgtccaaaaaaaaaatatatcgtttcatcattctcgaaaccatttctcatttatgccgtagctgctccaaaacctttcaagcttcatcctcctccaccgtctcttgactcgtcttcatcctccttgaaattttcttttacaatcttcaaattgcaagcttttgatttttttaacacacacatagatcaagatcaactaaccaaatcatggtaaaaagtaatttaaacaatagataagagaatattgtgctttcacgagagagcggagcagagggatgaagcgagagagagtggaggagagggatggcgcagctcgtggctgcaaaggagagagagagagagctgggaaatgaagcgaaatttacaaatgattttgaaaaaatgagatctgatttttttgggagaatttatatcttaagaagcgggagatgaaattttgaagtttaagatgcgcaagaaaataaaatgttagatatgaaacgcgttaaatttaaatatagacattgccgacggtttaaaatcgtcgaccaatatataggcgacgattttaagctattgcctatacattgtctgaaggttttaaaccattggcaattcccatttaaaaaatacgagattttttaaggcacgtttaaaaattgtcgcttatacctcttgacagtttaaaaccatcgagaa

SEQ ID NO: 303744 - DNA, 5874 bp, Cannabis indica
gtacctggtccacttccataatagtattaaatttctctagatagtttatagggttagtggtacctttatattttagagactcgaacaatcgaaatcccttaggcagtcgagcttgtcacatttctgtggtaagacgagaagtcccatgcaacttgtatatgggctttctctgctgctcgattatctttaacgcttgtaaaagaataccctgatcaataccccctggaagggcagcgttcctttgagtcgttgcgggagcagttgccatagtagctatatttgctgagataacgaccccagtagtcgcagctggtgcattaggcgggttggtgtgggtatttatggcctgatcccccaactgaggatcacgaggctcttcatcactccggggcgtttgagaacgcgccctaaaaactgcgttaaggtgatcatgaagatcacccctatgaacctggtatcttcctcctcgcgatgtttttaccgagcttgacctgatgaacttgctcggggtgcgacattgtgttgacaaagagccaaactcagcgtcattctccttgtttcgcggttgggatctactgcgaggattacgtcgttctggatcttcttcaggttgtacctcacggtcgaggttctgcgtggtctggcccctcgaggttggctgattcaaatcgaacccttcctgacatgtccttcgttccctgccagtacggttagttcgtcatctagaggtggttacctatggattatctgagtgggtagtgggcactcgaggaggacatcaagtcctattccgtctgtcaatttcagcctgcaaggctcgcatttgatcctgtattgcagtgtactaattagtggttaattgaacaatgccttcagataccatggcaagcctgataggccgaaactgccccaccgtggctgctggcgtggacgtttccccaacgtgagcagtagtttctgggaacaaattgagcagcgttatgtttgtccgccccattccgtcgttgatggtgtcgatgggaggtactctatttcctgggagtgggacattcatcgtcccaatattgattgatccattgttgatatctccaatcgtctgatttccagccatagtgattttccttctaaatcaacaaaatatcgcgttcccacagacggcaccaaatgttgttgaaggaatttgtacaacaccaaaattaaattataataataataagtataaagaatgtatgcgagtactcaacccataacaacgagtattcgaattaggaacacaaaacacttaccaaaaactagaaatacaaagaacacaagagaatataatggttcagtcaaatcacggtctacttagtccattgttgcaaggaattctgtcttgttttatttcacgatggatcactcctttatatacaaagcaagtgtactatgatttacacatggattaaattcactatcaatccgttcatacatttaattacagtaattaaactaaaaaacgtaaacataataaatgaataacagtttctagcttaattcactaaatacaacaacgtatgcgacttctagagtgagagttggttatttagattcttgcataagctcgcaggctttaggatgcatttgagactagtcgtgtctaggatgtctgcgtcctcttgaagtcgcttatacgaacatcatattacaagctgatagaactaagacttgcgagtctatatcggtttatcaaggcagttgggtcaacgggactagctcgcaacatagagaatcgatctctttcggaggaggatcatggggatactcgcatacaccctattagatgtgagtttaaagccgttccttggccttacataatgtgagccatacgaatgcgattagagttggtcatattcgcatcatctcgctgaatctggttcaggcaaggttcatactcgaggggtctctcatcgacatctcagctctgctcgaggaaagtgaatacatgtgtcttttcagtaggagtccggtctcgagtttctaggtgagaaaaatctcactataacaacaaactaagtataatagttaggtaaacccaaacaactaataataaggcatccatcttgttataggagggcatgcacgtggtaccttcactaattagttccagaatctttcagtgagattcatagctccatcgagtcagctctctcggatataagctgacattcaaatgatgttggctgttgaagttcatcttgtcgccaagaactgtgggtttttagatagggcattatgctttagatgtaagaatgaggaggcttacatcatcaacgtcgggaagacatgggaaaggttccagctcgatacacaggctattatcaccatgttcccaacgagacatcccagagcgttacaatttacaatgtctttaatgcacatttaccttgacccggtaaaatcagacctatcacagttgtgtgatttgcaaatattaaccacatttattttagtggtatgtaattaaccccacgatttcaggagataattgttgtaagatatccgtcaactatgtaattaactgccctatgacgtaattataaatagaggcaagttatactgaaaaaaggaggaaaaattcataagaaaaaagaagtttatcaccatttaggctcaaatctagttaacaaaaatatgtgttaacacaaataaatcgacacatacttgtcatgcttcttctatttctttttattcttggatgattctttcgagtcatcctttctttttgtctttgagccactaggattgtccactttaatcgagattgtgctcgccattactgtacttgtgctgggtttacatcccaagccaattttcaatagcttcatctcgtatctttcttcctctttacgcaaaaatacttgtcctctttcattaactcattaatgtttctcacaaggtgaccctatagatcattccataattcgcctccaatgttgataagtcagttgtaagtcctgcctgaagtactgtgagctgtatactgtcattcatgtttctagcttttgcagcggctgtgctaaagcgacttaaataagccttaagtgattcgcctggttgttgctttatattggttaaggataatgcttcaggccgtcgatctctcgcggcttgaaatttctttttaaagtccttggagagttgttcccaggatgttatagaattatgggtaaatctttcgaaccagctgctcgcagctcctattatggaggttgggaataaaatccaacgtaaattattcgagacattgttggcccgcatgatagtgttaaagttgttcaagtgagtgactgggtctgtggtcccatcgtattgcaaaacatgtgggtttttaaatccctgaggaaactttgaatttaaggcatctggatggaatggctcggcctcttcatctgagtcgtagccaggcaattttccatgttctctatattgaaaatttttaaatttatcttctagttcaattactcgtagtttgatgggatctacttgctgctgatttgcattttggttgagtttatggcgcaaatcagatgcattttggtttagtcacttgcaaagataaggctatcttcgatttaagtgctcgcaaagatcaggctgccttcgctcataattactcacagatcttttcttttagtaactctcagattgataactttgtgaattgcttatactttcttggtcagcataacgttgaaatctacttccttctcctattttcctactcgattgactatgtcctcgagaccttgaacgtctcgaacttgaactttcttcctcttgtatcggtcttctcctgcgaaagaggttagatacacatcctttattcaagtatgtgtatatatcccctctatctactcgagaaggacattgagggtgtcttggaggtagcccactagaccttggttgattcccagggttctctcataactgcgagggattccctagttccttggtcgaggttgcgtctcctcttcattcgtacgagatgcctctggtacattagttcgctcattccctttgtttgcaaatccatgggaacttcgaggaacatctcatcgttgttcttgattatttgtttgattatccagtgggacgtcccttgtatccccaggttgttcttcgtgggaattcccttggtttgtcacatgtctcctggttctggaaccttgaggtctttctcatggtcttcttactgcaggagcaggctggttttaagaaattgttccttgcgccgacttggctattgtagcctctctttcaacctcagcattttgttagttagattcacctaaacattgtcaaagttgcctattctctaacttcaccaatggtacatatcaggttgggtcataagcgtcctcactcctaagcacatacctggcagaattattggcatcttcattccttcttttaggaatttgatcaccatcatcatcgttcctccactaacatggtgttttagtggtatggggtctttgggatgccatgagctcttttccaaggcaacaagttttttcttcagggctatttctatcgttttgattgtcattatccattgaatgtcattagatcaagtttataaggagggatttttctgagttttatcaccaaggctctcaatgaaagcaccaaactgttaacgtagatttttgttaaccaaaataaatagcctttacataataaattttctacaaaaatgtatatataagtaataaatgattagataacactagatatttttacgttgttttgtagttaaaatatacttactccacgagtccttattattagggatatttattgagtacagaacacaatatcacaatttgaataataatattttctttctcaaatttgtcgtcccattttccatgaaatttttccctatttatacgaatataggttggcagttacccttttttgggattgattcaaatataacggttcatgaaacatggacaatccccacgttttatttaatcacatgtggaataatatctaataactactcaaccgttatttactcttatcctttagacaggtattattgacttggaatattgtatctcgcttgatacaagttatcctccttgtctgtcttaataaaaaaaatgctaagtgttgggaagcagtacgtctcgtcgattcccttattggaattaatagtgggagatgatcttctcgctatgtgttatgcgaggcagttatgttgttacatttattctgcttaagtggatgaatatccccttcttgtttgtatattctgaggtaggcatatgtctcgttaatctctgcttaatagttattattcttgtctcgcttaagactatatagtcaataagttttgaatattatctatcaagccattatttaatgataatgaattatttaatatgcatttaatgagataacattaatatatcatttgatttgattcatattccttctataatactcgtgttagcttatagagtatagccaaattttgggtataacaaccagtttgggaatttttcctggaaggcaaaatgacaaaactttctttctcagcaaagggagagcgtgccaaagaaccactaggattagtgcattcagatctttatggaccactgaatgttaaatctagaggtggttatgagtactttgtcactttcattaacgattactcttggtatggtcatatttaccttatgcataagaaatcagaaacatttgagaagttttgagagtttctaacattggctcaaaatcaattgggtaaaactttaaagatcttgcaaactaatagtggtggagaatatatggatgtgtagttcaaagatcatttaattgaac

SEQ ID NO: 303745 - DNA, 1448 bp, Cannabis indica
actactttctttttcttttccttttttttatataactcttttttaaagctttttggctttgggcctctctctacatatattagagcaactgattaataattattcatcttatttattaaattaaatatgtggcctccactccaccccatatttaactgtaaccaatagtaatattttccgtgctgtagtatttcgcaataagtgtacatacaataaaataagtgtataaaaactaataaactcaacataatgatttccagaggacaggcccacttagcatcgtgaataatacatccttctctttctgacaacggctccccgcacgcatttcaagttcctttaattattcatatcatcttatatttcaatatgtactcttattccttcaaacaatattaattaaactttcactaatcatatatatttacaaaaaaaaaaagttaattagtattttcactttttgaatttgacatttactaaattatgctctctaaactttaaagtcgttaaaaatactccctaaattattgagattgttgtatttaaggacttttgtctaatttcagtgattgtttatgtactaaaccatactccccagattttaatatctaataaatcttaccactcaaactttgacatgtactaaattatggttcgtgaacttttattcatgttagatttttttattaaaattagaaaaaaaaatccttaaattcaacaatcttaatagtttaaggagtatttttaaccatcttaaaaattcaaaaggcataatttagtacatgtcaaaatttagaaagtaaaaatcttaattagcttaaaaaaaaatatcattttttctctccacctcagtaatcatctctaaattttttcaatttaaaaaaaagagagagtcttagttgtacatcatattatgggatttcaaagagactacaaaggtccgtctttaggataggacagctggagccattgtccaaacccctcaatctaagaggtctcccaatctctttattttttgagaaatttttttttaaaaaaaattacctaatacatttaaaattgaaagatttttatattttcatgaaactttttttatttactttttttacgaattctattttgtactagtttttgtttattttttttaaaaaaatatatatatattgctttcatattattttcccaatgtcaaaacaccattattttaaaattatggaaaattaatactctgtatagttataaaaaaaaaaaaatacataatgctttcctgcagatttattaaaacaacgctatttcaaaaacaatagaaatatagtattatgtatttttgttagaaaaaacaaaactaaaaaaataccgccaaaatgtaaaataaaaaaaaaattagtatatttatgtaataatacttatttaaaaaaaaaaaaaaaaaaaaaaacgaaaaaactaat

SEQ ID NO: 303746 - DNA, 1081 bp, Cannabis indica
cacaccaaactagtacacaccaacactagtagtctattattaccaagtaaaaaaatgcatgttccaacagagaaatcagtttaacttgcccacctcttccatatgcaaaaaaattttgttcctgcgacttcgtatattgtcctgaatttcttgtaattccatattggcaaagtcttccactgtctcaggcccctcgatgatacaaaacctgtatttggattgggaagcacgtcatttgaaggaatttattcattacaataaaaaattcaccaacaaaagaaacccaagtcgccaaattgcaaatagaaaaagaaacaatcatatgtattacacatatataagtacccagtagcgttttgatcaataggctcggattcgattgagggagcaaagaagatgagtcggggtcggacgccatggatcgccatttaaagctcaacttatgcctagtagcaacaccaaatctagagttggaataacgaatattatagtgatttactggggttattgggtgtgaaagagccaaagctcgacccaaacaaagcatattctcttctcgcaaagggcagagagcccctgttctgttatgttgttcagcgagtcgactgagtttggaaagtcgggtagagaagaaagaaagagacttaagacaaaagtgtgggagttgtcacttggaggagttggggtcagtgcggaggaaaatggaggactcactatgtttacgtggcatcacaccattggattagatttatttttcttgtttatgttatgctatgcatcataataaaaattattggagaatttgagtggagctcgcctccttcgacccctccaacattgaaacttatgtcctctataattaatagctttttggattattttgatatttacagtgacaattatccgttttcatatatttttaggttttttttttaagataatcactgtcattttccttttgatatatataattttgggaaattttataatgcacctccttaaaagggatatactaatatatctttatctgttttagtatccgaaataaccttttagtaaaattttttctcatggtcatata

SEQ ID NO: 303747 - DNA, 1645 bp, Cannabis indica
taagaaaaagcaacttaaaaatgatacattataaaaacacaaaacacaatgacactggattatcatagggtaagaaaagcaacttaaaatgatacattataaaaacacaaacacaatgacacctagtaatacttccatgttatgaaatttcaatacaaatgactttgaagcaatacagaaacttcctcaattttgtatttttaaaagcctaaagtaattgcaggggaaacctaaaaggaaaagaaagaatgagtgttttttaacatacccgaaatactgatttaaaaccaatacccttctgtcctatatatccagcatttgatcctttctttgttgaacttccaacatcacataatgctctaatattctgggcagaaaaaccacgctcattgtttaaaacaataatacctgaatcctgaagaataaatgtcagtgttggctccacgttttctgggtagatattgtcatcagcattctgaacctgcaacaataatgaacgatgagatgtatttaaaagaagatacataatcatgaacttgttcacgaagcagactcaaacagatgagttgttgtcaaatcaataagaaaatatatgtcagaaaagaaattaaataaaacacaaataaaaaagaaaagaaaatcagatattcccgacataaaaagacctaaaaaattattttaggagagaaaaaaaaatacagtaaaaaagcagatgagaagtcctccaacaaggaaaaaagccagagatggcaaaacttgaacaagatttaaatatttacgacaaattgaaccttcaagagaaatcaatgatgcagctgtttaaaaacattatatgattgaattccttccaaattccaatcaaccttgcaatactcaaagcaacttcgggcatccttcaattattattcatccaacaaatccaaaaaatcataaaactgtgcacacttagtaaagataatcaaggaaatctccccgaaattcggtattcatgaagattatatgcccaatcattacaattcaataacctgaaatctgaaatatccagcatttctgttcccatgggtggtcatactggaaaattctttccaatatcacatttatgcctttcttacatagcatccataaatgtaaaattgaccagaatccatgtactcaaacatttatcgtgagcatactgtatattaacttattaggatgtatgtcaggtagaataactttcatattaataatgggcaactactaacatttcacagatttttccccaaccagaccactcaaagggggaattttgcacagactatcatagtcttggatttttttctttttttgaaacctatgggtatctgggctccaccccaactaatcccataggatacccggcaggccccactgcctggtcccaagattcaacagggactttatgtggtggctggaatccaaatctgagagctctgccaaatcagaccctgctcaaggaacactagccactgcaccaaagccctgtgggctattgaaaatcttggattataattaccaggaatatctcgagtaagagtacttttatgttataattcaagagaaaaagaacacacaaaacaagtaaaacaggtgagtattcaaactaaaatggcactctaaaagagac

SEQ ID NO: 303748 - DNA, 3982 bp, Cannabis indica
ttatatagtatgcctgtgtgtcctttttcaggtgtgttctaataagttggcacgttatactaacaaccaagtattttggaacgaactaggttcgagggcaaaatacaattgtgcgataaattattggtattttataaatgtgtgaataatctgaaaattatttgagtttatttgtgtatggaatgacatgattgtctttgaaagcttttatgtgattaaatggccctagtggcaatatggtaatttggcaaatttggttaattagtaacaaaagtgaattgtttgcaaaatgaaaagcaattttaagcatttgttctcagcccttgaaaccaaccccctccctctctctaaactcctctttctagttcttgaatcttgttggtaatagcttggattcaagcttaaatttttgttatcttttggagcttagagctttgaggtgttgaggattgttcttgatataatttgaggtagttcttgctgttttaaatttaatttcccttgctgaaatttgttgagagtaatgtttttgggctttgaatgcattcgggttaaagagaggagcttatggtgatttctttgtaacttgaacttgtttaatttatggattttgcacctatgttgttagcaagttttagggttgtttttccaagttgtgaaatcttattttttccctatttattgttgctggatgatggtgaagcatgtggggattttctagtccttgaatttgcatgttgtgaagatttgctcatgtttgggcttatgattgagtatgtttaaatctgaattttgatgcatgtgagctttgattttgagctttaaatgtgtagtttaactctctcttatgttggttttattatgtgggaaatgattttgagatatatgcctgtttgggttgaattgggtgtgagtttggcatattttcgaagctgaaaactgggttttctgggtttttaaccctagtggttgcgactatcataggtctggtcgcgaccatgataatggtaaattattatttttttgggtttttgttttcgccgtaacttttgactcaggactccctttggcacgttctttctatccttgaaagatcgttccgagatctatgtgattatctgtaatttgaatgccaattttatatgttatggaaatggatttagggattaaccctatttgtgaatcctggaaatttgtgactaggattaccggggcttggtcaggagcacccggggaattggaatctccaattgcaggacatcaggtaagacagtagtttgcacttagatttaagcatagtggcgctcatattatatattgaggttgttattaattgagaaccatgataagggttattaccctaaaatgagcggttatatggtctaggggtttctttcacaaaaaaatatggtctagggttattaccctagtaattaaaatatttttgagtgttatgccatgcttaatatgttggaataaagaattatacgactaaggcataattaagctagactcggtgaactagtaccttgagtttaattaaatgcagtctagggttattaccctagaatattattaaggtaagaaagcgatgatgtatggtaatattgttaatccagtgaaggcatgagttagggttattaccctcaatagatgttattttgagcatgctataatatgttatatgagtgaacatttagtatacaagttagggttattaccctaagatgggcatacatttatgttaagagttatgtttataagacataattgggttagacctggtatatatcacaaggataaaccactgaaagaacgtaatgtgtggattacatatatatatatatatgaatagggttatacgggcaaggcataatcaggttagactcggtaactataactgagataaaccctactaaggccttattgtaaatagacgtgtgagcgtaacacatgggtctatgctatatagacataagtagacgtgtgagcgtaacacgtgggtctatgctacataaacataaatagatgtgtgagcctaacacgtgggtctatgccacatagacatatataggcatgtgagcgtatcacgcatgtgtatatcaaatagacaaatagtgcggtggcaccattaattatgtgttttatatctaatgtgtatatggtaatttatacagtcttactgggcttagctcacgggtgctctactgtgaaggaaagggtgaactagtcggtgatcagccatgagtacgagggcttggtgatgcgtttacatgttctgaccacactagactaagccggttatggtctaccagtgatgtactgtgtaactttgattttgtcgcttaggtaggctcgtaaaatagacttgtaatattttgtgaaaatatttacgggatcccaaaacatgtatcttttatttgtttgtaaagtttaaattactacaagttttattttcattctggttcaaaatgaagtttaaatttctcgcacttatccttctagttatcctgaattaggggattagggttttataatcggttagcgtagcatgcctaattgttagggcattacaccagcagtatctagtggctcgagttagaataagaagttctgggaaaaactagaattaggatagtgatcgggatggccctgaagggtgaatgtgttgacctcagagttggtcaactgaaagtggaaccttatttatgatcaaaatccccatgtgtaaataacataatcaagtaaagaaaataacacaacaatttataaaggttcgagccccgtgattagcgggtaatgacctactcccttttctgctgtattaattcgagagatcataccacacagattacaagttttaccttgtaatttctagtgtggctctctatgaatgttacaatagtgagaacaatgcaaggatgatctcgaacagatgagataaggacacagacttagtgtcaatgctatgggcattcaagggagaaagagagctagggtctcaagattagagtttagaacttaggtttttggtctgacctaatgctctttatataagttagagcttacaaaagatctagattcaaaatagtttaacatctcttaaaatggggagatattactccttttacatatatttaatatacaaaaataaacacttaattgctcctaaagaataggtagatatttagagttgaactcctatttttgtgggttgttggagtggattcacaacagagaatgagttatggtctgtcaacgaaaaagatacagaaaccctaatcaatcgggcttctttctggcagtgttataggtgttggccgacctaccctttgtttaatgttggccagcacatgccctcctttggtcggccaagggtgttccagctagaccctcctatttggacattttcttgtcactttgtcctacttgagaatttggatccttggtctacagataagttgttagtggtgactttgctcatctattgataggatgttctccacgtggcatcaatcttgtctatgtggacatgccgcgtcatgtgggtgaaaattaggataacattttcccccaagtccctgtgcagatgtttgtctaaatagggactttccaactccatctctgactgttgaaatcttaaccgggtagcttatgtccagcgaggtacttggcctctcatatgtcccacttcatgacaaagaattgctttttttccaattactatgatcttttacagcacacgttcccactaaggaactcttgatcttatgcatggaaattttgtaggtagtgtaaccacccactaagtttttggatggaaattctcatcagaacctatataaggctcacttgaataacttttcacttccactcccatttcacactttctctctttgtattatcttcttgaaaaaggaaaagaagactctgttgggttttatgccctaaataaaactctgtttcaatgtaatccagatta

SEQ ID NO: 303749 - DNA, 2919 bp, Cannabis indica
ttttttttttttcataatatttatgaccaacatataagattatgaaaaaattaaattaaaaagtgctcataaatatcaaaataaacaggtgatgtattgcaacagcccttattaggaatttactgtagattttttccaaaataaatatttgaagtttaacgttaaactattgtagaggaaaataataaagacacctcaaaacattataaagacacttaatttctataaaataattaatacatatttaacttcattactaaagtatataaattctgaaataattggtagaatagtctaaaaatttgactagttgtctaaacgtttcaactttcaaccacctattgaaatttttggaccaatggtctacagggtcggaagtgattttacaaagaattatcgaaattaagcccaaaaaaaaaaaatgaaaaatatatatgaaataggctatttttccaagggactcctaaagttttagaatgagggtatttaagaaaaataaaattagtttagataaatatggtaagaaaacttaataagaaaaaatatggtatttaaaataaaaatttaatatatatgggattgaattaccataaaaaatattaaatttcccttcatattttttttttaaaaaataaaacaaatgaaactacattgattgtcgagttgtcactagtgccagaaaaagcgtcggagtttactgttggtgctgggaaagttgccggagttgctgtcggcaccgaaaaagttatcggaatcgacattgtcgccagaaaaattaccggaaaaatcaccaagaaaccggtttcttcatcaagaaattggaagggggctaataggaagaagacttgctcggctatcatcatcaatgagtttgaggcagtcgctccagccaactccactcttgcaccagcatctgcgagcatagatggacaacccttagggtctgtccatcaggtcaagctttttgcgacccaaccatagatggtcctcttggaaccctcctgcccctgccaaaacatgcaagtattaagggttctcagacctgctcgcaatatgcttcgcaaaattgccgttaccttaggaccttccaacaagatgattgggatttgactaacaatagcgactatacaagtctcttggcaaggagtgttgacctcatgcagtcggttagtccaacttccaatatttgttttattattatttgtttatgttatttttttacttctttcttctgacctcatttctacgtaggcttccttcttgacctttaggactcaacaagagagtcttcaaatttcaactagcttaaatgggagcttcgtaagtctaatgaccattgcgagcttttggctaagcagtggaatgatgcccaaatagaaatttctctccaaaagaataatatgtttgtacgtcagcattttgcattgatcaacaatcaattgcatgttagcatttttgtgtgtggataaaaactgttcaaacactataaaccaacgttaaatcaaccaatcaaaaatatacaaaaaagtgaccatattattaactatattttacgagcacggtgccttgtattgtcgatatgaaataactgcaaataagagaaaaactattgtatcattatcaattttgttgttaatgttatttcaattatccgtgcgtgaataaaatgaaaatccaactcttatgcatctttgaagaaacaaaaattaaaatctatatttcagatgcgtggcgctagatgaatacgaatttcttgttatctttgtgtttagaattgaataaatacaagattaaaattttagaaaataaatataatgcaacacttataacattatcttctagtgataagtgtattctgaattatacttaatttggattggtcagaaaatccagttcttattcattcaaatttatattttttgaatctgtaatttgaatataggaggattagttttgtaaaatttgaattgtaattgagggtttaatttgtgtttcaaactgcatatttttttaccaatcggtaatgattgattttttgatcaattttctcttcttcttaggtcttgttattggaattaacactgaatcttcgtctggttaggttgttttgctgttgccatcctggtttgattgcacgaagggttcgaggatgagaagagtgggtcgtatggcttgaatttttgtgtaaaagttatttaagtaattttgtttatatgggtagtataaatgttaaaatagtcgacccaatgtaaaattataatattttttctttttttggttataataggaaaaattcctgtaaatatttttaataaaatttatttttaaaatttgttacaaaataataaaaattataaatattacacaatattaatttatttattatgtcaaatatgataatagaaatttacatgtaccacttgacttccaaacataatttgtattttaaaatacaatgcaattactatgaagctcccataaaatcatatcagtagagacttttagaggaaccaaatgaagaagacgattcatggaagtaggcagtattaggaaaatagagtcaaaataagaaataaactgagcttgcacatcagcccaacaacattcatatcacccaaaacaaaacaagaaaaagaaaaataaaccacctactttattattgttgcccctgatttcgcccaaaatacgtggaccagttaaacagggacacgtggatcagataacttgtaaatatttgataaagtctttgtatgccacaaggaagcaccctgggcatgggtcccggaggaggcacccggagtacaaggtactcccggaagctcgcatagcatgaagcctctccgggatgtgtcaggcctctcctgagcaatcaagtcgcatttaatgctgcatgggaggaagcgtgttgggactgcaaca

SEQ ID NO: 303750 - DNA, 2516 bp, Cannabis indica
tgggttgtgggggtttagtgaaaccaaaacgaaagtattgggggttttaccgccatttacccaaatataaaatacctaaaaaattatatacaaaatttatataaataaaaaattgagggggtgcaaatgaccccacatgtcccccttccttctgcctctgcctaaacctcactcgcaaccttttgcctacgaaaaaactcgtcagcaaaagttttcgacaatagatggtcagggacagtcgtttcgccaatgaaattcgttacttcgccagcaaaactatttttcccagcaagttcaatcaccggcataaagcatacatttgcattctcccttctgttgagggcttttctgcctttttttttttggcaaagtaactcgccggcaaaactttcgtgctttttttccaactcctgcaaaagttttgttgacgcaactaaatttgccgacaaatttttttttcctttttcataaaataatatttatgttttgctagtgcaatgaactttttcggcaatatgtttcctattttttttaaatatttgtttcatattataatatatatataatataactaaatttaaatcaaaattataattttataaatagtaatataatcccaaccgcattataaaactataatttcatattataattataaaaaattcaagttattggaaaattaagtaaagagttgttagtttataaaaattagtaatatttacactgaaatttataaagtaaaaagtaaactataaatcaacaatatcattatcatcatcgtcatcgttctgggtgggtgcagcctatgatgaagatccaggaggacgtaacaatggaatcaaagccatctcaggcatgttgaagctaggaacgacgccgaacaaatacctaaacttctcttgaaacgtattcaaatattgagtctaagcctgcatcatttgttgttgataatcattaagtgattcctgctcttccaccctttacttcagcgcctcatagtcctcgacgctaacagtaggttgactggagggacctgccctaggagtgccattttggcccctaccctaagtctcagaaactggcccatgcctctcaagcggcgtgatagctaactaagcacatgtttcataacaagcatgtctacaagaaattaggtgagatctatatcgtactgacgatggacattggtaagtggaagttgagtttcacacatctcaactatttgggcttacaaaaaagtttaataaactgttagatttgaatagaaattaaatatagaatgatataattaagatataaaattatttgcatgcagttgttgtgtgtattcatcgcgtcatttgttgttcttgtggtggaactttttaaaagtatcaacgacattggaaagttctcccgtctcgagattagcctatttttatacataaaaaaaatagtaatatattattcaaaacttattaatttttaggcaataatatttgtaacatcataccccactgacgatgtggccgacaatggtcttagactcccatctgccttgaattttcattgggcttcgatcttttacattttgtttggctcttgcctgtaatttaaagtaaatttattatcaactaaatgcataaaaaagtataagttaatggaaattcaattctataattttcaatttctacctgttattttgggtctttccagtaggcgatgacctcatctcacctcttgtggatgtgatctcctagtcgccttttcctctcccattttctcaatattcttcttccatatttttttcgtgtctaatctctggacgcataaccctttagagtttagacattgctaactcactgtagtcctcaaacttagaattatcaaatgagaactcaaatttagtctggaaaaaaaaaaacattaaagtcatatatatttttttacagaataattttgtttgatctattacaataaaaattgaatgttaccgctagtctgttcgagatagtctaaatgtcccttctataaacatcctcaaaatttaactttttcataggaatatggtgttgtgaacaaagaacttgaccatgttgttaaacttgtttctatagtcgtctatgaggcccaagtccctatatgttatctaaattttaatttctgtctgcagacaacttggttagttcttcttccacatttttccccttgtaatgttctctaaatactttatttttattgtttcttgtacttgtgtaagtcattctacacatacaagctatatttattaataataaaataaataattacaatcttaattaatttattaaaaaaaaaacatatattttatataattaatggtgggtttaaatattacaatattttaaagttactaagccatcataattatcatcaccaacggttacattattagaaggcttttttcataaatgtaacaaaaaaaaataatataattacaaaaaaatgtgcaaaaaaaaattattttaaaatctaatatattttgaaaacttattaca

SEQ ID NO: 303751 - DNA, 974 bp, Cannabis indica
aattctattattacacaaaattctaaagttgaaaaagaaaaatcataggaattaagcccttatggagtcaattattatgaaataattgtaatcctatcactacggttatttcataataatcgactccatcagactcctacgaagtcggttattccatacccattttaccgtcacttggaacagcgtcgattgcaaattttactaaaattgacgccttatatctaaaaaatcgcctctaaagccttttttttttttgtagtgtgactataaatgattgtcttattagataattatctcgatataatgtgtagtatgtattgtgtggtgtaaatacttgtttatgattgggtatgtgcataatggttatgcttatatattgatacctgtaattttagttattgcatttcttcctgagttataatgacttatagatgctttgtggtgcaagtaagtgtaacaataagttggatcagccataagttatggacttcttcaaaaaatatacatatcagcctaaccgatcaatggggccgagttgtcagaagatatattttaggtcacttttgaaaactaaaatttacattttaaatgtaacactgagtaggcaacttttgtaattttaaatagagatcctcgaagttaaagtttgtactttatggtttagtttatttatttaattaattaagttttaattaaatcatgttttattaaatattagtttattattgaaaattaatttgtaaaagtacacacttgacgtccttatgaattagggtgtattcggccaacccgattcatacacgggcgtccaataaactcgcctgttattcaaccccaatcaaaactataagtattatgtttttaattggattaaatatatgatattaaaggattatttttaaccaataaaaaataaggtaaatagcggcacaagtacccaaagttttatgtttgtaagcagcataaactcaatg

SEQ ID NO: 303752 - DNA, 2318 bp, Cannabis indica
tcagaggtaagatatgatgagtgagacgatggaagaagcatgagagttttttagagagaggtcccacagtcgagtcttctggcattagctcgcgaggacaaacgagggacaggtgagtgagagcactttgtgaatcgccacgcgccggtttggcgagtgtacgagccaaaaatttacccccacgcacgaatgaccatcttcgtattagtcttctgttgctcatcacgcgttcttccatcacaattctccacgcgctctaaattataattatagaaacaaaagtagatttagtttgcaatctccaattacaatttgttgtttgacttgtgcgtttcaaatttatactgaaatattttttttattgcactattcgttatatttgtgataatataaatgttcagaaattgtaattagtctcttcatataataataaaccaagtgaacctttttcttaagaaaaaactactttttcttaaatgaaagtgttttttccttagtccccatcaattcaatattacatgaactccagttaatttaatttctcaccttactcgacaatttactcataagtatctatttttatttatttacttgataatttttttttagaatccttgataatagtagacagacatgcaccttagtccaagtctccaagacagaccgaccctatacactttctcaacccttttagttgaatcatcttaaatttttcatatcatttcatatctatatgaagtataaccaatacttattatacaccacactctaagtatttatagttatacaaactagaaaaaaactttaaccaatgaataaaacctcaataaaaagtccataaatataaaagtctttacttaatactttaatatttataaatatagtagtgaacaataatattaattataggtattgaaactttaatgagcagcttaaatgaataccatttatttcacttgaatgaattcattttcctaataattgcaaatttatatttattaagtaaatttatagtacacatactctaaatttcaatatgcaaacaaaaaaatttagtcaaactttatttcatgatcatctatgttatagttatataagatcatgttaactcgaaaatttttcctgttaatatggacatcaatgtttgacatgtggcaaggagatgacatcactgagttgagtagatctcagtcataacagttgacttgggaggggaccttagccttgtgcccaggttgatattgggagctccgggatagaaatttggacttcaatagcttgaatttaactcgttatctgtcaatatatgtaccatgaagacattaagcaatcaaattacaatcccgagagttaaaattacacgaacttgcaccccgaaggccaacatttgcatcttctttgtcttcatcaaaaatagggaaatatgtactttcaaggaagaaaaaacacttcttgggtgccagaagcaaggtccagcgctcaggctgacccttagggctaggccaacgcccaggctgacaccttgggctagcccagcgcctaggctaacacctggggctggcctagcgtccaagttgacattttgtcaacctaggccaattccaatgatgttttcggagatctcttatgagcatcttctctgttttctgcaaagattaagattcaacaatttctgaggaccaaacggaacttttgaagggccaaaagagggactcagcgcccaggttgacacttggcactaggcctagcgcccaggttgacaatatgtcaacctgggctgtttccaatcaagttctcaaaaaaatgttctgggtattttttccatcattagaaataatgaagattcaagcaaactcggggagaaaaccacaaacttgagaccctggaaacgggacccagcgcccacattgataatcaacctgttgtgctagtttcaatcattcaaatgccaaatctaattcgaccattgaatccaaaatggtcaaaaatggggtaggagacctcatcctcaaaatcaagaacctcataaatgagtactcatcacccaggttgacaaatggccttgtgcgttgggttttgcttatctgattatgttttgactgttaatctagtttatcacaataactaagatccatgaagttagtgttgggctttgtgccctaaataaaactctattcaatgtaatcttttctattcaattattaataaagaaacagattgaatttcattacttgtttaatgtgttatttggttcatgtgatcatttatttatttagttgatttataaattcatccaaattcttatcatactgatattc

SEQ ID NO: 303753 - DNA, 3630 bp, Cannabis indica
tgacagtatttttataaaaattatcccaaattacagtatgtatttttgtaagttttcctataaaaatcaacactttgttcaaaagcttcctctttttcaactcatttttttcagcataaattttgaaggttaaatatttaattttgttttgttttgtttgggtaggtttttctttgatttcagcacaacatatgtgggagcaggaatgatatgttctcacttagtaaacctatcattgcttcttggagctgtgatttcatatggtgtaatgtggccacttattggcaaacttaaaggagattggttccctcaaagtttaagtgaaagtgatatgaagagtctttatggttacaaggtctccttttctctttatcaatttattttaagtatattaatactcaaaaataatttactaattactttattgggacaggcttttctttctgtatctctcattttaggtgatgggctttacaattttgtcaagatacttgcttctacaatcatcaatatgcatcaaacattcaaagacaaaaataatccaggtaataatccaataataatgtttttttattattattattgaggaatatatttatttagtactctgttttgtgctttattttcaataatactcatctagtacttaatattttgaaattataccaatttaatatagcaaagataaaattagtcaataaaattatataatttttttataataaaagtatattaattagtagagtaatttacggtataaatacctaaatttaattcccgattacaaatgaaatcctaagtttaatttttagcaataataagtacttatgttataattttaaaatttctatagatacttggttgttaagtgttaagtaaattatcacgtaacaattcttgatttattctagattcaatataccaataagaaaatgacatgtagataataacttcacatttacaatcaagtacctacaaaatgttagttgtataatttaagtattattaccgtcaaaaattaaacttatgtatttatttaaaactaaaatttaaatttatatatttatcccacaaattacactaattactatgataaagttaagttcaactactaaaaatatacaattactagtctttccatatttataatgaacagaggattttaattctatacaaagttgtatatttttttttatatttataatcaaaaactgtcgtttcacgaataatatccttttcgctagttgtaatattgtatttttcatagtaaagttgtcgttttctcaaaagtatgtcgtttttcaaaagttgtcgttttctcaaaagtatgtcgtttttaaaaagttgtcgttttctcaaagttgccgttttacaaaagttgtcgttttttcaaaagtatgtcgtttctaaaaaattatcgtttcttaaaagttgtcgttttctcaaaagtatgtcgtttttcaaaagttgtcgttttatctaaagtatgtcgttttctaaaaagttgtgattctttagaaagttgtcgttttctcaaaagtacgtcgtttttcaaaagttgtcgttttctcaaaagtatgtcgtttttttagaaagttgtcgttttttaaaagtatgtcgttgtcgtcaaatcattaaaactcgtcgttttacgactgatatgatcattttcatcaatattgtcgttttcttctccttccaacagtaaattgtcatttacctaaatatcgtcgtttaatctcaaagttgtcgtttttctgaatctctgatcttcatcttcttcctcgtgatttttgattttgacagaaacaagagagaacaagaaaaagtcaggaaaagcagtagaagaaaagcaaaaccaaatcttcttaggagaaacaattccactatggatagccataacaggatacctaatcctctcctcaatctccacaatcgtaatcccaatcatgttcccacagctcaaatggtactacgtcgtcgtttcatacctcttagctccatctctcgccttctgcaacgcttacggaacaggcttaactgacataaacatggcttacaactacggcaagatcgcactcttcatcctcgccgccataaccggaaagcaaaacggcgtcgtagcagccctagcaggatgcggattaatcaaatctgtagtctcagtcgcatgtattctaatgcaagatttcaaaacaggacatctaaccttaacttctccacgagcgatgttcgctagccaagtcatcggaaccgccttaggttgtataatcgctcctctgagttttttcctcttttacaaagccttcgatgttggaaaccctaagggagaattcaaagctccttacgccttgatctacagaaatatggcgattcttggagtccaagggttttctgctctgccgcgtcattgtttgcagttgtgttggggcttttttgggttcgcggttggtgttaatttggttagggatctttcgccggtgaagatcgggaaatggatgcctcttcctatggtgatgggagttccgttcttggttggagcttatttcgccatcgatatgtgtgtggggaccttgattgtgtttgtgtgggagaagattgatgcgaagaaggcggagcttatggcgccggcggtggcttctggtttgatctgtggagaagggatgtggattttgccggcttcggttcttgccttggccaaggtgaagccacctatttgtatgaagtttttgagctcttaagagaatgttatattaatgggcttttaattgttgggccttttttatttgggctttatttaaggttttcataaatatcattttatttttagttttggggttaaatgattagttggagaatggaattgaatgttaaaagggataatgcttcacttgatttctaatggtatgatgtgttgtgactatttttttttttttttggttcctagattataggtcaatcaattggataattattttactatttcttaccaatacattatgaattatgctcccaatttatataattaaggttgttctttttagtgtaattgggggcgaaattgtttatattttaatatttttatatacttaattttttttgttttttctttgtaaattttaacccaattgatataagctctaactcaaagccagttcagttataattcaattagtatttaatgataatatctaactggcatcttaaataaaattaaaatataaaaaaatttcacaaccaataacctttttattatactgtccataaatatcattttatttctagagggtgtcgtttcacctattaaggtcaatagtaatactgaaaaattggtttttggggttaaaaattagttcgaaaatggaattgaaggttaaaaggataatgcttcacttgatttgtaatggtatgattggttgtttctttttagggtaaataccattttggaccctgtattttacaaaagttaccgattggaccctctgttttgttaaatgacaaaaaggaccctgtattttctaaaatggtaaaaatagaaccctaaactgattttttgtcaaaataaaatttaataataatccgatctaaaagtgttatgacaaaactatttacattttctgtatctattcg

SEQ ID NO: 303754 - DNA, 2862 bp, Cannabis indica
gagttataccaccaccactttttttttataataggttcggtttgatatatagaggggaaaaaactaaacttttttacagtataggtttaggtaattaaaatagaagattttaagacaaaaatgggataaaatggttaagaaatgaggaagaatgaggttgttttagtggtggttggcgagagttttttcgtgggtttgggactgttgtggtggctgttctttgtgggtttgagggtgtgaaatgaagaagacgatgtacaggggggtctgataaataaccttatggcgtcggttattttgtattaaccgacgtcttaggtgccgcctttagtcataggtgccacgtgtcgactaaaggcggcacctatagcgtcggttaatacaaaataaccgacgctatagggttataaaaaaaatcctgattttccctaaccctaactgacggcatagatatatatattttatacctacggtttttaccaaaaaaagtgcatctaaatatcaatgcggatattttcacaccctttagcttccttttttataaaatgtgttgaaaaaaggaaagctaaaggcctgcattgtagtagtggtaaatgtgctagtaaaagttaaattttagccactgcaaatgtacgctagtaaaactttgacctttttgccagcgcagtttgcgaaatgcgctggtaaaagttatttttaccagcgcagtagtgaactgtgctggtaaaagtgacatttcttgtagtgtcataattagatttttaggatattacattaaggttgattgattttaatttatttatggatgcgggtatgagaaccacggttgtatgggtctcgaggcagtgacgataaacaatgatagaatggttttgtgttcttcgagtgatctagttgcaacctcctttcatccttatgtggcggaggcaacaactctcttaaacggtttgttgcatgtcgtcgtttgggatacaactctattattgttttctcagattgtctttgtcttatccaagctattaataataagaataaatatcagattaagtttgatattattgttcatgatacatgtttggtattcttttctcttttagttctcttacttataaaagggttcaaaacgctgcgactcattctcttgcacctttggctttatttcttgactctttttatgtttggtggcctaattaatttactgtcttgcctttaattcttgactattttgtattgagcttttgtttttttggtttaccttttaatggaattctccttcggtcgaaaaaaaaaattattgtgtactttagaattcatcgctatttatgctacatatcaactaactccaataaatcaagatttctattttaaaatattgagattaataatataagattgcaaatgaaatacctataataattaattaaattattattagcacgtgaatattcaataaattttattatttaaagagagggagagacaacaaacgcagcccccaaaatcgatgttgcaatctatgtatgggatccaacgtacgtagtcatgtcatagtagcaattaaccaccctgaatattatatatgacagatcatgaaattaagaaattattaatatatatatataaatatatacatagttcatccacaatattgcttttaaatcactgttaaaataggataccactcagttatcattgtcttagcattgtgaatgtatcaacagtagtgtggctggctttgtgttaaaaagtatataaagaaaacataaagaaggataaatgagttaattagaagaaaataagttagcagtaaatagtgttgaaattggatttaataaaattatctcaaaattctcaatggagacaaataatttcaaattaattaggagagttttattgtcttatcaagtcttatatctttggtaaaaatttcatcaaaaaactaattagcaattaaaagtagtttatacctttattgggactctctaacatattcttataatatttgctaagattcatatattgcaaacaattatcaagaacaatggccaataagtatggccatgactacatcccacttataatgtgaataaaatgatatttgaaaatgagaatttacataaaaggttgaagtaaaaatttatagcaatatataggcaaagagcaacactttagtaggagagtgacagatgttggaaaaattaaaattgagatatagttacaactctatatatgttcaacattacaagagcaataataaagattaaataatattacaattctattgcaaaatacataaaaaatgaagaataagagaagaagaaaacacaactcaaaactttataaataaattatctcaatgtgaatggtataaaatataaagtgatgtgagagcactaaactaggaaaattaccaaacttaaataaggttcccctaccacaagtactcagagaagagaagaagtggaaataattttatagctttacatgagcctaaaatatttttaacaatgtgttctcttaatagaaaactaattaaatgatacaaaaatgaactcatataggtctccatttatagtattttaagtaaccataatttcaactccaacactcacatcactataattgttaacatgacataaatttagaggtcattaagtgcgaaaacattttttgaaaaaatcctttcaacacaattttggagttttgtaatttttcttcgaacctacttaattcccaatgctttcctactcaatttaatgactcaaatgagtgtagcaacccttgctaacagctatatatataatgatagatttgattgttagacatttatatgtataaactgtaatatatgtatgtgtatat

SEQ ID NO: 303755 - DNA, 1337 bp, Cannabis indica
tacaattgggttgatttcatttgaatgggctggtagatgtgggctttgttagtttgttatctgggctctaatgggcctagagatcgtgttctgatttgatttgcctgaagggcaacttagacttaaaacatgaaattacagttttgcaacacgcgtgtacgtacacaagctcaacaaggtcaaggattcgacccaaaccccaagcctcaaacagttgctaactccatttccctcaccacttcctccactgggcgttgtaattgttaccaacttccgaaaccagacatgggacgcggcagggctcgtactcagagaaagcacttcaaagagaagagagacaacgtttggaagcgtcccaagtccgacccttcctctgatgttaacaacgacaacgccgccgccaatggtaataatggtggtgctacacattgggagccctttgcaactcaaaaccctagttttgatttctattataaggtattctctattttctatatatatgtgtctccacaatatacgtatctagcattctgcttttgttgaattgtttgttttgttttttcacttgttttttaacgtaggcgcaagggatagttgcaccagatgattgggactcgttcatgggagttcttagaacgccattgccagctgcttttcgaatcaactcaaggtgattttaataaaaaaattaggaccagagaattcttttgttcttttctactgttcccttatagagtgtgctatttgaactgtaggaagtttatgtttggatgaatttatatataagcgggagtggtttgcagaaagaaacatataaaacagttttattcattaatttcaagttaaaatattttttttatgtggatgcattctttttttttctttctaaattcattgtgtttatgttattatcctagtcattgatctgtgttttacatgaatcagatgagaaatttatttatatgctgtaagcattctgatcattgtgtgtttatgaattagtttattggtctatcccatattccttatatgaatatattgataggagtacaactaaattatcaccagggagtcagatagtaatagttattttaacacatttctagcttattgtttaccttgcacttagtaaactcatgtgactctttgccgagcttttggcagtgatgattgactgaagctttgtctccttttcctgatcttgcagtagccagttttataaagaaatccgtcatctaatagtaaaatgtacttatgacgtctcttactgtctgaggtaagttgaataaaaatttgttaaatttgaaattgttacttgtatgcatatttagtcgtac

SEQ ID NO: 303756 - DNA, 1506 bp, Cannabis indica
ttttatgttgacaaaaaatcaattcagggtaatattttgtattattttagaaaatataaggttcaatttgccatttaacaaaacaaatggtcttatcgataatttttacaaaatacatggtccaaaatagtatttgtccttattgttatgattattattattatcatcatcaaaatataagaatttttaatgtgtcgtgcttttggactagtctatttgtgcttacttatcatgccttcggtcttgtcgtgttgtgcttaaacttattttttctcgtctcgtgtcgcgacaatttacaacatcgtgttgtgttgtattgtgcctaaacttatatttttttgtgtctagttgggctcattccgatttcgtaccatgttgaaaagcccaacttgtatttacattactagttccaactagtgttgtaaatatgggccgaatattttgacacaacacaaaattgacatgagcccgagaagcacgagcacaatcccgctcaaaaaatatgtgcttagacacgacacgaaaaaatatggacttaaacacgacacgacacgaaaaatatgggtttaggcacaacacaacacggaaaaatatgagtttaggcacgacacgacacgacacgtaaggacgaatagattagctcgaaagtatgacacatttaaacgtctaataataataatgataaatatttctttaatattaaaatgatggtaataaattatactaattataattattttttatacgattgtgagtaactattattgaaaaaaaaaaataataaaagtaattaaaattaaaaaatacacatatatttagtattgagtcgagaaagattttccttgctagaagcagaaagagaaattcaaagagagggaaaaccaatccctcgatagaaggagtgagactatactcttatctatgaaagacttgtttagaccaagcccgggcgactatttaccaaaaacacaggtctctgcaaagtcaaactcatcaactgtaataaaaatacaaaattatggaacacgaatttaagtccgtataaaaatagattagtatttttaagaaaaatgggctgacctaaataatgcacaatacaaattcgagcatgacaagaaattattagatttgcgaatcgtatcaagcctactttataaaattatcatacagtacgatacgactcaacttatattttttatgacccgtactttaaaaaattctaaaaatataaaccaaactaggcatggacatttgtccaagcttagagctatgattgcaactaaaaatgaactcttcctactttttaccccttttgactgaacagatgatttttttctctttttgactgaacagaggattgcacggtaaaataaaaaaaatattactttatagaagtaaagaagtgaaaaatcctttccaaagaaaaaaacaaaaaaataagcaaaaaagaaaaaaaaaattaataaaagtataaaagtaaaatgttcttgtcaaattaaaaatgta

SEQ ID NO: 303757 - DNA, 1869 bp, Cannabis indica
aaaaaaaggaaagaaaataagtacccttcacaaactttaaaaatttactttattaagatggtagtgagagactagattgaaacaagtcaagaacacagaattggaaatttacaaaaaacaatcacaacacaaacacacagaaattgccagtatacatacaaaaattatatcagagacatgagttgggtccataccaggcctgtccttgcctctgaaacgcatcactttttgaacccaatttcacacaagccattttatctcaaatcaaatcaaatcaaacctaaggctcttgctatacagctcaaactgaacccaaaaatttcttcaagtaaaggcaatgtgcaagtaacgacagtagattttcttctctcccaaacagcaccttggttccttctctaaccaagttttgaaaaaagttgaacaccagcaccagtgaccaccacaatgtagctcctctttctgatctgtgacccaaaaactaacccaacacttggagaattttcctgctaaacactcccaaatctaacaataagaagtaaaattgcttaaaaaagaaaaccccagttccaaatctgcaaaaacctatggacctaaacccactcactccattacattattcataccccactttccaaaacacaccagcaaatctcaaaaccaaataatcctaattaagacaagcaatttaggtcaacccctccccccaaaaaaaaacccaactgttacaagtctctctacccctacaacaacctaccaagaaagattccaaaactcaatagtaaacaattcacaatggaccaaaaccactcatacccatgaaagtaaaaggttgaaaccacgtcactgtggtgccataatagtgtctcttaaaggccaaaaaaataaaaagccatgggagagagagtagtgaaccaaaaagaataccccatatgagctttgaaaaacccaaacgcatgtggggtctttagcttaaaacgcactcattgcttttctagaactgatttgagtttttagagatatattatatagaaatagaatctttattagcataaaaccaggtagaagaagaagaagtgtaattgacctctctctctctctctactaaagaaaaatggaaattttcaatggtaagattcatttattttttctcgttccccgtctcacgcgcctagctccatggtttctctctttctcgctaatgttctctctctctttctcttttaagtttttttacgggtagtggtggtggtctggtgggatggtggtggttcgatgtgcttttggtggtacaatgggttgttgtggtggcggtatttattattgttgttgttgggttgttgtggtggtctgaaaggttgtggtaatctgaaagtttatgctttatttttattttttattcttttgcttcggttcataaccgaagcaaaaaaactaatttgcgtcaaggctttactattttcttcggttataaactgaagcaaaaatcttttagtctgttactaagtgaagcaaaaaataagactatttgcgtctacagttataacgtcagttacacaaacttacgaaaattctttatatgtcacttaaaaactgaagcaaaaggctatttttatattagtgttagtcacacattttagtcataaagatttttaattataactgaatgtatttttagtcacaacatttagttgtaacattttcccaatttaaaatttaaaaatttaaaatttgtcacaaataattagttatgattaaaatattatttgtcataagttgtgaccaaataatacacttagtcacaaattatttttactgtgattaaaagtcaaattttttgcagtgtcggtagtatttctgaagtaagtcata

SEQ ID NO: 303758 - DNA, 3017 bp, Cannabis indica
tcgcttatcaaaaagactcattgtcgttggctaaaagcgaagtcaacaaaatgataagaggatttttacgtggttttaaagttaattcttcatagtttacgagtccatcttattcaaggattgatgaattatatacagaatacaatttattgttttataggatgaataatagatataattctctccttttctccaaaatggccatctcttgtatcttgtattctgtgcctatttataagagtctaggatgataattattcttttgggatcttatcacttgtaaccattcatgaaacatgaaaaatcctcacgtttcatatttacacacatgagataattacaaataacttcccataactacacttttaattttatctataggcatcgatgttgactgtgcttcagctgcctcacagcgtaacaattctttatgacactttgtattaaactagcatctaagtatgtgatgtagtactccttgcatttctctattaatattgagttaggcatacgcaagatgtttgtcacaacatgaaaattgcgaggtgaattgttccgaaggtgttgtatttagtctttcaacatactctcgtgtatatgggtcaatgagctacaagctctttagataattcattatctatcattttcaaataattttgttgtgtattgtgtgcatctcgagattgactttctttgttcgtctcgctggtctcataaatcggtagttattattcatgccctgccattatctttaagagggtgagtttaaatatttctaccaattgtatttctcgagacgagttgtctgaatgcatttattattgcataatttgggctggttcatattcacatgtcaacaccatattactgctcaaaatatgggtataacacttacctttagatttacctgatggttgtaacatatctattgaaacaactagagcacttgatgcaacatattttagagaagataacacatgaacatgagatgaaagcattctagcagagacaaaggtaattttctttgaattttgagtgcttaaagcaacaagtacacatgacttctttgaccttcttcatcttcactactttcagagtaattatcactccaagtagcaatcatacttttcttgttctttttaatggtatttacgcattcagattgaatgtaaccaaaactctcacattctctgtattgaataatcttttattagtttgaaaaggttttagagaagaagaattatgtttagaaggcttaacattaaattttttattcccaatcttcttcatatatttttgaaacttcattgcaagaatttccatttcatcaccaccttcattttttgcaaagaaagacgttttaataacaaacaatttaattaatgcgggatctattgtatgcggatctgttgtaaatttttctaaataaaatcaaaatttgctcaaaagttgaacctcatagaacaaaataaaagtacaaaaagtaaaattgaagaaattaaaatgacgcacgatattttatacgtgaatatcagcaatatttgtagattgctactagtacacgggaccatagagataagattcattagtcaaattttaacagtacaaagtaattgaattaaacaaaacatatactccatctaataattttcctgcgagcttgatgtactcctctttgctgaatgaatcttcttaaggcactaaggtttcaattcccttcaaattacttaatgaatgcttgatttctcccaatgcaagattcgtacaaatcttcttccaaagatagcagtgcttgcttcctcttgatacaagtattgtagaaattttcttccaaagatagcaatgcttgcttcctctcgatgcaagacttgtagaaatcttcttcaatccaatatagcagtgcttgctttctccttatgtaagatttggattaactttctctcgtaggttgttctttatgttctttactttggaaactttaaataaaagttagcacaaaggcacacaaacttgccaaggaatagcagaataactatcatttgcaaaagaaacactttctaaaaatataagaatttaagaagtgaaagagtttaaccttttgctaatagtttaggggatatttataaggataaatgacactcgtaactgagctctaaaggtctgaatacaaagagaactcattaaaaaagtttcaatacaaaaactcattaaataaatatattctatctgaacaactatgaaaagtgtgcaaacaaattcccaatctgtctagttagcattgtgaatctagactctataaaatccaagttcatcagcatgaattttccttagacatcactaatataagaaaaactataaatgacgaatttttttttgaacatatatggaaagtgtccagataaaatccttatttgtctagtcagcatcataaatctacactccatcaaagtcaagttcatccccacaaatactccttggtcatcatgaatcctacctagagagattaatgtacatcatattagaaaataaataaaattaattacaacgaaataccacatatagatatagtattttatcacataataaataattttattctttccatataaaacgacaacttgagtaagaatattttttcaattaatacaccacatatcgcgctttataaggaaggaaacatgcatgtaataaatgaaaaatattttcaaaagaaaactcaaaatctatttaaacagattgtcgatccgttcaaacattgttccttggtaaagaaagttaaaataagattttttttgcggttaaccttcacttcacttgcacttaaccttctcccttcaaactattgaattgcttgcaaatttaaggtgtcatatattttgacagttaattgctaatatagactgtttatgtatacttttgtacatgtgtcaaatttttagtggtacacctaatattattattttaaaaaatattaaattatttcaaaattaataatattttaattttttaaatatttt

SEQ ID NO: 303759 - DNA, 810 bp, Cannabis indica
gaggagctcacatggagggacaactctcagccaaaaggctctcttttttctctttcttatttctgctgttgtgctctactgtatctctttggctctgtatatctctttgttatgagaaaaatatttccttttatagactaatatgtgattctgatctagggcagagccctagtgatatttgtaactgtttcagttgtaactgatttaatgttctttagtcttgatctttattgtatttgatgtaagggtatatttgtcaatccatgtgagtggtgttattcaacgtaaggataaataagtgaatctgtaacaagactatgttttcagaattaggttatgatgctaaatctaaacttttttatttccagcacgatctccaaaacaattagaatagaaagaatgtgataatgtaagatcataatagcctctggtgcaggaagatctctaagtatggaatattccagctcaacatgcaatgtgttaggtatactttaccgaacgatataattccatgacttgggaaggaactgtctccacccttggttcaattcctaaatgaacctttcgtagatttcaccacctattcgctcaaaatagtggtgatgctagatcttgggttccagagaaccactactcaattcaaaatcactcaaacagctgcctgatgagctctcacaggaggaactggctgagcgatagtcttcatacagaatacttagtaaatcctcatcaatttggttgtcacctccctagtagttgtacaagttcatctgtgcagaaaggtagagaaaggtaaacaaccagagatca

SEQ ID NO: 303760 - DNA, 4323 bp, Cannabis indica
gagactggtacatataaggctaaccttgtaacttgttgcaggacacagtatgtccaatactccaggcagtttcatcaattccgtcgtgtaaactcatcgaagaaacttgcgagaggaacttttccatgcatttcgactattgtacaaccgcgagcattgacttcatcttcttagaagaggcgaattttagcaatatcatacgggtatgtccactataacagatcacattagatttgactgtaacatctgaagaaaaagttatggtcttgcacttgcagcatccagatttgactgtaacatctgaagaaaaagttcttgatgcaatcttaatgtggggtatgaaagcgaagaacgcatatggatgggaggtggtggatgagctgatgatatattcgacgcctgaacttctcttcggggagagactagagtcggttttcaatttcttatcttctgtgcgatttccaatcatgcctcttgtcctgctcaagaaggtaagtaaagctttgatacacaacaatttatgagtttgttagaacttaaaggcatgctcctcagttgactttcattgtatgatcatgcagttggaaaagagcaacatcagcaggcacattcctagtttcgattttcttgtgagttgaaaccttctctttataaggacaatctttttgaatctgttcaattcatgaaaattttattgattatgtaggtgaaagaggccatcagctatgttgaacatggattatgtgagcctgaatttgatcaaaagtaagttccatggagttgtaacagaattattatatgacattttagagtggcattttctctaacatgaacttacttacttttgtagtgttagatttcaactaaggagatctagttataaggagcttcagtacttgtgtgatggagatagtaatggagttctttacttcgcgggcacatcatacgggcaacatcagtgggttaatcctgttctcgcgaaagtaatgcattgtcaataacttcttgtcttttcagaccaagagatcattttattatggttcctaatcctttttaaattgtttgcttcattcagacaatcacaattacagctagcagccccccttcaagattcaccgactccaaagttttggcgtctagaacttaccaggtataaaatccagaattcgttcgttacaacttactgaacaatgtgagcatccatcgttaaacagctaacgaaaaacacaaagttacattcactgcagggaacatcttttgctggaccaaggatagaagatggacatagtagcgcgtggtggatggttgacatcggccccaaccatcaggtttgttttcgtgtttttatttctcatgctaagattactctataccaactttctgatcggtctaatcggtacagcttatgtgcaactactacaccttaaggcaggatggatccagggcttacaacagatattggaatctacaggtgaaaatggctatttattctcaatattatattcctgtggtgaagaaacttaagtaatgaacataaacagggccagccctcagggtatttaacgtgtaactatgaaggattgaatgttagaactcttaagagtttttaaaagctttaccattacactaaagcactaaaactatcactttcattttgctttaggccctatatactttaggaccggctgaacttgagtttttttttttttttgttacatgcagggatctttggatgggaaaacatggacaaatttgagagtgcatgaaaatgatcaaacagtatgcaaaccagggcagtttgcatcgtggcccataataggaccaaatgctctgcgaccatttaggttctttagggttgttctaacgggtcctactactgatgtatccaaccccttcaacatttgcatttgctttttggagctctatggctttttccattagtaactacttaaacacatattttctttgcaatatcgtgtaatctacaccttcatctagactagtttttagaacacttttttttctttcttactttacaatgtttacttagttaaacttttactcttgcttatagctagtagtataaaataaataaagatttgacttatttttggcgtttaaataattattgtataaaaataaatttaatgaaaaatattttttaaagttgtgggaaaattacaaatttagtgtagaattaaattaactcaaacttaaacaacaaacaattaacaatgacaagatttaaccatccacacactaatcgggagataaaataagaatgaatggagtaattgaaaccaaaaacaaataaagcaacaaaacagcaccaagatatatattggttcaagtcatatagatcgatgtgatctatggctttactcgagttttgaaatactactaaatcttctttattgattgagcaagaacataatacaatacagtcgagatcgattctctgtaagattctcacaaagtgtttatctctcacactcttatctaagaatcttctttattacagaaaattcttttctctctacctctcaattctttttctatcaagatcacctctcgaaactcatttgaacttattcttttttgaaatgctaagtgttggtggtatttataggtttaggacatagatcctaaagttggtggctgaagatgttaagttgtgaagttagtgacgactttacaaacccatcgtaatagtatctctacgttagcataagttgaagtgctttcgggtgaggcgtacacttcctaaaagacagaccaaagcgtgcgttgaaggaacttcccgaataggaaaggcaacaattggagtcgactattagggactccctttcagggggaacaactgaccattcaaaactccttttcgaagggaggttagctttcctgaagactcctcctaagtggacatgataggcatctgttctagatggcatctatcactccacgagacttcttctggatagacaatttagacttccacgaactccctttctttttttttgaaaagggaatagacccacatatcgagggatcttctcgttatttattaatgagcctcacttatggcggaggaaaaccatgattacaattaacatcaaacaaaagtcctaggacaggatcattctcgacaacttataaaattgttttccattctctgcttaagtctaaaaaggacaaattctcaaagtgttttgttttaaagacccaagtagctgtccaaaatttaactgtctcccacacattcgcttctggtttagcaaccccttcaaaaatgctaccatttctttcaagccacacagcccaaattgttgctaaggtcacagttttccaaagctttgttctgcgtttgctgccaattaacttggaagctatcatttgtggtacggaccttggcataacccacgccaattcaaactcctctaacacatgtctccataagcaccgaataaaattacaatccagaaacaaatgttccacatcttctccactgcctttacaacaaacacaccagccaggggatatatacaggaaaggcttccttttttgcaccttgtcatggacactcactttgtctaaggcgactagccacccaaatactttaacttttgatggcacacagcttttccatagagtctttgtccaagccaggtcctcagttgatgggtttgatgtcaaccaagagaaggctgatttacaagaaaatactcccgatgggtccggtttccaaattcgactatcatccgaaatactcaacactcttacatgttccaccttttgcattaatgatataaggcttggcatctctctatccattaagttccttctaaactggaaatttcaattctccacccatccacctggtgacccttcattcgctatcattttttttataggagcattccttccctttgatattactgctaagtcagggaattcactaatcaagggagaatcgttaagccagatgtcttaccaaaatcggatcccatcccctcttccaattttgaaatgtaccaaacccaagtactcagcatacagatctgagatgtccctccacgggcctttgggagacaaacaacttccattcttggaatcccaaaaattatcagccctaccgtatctacttaccaccaccctatgccaaagcgaattttgctctaagggaaatctccacagccacttcataagcaaacttttgtttcgtgcctctaatctcccaattcctaggcctccttcatctcgaggcttgcagatctcctcccaagccactaaatggtccccacctgtagattcactgccttccca

SEQ ID NO: 303761 - DNA, 2395 bp, Cannabis indica
gtatatgaattcttatattagttaaaatcaaagcaagtgttttaattgttataggtacctaaagaaattggaaagagattgataaaaccaggtcctgctgaacaatcttcttacactactaaatttgggtcagctgaaggagaggagcctatacgaccaaaaaatgtgaagttagtgagtcctataacacaaggagaagagtcacaaccaaaagggtgaagttagtaagtcctataacacaagtagaaaggttttctcttgaagaaattaaatatatacctattatataataaagaatattttaggtattaaaaagtataaatagatatttgcttaattattttttaaaaaaaaacattaactactaccaaagttagatatagaatcatttacttacattttttttcatttttctcacatattagtagttttttgtttaagccattccattaattgacctggtatatggaatatacttttatctatttttactatgataaagtccctcctagaaatatttatatatcataaaagtaaattaaagaccaataagatagaaactctatgcaaattagttcaaatagtattgatataaagagtccaagggtcaaaccccgagcaactctaaagaaatatatctctgtgtgcattattgtacgtagtggttgaagaacaatgctctgtttctttttataagttagtaactaatgagctaataactacttaataaaaaaatgaccattaatgtctttatcttatctgctacacattattatattaatgataaatagtacactacctctataggctgctaatttgatgtaatatacttattacggatccatctataaatagacgatttggggtgcatttgtttctcaattcttcaaccaaagcaaaaaaaaataaaaaaaaaaatacattgattctagctagatatcacatacttaatatagaaaagaaaatgaagggcatgcattacttactagctgttgccacattggctgtagcagcctccgttgtgtctgcctatgacccaagtcctcttcaggacttctgtgtggcaatagatgatcccaaaaacgcctgtaagtaatgtaattattttgattatgttatgtcacctttattttcttaatattatcctgtatatgctttttaaataatcgaagtactaacataactaatttgattataatatttaagcatataagacctttgaaagtgtatccattatttattatacataagattaatgataaatcatcatgtttgaaaatggactctcttaaatatatattcatactctaatatagtgctatatagatagatatgcattattttgttttgaattttatgtaattataacttattgaaaatagacaaaatatcattttaatacctcaatattcttttatcatgcattataagttctagcctatctatcgtggaaagaatactattcaaaatctatgtatatatatagagaaatgtgcctagtattctcctatatgtcaataatgtattggttcatctaagtattgagtcccatataatttaatataatagcttttagagagtatcgctaggcaatcgcaacttgacatgtcgagaaggtgctagacacccttggtacctaatagcaatacttatatatatatagatatatgaaaaaatcatctcaattgaaaatcatgcatgtatctttcaacactaatttatttattaattaagaaagatatacaacttaattaatttagaagacattagtttatgggaaaacgatattaaaatatagatgttatacacaagattttatttttaattaacaaaagacatcaaaaataagtaaagaagacttaaaaattaaaattgtaactaatttggtcaatatatttgcacctcataaagtgataaatacattctattaattattaaaaaaaataaacgtaaataatttttaaaaattaatcttaatatttttttacaaaaaattctcacattattttatgttaatttcaacacttattttaattttattttcatatatatattttttgaaatcatgtatttttttaaaaaaacaaaaatcatataattttttatttcaaattttttatcataatatttaagatataatttatttttatttgatagatatattttttttaagaatataaattaagaaaaacacagttaaaaaaaattaataacaattcaaatataaattttatatataataaaaattattaaaataaagtgctttttttgtgtgtaaataaataaaatttacctatttataatttacataaaagtcatattaacattaacattgtgttatttgttgatgatgaatgagcagtgttcgtgaatggaaaattctgcaaaaaaccca

SEQ ID NO: 303762 - DNA, 1318 bp, Cannabis indica
cataaaacccaacaaaggcttcccaccaaaaggtgagagatatttcagctttggcaagaagggtgaaaccaacatcaacaacatgttgtcttctctcaactcaaccttattgttgatggttgtgaaggcatgagtttcttttgataatacctaggtgttgaaattttttgtatagtggttcaaactcttcgattaaatcagtttgaacactttttattttaagctgaaatttcctttcaatgtaaacattaaattgtacaaaaatatttgttgcttcatatttaagtttcattggaaaaatccacacaaacggagtaaaatcatcaacaaagctcaaatactatttgtaaccatcagtagatgggtagaaagatggaccccaaccattgaaaatatcaatttaaaaggtacaaatagtttattactataattttttttaaattgaaatgatgtagtttgccaattcggcaagcatcaaagaatgtgtcttattacaactggtgttgggggaaactttggacaatactttagctaaagcaacatgggagggatggcctagcctacaatgacaaacaaaagtgaaatatgatttatcatacactggatggattgctagtggttgtaaaatttaggacagtgagactttgatgcatagaaactgacttgagacattgattgaaggacttgaagtttgtataggccatcacaaacttcacctcgaagaagtacttgtttggtgatcttgtcctttataagacaacaattatcatcaaattcaagagtaacatagttatccttagtgaactgagagatactaagaaaacttttagtaacattaggcacatgaaggatgtcttgtagaataagagattcagaattggtatttgactaaaacacattagatcctatatggagaataggtagggagttaccaataccaacaatcactttagcttcacctttgtaacttgtgggacgagtcacattttagggtctagaatgatataatgacttgctccactgtccaagtaccaagctcctccaagatttggtgtagatgtgttggtggtttctgatagaagaatctgcggtgcatttggaaggtggaggtatttgcatcaatattggtttgatttccattgaatgttataccaaacctatgattatgacagccagtagtcccatgatccgcaaggggaaacaccgggtaagctatgcaatcccacatcgcctggggaaggtcaagtgagatgattctgagactgtgtaggtatgggactgcacagttgaagagagcttaaatggattgattggtact

SEQ ID NO: 303763 - DNA, 904 bp, Cannabis indica
aaataacatataaaaaaactaagcgtaaaaatttagtatacgtgtctcgcacgtagtttttgctattatataaatatatatatatatcattataaactcatttattatacattatacacaaatatgtgtaaaaaagaaaatgtttcaaacatcattcataaaaaattacatcaagtagattgcatggacagggtgcatgtaatcttgagaaaactactctatttgaatttgcaatttcactagtaaattacatttaggtataaataaaattacatcaataaattatttattttataagaactgttacaataaaacacattttattatttacattataagaaaatcatgatatatataatagtttagacattttgtcttttgtttttattttttacaattttatattatcattaatttttttaatttatttacgtcaatcactctaactggctaactgttttttctctactagcttccatcaatctttgtcgtaattcttctttctctgtaattgctattgtcttcatccatcaccctaaaacctccattgcgtttgtttttcttttctaaatgttataccaaaatttttgcaaaaaatagaatagtacccatcatcttccattaaggtccacaagccaagaatacacctcgaaaacataaaggtcaacaaagaagaccttgacaaagcaacaaaaaacgagacaaagtgccacatggcatagaaagagtcatgagcaactgctacccagaaatggttgtcaatagtcgcactcctagagttttgccctagggtttatcaaataaaattttcatttaatatacttattaattatacttaataaagtctcttaattaacaaatagaccctaaaacctctttcttcacaattaagtcctagcttagt

SEQ ID NO: 303764 - DNA, 1003 bp, Cannabis indica
aaatctctacaaggtcttctagagatagattgacataataatgtgttctaccagaaaaggctttatttcctagccaaatgtgctagattttattcaccagctactcaactctatctctctctctcaaacatagcttgaggcatgaagtagtaacaagtaagaagttactctagacataaataagcacaacacgaatggaaaataaactagacaccaccaatgcaccactttttctttcaaaaaaataaagtgagagtggaaacaagagacagaataatagagttaactaggttaatactgtaataatcgctcagctttaatatgagaattagcagattattagatttaattcagcattagacttttaattatcatttatataattgtggagacatatttaaattctaggtgtgttaattgtgtcatatgtgaaatattatgattttttattttatgctcgataataatataatgcaatttttggcctattaagtcacctagatatatttttctatgtatcttaaaattatcgagacggaatagttagacatttagatagtcggttgtttttagagttatgatttaagactattttacccctaagtatgttagttgctctttaggtagaaaagggtaactatcctaaaactagtattatgtttaagtgaaaaatgatttattttctaagcttatcattaattaaataagctaaacatagtaatttattaattattttttcatttagctatagttgttaagttagaaaacaaaaactaaaaatttcctaagcctctctctttctcttccttgagttcgaccaccccatagaactaagaaaatcaattttttttcttcaaattccagccatgttcaaaggatttcgctaggaattccaaaggattgaaggtagcagctcttggtaagctagttttctttcgttttctttaattttctaaattttaagattaggttttcatgcaatttatgttgggttttgtgccct

SEQ ID NO: 303765 - DNA, 1479 bp, Cannabis indica
gtatatatgtaataaggacacctagccttgctagcggcgcatgtagagtatttaaatcgagaaagctatagtagctagccaggttttggaaggggagattgaatatgcccaattaataagatatatgctacatagttatatataaaatatataatgaacatttctgggagaaaccttgcccaatatatcgacatagtggtgtctcatattatatactattaactaacagaaatgctaaaactaaaaagtactactaatgtgtttactagcttactatgtgttattatttccaattaattaagtatcgggtgacatataatagtatcgctaggcgacatatctagaggtactaaacaccaatattattgccccatagtaatgctctattacaaatattaacattacaagtctaaacaaagctgcaactgcaactgtactagacctaagtgctcttatataattaatcaccacagttatttctatgcagtggatgtctattaattctctatttattttttatttatttgttggctgcttgtgatcgaactgtgattttgattttatttatcaaatgtttgtcctcctagtggaaaatatgctttctagtttctacataagaaagaagtggtcctcaccaccccactatatatagcttttcaaattctattaattttattctgatagaattaattaaaaacattggcacctttccacttttatatttatttagttcatacataattacattaagctgcttttttgttatttccaccctcttagtcaaaaagctgctatttttctagtttaggcgacaaaagatcatcagctaagaacggtagaattcaaaatagttaaaagaagattctatcaatgatcaatctaagccatatacaaaacaattaataaaccattatttaaacatgtaaggacaaaaatccttggttttctatgcacatttacaccatcatgttgtctagaacatagattttcgttcaagtacgtttgtcgagagctgtaagatgagatactccaactccactcaaaagcctttccaaagcctacactaacttctgttctttcacttgtgagattttaaaaaaaaaaaaaacaaccatatgaatatgaagaaatatatacatatatatatatatagtggtgtgcgttgttgcgaaagagatcatttagtgaggggagggaagggaccacaatatgaatatgggctatcaatatatattttctattcaacatacaagtaggatcatgtggtccctttacaaatattccccaatcctgcaaattccaataaactatagaactccataaccagtaaaagctgaagttataagaagaaaaaagattaaaaacgtagtacaaatggtgatggtctcaagaacatgcatgcggcttatactacattacaacacatttatgtattaggagcggcatcacccctaaaatcatagaaaatcacctataatg

SEQ ID NO: 303766 - DNA, 784 bp, Cannabis indica
gaagagattcagggagtggatgtttagtggcaaggtaggattttggttttctaattccactttgagatcgagtcttcataggatgagttcgggtgatggttgtggtaggattatttgtcggcacatgggcagaaatattggatagaggtggtatctggggtgatggtattgtattatgtgagatgggaacaggtggtggaatatagggtgatgagttggggacaagtggagagacaggtggctgtgtttcatgagtggatgatgactcattgctgatcacgggtgagacagtagtggaggggaatggaacatcaataggatcaaccacaatagtattagtaggtgagatattggaatctgtattaaaagaagttgaaggaaaaggtaatggttgatcagatactacctgagtttgagatgcagaaccttttgcaggataatggtcttcattaaacaccacattccttgctatgtacagtcggccctcagaattttcacaaagataacctttgtgatgtgatgagtaccccagaaataggcatggttgtgatctaagttccatcttatgattattatatggtcgtaggtgagggaaacaggcacaaccgaaggattttaagatattgtaattaggcttgctgtgaaaaagcgtctcatatggtgataagtagtttaagactcgagtaggtagtctgtttattgtaaagacagcagaactaaaggcattcctctcggctcttctattttgttcatgtgttcttggacaaggatgttgaaagtgaat

SEQ ID NO: 303767 - DNA, 2116 bp, Cannabis indica
aaaaaaaaagtaaaaaaagttaatatccgcatgtcacagtataattataagaaagtggaaaaagttaataatttatgtaaattttccaaaaataaaagagcagtgtaaataaataggaaaagtataaaataataaaactacaggcctaatccaaagcaagcccaaactaaagatatgggcctacattgctgagtgcaagtattctttaggccctttgttctataaatactcctcttactacttactctcttaaaccctaaattacaatccctaaaaaccctagcgcttctcaagttctacctcgacaccgaaaatggtaaaacatctgtctccctcttccttgttcttatggaaaatcatgattactgattcaatttactgatatgtggttttggttttggttttgattttgattttgattttgcagccaggagaagaagtgaacccaaaggcctatcctttagccgattcccaactcagcattaccatattggaccttgttcaacaagctgctaactacaagcagctcaagaagggcgccaatgagggttcgttattgcccatgtgcattattttttactttatttttcttgatttgctgttctttcttgtttttgtttttgataggattcgtcatattgggtactagccctgtttcaatttcgttttggatttcgtgactatcttgttgtttattaatttatagcataactgaacaaaaatttgtatattaaatcttagttatagtgatactatgattttatataattcattaatcaaatggaacattattgtgatgtttcagcgactaagactctgaataggggtatatccgagtttgtggtaatggcggcggacactgagcctctggagattctgttgcatcttcctctcttggctgaagataaggtaatcctttaatattctagaatataattgttttgtattgagtataattacaatttctttccttgttatatgtattccatttgtcttggttgtttaaattgttatgaaaatgattttagttctcacctgttttatggtttgtataaacattctgatctgcttcatttctccaaataaatagatgttatgatctgttattctaaattttagatatgccgtttaaagtaatatgtttgtttgaaatgccattgcaattcatgttatccaagacataagattctcgtgtgttgtctttggttgacaaaatttaaacttgtaactcagtttaagtttgagcttaatgagaatgttcttctaactagtccattggatttttcagaatgtcccgtatgtcttcgttccatcaaaacaagcacttggccgagcttgtggtgtcacgagaccggtcattgcatgctctgtgacaaccaacgaaggaagccaattgaaatcccaaatacaacaactcaaggtaatttcctttctgatttctagttgtctgattctgtggtcctatctcttcagctgtttttgttttcaagtgctcaatttgttttacttgatggattcttacttgttgtgtgtataaatgcaggatgctattgagaagctcctgatctaaatgatgatggatgctatatttcggtgtgatgggcctcttcggtcataatagtcgcaactctagaggctttgactgatgaacttgtgctattattagaaaggatatttttctttgttgaattatgagaatttttatttgtgtgcattacgagaaagaatgctcaacaacaaaatatatttgcgtgagttatgattaatgatgttataaagcccctaaaagttaatgtttcttgattaatgtgatctgttttatcagttgttttttttaaccattttaagattgtgatttaaattcttattaatttgcttgaatgtgaaccaacgtttattattacgaactttcccttttgcttaatatttttagccttaaaattcattcgggttttttttttattaatctaaagtgagtggggttgtgatatttactaatgaaagacttatttgcactcgtgttactagagcatggctattaaggttcctaagaccaatgtcacttggtggacaccttatcctttagcatttcttgttttactaaagtttttttttt

SEQ ID NO: 303768 - DNA, 5390 bp, Cannabis indica
tgaatagtaatcctaagatgatgaagtaaaacctaatttagtggccatctaataatcatggcattgagcataaaagaatagaagcaatttgatgtaatagaaactagaaattaacattcaataatgaaattaagaattcatgtctcgggttttgaaataacccttaactaaaaggaaactactcaaaactagacattataatgataatcataataaatagtaagaaggagaagagaagaactatgatgaagaacacttcgaagtcgcgatctccctctcgtccttgctctctctctctaagtttctatctcaattttgtagctctagggttccaaaatttttagcctaaaaggttctatttataatgcttgaaaagatagatgaatccccttagaataaggattttatatatatatatataaaagaaaattcggtgctatttcgcccatgagatatttgctgaacaacttatgttcagaaattatcttttttattttcagaccagcattatagcgcaagaattgggcgctgcacaatttttgtttctgcacttgtttagtattttggccataacttctttaatacaacttggaattggacgattctagatgttctggaaagagaaatatgagatctaaaacttttatgttgagctccaagtccaattattcatctaagattgtccaaatatgcatttaaatcgtaccttgtaaaactgagctcgccaacttccaccattttctaccaaaatatgctaaaatccttccgaaagactccaaatgcatgattagtctttaaaatatccaaaacaattaatattacactaatcaataatttgaataatcaatttaagagtattaatacataaattgatcattataagacaaatatggactcatcaagtctcttgagggaaatttatgggattcattatcagctcttgaggaatcgaagtaaaccttgagaaaatcaaagcctttctagatatgccttcacccaggaaacataaggatattcaaaatttaacaggctgaatagcgacacttagcaaattcgtctccaaatccacagacaagtgcataccattcttcaatatagatcgagataataataactttgagtagacagtaaaatgttagacagccttccagtaagtaaaagaacatttagtgaaggccccaatattgtccaagctagttgacggacagttgttgttttgtacttggcagtgtctgatcatgccttaagcaccgcacttgtgcgagaaggaaaggtacaacttccagtatattacgcaagcaagtgactactgggctcggagtctagatatccagtgcttgaaaaactttcctgctgcttactaattggttctcagaagttaagatcatacttttaggcacatgacataagggtgctaaccaaccataaggccaccactcttcatcaagtgttgcaaaagccagagtcatcagggaggctcctaaaatgggaaatagaattgagtcagttcgacatacaatacaaacccagagtatcaatgaaagttcaagcattggccatctacatagaagaatgtactgggataaatgacaaccttgacatgttgacctcagaaagaaaagtgtggaggatatatgttgatggagcatcaaatgaaaaaggtgcaggtgttagaatcatattgatatccccacaacaccttcatcttcagagagcactccgctttgagtttgaagcctccaatgatgaagtcgaacacgaagctatgattgggtttattgtgagcaaaggaagttagtgcgcaacacatcgaactctataatgactcgcagcttgtggtaaatcaagtgctggagagaccagacaaaaggggagaagatggctagctacgttactaaaactcgggaactattataacattttaagcattactctgtaaagcaaatccccagggataagaattcttttgctgatatcttggcaaagttagcaatagatttggggatagaaaaatatgggcttgcccccatggcacatttgatagctccaagtacggaaggagtgggggctcttccattggcaattcaacttcctagatggcaccaatacaacagtacttggaaataggtgcactcctgaaggatagtgttgcttccaagaaagttcagtaccaagctcatagatatgtaatcatggatgggaggttatacaaaagagggttatcaatgccatatctttgatgcatagccgaaacagaaataagcactgttatgcatgaaatccatgaagggttttgtgggcatcacacatccggacaaagtatttctaaaaagatcattcgtcagggttacttttgacctaccatgaagaaggattgggctcaatatgtccataggtgtgaatagtgccaacgttacttaaaagttcccagagctctgccaacagagataaccctcatgagtagtccttggcctttcgcagcttggggaatcaatttagtgggatcacttacaaccagcaagggatgagtcaaatttgtcattgtcatcgttgactactttactaagtgggtggaagccaaacccgtgaatatagtaacttccaagaagtggactttgttatcaaaaatataggttgctgatatggacttccacacaaaatagtgtctgacaatggaaagtagtttgatagtgaccagttcactgatttttgtgccaacaaaagaataatcaaaagcttttctattgtggccagacctcaagcaaaggataggtggaagtcgttaataaaatcctaaagactactttgaaaaagatgcttcaagcctataaagcgtactggcctgaagaattccccagggttctttgggcctacagaataactaagagaacttctacaggccacactccgtattccatgacttatgggtgtgaggtcgtaatcccagtggaatccactatatctacgcataggagggatacctatgactcgacttagaaccatgctttactccaagaatctttagatttaattgaggagctctaggaacagtaacaagtgcaactccaaatgtatcaaaacaaattgccaggaatttcaactcaaaggttaagagaaaaaaaatttagattggtgacgatgttttgagaaaagttttccctgcttctcaagaacccagagttgtaacttatgtccaaactaggaaggaccgtacaaagtaacggataaaattggtgatggaacttatcatatgaagagactagatggaacaagaattccaagtgcttggaacgctaaccacctgtgctgatactatcagtagaataaggatggtcaagttcctttttacatttttgctttgcctttttattaatttccatgtacgccttagggaaagaattatttgaatgaaaagaaaaattttcatctcataattggtcttttaaagttttaccatgtaacaagttattagaagtctcaactactaatcacttgtggggtagcacatatatgttattgtacaaatattcatattccctttcctccacaagaaaatgtctatgttaaatgctcaaatataagagtagttaaatactcaaatataagagtaggaagtattgttgaaactggaacctcaaggaaccgaaagtaagtcactgccttattgtatttgatgattatttaacacttaaccaaatgtgagaaaagtaagtttggaaaaactagagcctcagggaaccagaagtaaatcattgtcttggtacatttggaactaattgttgcacattaaaatagttaatctatgttaacttaaaataaaggctaaggcctaatggttaattcaggttaacaataccacaatattcaggttatttaattgattgattcaggtcaattaaaaaagttaaggatgccaaaaaagggtaagttctcaagaaaattaattagttcaggttgattaattattcaaagtttcaaatatacccttttaaaaaagcatttttttctcaaagagcatttaagtcagggtactaagaaagcttcacggcaagggtataaattgattcgcacattcaaaaacggaaacccttgttcctcaaataaaataaaaataaaattgaatagttcagagcatttaaggttgagcatagtcgtccagtgctggagcatttttagtttggccctctaggagtgcagaccgggttgggacaagaacctcagaggtcaaaggagcggaattgtctgtgttctcacatacagggatggtggttccaagatcaaccatccccgatccctgaggctcgttccatgacttgtctgccttttccaacgccaacagttgaggcaaaacttcctccctatctttaacgtccaggagatctatcattgccttattatgttgcaagagggtatatactgagtgaacaaaagcttgctccaaagttttgccgtgtcgagccacctgctcttgaagaggagcctctaggttgatgaccttcaattgggcttcttcacaagccttcgtatctgtagccaattttccctcagcctctttagccttctttatggcttctgtttctgtagattaagatgatgctccactagtctttctagcctagtcttattgaggaacttgttttcaataatttgagcttggttattgtactactaagacagggtgttgatcttcttttctttctcatagacctcaagcttggttgtttggaatattttactaggatctagatttaataacaagtatgttgaattaacatcctaaacatgattatctctaaaacaatgaaattaaacacataagagtttagaaaacgttgcattgattgcagtggaataatatgactccttccgctcaaatctctaacccttattcctttttctggcagagtattataaagatacgagcctggatctatttcgctccttcgagtttaattaccaccgtcttactcactatgattgagtactggacttgctacgtgtgggcatgtcactctatcactaagggttcgaatatgatgaagaacaatgaaggaggtttgaaatcaatatagaacgtgactctcatctactagttgtctgacagagaaaactagatttttgggaggttgaatgagttggatgagatgagagcctcatgttccttttatagtgtttcaactagggcttagggctgaattatatggattaaaaaataataaaatattagaaaaatatcacttgtaagaccgaccatataaaggactttctagttacaattttgccactttatttcaaccagttattcttctttccataataccatattttctaattcaatcctataaatgccaaaactatgtatttaataattataattaactatcaaataa

SEQ ID NO: 303769 - DNA, 2541 bp, Cannabis indica
tttttttttttttttatttaaaggtcatgctttgtggagtctagttgaagattatgtcagagcaaagttaatatgcttataattttgtgaatggtgatgtatttgaacttaaatctgcatagccactattattcttaattcccatcatttttatttgaaagaagtaaagcacttacctgttgttttttctaactttcatattcctgtcaatcagattcatatatattacctttttgtgttgatcaattcaggcctttgatgaagcaattgctgagttggacaccttgggcgaggagtcttataaggacagcactttgatcatgcaacttctccgtgataaccttaccctgtggacctcggacatgcaggtatatattaattgatcctttttcttctgtcatgagcaaatagtttcaaaattgtgtttataagattaatttgtggaaagaattatgtagttattgaccaaatgatacttttccaaacgatttttgaatgtatatgatgttgataatttgattcaggatgatggggcagatgaaattaaagaagccgccccaaaggctagcgaggaacagcagtgagcctagttctctgcaaagttagggttcaacttctcctctatatgtttttaataggagagggctctctcattatctgatttcgggtgttattctgagattttaggcatattcttgtcttttgtccctgaatgattgacacactgagtctttattttttcttcttttttattagtttcttgtatcagtttgtgtttcttactgcgcttattgcttgaagatattgaaagctttatcctgttgggcgtatcaacctttgatattcatgcagtgtgctccttaatctcattataagtaaagctctattaccatcctattaaaacttataaagaagcaatcaaatgagttgaattcattgaataattactgagctgaactgtcgaggcagagatgaaatattacataggacaacttgtttatttaggtcacgtttgtttttataaatgtacaatatgtctgttagtaggcccattgaacatgctcatagagatatataccaaacttttcaacgaacatgttaggttttctgtcgaagtggacaaatgacagaccaagccaaacacttatcattacaagccaatgattatttaaagatgtaaggaggaattaacaattttaagcaagtataatttttcttcctgcattatgacttaaataatttctaggaactatacaaatcattacaaacatctcatttcagttaactttctctttattttttttatatgaatttacttatgtggccatatgttataggtgtagatgttgtacaagagttcatttaataactttaaactattagaaattcaattatagacatacatacaaacattagctctaatacattctcataattcatcattagattgatatttatacattgttgtttgggttgttaaagtggatcaaaataacgtcatattagtgctacattaataaattatttaaagaaataagaaatacgacgaattttatagttgaagggaaatttttacaaatcaaaaaattaggaagcaaaactctacaaagattataatttaaggagaacaaatcctatatattcaaaaataaaacaaggatcaaccatacctatgatcaccaacaagacgcaacctcatgacaaaccaaccctaccacttatgattacaaaccaataattttccaatctataaggagtaaaatcaagctaaaattatgaaagttcaaacaacgatcaatcatgttaatgaacacaaccacaacgcaacgataaatcaaaaatcacaagcaccctcgtgaacaaattttttttgaaaagtaaaaatactaaaattaaacaacatgaaaatgaaaacaattcataatcaaagcatataataagatctctcctccaactctaaccttgcgaccccaagtgcaaaagtaatagcatcactgaagtcatacaaatctgaatccaaatttcgcaaacttaaagatagccctttgaaaacccacagccagtgaaattcaaaccctaaccaaccaataacccagacaaaacacgccagggaggtcaaccatgttgtgatcctatcgccacccgcactattcgccaaggcacaaagccactcaaatcaaaagaataaaaaaaataagaagagtcaggccaatgccccactcaaaacaaaacaaagctagtcgaagacccaagatggacaccactccactcgcgtatgatcggtcgagtgcaaataaagtggtgctctgaccgagcgaagataagtcatacaaatgtgaaaagaaaagaaaccctaacaaagctctatatttaaaataaacaataagagaacttagtagcctattttacttcctatatggtgttggaaattgttgtgctccaataaaattatcaaatcaacaagattacaactctatgacaaataatacaaaggaaaaaatcatagattaaataatgttacagcactaaacaaaatataca

SEQ ID NO: 303770 - DNA, 2843 bp, Cannabis indica
cattatcatcatgtgtaaaaaaaaaaaaaaaaaaaaaaaaattacaacttactactgaagtgtacaagaagagactcctatatagagccattgatgagacgaccacacttttaatggtatctcattaaagctaatttaagttttatatatatccttataagataataatattatttattctctagaatctctaagtactgttactagtgcatgtggttcttctcttttacaattacttgtatagattactagttaatgacatttcatttgtttttttttttttttgctttgcttttcaagtatatttcaaaatatgatttgcaccgtcatctaacaatgtcttttctcaaaggctatacttaaatgaaagttatttttgtttctagggacaatgagattttctttctccgaaaacaattataaacaccaatactgtcccttttagttacaagctagctaaacacaatctatatacaaattatccacccatctcctcctatctttacaagaaattttctttgtgtaactacataaaattctattacaaacatatatatgcactatattgtaaaaggttctcttgactgtagtgactttgaggttccataaggcttcatttcttgattttcaaatgaagtacaccgtagtggagataacgcatagaaacaccaactctctttaattactgttctttttttttatttaagcgtttatatattacaactatgttttacctgagactcgaacccaggaccttcaagacacacacacccacctatggccacttgaactaacctcaagtggttctttaattactgttcttaatccaattaagaatacctgcaggcagttgtatactgatcattcctttaatgcctatccaatccataacagcactcaaaaaaacaaatgcatgttgattttgtttcatctttaactccgtacaaatcaagcaatcaatctcattgatgatccccattctcttcaaccgaactcttgtggaaagtttgcctttgagagttagcctatgctttggagtacaaagtctctcccaaatcaaagtatatcatgttgagagcttttcaatttgtcacacatatcagcaattgaataacgacaattctgaaagtgaatctgtgtaactctgttgttgatcaagttctttgtgctaatcacttgtttcaaatattagctagcttccaagggagcttcatactcccaccagtcattgccttttatataaacagagttaacccacttcacccacaaattaattttttttggatgaaattgcccaaatatgcttacttattgctcgtttagtactccaaagagcaatgtctttaaatcctagcccaccttacttttttgacttgtaaagagtagatcatgcaactttttcaggccctgtactatcttccttccctatccaatgaaaagcacaaaaaactcgagctatcttctgacagcatttttaagaaggataacaatttgagaccagtaagcatttattgttaacatgactgaattaataagcacatttctcttagcatgtgataaattttgggtactccaagttttgattctaactaacattttatccaccaaacaatcacaatcttttttagatagctttttagagctaattctcatgattaagtatttaaagggagaaggaacctcttgaaaaaccagacatatcaacaattctttcaattttagagttagacatacatgctctataaattttggatttcttcttatttgcttcaagattggagctctcagaaaaaagcttaaatcctctgagtaagagattagcatctcgggtggaacttaaaatcctttttctcaataattttcatcataatttgagagaaatatttcatacaaatcacaaataagagtggcaacatcggatctcctagtcgtaattctcttcttgattgaatatagctatgaggaaccccattaataaagaaagagaatttagaagtggagatatataccattatgatcttgatgaacttgcctggaaaatttagtgcttccatcatttctttgatgaagttctaatcaattgtgtcataggctttttgaaggtccagtttgaataagcaagttgatttggcactttttcggtcataccttcgcaccatgtcttggcaaattataatattacgtgcaatttgagtccaagtctagggcgggttctagggactggggccggcaccaaattacgggtcaagctccaggttcgagggcagggccaaggttcgagtttggatctggggtacgaggtctagaatctgggtccagcgtctaggttcggggctaagaacagggtccgggtcctagtcttggtttggggtacgaggtttggggattgggtctgacgtgcaggttcgggttcggggtctgggacagggttcgggatggggtccgggtttggggttagggtcggggtcggggtctgggtctgggtctgggtttgggtccaggtatcgatttaggtctggattcgggtgtaggtctggggtccgggtcctggtccggaacggtggctgggtccggggccaaggtcgaggtctagggctgaggtccgtgttcgggtacggggttcgggttccaatctggattcgaggtccaggtttgaggccgaggccggggttagggtccggggtctagattttgttcgggtttgttcatatcggggtctcaaagttttgaagtgttttttaaaaaataatgaaaatgaaaactgttttttgaaaacattaagttgttgtttggtaacacttttgttttcaaattttttaataacaaaatgaaagtaaaatttt

SEQ ID NO: 303771 - DNA, 2102 bp, Cannabis indica
aaaatgcatctctgaattcaatagtaacagtataataattatttaaatagctataaataattttcataattaaacgtgattaactgctaatttccaaattaaactaagcggtctttatatataatatggaccataaaaaccaacagtagaaactcttcgcttacccttaacgtcacgccacgagtcctccgagagtgaactgaagagtcgactaagattaaagcaagtcccaactcaatttatgagttggaacttgggctaaatgttgaacatatttttttaccaaaatatgtggcaagcgctggaggcaccacatgacaaatgggacccacctgctaagagattaatactcattattatgtaagtcctctccaattaatatgagatacgtctggaaagggtcgcaaaccttttgaagagtggttgaaagaatgacagtcttagccattcgaaaagtcatgaactcttggatcataggctatcagggactcaattattcacataacacaagttccaaagtaaatcactgtatacaactaatttggcatgggattaacatcattagaagatcatatatgttttgacaatccatttgtctatgcaaataaagtggcgactatattctgtactgtcacatcaaccatatatgggataaaacttgtcttaccaaactcttactacggagactagatattgcctagagagaaaaggaagatgtgccattttctcctctgatcaataccagaagacagtaaatgtaaaagaacttttagattcacgaacataatgaacttcgtaagctatgaactgaatattctcttgaactagagaacattccaacctttaataaaagtgactcgtgtattaaagattattattaaagcttcaaccatgtaaaaaatcctcatccatatctaaatctttcttattaatatgtgtaacaattgccgaaatatcaatcaacaatgatagttttctatgtatagtcaatatatgtcactatatttttattattatattattatttttaacagtaacagaattgtgttatctaatcaccacgtgtaaacaatcctactagggctaaacattggacgagtttgtcgggtttcaggtttaaaaaattatacccgaacttggcccatgaaatgtcgagctggctgggttcgcgagtcgcgggttgttgatccagtcaacttggacaactctcaaaaaattatattttatatggttttttctatatattaaattaatcatatagattataacaccataatctatatcgttggattaaaataaaaaaatattaattttaaatttaaaacacgaaagtcaatttaaaaaattccaaattatattatatactgttatttttaatatattatatatttaataaaaatgtaaaaaataaaaacttaattctggcttaggttggtgggcaggttcgagtccaactcatgactataaaaaattaacctgcgaacccactcgaaagtatactggattggacccgacccctcttaacgaaatgggtcttttattttatgggttgaccaagttgagtccgggtccgagtccgagtgagttagccagttctgagtcaaacccgattcaaatattcagtcctacaatctatcttgatattctgttttctatggcgaatcaccttcatttattaatattcacacgtgccatgtaataaataagaaggaaatcattttattgattaacaaacaaaaatatattaaatataatacagaaaaaaaaattgcttaaattataacatccatacatatatctattctatataaaatgtagttatgtaataaaaattttagttttacgattctttttgggtttctacgttaactttaacaaaatatcttattaattaacagaatattttttattaattttataatattattatatatatttaaaaataaaaattatgtaccatttagacacaagttgtcactaatttagttttagtcacaatacttaaatacatttagtcacaacaaattttaatttttgtgactaatatctttggtcacggactttttaatcacaatataagataattatttataattagtcac

SEQ ID NO: 303772 - DNA, 1975 bp, Cannabis indica
tcaataataaatgttcataattttacagtcacacatatatcaaaatgtttaactctttatttaataattagaaatatctcttcaggctttttagggcataaaccctaacatgttgtgccataaaaaatatgggtcgtgtcatgctgtgcaataattttataaggtaggtccgacacaacctgtaagtccgctaatttcgtgctatgctcggatttgtgttgtgctttattcgggtcgtcccatgtttcttaaatagactaacctgttttctatacaggctaacctatttttttttaaatggaccaacctgatttcttatatggactcaaattcgtgtttcatatttttgtattttgtttacaattgaagagctaaatactaaaatatatatgtattttatagttttaattacttttatatttttttcaataatagttaaatacaatcatgtaaaaaataattataatttaaatattactatcattttaagtgataaataaatatttattattgttattaatatcaaattattgaactttttaatgtgtcatgttttcaaactaatctatttgtgcttatattttgtgattttaagcttgtcatgttatgtctaagtacatattttttttgtattaagtcatgcttgtgccttttggacacatcaaaaagtccggtcatatgtacataactagtaaccagacatgagaaactagagagattaaacatcgtggcgacgtgataatatgttggtcctaaatggttcctcttgctccattcatgtaaggttgggcctttacatatttgcggcattgggggcacccacaatattcgaacctatgatttaggttcacatatagccatttgtgtgatagcacttcaaaatgtcgcaaataggggtgttcatccaatctatttcgtactattttgtttaaagtgcatccgattcgcactaagtgtggatttcatattttgaatccaacccaatccgcataatagcttaaatccaatccaatccaatccacaaaagtgcggatcagatcaattattttaaattagttactttttaatattaaattatttagtatttataaaaaaaaaatatttttttcacatacctaacaacaacataaaacaaattattgttattttatgtctgcaacaacaaattaaaataaatcaaataacaaatttaaaggaagaaaaaaattatatgtacaaagatatatttaattttgtttgaattgtatgtagaaaaaaattatttataagaatgaaatataaatttaatctattattaaaccatctattttatgaacaccctagccgcgaagttagggcaatagatacttgagcagtctacatgcaatttaaaaattaatgcatattttgaacatagaaacaatccaatccgtaggaaatatagcttcaattttatttagaagcccttcatataatttgtttgcatttaattcataaaccatcattgaattatcatacttataacgaacatttactattaaaaaaagaaaactcaatctttgaataaatctaatctcattttactcatatacagctagtttgtctaacaacgaaaattctatagtgtgttccttttgtttagctttttgtgatttaagtattcgctattctaataaatactggcgtagtttttgtttagtgttccatattatatttgaacactgttttaagtgctgttaaaattcttcaaagaagagtttttatttttattttctttgggctcgtttggaacgccgtattaagtcgtattgtattgtattgtattatattgaattggattatatatcatatttttatataatactatgttaaattttaatttatactaaaatattatatagctaggtgtccataaaagttaataccacatatagttttatataaaaatattacataaaatacaattcaatataatacaatacaatacaatacgact

SEQ ID NO: 303773 - DNA, 3160 bp, Cannabis indica
ccttttccatcagaatagccaatgaatcaagctttcttttaatgtcactcatctgtggatggcttttatcatttgctgtgaatacatgaactttatgtttaatctcaacccagctgtgtgctgttatctttttgacccctctctccctcatggccttttttattttcccaacactatcccactcacctgcagctgcataaatatttgacatggttacataaggagcagcatctcttagttctgccatgttgaaaagctgatttgctgctttagttgctaattcttgattcttatgaattcgacatgcgtttagtattgatgaccagatgatctcatcaagctcaaaaggcattttagctattaacttctctgcgttatcaaagagtccacttctacacaacacgtcaatcattgatgcatagtgttctctctttggaacaagtttatacaagcgagtcatggagtcgaaatacttcaatccttcttctacaagtccacagtggctacaggcgcttagaacactaaggaagctgaccgaatctggtacaaatcctgactggaccatctgttcaaaggatctaaaagtgccttcaccatctccatgttgtgcataagctgatatcaaagcattccaagagactggattcctcatgggcatctcttgaaatgtttgaattgcatctctcatggatccacattttgcatacatatctaaaagggcacttccagagaacacattggacatgaatcctgatctaattaaagatccatgtaactgtcttccaagagagagtgatgccacatttgcacaggctcgcaagatactagcaaaagtggcctggtcagcactaacattttctctttgcatttctttaaacaattctaggccgtcttcatgaagaccattctgaacataagctgagatcatggcagtccatgggattttacttctgtggctcaaatcagaaaatattgctttggcctccttaaacctattacttttggcatacatgtcaaccaaggcattcgcaaccaaaatttcggaaacagctgttgtcacaatggtgtgggaatggagttgccgacccatttctaagtttgaagtaattgctactatgcttaacatagttgcgaatggaaattgccttctatcaaacttggtagattgcagcacttggaatagatcaagagattctctgaactgcccaatccatgcataaccagtgatcattatgttataagaaacaccatccaattcaggcatttcattgaaaagtctccttgcttcaattggatagtcatgtttggaataaaactcaagcaatgcattgcccacaaagacgttccaaacaaaattagtcttcaccacaaacccgtggacttgttgcccaaattttaagtcatccaaaccaataccagcactcaacacagctgcaaaagtgaaatctgaaggcttgcagccacaattttgcatttccaaaaagagcttaattgcctcttcattaaggtcgccctttgagtagcctgttatcaatgcattgaacgtcacagaatctctcatgggcatttccttgaacaccctataagccaagtcaagacaacatgttttgcaatatgagtcgatcaatgtattgctaaccatgaggaccaaattgaacccaaatttaataatatgggcatgaacttgagctacttcactggcaatgtccacatcagtgcatccagataagagggttgcaaaagtcacataatctggttgtgttcccctcctgtgcatctcagcaaaaagcttaaaggcctcggagaaatcattacgttgtgagtaaccaccaataagtattgtccatgttacagctgtccgttgaagcatgctatcaaacaattgtctagcagcagaaatgtttccttgttttacacagctagaaagcatgagattagtggtgatagtattcttgtgaggcatttgatcaagcaagccatgtgcatgagatatattgccccttcgaacagcatccataaccttgaagtttgagcgacatatgttgggatcgaatcccgttttgataatacgggcatcaatgatgctgtcggcattgaatgatgttttaaaagaagactgaacttggaaagtcccaacactggcaagtttttgaattgcatttgttcggtgcgaactgatcatatcaaaagtctctttttagaacactcttcaagagttgagcattatgtaacattgctaatagagtgtagagacatatgtcgacattgtactgtagagccaatataattcgattaacaacaaaactaagaaacaatcttgtcatacttagaaaagtacagtaaacatttaatatggtcttgcaccaatcgtttagtagagtacatatattcaacgtaaaatggatcatagcaatgcaaagtcatcttaattaaaacaatggggtttctaaaattcatgtcttcctgatattttatacatattatatttgatcacataacaataataaaaacaacaagtagaagttgtctgagcatgtgaaaactaaaatctgttataatttctttctttgaatcattttatcaaacacttacagagcattgaccaatagttcaaaagttcaatgaattacggttacctaacgcaacccggaaaactaaccaagaaaaaacatcccagacttgcaagaaaaaaattgagagaaacaaacagcaatgtatataaaaaggaaagtgagataaaagcaagaaaactcacctctggaaccagagcaaaggtgaaatccggtggaatttcttggcataactctaaatttacataacacatatcagtaaggcaattcatcgaacaagaagaggacattgtcataccgaaattctgaaaaatgaaaataacaaaagtaaataccaagtgaagaaggaagagacgagaggcagctgacctttcccgcgtttttctttcctaatccaaatatactaaaatttcatttcattatttctttctaggtctaggcatttgggccactctaactaaaaagcccaatacatttggcacatcggcccagaataaaagcccaaacacattataacccaaatttatagcttaattgtcaattaataaggggctattttaaaaaagtatagaaaaactattaattttatg

SEQ ID NO: 303774 - DNA, 2199 bp, Cannabis indica
ggaatattctgcttccattgatacgttacttgtttttgttgttaatatttgttccaaatgttacttagagaggggttgggtttataatttttatacttgttgtatgaataattatattttatattacttgattctgcaggattaggtggccatataagtgtagctatcacggttatgatatattttatgagtgaaaccaattggcagtgacgatcttgggcatctgaagttatttgcaagacccaccgctgcaccttttgcctgtaattctttaactatgacgccatttcaatcatctgggcctttggtgggatcagataactcaggtttgagacccaatactccattagttccacaatctacaacacctttttcatcatatgggcctgtggttggatctgagtcctctggttatgttcgtcctccaccaatggccccacaaacaaacgttccccaggcttctagttttagacctgctccaccagctaggtttaatgacccatctgtgccacctccaccaacgtcatatgcccctacacctgctggacctttcccaacgccacaatttccctcaaatcaaccacctccttctcggcctgttattggaagccggcccccatttcaacctcctgcagctcaagtgcctcctccacaacttccacttcatccacaacagcaaatacctttggtgccaatgggatctccccctcaaaatatgaattatgtaccaggaacaggaagaacaaatattccgcaaccttcatctgattcatcatttcctgctctcaggccaaattcccaaccgtcatttcctggatatgttcgtcaacaatctagtgcagattcaccagcaccacctgtccagtctccgtttctttccaagcagggaagtgcacctttccaaactacacctccctcttttgctacgcaccaagctggttatgctgcttctccacctgttgcagcccccatgggattgcagacaagggatcgtatgcaacattcaactttaggacctcctgctggttccttgcaaggcttggtagaggactttaactcactatctattggatccagtcctgggtcaattgaacctggagtggatctcaacgctttgccaagaccattggatggtgatatggaaccaaaattgtttaatgaaatgtatccatcaaactgcagttctagatttctacgcctaacaactagtggaataccaagttcccaatccttagcttcaagatggcacttgcctcttggagcagttgtttgtccacttgcagaagcaccagatggggtgagtgtttcattactcaaagtaataaaacttaatgatccaaaatttcctctaataattattattaactgcttttgtgtttcatttaggatgaggtgccagtaattaatttttccaattctggcattgttcgatgtagaagatgtcgtacatatgtgaatccgtatgtgacatttacagatgctggaagaaagtggcgatgtaacatgtgctctttacttaatgatggtaaattttcaaggactgttactgttctattgatcttcgtaagcatataatagtctattcttgaggaaaaataaattatgcatgtataactttttgtaattttagtctcatgtaaactacactgtattatatacgaagtttttagtcctagcacactctggttcattggtctggtagacttcatattgtcatttctatacccgtcttttattaatcttgtggaagtttatggttggactttgaacttttttccccagaaaataatacggctgtagaaggaaaataaaaagaatggaagtaatgagtttgaattttctactaacaattttaaattttcctcatggaatttttctttcaagaaatactggtttttgtttgttaacttgctttataattggtatcgtatattcttttgttatactggttattatgaaatatatgctgattcttattgatcttcatgcatagttcctggtgagtattttgctcatttggattccactggaaaaagagtggatttggatcagcgacctgagcttacgcgtggtagtgtggagtttgttgctccaacagaatatatggtccggccgccaatgccgccattgattttttttctcattgatgtttctgtatctgcagttagaagtggtatgattgaggtgagatgtacaatt

SEQ ID NO: 303775 - DNA, 2520 bp, Cannabis indica
tggaataagctggtagtaaaatcttggagcgtcataaagttctttggtggtgtatcctatccagtgctcttgtagttcgagctgtgatcagaaaaagatttcatgtgaagtgatgtgtgggatggtgaaggaatctttagaacacttgtttctttcatgcgatgtggctttttatttatggcagtcttctccttatggtatttatcctgtttgtgataccggtattcgcatgtgggactgggtcaaattcatttgggaccttaaccgcaggggaattcttgctgagaatgttttcttttatgcatcgattgttgttgacaccatctggcgaatccgcaatgacaaggtacacaataattgtcaagtagataggaagaagtgtattgactttatttgtacttcttttatagatttacatgcttctagtttcccttgctttgctccgtgcttgatggaggtttggaatcctcctccttgggactggattaagctgaattgcgatgttaaagtggatttaaaaagcatgtgtactgcagtagtagcaaggaaccatcttggtagggtggtttgggttcaaacgtctcggttggatttttttgatacgttatgtggggaagcagcggcctgttgtttggctttgacggttgctaaggaccttggtttcaagtttgttattgtggagagcaattcgcgggtagttatcaatgctcttaatggaaagaagtctcattggacacttgaaaactatgtctcattttgtaatagttctcttttccattgtttattagttgtatttcgctaatattagtaggacttgtaattttgtcacctataatgtggctaagtgggcatttacccaccagaagtttagttttattccgttatcaaccattcctgtaaatattttttgtaatgaccggaagatctaactgttttctatttatcttaagtatgtttttcgttaaaaaaaatattgagttttaatcatacatatttttaagttattgatgataattagtttgaaccaatatcatactaatataatgaataataatattagtttttttttttaaggtaaaacatgtattcaattaaataaaatcagctgttacaggagcactaataaatctaggacaagcatatgtccacaactgaacccctaccgaactagtaacagactttgccaatgcatgggccataccattcgcaacacgcgaaatggcaggacaaaaaccactaacagcagcagctaaaagagaatgaatctcctcaacaataggtttaaacataataataggagaaggacaatttatccaagaactaacaacagaggaatccgtctcaacccgtaccaaattgtatcctaatttgactgcctatatcagacccgtacgcaacgcaccaagtcgtctgataccatattagtgtaatgaaatctttattatgattgattaaaataaaaacaaagtatttatacagaggagtaataagaagattgttacaagcatacaagtaggaaatcttaactaactaacgaaattcctaactaacattaacagaatatgacatggacatcctaatatatacaaaacaatgagtagtaaagattatctcaagagtatgttttcacgtgagtataatggaaaatctcacattgatgcattcaaattgtaagcttaattacatcatgtactcatggatttgagtggggtttatataattaagatatatgttgctttaatataaaactagaataaaactaattaacccccacaccatgtactaaagtaatatgtttgttgtttgttgttactaccaaatactttggaaaaaaactatttggattgtcagttgtacttttgttatttaatttgtctttatttttgtaattgtttcctttcgtttggttttaatgaattggggtgtcttgagtttctaggcaccccaccttccatccaacgattactttttccataatatttattaagacatcttttttatttcttcttctcttcttccttttcaattccgtcagtgaatgcccataatctgagacaattgataagtgagtgaatttagtgtcgatgtacaaccaatgcaaaattgttaattctttttcaaaaaaattagtaagtatcagataataggcttggggccttgtaacaagaaccataagttattatatatatacgaatgttaaagggcaccagtggtggctagcaccctatgtgttaatatcgctattagtctaattaagtatcagattccatataattaatataaaagcttttagaaagtatcgctagtcaatcgcaaggcgacatgtctagacactacaaaaaactactatttttagtgacaactttttagtcacaatataatttttttgtgactaaatgactaaatgtgacttttagtcacaacaaaatgcatgctacttgtgactaaaacatagtatttagtagggctgtacaaaaaaatttgtaaaccgcctaaaccgaataacccgcccaaaccgaa

SEQ ID NO: 303776 - DNA, 2678 bp, Cannabis indica
caaatttttgtttggtttactagtaagtaaagtgagagagagagagagtgtgtgtgtgtgtgtgggattttgatttaatatatagtccatcggatattggagatgaattccccatagtttgtcactgattgaactcatttttgaaaaattattttgtgacgagtagatttttatatatggatgtaacaatagttggggaaattttgagatgtgtgatttaaattcgtttgtagaggtgaacttagtccattttagcataggattttttatttattttttattgtgaataatttgaaacttgggatttattttactttctcagttccgctatctgtagaggctgcaaaaccagtgacaaatcctttgattcaggaggcttctccacctcgattcagtgaggttaggcttctatcttcagtgttttacatgtctaagccatacccacaatcgttgacattttattttctccatttattagtattgaatataactacgttcctgtcttttcttgggtcttaaactaggcaatggcatcttgcccaaaggcagaaattgagaatttgaaagacttattgcaagaggagaacctgtacttgactactgaggtaatttgcattaagttcaatagttttgaacttatcaagtcttgttatttcaatttgccaatgttatttcggtgttacttaagacgatttggtaaacttgggggaaaatacaatctggtttaaattctatgcaagctagatgtaaaaggtagtacttgtttttaagcctaattaaggtaaaagattatgctacaatggccaaattattaggcaggagagcaaggacggttgccagtcttgattataagcttgaaggacgacacgaaagataaaaaaaggcctgctattgtttttctacatagcacaaacaagtgtaaagagtggttgagacccttgctagaggtgggtacctttttcgttgacgaacttctcttatcttatatgaattacagaaaaaagatttattaaaagcttagttgatacgttcttaattattagtttttcttattcctagaagcttgtaagatgttttggtccctatacttttgtcatagaattctgtataatcatatattgtactcttttatacatatcagaagaattcaatgaaactgagtttttcacatctatatgtattccatagttgatctactaataggattcttatagttctgtgattttttttgtaggcatatgcttcgaggggattcataaccattgccattgattcccgctatcatggtgaacgtgccagcagccttaccacctacaaagaggtttgtactaatgctcatctattcttcgtgtccaattttaaggggaaaattgatggccacagattcagattcatccaaaactttttcacatttgttgtcctgagaatttgaagttatatagagtgttggattaattagtattcgtactatccagatcagtagtagtttatgtatatatatcactcttataatgatgtgtttattatcctctaagaagtatgatcatcacactgatctgtttattttgtcaactgtaggctcttatatcatcatggaaaaaaggtgataccatgccattcatatttgatacagtctgggacttgataaaactggcagatcatttaacggaaagaaaggaaatagaccctactaggataggaatcactggggaatcacttggaggtttgctgcgatgcttatcatatattattgacagcacacacacacaaatacatacatatgtgtgtgtgtcacatattgaagtcacctttcttatattttgacaaaaatatacaatgacaatgcaggtatgcatgcgtggtttggtgcttttgctgacaagcgctactctgttgttgccccagtaattggggttcaggtataatgcggcgtgcctttactaatttatttcaactttatttttcaatataataactgaaatttaattcattacgactgtaggcttttcaatgggccatagagaatgacatgtggcaagctcgagttgacagcataaaacctgtttttgagggtaagataaagtaacatatggtatgttttatttcttttttcttattttaatatatttgtttgtttgaaaaatatagtgattaggactacctaatggctaataagttattcgcctttaaataaatctaaaatattttaggagctcattgagtgcttataatgataggatacatagatcattttgttctacattggcaaaatgattgattaaattgattttttcagtgaagtggcagcaaatattctctcatatttttcaatatatttgtcaaaattttaaaattagaaaatttaatccagtttttttataaaatgaaaaatattataagttactttttttaactgtagtttttatttttattttaatatatatgtatatctacgtaaagaaatgcacaaaataaatgatgtgacatactttttagataaactacgttattgaattaagagtaatttacggcatagatgcttaagtttaatttccagttacaaataaaacttaaatttaatttttggcggtaataatacctgacttaagtcattatcacgtgtttttttttattggtatatttaaagtacttttttttttaaaaaaaaataaagattt

SEQ ID NO: 303777 - DNA, 3962 bp, Cannabis indica
gtagaataataaaattagtattgaaacagttttatagctacaaaccaggttcattacacagaccagaaaaccagtgaagaacaatagtacagaaaaataaaaccacacaaggttttatatgtggtatctaaaatccttgcagattgttactagtctacagtgtcacatccaaagataagactcattagtaatctcaaaagtacaaagcttttaacttatgaataaataaacttcatcttattatatgtcgcaagcttgatgcattccaccttaacaaatgaaccttgctaaaattacaagtattcaaaccctcttcaatttgctttaagagtacttacttcctccccaggaaagactttaaccactttctctctaaggcttgaagaaccttctcgtgaaggcttatgcacttttttctcctcctttattgaattgtttgaagactcaatacaattacgaagatataaaaacaacataaatatagcatatcaaactatactctatacgaaactcttttttacaatatgtaaaagaaatgcgaaagagctaattaaaccccaatagtcaatatgattatttatagacaatatacttatattagacagtaaatacacggactaaaccctccacaactcacaaggaaactttcttaaataaattcttcattttttataaatttcctgtttatgtagctacagaattatggctatatatgggaagaattctttttttaaagataggaaccaaaactttcattttataacctgaacatgaaataaaactcaataataaagtcagattcaaagagatacacggctggaaaagaacaactcacaagacttgattttctcatagtaaagacattatttttgtcaaactttcccaatataaaaaagttagacaataaatattttcttattatttaaatcaaataaaacatatataaagaatatatatttatatacggccgatatcaataaataaatataaaatatttttatcaaattaaatatggtaaaaatagaattaaaaataaataatttgtatatttttaataaaataataaataatgattaataataattttttattttttattttacattttatgcattcaaataccattacaaatagtaaaaaacttattttttgtggtaaatttaaaatatatattatatcttgtattgaagatagtggaagatggaaaaaggaaaactcagagcttctatttttatcattataattgtgtgaggctttcccttgcggtaatatcaaccattgagcattattttcttgcaagtgagtttggaaatgataagctctatctacttgcatattggtaagctaaaaggaacttttgctacaatttaagggatcttttcaccttttcttttttcattttattagtgtagctatgattatggtatcacatgcaaaactgaccaatacactccacaccccttacacatgtaatgtagggttttcatacatgtttttgactgattggagaaatgaatgtaccatataagtattaaataaataaataactttgttaagtagccaataatatcttcagaagagaagattgggaacataaagatgtgtaactttacgaataattattggggtaagtgagtttgcaattctcaaggttggactgatgtgataatcaatgatattgggacccaaagtaattgtatataatcccaaaattaataaattctataatcaatcctaattgagcttagatcataggccaaaacaattaaaaggaaaagataaaaaaacaatagattagaggaactccctcccaagagtatagctttcagtagaggcaaacctactattggtaatgataagaatttgggtctccattcattatctaaatcatcatcatcatcacaatcctatacaatacattattaaataatttaaaaaaacactttcaaaataataatttttttaataataaatataactaaaaaagaagaaagacagctcttcttgacctctcctctatagcaacatttatggaacatgaattcaacttggtggtgtgtgtactatgtatagccgaataaggcaagcaatctacacgccaccgttttatgagtgggtttttttatagttgtaattataaagacagttggttttttttaggactctttaaaattcaattaaaatgggaatccctaaaaattgaataataaaaatttattatcaacgccttaacatatatttaattaaaatatattaataataatcaatatccaatattaatgttatggaatatttcacactatagtcatatttttattaggataaatactattttggatcatgtattttataaaagttattaattagaccatttattttgttaaatgataaaatagaccttctattttctaaaattgtactaagctgatattttgttaaaataaaacttaataataatctgatctagagatgttataacaaaacatattatatttttgtatctgttcgtattagaaattgtcttaaaattggttatattgcaaaaataaaatagttaaaaattgagttcagggtactatttttaccatttaagaaaatatagggtctatttggtcatttaacaaaatagaaagtccaaataaatacttttacaaatcataaggtccaaaataatatttaccatttttattatcactttacacaatagtctttttttaataattttttacaaaatagtcttccatatacgtctaacatcccttaaaattttcttgaaaattctatacattttaacactgatgaaaatttttaatattgtgtatgcatgtactccaaacataagtcattttggaaaagaaaaaaaaatcgaaagaattaaagtgatattaaaatcattttacaaaatgaaaatgaaaataattatttatataaaataaaagattatttacataattattgtaataaatatgtaaaaaaaaataatatttctactgtggggtgaacatgtttgtcttccataccattctccacttgaacaacagaaggccttcaatctgtcaccaaattctttgactccaatatcaagagtgttatattatatttgttatataatataagaaaaattaaaatattaaaatgtcacatatcatatattaatataagattaatatatataatgtgattaagagttgcgtacataatattcatataaattgtaacataaaaggtgaagttacttacattttgtaacctccacaattatcactaatattaaatgtgtaaaaaagtgttacacatcttaatttgaaattattaatgctatatgagttcaaatttcaaaatgtatgatcttaaacactataaatagaggtctttagttcacgtgtgaagacactttttttgtgagtttctatcaaagagagcaccttgctagaaactataagtttgataaatccagaaagctatttccatttctttcttatctaagtgcttgtggtagggggaaataagcttttagacaaaagtgtaaaaccttgttcaagttttgtgacttctctacttgacacttagtattagtggtgttgagattgttctcacatctatacagggcaagccctaggctaagataggctaggcccgctcctagggcccactcaggggcccaaataaaaaaaatacctcttaaaaatattttttaataatatttgaaaataccatttatcagtaagggcccaattttttttttgtttatggcccatttgatctgatggctggcacgacatctatatgtatactactatttacattgtacttttatttattatgtttttataaagaaaatttacatggtatactaatttttactattttcttacaaaaatactgccagacgatattttttactcttttactgtgttttttttataagtttcatactgcagttgtaaagaccgcatatgatt

SEQ ID NO: 303778 - DNA, 2402 bp, Cannabis indica
accctaagtgcatgcacaactaattcatgaagaacagacagtgaacgtagggatcgcctctagaaaaattggaaagacaaactagacaaaaaattaaaaaacccaactcattacaaaaaaaaactaaaaaagcctagctcattacaaaagaaagagcgtttttgaaccgcagaaaccaaagctaaacaatcagactccacataactaaaaggaagagccacgtgtgaaaccaatctagcactaccactaaagctaatgctcctgcttgactgactaagaagtaactaacaagtttagatcttctacaatgtgtgaattttccacctttgaagtataaataaacaacctacaaaataccaaaaaagataaatgaggtaagaatttaacttataaaaaataaactaaatttaaaaactaaagtttaaatatagcaattaaaataagaagaaagacttatctgtgacattcattgatcctccaataagttttaaagtttatatctagggattttttcataatatacataaatagaaaattatttacaataataaccttacaaaaacaattcacaatctttaacatgccatgtcaccaaagaatacccatctttaactattagtgcgtgacaataaaaaacctagaaacaagtaaatatttaggctttttttttgtttaattgagaaaccattagatgtctttttcctttattttttcctttttgtgttttttttactaaaaaagattatacatttctcactcaataatatttttagaaaaatgttcatgaaaaaaaattaacaaagaattctaattacaccactaattatttggctcaaaaataatactattataatttattttttaatgtatattattttaattttaatatgtagaaagcatatatttatttggtcataaaagaaatattttaaattaaagtattatccttttagtttattttatatttgttaaccaaatagtaactaaaagatttaaacaaaattttttcttaaaaaaattataatgaagagagaaagaattagaaaaaaatatatataaaaataataataaaattagtttggtatattaaattttgcttgggttgatgatttctttttttttaccaaaaagaaaaaaaaaaaaactaatcatatacttttaattttatcattttctatttcgaaaagttagacatcacagtttaatttttaatctcaaacaattatttatatagtcaaaaaaatattaaaaaaaattataaaaaagagataaagataaaaaagaattataaaataaaacaaatgagttacagtatacatacaaagaagattaagagaaaaaagaaagaaaagaaaaacagaagaaaaaaaaagtgcgctgacaatgatgagagaaggtattgtattgactctccacgttatttttgtaaagttaaatgagcaacgataattctgtaaattagagaaaaatgtcgtttgtaaatgtaattttcccttaataatatggatatgtacaagtacaaaagttaaggtgtgatgatatgggtttaatggcctggtcaggggtgatcctacttagtaaaatttggaaataagtcactttttcacattcttttaacataattatattaatcagctcgagtatatatgaaggatagctttcatatttgtgtatagttagttttaatttttaaacaaaatttaattaaagaggtaagtggttttcaagaagatgaacaagtgaccgatgttgagtttttataagagccacaaactctcttaattgaaacatacatgccacaatcttttggtcattttcttttatgtctatttatgtagaaagttatatctttatctttataaagtggcctatcttttctttattttataaatctttttccttttccagaattaatcatattcaatttgttaatatatcaataatataatatagattaaattggcgtgatttaagagtttagatagaaaaataaatataaaaatagcagtttaataacagattttgagaatatgtattactgttcagagaactaatatttatgtatttagtattagattttgactatcttaaattagtattgaaattttgggtaagttttataaatatactgtcgcacggtattttttataaatatactaccctagactttttttatttctttatactgtgtgtacttcaaaacgcatacaaagtttccatcttcaatatctatagactgaactaccagagtaatatcataatagctagaaaacaactatttttctagtcagaatcctggaacaataacataaaaaattactaggacaattgtaaaacaagagtaaaactacaaaacaaaataatcaaataaaatcacaaaaaaaaaaactatacctcaataa

SEQ ID NO: 303779 - DNA, 1267 bp, Cannabis indica
attattattatccttggaatatttattgttgacttgatcaacattgtaaacatagaatttggcaacaaaccaaaacaagatgagattaataaaagccaagaaagccaagaatccatagtaataatccaaatgagagacatttaagttatccaaaatccaccctttttggccattatttcttttagtgaaattagaaaccattgtaagaacaatactactaagaaaatttccaactcctttgcttgttgtaaagaaagaagctcccaaacttttcatgccctccggtgcttgatcatagaaaaattcttgctttgaaacttctaagaaagcatcggccaaccccatcaaaccgaattgaggaagaagaataaaaaccgaaagaggaactatctctttctttccaaccacaccatgctctcttgcaacacttagtctcttcctttcggctaagcaagctgtgattgtgatcacaacatggagaacaagccctacaccaaatctttgaagcatggttatccctctagggtttttcgtgtatcttcgggcgattgggacgaagcaacggtcgtagaggacaatgcttatgagcatgaagattgttgtgaagaccgcgagacatgctggtgggatgttgaagccatgatgccctattcttctgtctagggttgtgccttgtttgatgaaaagtgtgtgtatttgagatgatattatgcttggtatgaaggtgattagtaaaagaggaagtagtttcactattttcttggtttcttctacttgagttattggacataatgtccatggcctctttgtagtcattatttcactatccacagcagctttgtccaagcacctatacaaagtaaatatatttaagataataattttgatgtatgctatatcaattgatcattgtatgctcatatactaaattaagtatttaatgttacatacaatgattataatgtgtgttgttatgtaacaataatattacaatttcaaatattaagatataaagccacttatacctaagcaaaattatgtcttataaagtgtttaacatgatttgatacaacatatagtaattaaacaataattagtgtatgttactatgtataaagtagtcttaatttgtactcaaggcgattttgagtttggttggacctagaacttttttgacctttattagaagaaaatgtgatatttaaataatttttttttggattcttaagttggatgaaccctacgcgcagatctaacttgtcttaca

SEQ ID NO: 303780 - DNA, 4262 bp, Cannabis indica
gtcatgggttcaaatcccataattctcttctttacatatttgggacttaacaaacgaggatgttaaaatttaaacagttgtttattattatgagtatataaaaaaaaatagtcacaagtataataattatatatttaaaatcttatttaaaatggtacacgatcattaataaaaaaacaaccctttcaatgaggtctattataaaatttttcccaacatatttatacacttaggcttgtttagtacgatgtattgtgttagattgtattatattgtattgtattagtaatatttaatacaatactatgtttggtattgacttgtattaatagattgtgtaaagttataatatattttcaccccaacaccaattacgggtccgagtccacgtctgagtcccgggtctcgagtcctgggtcccgagtttgggtccgggtctggggtccgagtccaagtccggggttcggggtccggggtccgggtcccagtcttggtccaggtttgggtctcgggttcgggtctgggtcccgagtctcgggtctgggtccgagtctggggttcaagtttggggttcgggtccggggtccgggtccgggtccggggtccgggtccggattccggttccggttcccggtcccaggtcctgggtacgggttagagattggtgttgactccaaatcttttgcaaatattataatacaagctaatacggaccatttattatgtattaaataatacaatatacattgtattgaaaattttagttgtcataattaatacaatatattgctttatctaagtataatattatttattatttaatacaatacgatccttatacaacgtaccgaactaacccttataaatcattctctctcttactttattaagtaacgatggtttcgtactttttgtaaaaaatatatggtcttcatcaacatgtgaaattggcatatccatctctctaaccaccaatcacgtgcttaatcccaaaataatatacaaaaaaaaacgttgaaaacacaaccaacgatcaagtaatggttttatttatttattttgagaaagatcgagtaatggtattgatcgtgtatgtcgtatacaattaattacgatataataaattatcaaagtagattggattatgatattttgaaaggcatcatagcttccttttctactctatgttgagaaactcacaaaatgctttattttattttgttaaaggtaaatcaaatttaaattcatatgtaaaatcagacataatctattatatgtaaatattatttatcgaggagaattaataataataattcaatcaagtcgtttacaataattagaactgaaaaccctaacatcatcttcgactaaatgactcttaagccgtcaactgtgaagtatcaaaacaatatgaaaaatactagatttttattttgaatgaacatacgacagatcacacctatcaatgacaataagataaaaatcctccaataaaaatgggataaagacaccacaattattcaaactagaataaaagaaaataacacgagaaaccatgttcaaaattctcattattaaatatcaattaactataaaatatagtgtcaaaaaataacaaggaagacctcgaaataacatgtgcatctaaattcgaaaatagctacagatcaaacaagtgtgtaaaaatactgttaaaaacataaatacaactaacaacctcacataaagttaaaccagacacacatgagaataaattaaaataggactaatcaccaaagcatcattatctacgaaccatgcgtaaatgaacacaaacacaccctttttgaccaacacacgcgagaccaaacctagcaagggagacactaggcaaggaattacaagaaatgtcgcttttaccagcacagttcgctactgcgctggtaaaagttgtaaactgcgctggcaaagaggtcaaagttttactagcgtacatttgtagtggctaaatctaacttctatcagcgcatttacgcgctggaaaaagttatttttgccagcgcttttcattttatgctggcaaaaattctaataccaacattgatttgccaaccctctttttccaacacatcacaagtaaattctattttaccagtgcaatactacttttgccagcagattttaaaagtgacatttcttgtagtggaaccactgccattgaccatcctgcaagagacccacccaaaccacagattacacaccatatatttgagaagatacatcgtagaagaagaagccctcactgaacgactcaccttagaagcagcacccaattgattccttgtaagacacctaatagaaacccactgcccagaagtcaacacaaaccatccaaaggaaatcttggatccatcaagaataacccaagattgaataaaacaagcctactaataaccaccattaaaattagtctcatagtgcaaacccatcactacccccttgcccacccgaccatacaaactaagcccaaaaaagggtcgaagagggagaaaaaacctagcagcggtggcaaggaaaacacctagagtacaaacctatttaaaaaaagattaagttgaagacaataaaattaaagagagcaaggtgagagttttacgtagttgcggtgttaattaaccttagtccacgagtcaatatttttaactctaaagcaagagagtatttttcttacaagccttacaaaaaatttctaacccttagggaaaatgtcatatttataggcttattaattaatgggttgggctaacccagacccattatggtttgtaatttaaaaaatctcactaatggggtaaaatacattaagatattaactttgggccgatttagtgaggcccacagttggggacaactagcatccatacacggaggtacgattgatagtgacaactaaggcataagccatcagtacgttgagggaatgtcagagtagtggtggttggcccaaaaagttgatctacttttgttatgtgcctttccaagcctcttgattctttaggatttttttcgggagtgtgctatgtaggatgcttcctagaaactcatcattctcgaacaccttttaaactactccttcccaaatgacccttgagggcatctgtctttgtctccttcgatatttattgaaaacatcaatgtttgagatctatacatccgacttagtcattataaagttgtagttgaacctgcactcttcgttcgacttttctcatgggttgggcaatcattcttcataggcttagtgattgtgacagttaagctaattaggcatactcgaatgtacacatgtcatttgtccaaaaacaacatttaccctccaaacctttgtgacttgtgttgcgattttatgccctaaataaaacccaatttcattgtaatcttatttactttcaataaagatcggaaatcatatcttgaccttgtcatatgctttgttcacatgttttatgcatgattataggtttaatatataagttctattaaatcctgaatatatagttattcacaattacagtgatgtcatcatagtggaaagtaattgtgattatatgcttcaaactatttagtcctacgatttatcagtgcactagatttatactgacatgataatcaatgataaagtttacttacacactaatatgtggaatgtcctttccaaggaattatcatcagagtatactagtatcggatgtattggctatacatcagactagaccgatattagtagtgtaaaagatatcataaacttactgttatgtcttttctaagtcaatgtcacttagttgatcttagatcaaagatcttagtcttgagacggttaggttctggcttaactgtactgcatgtgttctttgacttgtacaagcttaccagaggatcatctaaatacttacatcttgggaactcgataatataattgagtgggagcgctaatcatagatatggaatccatagcttctaaactatttagaagtgaaataatggtttccttagagcttggctaacaaacataaatagaagagctcttatttcagtaattatattagtttactgaaagattatttataagaatctaagtattttaaggataaaaaatattgaacggtaaaatggtaaatttatccctactcgatctaaattatctatagaggatctttgattatttagatttaaataatagataacttgtagtatatctattcttggtgaatagagtgttctat

SEQ ID NO: 303781 - DNA, 1623 bp, Cannabis indica
gcacaacattatatcaatcagttcacaccatggaaattttatcaaaggtagataaaggatgtattcaagaattcatatattagtccttttatacagtgatgtcagataatcttccgttggccctttttattttattttagggagaagggttgaaaatgagcacactatacctgtggatgaagaagttggtcaagatgctggggttcaaccatcttaatggcagaaggagtatcaacaagtccttcattaaccatgtctacagctatctttactgctcctttaccagttcgcttgcctgatcggcactgcaacatccacaacctgttttcttggacagtgaactctatgtcctgtatacaccagagattagccagcttagcaatcttttcattaaaatccagagtgtttcactagttaattgtcaaaaggtttcaaaaatatgttttacatatagctttagtcatgtaaactgccagataattcatgtaatctaatatgaaagtcaatatctatctttatagagtaatttttaccatcatgtctttgtaatgccgttcaagaatttcacagttctctacaagctcctggtaagcatcaggcatgcaatttttcatggtgtccaagtcttctggtgtcctaattccagctactacatcctctccctatcaagaccattcattctttcagatacaatatatagccaatgtaaataagatatttctaactctcaacatctacatgcttacaatgactcagagaaatttgaatgatatatatatatatatatatatgcaacctgagcattgatgagaaactctccataaagcttcctttcaccagtgcttggatttctggtgaatagaacaccagtccctgaagtatttcccatgttcccaaaaaccatggtttgaatgttaacagcagttccctttagtccagttatctgattgatgttcctgtatttgtttgcccttgggctgtcccaagagtcgaaaacagctttgacagctaactgtaactgctgttttggatctgcaaatttaaagaaaaaagaaaagaacaagctggttaactgttttttaagctctcttctttttcatatggtagtaagataaaataatgaataagtacctgagggaaacttttctcctttagcttcaaggtagacactcttgtactgctccacaagctctttaaggtcagaggctgatagatctgtatccaattgaattcctttaacatgcttcatattctctaacttttcctcaaatgaagagtgcggtatgcccataacctggaattaacataacactatgttttactcaatccaaagaaagaacattgttggcctaagtaggaaggacacacatactctttttggcagtacaagtaaatataacttccaagcataatgaatgtgatcatcagtcagaattacttacaacatttccaaacatgtctagaaatcgtctatatgagtcataagcgaagcgctctccgctctttgcacccaaaccagcaactacctcatcatttagtccaaggttgagaacagtgtccatcatgccaggcattgaaatctagaaagaaaaacaaattctagcaatgcaagttctcaattgg

SEQ ID NO: 303782 - DNA, 1277 bp, Cannabis indica
taacggccaaaaaaattcaagaggcataatttagtatatgtcaaagttcggggcgaaaaattgttaattaactttttttaaatgccattttttttattattattttaggagagttaatattgttgttcatgatcttattacattttgtggtcaaatcattcaaattgtattcaacaacacaatctctcgtgactgatgccatgaatctttaatgacatccaactcttcttcgtttttgagagtttttactctttggaatggagtttaggggttttttgctaaagaaaatcattctataatttaacagcaaactgtatttttaaaatttcaacttttttggtaaagttaaaatttaaacttcaaattatatattgatgaaaaaaatgtttagtgatcgtataaatacaataaaaaaatggattatttcataaacatacaaaaatagtaaaacttttacatttttatggactttaattttttatttttttttaccaaattttattttatttttataaaagtatagagtttgtttttctgttatttttgaaaaagtgttgttttgacattgttgctacaggaagtaatataaatttttttacagtgtttttttttcgtttcaaaatgatatttttttgacgttattgggaaagcaacacgaaaataatatttttttctgaaaaaataagtaaaaatgtaaaataaaattcacaaaagtgtaaataaaaacataagatctttaaattcctcaaattattataattactaaatcgtatttctctctttctaaaatttgaagtcacaatttagtaatgataacaatttaggggcatacttcaatcattcaataataattaaaggaacacaactatgcataatggtatttaggtgggtgtaaaatagctatattccaatttctcagctaaatcaaatagtaataatttaaaaagatattaataaaaatgaaaagtgatagaaaattatatgatcctctcatatcgtggttatttaagatattatataatttttggtaaaataataaaaataatttaacttattgcaaataaagttaaaactatttgttacacacgctcttattttactttgaagtatatgaaatgaaaaattttaatcttattttttatattgtaaataattttaaatttctcaaaattttacaattatcttaaataacttcaatatacaacatcatatacataaaatgaaattaaaattattcaaatattaaaaatactcatttttatatttaatattacaag

SEQ ID NO: 303783 - DNA, 3405 bp, Cannabis indica
tggaaccctatgattctcaacataacaaataataacaaacttaatcaaataagtttgaaggataagagcactcccatcaaattagataaatacgagttattataacacattcaataaaatatatgttgttactttcaccactttaatagtcaattttttgtctaagcttgacgaactcaccataaatagttaattctgttacaactaaagtcctaaaccgagttgtataaataaagcgtgtctcattcttttaaattaacaactacaaattagagagttcaagatagatagttttaggatcaacattattagattacaaattgtaagttctttgatgaatgttaaaaagattgtttactctcgaaataaattctctcaagtaagctggtttgtaaaagagcaagtctcatgagtgtagtgaatttaatttttaattaattagttatcatcactgtgtacaactattgattgaatttattgttatgttgttcttaatgaggtattaattcgcaacaaatagtatcagagcttggtaaagcttaagtgatcaataactgttcgagaaaagactcaaagattcaagaatggctctagctaaatacaatgtggacaaactcacaaggaaaaataattttgggctatcgaggatcaagatgaaagctctcttagtccaccaaggtatctcggaggccattgatgcaaatgccttgggaaaaattaaagattagaagaaagaaaaggagatacatatcaaatctcagtgtaatcttgttgagcttgggagatgaagtcttgcgcgaagtttcagatgaagagactggcataggactttgggacaagttggcaaatatttatctaaagaaatctttggccaacaaactgtatcggaaaaagaaattgtacaccatgagaatgggtgaatcaaaagaactaaggaggcatatggacaaattcaacaagataatcctacagctaaacatacaaatgtcaaaattgatgaggaacatcaaataattatccttttgagctttataaaatcatttgagcattttactgacactatattgtatgaaaatgactctttaaccatgtcataaggaaagtctaccttgaatttcaaagagattcaaaagaagtttgaaggcagagttgaatcaagttgtgaagggttgttcactaggggaagatcagataaaagagagttaaaagatcactagaacaaaggtgggcacatgcctacttcgaagtctaagttcaagattagaaagaaatgctactattgccacaaggaaggatactttatggatgagtgtaatgcactaaagaccaagatgagtagagacataagcaaaagagaagttgatgtagcttttgatggctatgaatttgcagatgtactacgacacttacacatacactcaacaatggaaattatagcacttcctatagtgggatcaatcaatatgttcaactaacttcttactatcctcatgtagcaccacaagatcaagatcattctcttattgatctgctcaacactttggagtcttctactactcggatgcaacataattgtgcacaatttcaacaacctactcatgttgcaccatatagtaaaaattcaactactgctgagctgattgaaatgttagtagctaattccttacagtttcaacaaagctgtcatgaaactatgtagagccttcaataatctctgcaaaagttagagaatcttacggagttaatggatacatctatgagtgagtatgaaattcaatgttcaaactctatgccttcacaagtggagagtaactcaatagagaatgtcagtggcatcactatccaaagtggtgcacaacttgaattaccaccacaccaagaagttaatgatttgattccaactaaaggagtcaacaattcatcccttgaaggatcatctccaccaaaggtcgaatctcctactttagtgggtccatcatcactgaaaaagccgtacaaaccaattgtaccaacttatgtcattcctccacctttttcaagtagattgaaaaaatctaagaaagaggagcccatcaaggagattcctaaaactattctgaaagttaaataaaaatttcccttaaaagaaagtttgctctaattattggaagcattgtgccaaacatatagtttaagaaaagaaaatgaattattacaaaattgaggttcgaatagttgtgcaggcacaatgaagcggtggtagtaaaaacgtgcttggcaacgtcaaagaaaagtagaagaaaatcaggtttgcttgaaaagtattccaactctaaagaaatttttaaaatgtgaaagtgtgaaagagaagagacaagtgctatttataagactcaagacctcgatccaggccctttctcatccaaagacccctttcaaattgcaagtaacacaatttgatccaaggacgaatgcaaagaaacacattaattaacagatgtttggagtacttgagtatctgactgtcactctgcatttatggaacgtctcaggattctacttcaaaatgcaaatcgacttcaccagaatcaaggcaaaaaagcatgctgacatatgagccattcataaagtaacacgtaatgtactcgtgcaaacaattgtatcccatctagctatgaacgtcatgataaaaaccctcctggagggaaacgaagagtagtcttgtagcaagtctcaacttacaagaatgcaagttggaactttggggggcaaacattgccactgatttttattgatatacgtggcctctcagcacagagccacaagacctcatgaacccctaatatatgtacttattctcaactctcaccacgtttctcgaggaaaaacaccgttgttgactccttccgtacaagctaaaaaatgagttcaaataaaaaagcagagatacatcctcccaaaacgcctagcgacaacttgctcatctgcagtcccatcagtcgcggacatgtcccgtattgtctcatcaaatgcctaccttaagcctattcaacaagcccattgcaagggaacatttccttgtttagaaaaatagccatataggctacaacttgtaagggaaagtaaattcagaccatttatggccaccctgtttttcatataaataaggagagaatgtcactgtaaaaggatgagaaaaatgaggggaggattaagacactaggaattctctaacttaatccttgcacaaaacaaaaaatactattgttgtaatatgatcctaagtgtcacgggctcaccttttcaggcagcggaacacccgtgcggcaccttgacttctctaagccaaagttagccttccaaccatccgagtaacaatgggctcattttccgcgcgaccgtgtgcctcgggcacactcccgtctc

SEQ ID NO: 303784 - DNA, 979 bp, Cannabis indica
taaaaatgttgttctctagcgaatgaagcatatcatttgaattcttaaaactcggaaatttctactccaataactttttaacttcaataagtcaatatttttataactctaataaccaataactaaagtactctaataaacaaatataaaaatttcaatttgagaccactaaaaaggaggagaatgatgaattttaatttgaaagcaactgtgtaatactgcatattaattaacccaaaaataataaatcaagagcatttcaattccaataaagcttgtaagtaatttgtactattactttgctgatcaacggagaaagtgcgaaaaaagggagaaaagttttgtagaagtaatgttcaccagaggcatggattccaaccatttgagatctcaatttcctttgcaaatcgtttcctctaaaatacccatttccaggtatgcttccctctttttgcaatatatatatatatatatatatatacatttatatatatttctctcttactttataatgatagaaattttactacaaatctttttcactcaattatatcattcatatttatttatcaatttgtgtcttaacaatgtgtttatttgtatttttccttatataatatctcttttcgttctctatacattttttaggaattttgaaaaggtttcttatttgctatataaatttgttcaaatgatttttgtacagccaacttcacatctatatttcctttgttttattctattttatgtttattgtttatatgttaatcttgtcaaaccatagtgccaacacttgacccatttgacaaattaatgcttaggcggttagtgttttttaatttgtttaaattcttttgagttattggttgttattatctgagtattgactaagtggttattattaagtatcttaataatatttatgttggtaatgtttaataacttcatagtttttccctcgtgttttgctctcgcagct

SEQ ID NO: 303785 - DNA, 2299 bp, Cannabis indica
agttaaaaaacagtatataaggtaattcccctatttttaatctagaaaaaaaatataataactttaaaaaagaatattttggaacgaaaaaaaaaatttgactaattaattactagtatattaaaaaatatttaaaaaatttattataattattaaaaaattcaatgttaaatattaattattatataatatgattttttatgtaattactaattattttactaaacaaaacaataaaaattaatatgaaattatcacttttatatctaaatacataatttattttaaaatataatatatttattagaatatgtataattaggaaattaatatcatactaattatacaattatatctaaacactccttattaataatatttgtaacatgcaattctataaaaatattttgttttaataattgccctctctaaatttttcgtcttgactccgcccttgacttcgttcttattttttttaatattaaatttaattatttttcaaaaatatataaaaatatcaaattcaaaaataacctaaattttaaaataatcatcaacaacattaatataaaatatttaaaaataaccttccatttattttatattcatattatcctataaaatttaaacatactaattaagaataacagaacatggacggaaagattttctctaatgataacaaattagttacggtgatgacaacatgtgaaatatagtgataaaaacatatgagatacaatagttacaataattttaaataatcatgatgtattataagaaacatcctaatttttactacaccaccttatttttttataacaacaatttttagaaaactatttattatatgaataaatagttatttttattatattacttaaaaaaattaaaattagtaccgcgtgaaaagcgattatattaccttttttagtttattaatatagtagtttctacacaaaattatatattttttttgttaaaactttttaaaaaaaaaaaaactgtaagattttttattttttttctgtaacatgctgaattgctgaggatgtaaatattttaacgtatagctgccatggtttaaagaagaaacatgggccgaagcccattttgtcttaaaagataaccgaagattcccaaagttcttatgtttttcattgattgttctcttcgccgccaccgtaatttgtaactcggagttctgatctgagttcactgagtcagtttcactagttcactccctacgaagttgaagttgcttctcaagcttcggtatgctttcctttttcttctccactccattttttcgtgtttaaattctttgtcttcgtttatacttggtataatgttcgatgttttgggtggtactggtcgcgagtacacatcttttctgcctgaaacttaggtcgaccggaaaatttggtttagggttttgtaggattctgggtattgaacggaacattagggtttagtgtttcttggtgttcgaataaaatgcgtttaaaaagtgcctaatttcacactgctactaagtatgtatttattcagatgaaacttctcagttctcgcaatgtgattggagtaggtagggtttaagggtttaatttggaatgaatatatgtatatattttggtggaattatggtcatatttactattctttaagtgggttctttcacattacttttcgaattttttccctttgtgattattatagttatgaaccagtaaacccaaggtgaaaataatttataattaaacattaaggtttctagtttgagagccgaatcagtttccttatcaagaggttgaacacgaaagcagtaaaatctacggtccttgataatattcttgtaaaacatttatcgttggacagtttaggcagtaaattaggtattgggtagattgaggaagaactagtttttgtcatcatttggaaggactaaagatttctgattcagaaacttgaacttgcatagcagattttgttgattttctgagctatcagaaacttagaagtcgtatattggtaatttagttgtccaacatatggattgtatcaccattatgatcctaatttcgtagttcaatgcttaagcgttaattggtctccttttcataacataaattgttgatgtgaagacatgcttgtaactggtctctctcttgatatgctacattgctaagtgcttcttttttctctcaagcgtcctttgctgtcactctctctctctctctctctctctgacccctgtgagtgtgtgcgtgtgtgtgtgtgtttgttttttttttttaat

SEQ ID NO: 303786 - DNA, 2865 bp, Cannabis indica
aaaaatttgcgtgaattttaaattttttccacaactggaaaccttcctttggattctctcacatatgtcggacatgggaattatatgtacttgccaacaaaaatttgaagggagacaaaattagtacaaaagctaaatatgtgaacgtttataaatcatgatactaagaattaaactagtgaatttgttgttgcaagaatctaatgccgacacctacacatttctagtggtgaatttataattgatcagtcatgtcaatatatatttgttgcaagtgatgaatggagacaaactatatgatgattgcttaatcatgcatgcatggcagacaaagtaattaatttctttgcattaaaatattttctaaattatatattttttaagagttttttatacacctaattatactttactaggtgattatagtctttagattatatatttaggcttttcaattaattttattgtaatatttggcgctaattcgttaattaggtggagtcgatatcaatgactcatgcaacgtgggaggctcaatatgaatgaccaataaaagttatctatatttttttggcaattaattagtctctgacttaagtttcttgctcgatataattaatagtgaattggctaaattttctttacgaaaagtgcaatttaagttttaatatattttgatgattcgtccctttctgtgtatatacgaccccaaagagcctataaacacatgtgaccatcttttccaataacaatattgtcaacgtgaagatgtaccttccattattgaaatcttgtaacatatataattatatttatggaaattaattgataacggaaaatgaaatagaccccaaaaaatgtaatgagtttttattgtaattatttgtttgagcattaaatatgaagagaggagattaatttatgtattttagaatgggaacaactattaactaggctgttttattgtccatataataggaggaaaaaaacctattctaatagatgatagattgcgctgttatgttcttcaattccaacacaatccatctcaaaaaaccaaaaaaaaaaaaatatatatatatatatatatatattgtacagtactattgtggctagtggcttatgtccaccaaaatctttgacctgcatcggtttttattatgatattaattaaaataagtaacgcagagtcaattttgatatgaattcgttatcatttattatgaaagagacgatttatctttttttttttttgttagtgtgtaaaatttccaagtcgatcttgaaatttggtatacgttatttataattaaataatacggttagctatctacatccaatttggtccaacctcgttaccatttgaatcaaattaatttatgtatcacctccatggatcgaattaactggaaaaaaaaaaatgatatttttgaatggcacatgcactgaagcttcctagctcaagtacgtttggactactttttctctcttttccttattatatattatatgtggtttgcccaatgtccaggtatactcttacgtagtcctgtaaaatgtgatctataaggtataaattctgtagttagggacttgacaataaagtcaaaatatatttatatatatatatatatatatattcgaggaggcattaattcaactatccaattaaaaacatgtaaattaaaatttctctattatatattaaatgtaaagaaacttagctacattagcaaagtctagttattttaatttatagccatggtgggagattagcatttaactgtttagaatcttaaatttaaaaatcttaaatttaaagcaagatccaatgcatatataggccgttgcttaaactttacaagaaacttttcacaattattgattctaaattcacaaataaaaactaaaaagaactcagttgtcggcaatatcacacttagaaaaactctaattaagttgatgttggagttataatgataagtactcaattgatcgtagtggttaattctcatctcatatcagcaatcatgcaaatccctggcccaaacataaatataataaaattaccctttaatctttatggtccatataaagacacagatagaagcctctaatgcatacgttttaaccaaagcaaagtaagcacacacaaaaaaacaccagaggcagaagaatatatagaaggagtttaaattaaagaaagaaagaaagaactttattaccaaaatgtaattgggtagttggaagtgcttttatgaagagttgtttgctatatttgattctttaattataatgttggagaaaccaaaggtgtgaaaggaaggtagttaggttaggttaggttacctaaggaagtaattagaaagagttttgtgtgactgtgaagacaataaagccctgaatatattccaaaagatacaccttccctttctttattaaacaacaaatcctttgattacggacactctatatattatatctcatctcattttgttacacttacactctaccctttttttaacactttacaacaactttaaaattaatataataattaccatttttaatgcactgtaggtgatgacttggcagagcagcttatagtaaataactcatgttatttcttttgtggaaaaaataattgttaaagttgtttggggtatatatatttaagtttaatttttagttgtaaaaaaatatttaagttaattttttacgataataatatttaaattataattttagaatggtacctattaagtcttaagtaactttttgcgtgtcaattcttaattggtccaaatcataaaaaaaaaaattaaaaaaaaattaagtttatatatactaataaaaaattaacac

SEQ ID NO: 303787 - DNA, 2738 bp, Cannabis indica
gtaacttaaaaataaaaaaaaaaaattgtggtgtctaacaacaactattaatattaggtgtcattttataaatgatttaattaattttttttttaataattgttaaaatatgtgaaattaaatatttatttataccgtaatagtaacttgatcaaggtgctcttaattatatcaaattaattaaacttgcatatataactcaattgatcatatttataacattacagttcaaataaataattatatatacaattttgaaatataaagtacaaaataatcattatttgaaaacatacatattaaatctatatcttgataaaacacatattttcataaaacacaaagtatcaaaataatattattatttatttttgccatggcttcttaattattagatatattttttgtattctttctatatggattttgaggtggatgtcactgctacctagcatatgcgcctttcccagttgaaagacagacactatagttatatgccaaacaaagatatgttttcatgaaaaatataattatataataaaaaagaatgtcttttttattttgtccatttgtttatataatatactgatttgtttaaatttgccatgtcacattccactttctatatcctctctacactataattattatattaattaatatatatttatattaattaattaattaattattatgttagctctcttataaatcagcttttgacagcattagctactactagtcttaaattcttcacttgatagtaatatattttataggtgtagagtaatatataagatattttaatattcatttccatagtgggtatttgggatttaactattgagctatcattctcttaatcaaaatgctttagttaagtatgtttattaaaaaattatgaaaagtttggtcataatgttacccaataattcagcatggattagattgtgttgcatatatatttgttgagttgtcactttcttaccttcttatggtaaatagtctcatttgctaacaatggaaattcttttcttgtccttaatacaccataaaataaatagggtgaaatgggaaagtttatttatatgatttaatagcgaatatatttttatccatataacatatatatttaattatgagcaattacatggactctgatggaagcaagaaaataatattgtaattggttggttttcacaaggggtttgctcaagattattgaatagagcctccactttggtttgattggacacaatgttggtttcggtgaaaagagaaacgtatatatgttatcttcaaccatgaagatgatgaagaagacctttcatattatattaattcatctttttgttatgtatcatattattggttgatcctagtatttaagtgaaaatacaaactttttcttgttttatgaacaaaaaaaaatggttaataattagtttacctacttgtttaaatcttctgtcaattgaattctagccacacagtttaatctataaaatattgacatttttcaaaacagtgtttatatatgacactacaacatttttgtgccacaaatctttaaccaacttgctggtatcatataagaaagtcagacaaatcacgtaaaaaaggcagaaggagaattccagagttttcacttctttggatttggaatttgttttaatgttttacctaatcaactcgataagttaatgttatcaagtgcaagtagtagattattatttcagcagtactaccgtcaatctcttattaaaatcttttagttaatttctatgctcaaaatgtcggaatcttttttcatgacggtgttccttataattaaaatatcatccctgtaaaatttttgaatagtttagagtgacaaaaataggtttgaagttttttaaacacgtgatcaattagaatatcaggaactctattttcggtactgtaactattcgaattttttaaaaaatttacaaggatagtattgcagtcaatatttagtagcactgtaagaaggagattcaattcttaaaaactgaggatagttatcatcatagaaaagaatatctgaaatatgttcattcacgtcatttattttcttaaaaaaaaatagagcaacttcataagcagatgatcataatattctcatccaattatgtaagattataacaatttttaaatgaaaaagccataaaggaaatttaaaaaataatttcgaataaaataagaatgtaacgttgcctcatattgcacgggatgcaaggtaaacttattttataaacttctaccattgtttcatacttgtaaaacaaattcaaaacagccactattggagtgagtgttacaataaaatgtgagtctacaaaatatttatctttcgagatcttacggtgctaaattttctaatgcatgatcacctagtgggatggatcccattaaaaataataataaccttgtaagaccaataatagaaatccaaaattgatactatatattcaataatagaaataaatgcaatgttcaattaaattataatcacataatcaaatatggaaaaaatatactaaaaataagtgtatttataattttctaaggtttttttaccgaaataatatacaatgttctcactacaaaaaactgctacttttagtgataactttttagtcgcaatataaattttttgtgactaaatgtgacttttagtcccaataaaaacttacttttgactaaaatatagtatt

SEQ ID NO: 303788 - DNA, 8154 bp, Cannabis indica
agaaaagtataatcataaaacatatacatatatccagactgtaaccaggcacccatacacttaatcacggtctgataatggggtcaggaatgttctcgacaaagtatgactaactacaaatccagcctatactcagtactttagtcgtactaatgtggtagcagttaattcatactctctggaggcctagcatatggcatctctgtgcaactctatgtgcacttcagcgataccttatatgctaatctaatggctattgatttgcctaagatatatttattggtacctcggtgaaactctatgtacacctcaatatgttattctgacgacaactaatatgtatgctaaatatgtatacatctatgcaatcattatactaatttacctcatttaaaaatttaggtgtgtcggttaacctgagtagaactactgctcaacgatttacaggctcctaagtcacaatatttataaaactagtgagtgacacgctaaattactttttaaaatcaaaactaaatgtttttctatcgatggataacatagaaataccttaaatatcataaaaataggaaaatctagcttgctctaaaataccccaaccggttaatcagttcccaaccgaaaaaccagttctgtttagactagctcctctagatccaaactgaaccagtcaactggttcagtgcaggaaccacaaaaaaccctgtaaacaactcaaatcatccccaaactaaaccaaaacttcagaccgcctaattaggctacaacaagcataaatcaagcaatacacccataaactaataacaacaccattaaagagcaaagtttgagctcttaagctcaaaccttgatcaaacctcataaccagcctctaacttaacttaatctagcatataacctcaaaatcacctctgaaaataggaacaacaacaatttaaacttacagtatcctaactccacaaattatgcatagaacctagctttgaacttatgaaaacaaagagaagggagctttgatatttaccttggattgaattactatgatcttgctagaataccctgaattgagctgaaaaaaccctaacttgctgctggtatcttgagagatctagagagagagagttgaagaaagagagagagtgttttgtgttttatttctaattttggttaaatgaaataattaatatttatttaatatcaaacctatagaagaaatcagattaatctaacttaatccattcaactaaaggataaaataaattatatggtaaaagaccattttgcccttgtttgcaccaaaaagcatccttgctaccaaggggtatttcggtcaaacctaatacctcgaacattcccgacattctaaatgtctatctaatttgccgtgctattactaaaatactaaatcataagaaaatgtgacgctatcggccaaacattgcgttccactgttaccgggttaaaatgcgaaaaacatgaaattttatatgtaacataaataacacagttagaatttaaatatatctccataaattcataaatcataactaaaagtctaagtctataccaaaccttaattatctgctaattctcatattaaaattaaacgttctttacacatatgctaaaagttgtattaaatttgacccaaaatatagtgttgtgccaaatttagttcacaataaatattacttttttttatttatttacgataatatcactaattattataattaatttgttaatttttgtagtctaaattagagtagaaaaccagaaacattttttataaaaataatttaaggtaaaactaacatatttaaataaattaaaggaacgttttttgtaatatgtattttgtatttaatttacaataatagtattattaatattactaacgtgccataccagctaaatctaacgtatctaatgtgacctcaagttcatttaataaatcttgaattttcaatttttgttgtgtaaggattacctccaaaatttatttgtatacatcttagtaattaattagttatttttatgttatattatggtaacttattatttaaaatatatttggataaactaaaaaaatttatttttaaaacatatgagtgtcaatataatataagtagctactatttttatataccaattatcttatatatgttttttttattcttttaaaatacatttattttcctttttgtacatttccaaactacttaaaaaacaaattagttatcaatttatcatatggtaaaattctaaaataaatgttaactaagattaaaatatagaacagtaactaatcactatatgattggtatcatgattaacaaaatagtttcttaaattttagaaatagcaaacaaacatatgtttcccacatcttggaatgttcacattgaagagtagatcataatgatatgttttaagctagatcaaggactcatgggcagagcaaatcgactagaacccacgcacgggaagggaaaacatgagatagtgaaggtacatgttgccactatcaaggtgatcaagaaagcgtaagtaattctcagagttatcaatctgagagttattctgcaactaggtcaattagcaattatgaccagagaaatgaaaggtgatgcgaccttgatctatgcaaacattttaattatagacaacccgcgacttgcatgagcacttgaatcgtaacgtttcggatctccaagatcgattgaatcagaatgcaggttgccagcaacaagtcgagcaacaacccatgaatccgattcaattaagagtaatacatctagaagacaagttcaggtgatactaagatggagaatatgggaaattattaggatatgattccgttgaagagacaaagtcttttcatcccgatttattaaattatcgattcccttaaggattcaagaacctgcatgtcacccaatatgacaagacaaccgattttgtagcacacctgaacaattttaacacaaaaatgtgagcaagcaatgtttctaacaacttgtgttgcattttatttccaacatcactgacatgagcggagagacattggtttgttaaattcactaaccattcaattacctcttgggaacaactatccaaagatttcaagaaataatttcaggctgcgagggacaggaggctagagacgttctcgctaactaacatcaagtaacagctgagagaatctctaaaagcttagaagagttgatttagtacggaagcaaccaaagtgagaaatttaaatcatagtattcagttgaacgattgatttataaaccatgggaggagaactatggcatgatctttagggttgccctgtaaaaaacattaatgaatttaatcgaaaagtgttaatctttgtgtgaaaggaagaggcgcaaaatgagatgaaaatgcttaaattaggctcgggagataaaccaaacactagtactggaacaatgactattgtaacaacaaaagtaggatatttgaaccataataggtcaaacagaaagaggaaagatgagtcgaaagattcgtcaatggacaagaaaaagtagaagaagtatgagaggtatgttctaatatactcgatatataaggaactaaacaaaactcgtgagaatatttatctgacaaatgaaaatcaggtcgcgtttttaagacccaaacctatgagacatggtaggaataagcaagatcctaacaaatattgtcatttccatcgagacataggacataccactgaggaatgtcgccaattaaaagatgaaattgaaggactcatttcccatgagtatctcaggcaatatgtaagaaattgagggaatgaacaaaatctacccagaaacaaaaagaacaaccaagaagtataaccttccccaattgagtgtaagaacatctgggttatttttggagggtcgcatctcgcaggaaacagtaatagcgcccagaagagatatataaacctagtaaaaaatcaagagtcaatctttgcacaagaacccctaaagcgagcaaagcctaagaaaccacctattattttcactgatgaagacgccttacatgttcggttcccacattcagaccccctagttattacaattttgctcacaaataagagaataaagagagtcctcattgataacgagagttctattaatattctttataaagaaaaattgaatagtatgggtctagaagaggccaatttaagatcatgcatggtgaacttgtgtagattcacgggcgatagtgttgcaagcctaggcactattgaactcccaatgactatgggagagctgccactatcatcaacctaaatgcaagagttttttagagttgataagtcttcagtatagaacatactcataggttgccctacattaacaagattgagggaagtaagctcgattaatcacctgtctttgaaattcccaagtcattatggagtaaggatagtgagaggtgatcaactattggctagtaagtgctataacgttgagttacagaatcaaaggttgaaccaccaattgatggttattttgacaaaagaaagtgagaaaaatgagatgggtgaattggatcctagcatccacgatgaatacaaaaaatttaagccaatcgaagagttggaggaggtgaatttagacccaaatgatccaaccaaatgtgttaacatatgaaaagatttgggggaagaactaaaacaacaattaattacatttttataggcaaaccaagatcagtttacttagagccattcagatatgggcaggattaacccaaatgtaatatgcctccatctcaatattggttcctcctaccccttgaagtgtcagaagcgatgtcctttagaccttgactgacaaaatactttaaaaggagaggttaacaagttgtttaccaacaactttataagagaagcattctatccctcgtggattttaatcttattcttgtttcaaaaccaaatgggacatgcagaacctacatagacttctatgacttaaacaaacctgcatagacttctctaactgttttccattaccatagattaaccagttggttgatgcgacagctgggcacgagctgatgacctttatggatgcatactctagataaaagaagatttaaatacatattccagatcaagaatatacaagtctcattacaaacatggggctctattgttgcaaggtcatgtcatccagactaaaaaatccaagagcaacatatcaatgacttgtgaatggtatgtttgaaaactagataggtcataatattgaagtgtatgtggataacacattggtaaaatctgttaaaagggaggaccatgtagaagacctcgtagaatgttttgcaatattaagaaaatataatatgaagcttaataaacaaaaatgttcgtttgggggtgtccttaggaaaattcgttagttttattgtgaatgcaagatgaattgaggaaagccacgagaaaataaagacagtgctcaaaatgccttctccaaataaaccaaaggaggtttaatccctaattggaagaatggaaacactaagtagattcattttgagatcaattgataaatgtctcccattcattaatattttttgaggcaacaaaaaattcgaatggaatgaggagtgcgagtaggcctatcaagaaattaagaaacatctttctatgccaccagtattggtcaaaccaataactggagaggtgttgtacatctacttatccatctcgaaaaatgccattagtgctgcattagtgcaagaggagggaaaaaactagcaaccaatttattatataagcaaaaggttactgggggcataactgaggtactgtccactctgaaagtcgcacttagcttggtacatccatccaaaaagttacaaccttattttcaagcgcaccccaacaaggttttgacacaccaacctctatgacaagtattatcaaaacttaatgcattaggaagattgataaaatggttgctcaagttggggcagtttgaaatcacttaccatccacaggtcactatcaagggccaggctttggctgacttctttgtggaaggagaaagctcaagagaagactgtagaacaggaatagatcatgatgtgtggaaactatttatggatggggcttcaaatgagaatgtcttggggcatgtgtaataatggtgtcacctaaaaactttaagtttcactatgccttgagatttcaatttgatgcctcaaacaacgaggtagaagacgatgctttattggtaggattatggatcacgaaaacattaaaagtcaagtcagtccaatattttagagatttgtagttggttgtaaatagtattagtcaacaccaagaaaaaggcacaaggattgccaagtgtctagagaaattttgaaaaaacttagaaaattttgattactttaaaattgaacaagtcccaagagaaccaaactctaatgccgatgccttagcaaaattgacatcacaatttaacttagacaaattgaatctagttgtcgtagaggtattaagcgagctaagtatctgtaaaactgaaaaagcaagatgtagaaatgatagatgtcagtcccacatggatgaatctaattgttaagtagttgctaaacagagaacttctagcagacaaaactgaggcacgtaagctcttatatatagtcccaagatacacactggttgatggaaaattctatagaagaggatattccaatcctttgttgtggtgtgtacttcccgcaaaagcctttggtattattagagaaattcaggagggcttttgcagagatcatgcaagatggcaaagttggtccaaaaagatagtctgacagagttattactggccaaccataaataaagacacccatgagtttgtaaaaaagtgtgataagtgtcaaatcttctcgcatatatcaagaatacctcctaatgaactacgaatgatgaccccaccttacccatttgtaatatgggggattgagctaattagagctttaccaatagggcgaggtggtgcaaaataagctgtaatcgcagttgacttcttcaccaaggggactaaagtcaaacttttggtgtcaatcacttgtaaacaagttcttaactttgtgattaagaacatcatttgcaggtttgggactcccataaaaaagtgtctgaaaaaaaaaactcaatttaatggagatttatttattgagttctacgaaagaaataaaattattaagagcttctcgttagtatctaggccacatgctaatggtcaagttgaggctatcaatactacactttatctggatatcaaggtgttgagattatttgaaatgtacttttagttttatattagtgcaagtgggagtttattgcattttgtgccctaaataaaactcatttcaataaatcaaatttactaattaataaaagatcagaaattattttacattgcatggttcacatgatttattttatgattatatgcttaatgtataaattctattaagttccaatcatatatatatattcatgattatagtgtcgtcaacatgttaggttttatgccctaaataaaactccatttcaatgtaatctattttattcaacatcaataaagaaacagaagtatttttcattcatttgtgtatgttttggttcactttatcaattgcttgtctatttgatttataaattcatcttaaacccttttcacatacttgatcatgtttattgtgctgtcatcacattggaaagtaaacatgactatgtgaataaagtttcctagatttatcagacacagggttttactgatatgataatctacaacaagagtttacttgtatttggagaaatactatgttctttccagaacattggttaaagtaaagctcaggttggatgcatggagtatgcatcggaagggaccgatattgaactttgacttagatttaattaaacttaccgtaaaatctattcaagtcaatatcgccaagttgatcctagatcaaatgatcttaatcctgttatgattaggctcaatctcaagaggctattcgtgttctttgatttgttagttaagcctacttttaggtcagggtgatacgtacattttgggaacacggtagtgcaat

SEQ ID NO: 303789 - DNA, 2254 bp, Cannabis indica
atctactattaaataattaattaattgtgtgctattttatattattattataaagacaacattaatctaacctttttttgtttgtcttttgacaaagaacacttaaccaactttttacttttttcattacttttatttagttttttgtgggtgaatattactttttcgtactttaaattttttattctaaaatttaaaaccagtggatcattttattgtacttcataaactaactttgttaattaattaatcaattatcaatcaatcaaatcaaattcataactaaaaatatacaaattttacgaagaaatgaaatgactacaaattttaatttattttattaatatcatagaaaatttgataaaaattattagaaagaattctctactttttggccccaataatcgatgtacacgtgagcctttgaaagtcaactcttcaatacatcagtcaataatatagtgacacgtggatacacggattgcgacaaattatattgttagggaaatgactcagaaattcatatccataatatttttaaaacaaaaaagccgacgaccaagacgagagacgtgaaattaatatttaacatttaaatcattttatttaacattaaatcattacattagcattagaaaaaaacacaaacaaaatcattacattcttttttcttacaaggagtgctaccaacacatgctaaaacatattttttttttttaaatttttttacgagggtattcgttagattcatcgtaaatttttaaatttttttgaataatttacagtgtcaaaaatagatatgtaaaatttttgaacattgagtagtaaattagaataccagaaattctatttctgtaaactatttaaaattttttaaaaatttataaaaataatattataactataacaaacatcattatacaaaaaaaaattcaaacatgtaatttcgagcgagctttagcattactcctcttttctgatttgaacaataaaataaaatgggacacattactatatatatagtacgtaacgcaagattcttctcctttacatttttttaaatttgggtcccttttatatgaattttatgattaagtttctcaactttacccttcattaaagttttgcctataaatacatatagtttttggttattttggatccatattgccaacctatccaaaaacccttcatctcatccttttctttcaaaaatataaaatattgtatattatttgtctctagaagacgagaaattttgggtatacaaaatctaatattagctcattgtagctacttattaaggtttatctgatctgtttttctcaacctcattctaaaagggtattccaagattaggatttttttctatatatatccatacacaacaagaaaaaatttcatacgcaaggagagatttaataattaactctgaacttttgttatattttctgggttcaatttttttttggggtgtgagaaataatagtacaaatacatcaataatttggatcgagtagtgtttttgaattgggttttctggttgattcaaaaaggatcttaatttttagaaacagattatacatatatatatataaaatttatataaataattaagatcatgacttgtttggtttctcggactggaagggagttacagaggtataataatatgggccgccgtcaagttgtagggtaagtctttttcatcatcatcatcttctttattattattattgaaaaattaattatacaatccttaaaacttaaaagtctttcctgtattttaatctatttcggtatttaaaaaaaatagtttaatttttttttcatcttcctttacgttatagttattttggatatattgtttaaacttctttttcggtatgtcaatattttttataaatttttcaaatttttacggaatgtagacgactataaaaaaaattaaagtaaaatattctttcaaatgctaaaatatagtgtattggtggacttctttaagagtgcatttagaaatatcattattatttattaaaagaaaaattgtagttttttgtatttgaaaatggagtgtgtttttatagatctatggaaaagtcatagttaatgcatacatgaaaagtcatacttaatgtgttttttgattgaggaagtaaataattaatatatgagaaatactaaataaaaaataatcggaattaatatttgtaatatgttgtttactaaaattttttggaaatggaatggtagt

SEQ ID NO: 303790 - DNA, 1879 bp, Cannabis indica
attaattttttttaatgcaattttttttattgggggccactccattgtgagtgtgtccgtcactagttaagatatccacaacttagcagcttgatggtttaagttttaaattttggtacctattttctgaagtttgttaattttttattaactagcttcacatatggatcaacattttttcaaaacactgcttctcccactcttagggtaaatagtagtaaaagtatttgttttaagcttgtaagtgtcataaatctaataatttttttagtgacataagtactcaatgttaataaaaattagaattttcgttgaatttcgttagcacaattttcattagtttctcaaacagaacacatgcaaggcccagattctaaatcattggatctaaatagaaacatgtagtatcagttacttttaaattttattttaataaattgaaaacggagtttgtactgacaaaattaaacaaaatttacattttactaacattaaatactatggttgtgccactaaaaaaattattgagtttacatcgattacaaactcaaaattttaagtatttatcatgcaattattccgacacttttacaaagattaaaagtttattacaaggatggtaaaaaaatttgaacaccaaatcattttatctaattatgatggtacaaaatattctatcaaaattataaatacagatattattaaaaattaaaataacactaacaatattgaataaaatgtctaggtctatgaatatccgaaaataaaaaagtaaagtgatggttttgattaaagatgagctagcgaaaatgagtgatgtcaattcttgtcttggatggccttttcacaatcattacagagcaacgagcatgattggcgcaatagtcgcttacgcttcccagaacagtcctgcattgcattcatgcatacatttaaaaattaattacttgcatttttaaaagagaaatgctaaaaggtaccagtagtgccaagtactctcttacgtgtcaatatcgctattggtttaactaagtatcgggtcccatatagtttaatataatagtttttaggaagtatcacaagccaatcacaaggtgacacgtcttaagggtactaagcaaaactggtgcctagtagcaagggtctttctaaaaaactaatttataggctaataatcaagtgtttgagtagtactacctctttactacaccataattaggacttcccacaactaaaatggatgcgtggtgtctctctacagcttcacacattactttttttggattaccttcaactacctctatctccacatcttctatctgcaaaaaaaaaaatattgtaaattataatttcacgatataatgataatttttttttaaaaaaaaaatcccaaaagaagtttttctaaataatgaggggagaagggtgagatatttgaagaataaatggtattataataatatgtaaaagaagaagctaaatagagcctttttggagttttattttgaagatatatatactactcatttaattatcagaaataaaaatatgtatagagtttattgaagcatttactacttactagtgatcattaagccattaaaatgtaaaactacatgtcaaaaatgtaataaagaagtaaagaaatgaaacaattgcatactgatttattcagacacatttgcttaatttgatcaatacttcttgaagcttttctcttaaactctgactccattattgttataaaatttccagcacctgcaataagatttaaacattaattgataagaaactacaccacaaaattgaaaaataaaccttctatatgaattttattctacaatttttccttggatatccaacccaacttttttttttt

SEQ ID NO: 303791 - DNA, 3993 bp, Cannabis indica
ctaatttgtttatgtccatatcattaccaaaaaaaacacgaaaaaaaaaaaaaattattgatggggagattgttagcattttacttagatacaacacaatagaagaaccatttttcctctccttattaataaagaaaattaacgtaacaaaggcacttagcaaattttactcgttgggtttgaaatctaggcaaattcctctccaagcttcacacttctctgaatctgtacacgactctcctttttttagtttgccgccggctctgtcggtccttgcttccgccttgtctctctcccgttggcctcaggttattttgctgctgagtacttgccatttcttggtctctcttactctatccctcttaggttggttagcagaaaatactatttgtttagttcttcatgctatattttgagttgaacgatttttgtagtaccactgcccagcaagtgcttgtcaaaatgtgttatttaggttttcactatattttcttaccaaattgtcgttgccaccaaatatttgaatatttaagatgttttagtatcttattttgcgagaatgtgaaaaattatttgcttaatcgatttattcttataatgtttgttgtgattaggatggtgctgtacaccctgtgatacatattttcgtaaaaatgttgttttcaaggctttctagaagagctcatctcttgccttatcttaaaagcttacaagacaagactcctgcattcaggtaattgtattgtatacttaagtttaaattctttctttcaacatacttttgagctatgcttatatttttgaattgatcccttaccaaaaaatatcttttcacaatagaggaaaattttggtaatgctctagtttgtaaattcaataacaattttttttcttttcttgattcaggtatttgaatgataacttagtgtgttcgagttctaatttcatccgaggtaataatggatatcagaggcattttggttatgatatatggagatcaaagttaactagtgaatttagtacaagttcatccgataagtattgtcagtttgcaccattctctactaaatacactgggagacctctctgtttgttccgaattcagcgtcactatgcttctattgtatctaaagaacagagatcaaagaagatgctttattatcttactgcattagtctttgcaatggttggatgtagctatgctgctgttcctctgtacaggagattttgtcaagctacaggttatgggggcactgtccagcgtcgtgaggtctgtcttagtctttctatgttaacgattatctgtgtatgtatttataatataagcatttgtagtggactcacattctatggacctattgtcttactttctaatagtgccaatctcaaatagaaagagtatggtcgtagatattggcaggctgtgaattttcattacgaatgcagtgtttggaaaattgttttaatctttaattcagcaataagtataactaatttaccagtgcttttgcgctgtgtgtagtgtaatagtcaatagtaactgctttgaataaaaattcccctttcccctactcttcccgcttgtgctcatttctttccacctgacatttcattatttttttcaaaagggccctagggaagtaatgtttaatgatgaaagtaggaaatatataagtatcacagatgtattagttagcatgcttttttggatagaatgttagaattgagtatctgaagacatttctcttaccgttcaagtcataacaacatataagcaaacttctttagttcctaacaatgctgaggaaaggttaatagaaaacgacgttaggagtatggacagcttcggaaacctctttcactcatttatttttcttattatacaaagaaattctgtataaatactcaaagaagagaaggtcaaagtgtagaatcaaggaatctcatcctcatataggaactgatttaaactttcttcctggacttgtcaatttaacaacacattatcacctttaaatttttcctttttgtagagtgttgaagaaaaaatttctcggcatgctaaagatggaacagtcactacaaggtatggcaataatattttttatatttttgttcactttttgctgtctacttttcaggacttcctccgtgctaatctattttgtatattaatcttttatgaagcatatacatcgttatctaaagctagaatgttgaactccagttttctagggtcgctttttcttcattatatatgaaaaggcattttttataagatgtagggatgggatgggtgagaatgtgtagtgcaccccatgttcggtgcaatttttaagttgggaatgtgtaatttctccgtgggttccacacagttttagtgggtagtattaaccactttgaaaggtttgagttttagattaccccctatcctatgcccaaccacaaattcaaaggcaactctaatcttataaaacaaatgttccctaaaaattttactgatctgcaaactcttttaagagaatgcaaagtagacaaactaatccggagcattgaacaatgtaatgaagacaataaacaaagaacagggataattatcataccattaggagtcaagatccaaagtgtaatcctgtgctcatcttgatttaaaaaaattgatacatcattgagtctattatcaaaattcctgtaatatattgtatatatttatatttttgtgtcttttttctaaaagatgaagccaatacagcacccttccttgatactttgtgtttttctcattttctcaaaaacgtttcagtgatcaagcatgcatctcatctgtgttttgggaggtgttttcatgttattcctttatgagttgatataaattacataagattattataatttcaataaaataggaagtgaaactaacgtttttatttatttatttattattttgaaaaagtgacaaaggtcccgtgtccatgagtgacctgctcccaaatttaagaaccctcacttgtggtggatgtttgtaatatgatgagttgattttactaaagcatgatgtatttaatatttatatcttatctgagctatgcattggtagaagaacctgatctgagttttgcactaaccacactgcatatccacctttaagactcaacagtgcgcttttcctatataatactgtgttcatgttctagttacacttcgtcttggttgatacatccgtgctgtacagaccactgattgtgggaattaacttgattaagggttcagaaaaagttattgtactctgtactgtgaactaattcatctagatcttgtaagaaccttcaaattattgtcttgcagggagatagtggtgcagtttaatgctgatgtggctgatggaatgcaatggaaattcattcctacacaaagagaggttctttcttttgctttttatattttttattatttaatgtactacaactattttgaacatcacttggtcagattgttcaagtgggtgctttcctccaatgttctgttcttttttgatacaggtgagggtcaagcctggagaaagtgcccttgctttttacactgctgaaaatcgaagttcaactccaataactggtgtctctacttacaatgttacacctatgaaggtactgataaaaattgttttattgaatgtaaatgactctgggatgaatggaatttctatgtcttaattcatgaatatttgattttcttttcctcgacatgtgacctatgtcaacaagaatattctattttcttttcttctaaactgtcaacttcactttatcttaaacttcaagagatagtgaataaaaaagtgcgtgataaacttttcctagattagaaagagtaacaataataacacacaagaatactgaaatcccacaagaaattatttattgaatcttcaagatttacacaatcaacctcttcgagaggctttctctcatatttctaacctttcaagagggctag

SEQ ID NO: 303792 - DNA, 1086 bp, Cannabis indica
taaatgaagatccaagttaatcacctaagacaatgaaaaacttctcttgttgtttattggtaattcataaggctgcaagcctgcatatgcgttttttcttctttcaaaatttacaagtctcatcttgcttgaaagttgttgaggtatgtatgtcgttcctttctacgaatttcgaagcctctcaagtatagcaaattggtgaactattatttggtttttaccttggatagagacattgtatattaatcatattagctttaatggcatattttgtttaactcaatatactactgtgtactgattttattaagtttgcttatggctacagtattagtttttctcaacatagtatacttcaaattagaataaaatatggtggatacttttagtttcaagaaaataaaattttactgtacaaaaaattgataaaatagtgaatggttaatgagaacaaatctggtatattacatgttgtgacaatgtctccacataaggtgaagcccaaaagattaaatatttatgtaatcagcaacttttagatgaaccttttgttattatgtgttactggctttcttcatcatcaataaatgtatattaatctttttttaacattttcaagtatgtatttatatatatatatatatttagttcaagtaaggatctttaaaattgaagattgaaattcgtggtgaaacaatactccagtctaacatggcacactaaaaaattgacataaactgactggtctgcatgcattctcagtttatagtcaggtggtatggtttgatacaccctttaatatatggtgtatgaggaactgtttctagttatttttaacttattatttagacacaggattatgatcaacccgaacagattttatacatatgcttcaattcatatcattatcaagctggctctcaccctagctagctttttatttatttatttattattaattttttttttgtgaaaaaccgaaaactatatagttaatgattttttttaatgattttatgattttcttaatgattttttttttctatagttaatatgcttttttttttttttctttttaaactaaaa

SEQ ID NO: 303793 - DNA, 2254 bp, Cannabis indica
ccataccatgaacataaacacccataatttccatctagtacaaaaaagcagagatgctggataagaaagagcacgagcactcgaagaggaagtagaaaagattcaagctaacaagttcatcatagaagtattctatcctatttgcgtgtccaacctagtgctagttccaaagcccaattgcaaatggtgagtttgtatagacttcactgacctcaacaaggggtgcccaaggaatgcttcctaattctaaggatcgaccaactagtagatgttagacatgagatgttaagcttcatggatgaatactgcgggtacaatcagatcaaaatgcatccattagcacaacagcacataagcttccaaatggatgttggtttgtactgctacatagttatgtcatttggtttaaaatataccagagcaatttaccaacatttggtcaaccaaatgttcaaggaccaaacataggatggatagatatacatagatgacatactcgtcaaatctaaaagggctgggggcatatagaggacctagatgagtgtttcaagatacttcagaagtacaacatgaagctcaaccctctcaagtgttcatttagggtaggctctggtaagttcttaggctacattgtcaatgcctggggaattgaagccaacccagaaaagatacaagcccttttagatatgaagtcaccaataaggatcaaagaagtagaaatcttgattggtcagatagcggccctcaacaggtttgtgtcaaatagccaaatgagtgtgttcctttcttaaatatccttccaggaaacaagaaatttgaatggaccgaggagtgtgatgaagattttaaagagctaaagaaaagacttgcacaaccttccatcttataaaacctttagatgaagaagaattaggaatatacctagcaataaccaaattcgctgtaaagactgctaaattttaatacaatgaattattagatatttaggttctatttataaaattaaattatcaaccatgatttatgaatttattgagatttatttggattcaaaatgtgctaaatatgttatgtaagaaatttcttgttttttgtacttgtgctcagtagtagtaaaatgcgacgttgggccattagagagtcacgttttcatatgattaagaattgtattagtagtagggcaacatggttagacattgaagtgtcgggatatagtcagggtttagaaatgaccaaattacccttagatgtcattaaattgttggtgtatgttaaggggcatattagtctttttaatatgggacttttgtcttttgtggacattaatattcagattttataaaacaaaatttgataaattgatattaattatacacaaccttagaaaaacctaaaactctctttacaactctctctctttcgaatcaccaagaaccaacaagaagggaaggttttttagctgcaatccaagggattttagcaagagttaggtgtttcaatctaatgtataccctctagcacatctattctttgttttttaagttctagtttgagttgttgcattaaatttgggtattagggtgttatagtgttaattgatgcttgaactcgtgttctgaagttagattgaggctatttagttaaattgtgttagaattgttagttgtggtgatgcttgagcaaggttagaggttaagaactcaaacttcgctctctaatagtgtttttgatttctgaaataaatgttatgttgtattgcttgaattgagtctactatggtatgtatagatattctagaggttattagcaaatttggggttgatttgaggtgttgggagtggttttggggttttctacactgaatttattgattggtttagggagactagtaggaaccggaattctggttggtccctaggaaaccccactgaagcggaattctagttggggaactggtctactggttggggcaattttgtgaaccctagttttttccttttttgcaatgtttagggtcttgccatgttatccatcgatagaaaaagttccaattttgattataattccctgaataatcatgttagcgtgtctctcattagattttcaaatattatgatttaaggccctgtaaagcgtcgaactgttgttccactcaggctgatcggcacacctcaacacagaaacaaggtaatattactagagatggaaatttataccgcaaggatgggtaaccgtggggacccgcctctaatgg

SEQ ID NO: 303794 - DNA, 3153 bp, Cannabis indica
atacgttcttggtacttgttttcagactacgggctgatggtctacagcatgtcaagaaacagatactgtgagagaattggtagagagcacaaaagcaatcatggtaagcttatttttactaattgatcttgagaggagagcccatattctttgatgtttttcgttcgtttactcctcatctgatggaatctttttcctttgcattactattttattgcttagtgatatacgttgtcgacctgagacgagccgattattatcaaaaatgtcatgatcccgattgcagaggtgatgggagattatatattgtctcgttttttaagctttctgtcttgtaaattatgctataagtagtaactttatttctcatctcattgtttgaacttggaaccaggttatcgttcacccttgcgtccagttccattggatattatacctgatactttggaccagaaaggatctgaagtttatgaactaggacagcagaatgataaaagcatggcccacaattccatttccaccccagattcatggtggcttgaagccatgagactagcagataatgttgaaaaaaggcaggctctatcagacctgagtatgatggttagttttgaccctactctatcaaagtatccgaatgctaaagtcattgctcattttcttataatgtaatttgatcttattacaggaaaacatcaatgacgatgacgatgaagatttcgacaactggtggaattctgtggaaagcactgaactttctcacttactagtttaatttttacccgagctttggctcgatgacactcgctcagtgcctagatagaacagagtgttaggaaactaggaaatagtacaattctagttcagcattctcttttattggaacccaagtagtaagttctttgccactcttgtgactgaaattggggaattaaaatcttctcatgtaaagctacaactcgtgcttattatgccactttgttgtgatcaaggccataactgttgtattggcaatagaggaatgtaaataataaatatccataaaatttaatttaattggttctgttgttaccaaatagcattattataatatatttgtactaataaaagccaatttaataaaataatgactttgaagcgacacttgtcgccatcttaacaaagtctcacattgtcatctcactattatttattccccacaatcacacacacccccaactataatggcttcttccacatccatgtccgccgccgttgcacccccaactctcatcaacagtgaatcactgcggtccctcatctctcatcgaagtctaatcgatcattttcaatcctctctgcccaaagcttcatcatcgctctgtaacccaattcggcaaagccatgacgtttcacccacttcatctctcctcctcatgccatcttggtccacttctccttctctgccttatataggggtcaagcttgtgactttcttcccagataactctgcaataaacttgcccggagtgcatgccagttatgtgctcttcagctccacaaatgggcaacctttggcttccattgacggaaccgaaatgacccttataagaacttcatgtgtttcaggcttagcttcgagaattttggccagagacgatagccgagttttggtgatgatcggtgctggggctatggcaccacatctgattagatcccatcttgtggcaagacccagtttgaagaaagttgtaatctggaaccgtacggtggaaaaggcaagaaaattggctgagaaaatgaaagaaagtgtggaacttgatggggtttgttttgaaagcaataatgggtgtttggatgaattggttgagatgggagatattgtgagctgcgcaacaaactcagaggtgccgcttgtgaagggccagaaactaaaaccaggtgctcatcttgacttggttggctcgttcaaacactccatgaaggagtgtgatgatgaggctataaagagaggaagagtgtttgtggacaatgaggctgctttggttgaggcaggtgagttagtgggtgcttttgagagaggtgtgattgagaaaaaagacattggaggaaacttggtagaacttgtaacaggtgagaaggttgggagaagcaattctgaagagattactgttttcaagtctgttggatcagctgtggtggatatactagcagctcaattggtttatgagacctatatgcagcaacaacacaagtagataatatcatgtattttgttgctatttcttactagacatctttttaatatttgagggtcctgtccctaatctactgccatacatattcagctccgaataacatatcttcttatcatgaagatagttctttttcttgtctttttttctcttttatcttgagacaatgaggaagttcatagagtcagtttctttgacaactgagcacctatttagttagttggtagaatccatgtgtattacttacttgctatgtaaatggttaaagagcaaagtttgaaaaagaatgaattgccatgatctttgattgcatgttacaaatgatacatgagctggaggaccctttataagaaacccaacccaacccaacccaaccctcttgccttgcaaccctttccaccttgaattgcaagtgctaattataattgtactaagataaactcttaaatacaagtactaagtactagtatctaatgtatttttttggaattgtaggaattgagtaaggtgcaaaggaacattaagtaaaaatccaatccaaacatcccagttgggagtggaatggtgaacgtaagggaagatgtggtaagtaatcaatgatttttaataatgtgcttcaaaatataactatactcatttaattgttataaaataatgtagaaaaaggacctcaaggttcaagttcccccataccatcgtgtgtggatcaaatcttggaccaagagaacgaaacttgtcactacttacgacaaggaaattgccgaaaaaatagtaagtatatattagtccttaattgagtactactaatgagttagtatatatgatttatataataattgcttgaatatttgcattaggctccattagaggagcaacttactcagggacaaattcaggtttatggccaaaacgatatcct

SEQ ID NO: 303795 - DNA, 2619 bp, Cannabis indica
gaaaaaataccctaacttttacaaaccctaaacctaaacacacacatacacaactctcaccaatctccaatatctctcattctcaatctatctctccctcactctcaatcttggtctaatctctcattctcaattctatctttgtttttggtttttgagatatgcacactcaaaaaagcatgatgatgacaactaagatgggactcgatagtgatggaaacaacgacaaggacgggacacgactatatcagaactgaggaacgatgacgactatggctttggatttttttttccagaattatttttttcttagattttattttaatttcagaatgacaatgatgaattttttggtttagatctatttttaaatttttttatttgttattaattttctgatcagcaatggaaatgtaaggtggtggtcgtcgtcattgctaatggatctagcctttttgtttttcaattttggtgtgggttggtatgatttggggtagtggtggttgtcgctagataccgatatgggtgtggttcgatatatattgtatttttaatttttttcatgcatgttagctatcatttgagaacctatgataatgctcaactttcgtcaactctcaaccaatgccaaatatcttcttttttacgtcgctagtgtagatgtcagtcttagaaactaatattaaacgtctgtttaaaaacaacacctaaacccctgaattacctatcactgcccctcattggctgttaagctatttttagcctattacctatcaagcctgaatttgactatgttctgtttagattttagaaaaagtgaaagcataaaagttctagatctctctttcagctttccaaaacatcttgaatcatctaattctgagcaatattgaaagagttacgactgaaatattatcagtaagcttgttgcctaaaatttggggtctaatgcctcaacactagaagctagtgtcgaggcccgccccttgaattcgaaaagtggatattttatttttatcttttttatcttttttgggatataaaaaggggtggacctttataatttttatcaagcaattagggagtacgaaaatcggagaaaataagtgacctagaaggcttttcaacagagattttcaacaatttcttctcttctctattttcttcttatgctcttatttaatgtgtgtcgattgtttacaatgaacatgagtagctaaacaattattaaggtgttgatggagattatttgacatctttttatagttttattatgatttgattctttcctcaattttctgtgttctattttattcgttcttaattcttttaattgtctgtcaatcaattaaatgttcataatgtcgatacgaaatttgagaagtaagtgttgattatgctatagtgaaatagggacaaattttgatataggacgagagtaactatatagtttggatagcttttagggtttttatgcttaatgctttttgcatctttaaatttattacgagagtagaaaatttgcatgtaagtgagatttatgtatttaagaagactataaattacttgagtaaacctgctatatttgcatagaaattgatcttaggaattaaattatattatgctatataagattgatacaattgaaatcaataaccctaactctaatcattgtcaatttgcattctaatttacttgttttctgtttttactgcttttagttctaattttctctttaaaaatttattattttattgctaaataaaagtaaaagtttaattttattgtacttaactacaatccctataggttcaacctcagtcttataagtctattacttaattgcgatcccaatcctcacactagatttaattagaaaatttgtgcacaattcctagtacggccactagtgatcaacccttaaataatctagttaaatttctaacaaacgatacactagctagcatatattatatatgttgtagcccataaagtcaagattagctactagctagcttactggtgtcggtggactggccctaataagcaaaacaagtaaaaacatggagcttgttgctgctcacaacagtttgaacacaagtaactaagtactcacaaccagacaattcacacagattctcgagctagtatataaccgctattcactagcatatctcaataaaagagaaagctaagaatgaagctctttggaatgcttaagtttatactgtaaagtttctttgtaagtaaaaataaaagagaaatttttctaggctttctcattttaaaagatggaaatatagtataaaagatttaatttggtttgatagcttgaatataacttgatacttagttgtaaagttggcaatcaaattcttcttacttactaaaaaaaaataacttagaacatcgccactaagagtagctcaatgatgagggatgggtggaataaagggggagtgcaagggttcgaataaaaaatccctggattatgggaaaaacgtaatttggcagattacaaatccgtccaatataattagttggagtctaaataaatgctatataaatttattttttaattattattggacgtttagattaaaatctaatagtttaata

SEQ ID NO: 303796 - DNA, 4205 bp, Cannabis indica
taacagcaggacgacaaatctttgttccaggtgcagaaaggttgaaatattccttattataattggaatgtcgtatttcatcacaggaatgattgagcgtgggtgcaaaacattggccccaaaataagactgtacagatgaagttcacattaaatagactgtacagatatgctcacattacatatgtcatatatgaataagatgagaacccttgacattgaaaatgatgagtagtaaaattcaccatttcccaagcctcttggtaagataatgtcctcagaatcacagcttcactaactgcagaagaaatgttgttagtcatttatgttatggaatttagccagaatacaattagcagcaataagattctattaatgtaattgcagttggcagcatttgattgagagcaattacaacaaaccttttctagggtctgcactatacacaccatcaacatcggtccaaatggtaacttgacgggctctaaatagagcacccattatagctgcagaaaaatcacttccatctctcttcaatgtagtaggtatattttgaggtgtgctagcaataaaaccagttgcaacaatcgtattgaatggattttttgaataccacttctctagtctttagcctagaattcttcgtaatcgggatcgacctgattagaactagtagggtttacaataagaacttccctcgtgtccatccatccacagtctacaccagcctgcaagaagaaaacataaatatatatatatatatatatgtatatatgtatatacattatattgattgtaaagcaagaatgtatgcattcagaacttgttccttaaatactataaaatcaacaagacctttctaataacatatgacaacatctgagcagaccatagctctccatgtcccacaacaaaatcactaaaagattcagttgcatgaccagctgcaaaaattaagctagtaaattaaaataataaataaaatcctaatgtaagttgaaaaaaaattgaagaagttaaaaatatctgacagatcaaaagtcaattaaagttgtagaaagtgaaagtagtagaatatcatcacaaatcaatgaaaaggaatgaaacagagtgatgaatctgatggtattaccaatatatattgctcgaagcattgcctttaggttattgatgtcatgatgcaatcttgataggaaagtaccaaggtcatccccatcaagtaaatctagtgctgttaatctgtgcttttctaaaacagcctccaatgcagataaataagactcgtcacgtgattgagccttgttgatgagatcatacatcatatctgttactttagacatggctgagacaacaaccaacttactctctgaatcatcagtcaaaactatatttgcaacattcttaattctttctgagtttcccacacaggtgccaccaaacttgtggacagaccaaacaccagctttagaaagcttaactaattcaggggatgtttcaactgacgtgtctgtcattatattaagagaaagaaaagtatgataaagataaatcttttaaacaaaacaatattacttgtattattataagagaaagtaacaaggtgaagtacagaatgaacctgtaactgaggcaaatattttagtttttgatgccacttttctttccaaccgagcaatagaatccaatctgaacattcagaataagttcttcgtcaaatgaaaagtatgagaaaaaaaatagtaattaatgaatataaataaaataatgagccgctcacatcttaattcagcattaaaactaaagcaccaattacaatcaaatgctacaatgaagctcatgctccagtagtaagttgctactgtctctggagctttcaaaccttactcaatagttcacttcagaaaattccgaaacactaactggattagtagtacacgggcataattttgcacattactattactctacttacacaaaaattaagtgtaaaacttaggcaatcgatttttcgaaatttttagttttggcatttgctgcgaagaatttgattctcagacacccacaaaaatatgtggattccattttcagccaactttaaaactccaacatcagaatatttatatgaagaagaattaagctatacttagtttctcttcttgcattaagtggaaatggtagcagcagtacctggcaatagaggagcgatgaggagggagataaaggtttcgagattgggaagaggagcagatcttcttgtgcttgggttcatgaggcaatggttttggagaaagaaaatgagcacggttagagatcgctgaggagaaagacgccatggctgaggctgagctcactccgaaagaagagtttaggtttctcagtgttggtttggcggctctgtgttaaaagtaattcatataatgatatgatgatatgatatttggagaaatgaatgacattccttaattaatttacaaaaattctaaaataaactcctaaaaagttagtccaatgttccgaatttggaaaaaaataaaaaactagtcaacactttttttgtaatgacaaattaggtccagtcacgtctaaaatggttgatgtgttgtctagaatttgtgttgttagtattgtccatattaacaaagatattttgggtgtttaattatccaattctacttcaagtttttttgtttaattgggtataaatatgttatcttgttactgttttgattaatccttttgtatcggagattagagattacatttccttcttgttttgttttttgcgttttcgtaatactagtgaggggatgaagaggggtactatgcatgaattggggcttaacttgtctccctcgaacattaaatacttggagctcccgctttttagacctaatcataaagatgcggatctaacttcatccttgacaacctggtctcgaagctgcatggttggaagctgaagttactctcgaaggctggtcgtgcgacccttatcaaagcgatggatctggctttgccagtctacactatacaaacgaccaaactctcgaaaaaacttgcttccaaaattgacggtatgatcagggatttttggtggggacatgagcaagataatcgtggtttgtgcttgaaggcctgggaccatttatgccttcccaaatcaagaggtggtctcggttttcgtaaatccttggaattgaacctggctttggctaaatggggatgggcccttcttactgatgaacagactctttgttgcaaggtgttacgagctaaatacttgaagagtaattcgtttttagaggccacctataaaaatttcgactcttgattctgaaaaaatgtggtcaagactaaagcaatcctgaaaaaaggggcttgcaaaattatctcgaatggggaagacatgaatgtttggacggatccttgggttgtacatggtaaagagttctatccgagacccgctaattcttgttctgaaagggagattaaggtggcggacctgctcaatcctaatggggactgggacattgttaggcttaaggctatgtttgactctgagactattaccaacatcctaaaagggggtaggcctagcggacaaggatgtgacagatgcatctggacaaaggaagggagcgataaattcactacaaagtctgcttatttggtgcaggcttacgtgagagcccctaattgtgtggttgcgccgacattgtggaataaactttggcactctaaaattttagaaagacataaggttctttggtggagcatactttcgaatgctctaccggtccgtggtctcctggcagggagaatttccattgaatacgatctttgcctattatgtggggaggctgtggaatcgatggaagacctattcctctattgcaattttgcttaccatctctagagatcctccccgtggggggtgttcttgatcccagactctagaggccgtgtttgggactggatgaaatttatttggaacttggagtcgagaggggtaaaatctgacaacctgttcctctatgcctcaatcatcgttgacataatatggaaaacccgtaatgacaaggtacataactctatctcgagtaacattgttgtaaagaccacttagtttaatttggaaattaacagttaattatgtttaattatggaaattatttatagatatttaaataattgtttatactgtta

SEQ ID NO: 303797 - DNA, 2664 bp, Cannabis indica
aggaaaaatacactcttacttctacttttccttcagagaaaaacctgagccttctcttctaaaccctagccgccacctatactctctgcttccctcttgaatttcgaacctcttagtgatagagtagtgcccacacacaacaagttaaaaatttaaatatataaaaataataaactagataaaaatttaaacattccacaataattattattcaattaagcaatcgttaccataacacaacttaaaagtcataaaaattatactaatatactacaaatgcaaatataaaatgtaaataataaaatattattaaaaatataaaataaaatactaaacgtgtccccgtcggggtggagagtgtgatccctgtccctgccccgtttaatattcaggggcaaaaaataatctttgtctctgtcctgttccccatttagacggggaatccccaccccatgattggcgggtccccgtagagcctatcctcatggaggaaatgtgcatcctattacatcttcgatgcccaacaatttttatatttttttaataaaagaaatatattaattggttgcttttttttacgtgagtctcaaatagcaatttattatgttgcttccgttgatgatggtctaatggattttgtttgtttattaactatgtaatataactatccttcgtgcggtggttttaaataattgtttcgtgagttacattagatattttatttttctaattatttattaattatattttatattttttaaattattattaatgaataaaatatttttaaaatctaaagtgataaaatagaaagttaaatataaaatttgaaaatatttattatgaaatcactttgatatttttaatttatatttattatgaaattaaatttatacatcataaatatttttaataatatatattaatgctaattaattgggattctttttcgttctctttgtgttaatttgcaaaaacaaactatttattaaagacacaatatgagaaggttgctttatagtttttatcctttagataaggaatgacactttgtgctaattatttaaaggatatagtaacaacttatttaaataaattgtggtatattttttgaaagttgattttatctaggaggtcttatcgagatttccttcaaactcagatttaatagtccatatatatgttgtagaggtggtttataattttaataaattttcttgatatgatataatgaaagaaacttaaacattatgattttattagaatgggttttttagcattaatattttgttttggtgggtaatcaggttttctttatgtgcatgttattaacttttctaaatccattctatacttctcacctaatacgccaaataaagtcagtggcttgttcgaacaagtattaaacatgcaaaagacagatgtcattgagaaatatttaggattgccaatgcaaggaggaaggaataaaaatgaaatctttagaccaataaaagataaaatttggaatcgcctacaagattatcaagcaaaactattctcgcaaggtgggaaggagattttagtaaaagtagtagtctaagcgatgccaacatatttgatgtcttgttttcaaattccggaagactgaacgaagagattgaaagtttgatagcccggtattggtggggttctgtggatacaggatggagtatccattggagaccttggcataagttttgtcaacttaagagtgatggtggattaggttttcgaaggttcagtcaatataatcaagtcctattggcaaacaagcatggagaattttaactaaatcattttcgttattggctaaagtgtgtaaggcaagatattttagagactcaactattttggaggcaggagagggttattatccatctatgacgtggagagagatcgtgtggggaagagacatgtttattaaaggattaaggcactatattggtaatggtgcttctacgagggtattcaatgattcttggttaccacgaccaccatcttttcttcctagtacaaaagccacttataatgtaatcacaatatcagaacttattgatcctcttggaggttgggacgtttctaaggtgaatagcacattcaatgcactagatgccaaactcatcctatcgatcccattaagtctttttgagcatgaggataattggtgttggcattacacagaacatggtaattattcagtaaaaagtggttacaatctggccatgacaagagatgagggattgccttcctcttctagtgaggtgttctcaatatggtggagaaaattctggggtttaaaaattctacggaaaattcttcattttgcatggcgaggtttccatgagattataccctcgaatggtggcctatttcggcgtaaggttattcctcataacaactgtcctatttttggttatggggcgattcaaattcacatgcaattttctggtgtccctgggctcaaggaatttggactttattagattacccttcccttcacgatgcaaaggaagttttatcttttaagaaagtaataagctatgcttctgagattgtggagaaaaattcatttgaaagattaattattatttcatgggcaatattgacagagagaaataagatgactcatggtgatcctcaaaa

SEQ ID NO: 303798 - DNA, 1670 bp, Cannabis indica
acaatttaaattaatatactacctttcactttttttaatatactattagacataaaaatgatataatattgtgcataataactatatcaaacacttaatttcaaggttataattttaatttcatcatcaaatttttaatagaatggaccttttgttaattttttataaaaagggacatttgttaacttaattgttagattaagagtcattttgcatcttggcccatttaacaacctgccttcattagctaatctatttttttcctcagctacctatctaataaatatcctgtgattatcttattattacaatatttgtttctttacataactatatacatacaactcagaagaataaaatactattcaacttttcgagaatattaatttcataaacttaatatattattactatactcttaaaaatgatagctaagcatgccacttgacaatgaagaaaatagaaatgagcaaatttgactactaagaaatagcactcaaatctatcagaaaccaacaagaaaggaaataaatgaggaaaaacgaattgcatataagaaaaaactcaatgaaatagaggttgctggttacaaaattggttcgataatatcctcgaatagtacaaattacacaataaatataaactaacataactcttagctgtctctgctaaattgatatcctcatttttagataagacaccaataactaataattgttactaaaatatgagtaacatatttgaaattggttaattatgtatactcttatctcttactcaatctttaggtatttataaaaattattagcctaataaataaatccttgtaggatctacttttttgcgacaagaatagagcagtccttttaatggaccccaaagacacatcagtatccttatacactcactcgagatgatataccaaatgaaccaacattatccatgaacgtaatggcttttggtttttggatggtaaagtatccttaaaattgaaagattgtccaactaaactttatgaaatattcacatcttcaacaatagaatctaaacactttagaaagtacgtttgcacttataacaataattttgttttcacctcctttggggctaaaaataataaaactttaagcaaaagaaataaaggaatatacatatttagggtacaaggataggtttatcattattaatgaatttcttccatatgaaagctcaccgtcttttctacagttgtacttctatgatacagagcatgagataaaaaactaaatcaaatatatcatcaaaaatgaatccaataatagttgcacaacttatagaaattataaatatgaattcttattctttattctttcaaagtttaagaactaatcctaatttataaaattacataatccatatacaatccaatgtaggattagatcaaagaatatacaacacttcctttacttcacaagtaggagtagtatggatttatgataactttgttagagaaacaacagatcgtgagattgttgtatatagccattcaagaattagtcataaagtacagtattattatggttgttacaatccattacaatatctattataatttccctttggagaaataggatggcatgagaaaattaatcgagttgataaaaatagaaatcaatcttctcatgatagtg

SEQ ID NO: 303799 - DNA, 3388 bp, Cannabis indica
aaaaataatgccttatgtaattatcacatattttaatgaatacaaataataaccgtattatatatattagcaataacatgtgttatatattttaaatacatactaataataattggtttaaaaataacataataataatataatttacagacactttattttttttaaagaaagattatataattataatattattgttcattattcactttatgtatactatagtctatacatatatttataataggttaatttgaatttttgccccaatttgaatttttgccccctgaactttgacatgtactaaatcatgcctcctgaacttttatttatttatttttatttataggaaaacaagttttattcaaacaaaagaagaactaagtggttgccacaaggggaacaacctcccttaaaacagtcctcttacaacaacgaaaaactctagcataacgggccaaaccatccgccacagagtttttacaccgaggaacaaacccaactgaacacttcttaaactttgaaattaacgctaaacattcataaaacactggataagacccccacataaacggaagctctttgttacccaaggcctttactgctatagcagaatcagattcaattaggattgtctcatacccttcctgcaaagctaactgtaaagcctgaagaatcgcatcaaactcgtcttccaacacggtcatttccacgaaatgctgtagcagcacagttgtagaatcctccccaatcccacattgcagaacccccgtgcccacttccccgtctttgaccgaagcatccactttaaagtggccatcccacttaattggaattaaaagacccttgtccacggagatggaatcatcatgcacctcagtctggtctttactccgcacgtccgaaaattccttagctctcttcaaaatcatgcgagaaatttccattacattcggctttcgacccttacttctcagttcatttctgctaagccaaattatctcgaagagagaagctgcatacatcacgagcatctcatcttgcctattgaaaaaccaaagcataaactcctccaaagaagaacctgtcatactgtcgacctttaaaccccagggactgctaaaccagacacttctagtgaaactacaatctctgaatagatgagtaaccgtctcagcctcttcaccacagaaccaacaaagcctgtccgctccagtcattaaaccccgccattgcagcgagagacatccagacatacatctccatattagcagggcttgcctaggatgaatattcattctccataattctttccaaatctgtttctcaggttgcagccgatccttttgagtccaacagtaggcacttttgacggagaagcgaccatttttacttcctctctaaaaaaggatatcctccctatcctgcataggtctaacccgtagaatagcatttgcaactggttgagagaaacattgattgatgactctttcatcccactcacaagagtttggcttgaacaagtctgccactactgagaaggagtgagtaatagcataggagaagctatcccagaattcttccggactgaatccaggtacccaagggaaagaccaaatgtccgagttgccctttaccaccaatatacccgcacccaaaacaaccacatctcgcccatttaaaatccccttccaaaccattgagtcaccctgtttcgattcaacataccagaaacttaaatttttgcagtatttatcccttagaatacttacccaaggccggtctgaattattcaacaagttccaggcaagtttagacagaacagccaagtttatgtccttgaatcgccgtaatccaaggtcaccattgcgtttcggctgacagatctcactccaactctttggagcaaaatagcgaatcgaatctattgttgagccgccccctttccaccagaatcttgcagtgatgctatccaattcagaacaaacactcagtggaactttcgaagtggccattgtatacgtcggaattccatgcagtaccgaactaatgagagtaagcctgcctgcttgagacaataattttgttttctagccctctaaccgccccagaatttttgccttcaggaaagcaaaatcctctctctttcgggtagaagtaaaaaaaggattgcccaaatatttatcttctctagataaaccacccatgcccaaagtcgaaaagatattgtttttcatagcctgagcaatctttggggagaaaacaattccacgttttgccttatttaccaattgtccagaccacctttcatacttttcaacacaagccttgaacgccattgcctgatccaccttagccttgcaaaaaaagatggcatcatcagcgtaaaaaagatgtgaaatgggcattgcccgcttcccaatcctgagacctgtaatttctcctcgattttcagcttgtaaaatcaacttcgaaagcacttcgctgcaaagaatgaagagatagggagacagaggatctccctatcttaaaccacgggaaggggtgaatagtttcaaaggagccccattcaacaggactgaaaactttatcgtggtgatgcattgcataattaaattgcaaaagtgattgcaaacaccatttgcctccagaactttacggacaaagctccactccaaccgatcgtattccttgttcatgtcagtttttatccccataaatccaccccttcctctctttttttttcatggcatgcaaagcttcagaagctagaaccaaacactccgcaatccaccttccaggcaaaaacacagactgaaacgggcaaactagtttttccaacattgatttcaatctgtcagtaagaattcttgcaataattttataaccgaagttacatagactaataggtctaaattggtcaaacctgtttgggctctcacattttggaattagacaaatgaatgtgtgatttaactgattaacaaacttccccaagatgaaaaaatctttgaccatattgcaaacatctcctcccaccgtgccccaatatttgcgaaagaaaattcccgagaaaccatctgggcccggagccttcaacggatgtaacttgaagacaatatctctaatctcatcatcagaggggcaccgacattgtaaagcccgcttagttaatttggaaattagcagctgtttatgtttaatcaggaaattatttatagctatttaaataatttattattgatttatggaattcagatatgcatgagtatgttatcagtagcttttatatttcgcatttccggtgtccggtattttggaacgcggcgtttggctcagtagaaatcacaacttagtatgttagtattttggggacgggttttagaca

SEQ ID NO: 303800 - DNA, 2695 bp, Cannabis indica
ggcttggaagaataaattgccaaggatgttattgtggcagctaaacagccaaggattgtgaagttatgctcagattgaaagttagatttcgctgttgagggggttgaagatttgattcgaaaagggagcaattagagaagggacgtgtgaaaagaaaccattgattacttgaatgattgggggtcctgaacccagtgagtagaagaggaagcctaatgaaccactagtcacgggtacaaacaagagattttagggtaatcagagtttttgttgaggtgggaacgagcttgggcaatcatattcatatcctgagtgccagcattgtggaaggtgtcatttggggaaatgtcatgccagggcctatttccaatgtggagtaataggccatttgaagagaagttgctcgtagttagaaaggacgaaaaatatcctatgggtcatgcacaggtgtttccttgatctaactagatgcagaggctggtcttttgactgttacagatgagatttctattggtggtgttatgttttctattttgatgaatttcggtgctacacattcgtatatttctagtagagtcattgagaatttgcgtagaccatgtgacgttaagcctagtgggtttgatactttgttacctactgaacaaagggacgatgattaccattcaaaaattaaattcatgacgtcaattaaaattgttgttaggtttcttacttgtcgattgtcttattaaataatgacagagaaatatggattctaagttagggcatcagcttcgcgttattaggcaatgagatatattgatgtggtgttagggcatcgacattgccttattagataatgatatttatggattcccgattagggcatcagagttgtcttattaggcaacaacataattggttactttatgaagtagcagttatggcttgtcgtattatacaagtacttgagtcttactgtttaaccatgttattatcctaatttacatatctgactgttatatttcattgtttacattttttgttgagtctttgtcactcatgggtgctttatggtgcagttaagggcgaagggaaactagattagccatgaggcataaatcttctttggtcaatgtacatatggagttatttgacttgtgtgttcaagttgtcaggattttttttgggctgtactttatgtttattttgacttacttttgtatagccctctttgttaaatttttgtaacaagggatccatgaaaaaaaatttagcaatgccatcatcttcattgctatggttttacttttggtgaatttattattattatcatggattttattaaatcattaatttactattacaaaattatgtttccaaagcacacacattgtgtccctagggattagggctttatagtcctacttattttctaaaatcgatgattcggaaacttgctcccataactgaagtttgcatatttgtaggatactcagttgagactccaggtgcctatttctatagttattaagaaaaaaaaagtatttgtatcgataatgctacctttcttgaacatgactatatgaaaattcataaaccacacagtcatgtggttatcgaggaaataagaaataagcatatttctataccagtgattttagcacaattagtttaatgaacgatagcggttaccataattcttgaaaacgaaaccctgatacatcattgtagtgggaggatttttagaaaacctatccactatgaacatgaaacacgtgttcttgtctctgacagagataaggacgatttgttgacttatagagaagcaatggaagaccctaactcagacaaatggacaatgccatggattccatgcgcataaaaaaagtccaaaaataagaaacttcacctgaggatattacacccataaaggtagagacctttaaagctaggcatagcgagaaggcaatgattgtgacaaaaccttctctcttgtggcaatgcttaaatccattcacattcttcttttcatagttaccacttatgatttcagatatggcaaatggacgtcaaggctacttttctaaatggcaatcttgatgatatcatttataaggaacaactagaggggtatgtgttactaggagaagatcaaaaggtgtgcaagttacttaaatccatttatgggttgaagcaagcctctaaatctttgaatatcacctcaaataagggtattgaaagtattgctatgaacaaaatgtagacaaagcctgtttataaaaatacattagaggtaatgtattaatattccttgttctttatgttgaggacattctacttattggaaacaatgtacaaaggttatcaaatgtaaagaagaggttagccaataaattccaaatgaaggatttgggagaagcaagctatgttcacgagatcaaaatctacagacatagataagaacattagcaccttctcaagaaaattataatgataaggttctcaaaagattctcaatgaagaaatccaagaaaggacaattaccatcacagcatgcaattactctgtagagaccgcttagtttaaatttagaaattagcagataattagggtttaattatggaaattatttattgatatttaaataattatttatgttgctatatttgaattcagaatgcattttatatgtcatgtagtgaaatttcat

SEQ ID NO: 303801 - DNA, 2182 bp, Cannabis indica
ttttgcttaatttttttttttttttgagtctagagcttggccccttgtgcccttgagtcggtcttaaaagaataggtataaaactcctataactgacatatgatctcaaaattatctatgcttgcggaaaaaatgtgtaccatgtgatttcatattttgttaataattaaaaaaaaacagatataatttgtttgtaggcctaactagctagaaaatattatcataccccaccaaaaaaaataaaaaaactcataattatatgtcataataaatgaatgctatctacccaaaacacacactacccttacattaatttatttcaccaaaaaaaaaaaagaaagaagagctagctagcttgaacttgagccgattaattaagaggatgaataatattagccgatatatggagccatatatatatatatatatacatatacaaattagaaagataaaaataccgttgaagcgtttagattcaactgcttaaaagttagttgagtctctcacattccactcagaatatctaacagtcaacccctaccagccctttaaaacccaaaatcactcttctctctctttctttctttcatattattcataatgacaaagaaatacaaaccctttgagatgagtgttcattttgtttttatactctttaaacaaccaaaccccatttccccatctttctctctctctttctctatctcttcagttcatatatattcatataaataaaaaacaaacccaaacacatatataactctctctcgtgaccttaaaacataatatattactaccaaacacacccttgccatgggcgtggacatgtcgaataataatcccaattcacgaaccaaagattactttgcttctcctgctctttctctcagccttgtaatatataattttaattaacttcatctctctcacatatatatatatcctcattttcatacgtatatatttatggtttttttttgttgttgtgaattattaggctgggatttttcgtgatgcgggggcggcggcggcggcggcggccaacatagaggtagaagaaggagaggaaggcagcggtggcggcggcggaaggaaagaggacacggtggagataagtagtgagacttcaggtgcagctaggtcaagatcagatgatgagtttgatggtgaaggtgatgaagacgatggagatggagacaagactaagaaaaagaagagaaagaagtatcataggcacactgctgagcaaattagagaaatggaagcgtatgtattttcttttctattcttttccttctcaattttttttttatgattattattatagaaaatataataattaagaagattaattatttaaaatattagcaattgggtctttagtaatattataggtgggggcagatttaatattattgggtaacttttcgaatttcataaggtgcattgttttaggtggatatgattttttggaagcacatgaattattattattattttcttaatatggtcggttaaaattattgctttattacaatttacaaaagcaaaaccttttggaaaaaaattgtacggtatataatatatacacacacatactctacagtatattattatacacatatgaattagtgataacttcatcaaaccaatgatttagtccacataaatgtatttcttttctttattaaagagaagctcttagttaatatttatcgataaaattaaaagaagaatttttttttaaaaaaaattgtgttatgttaacatcaatgtatatgtcagcaaaatttgtcggtgactagttatgaattttggcttcttctacttgatatatagttgtaaggcatcccaattatatatatatatacatatagaatgatttaattcagtttaatttaatttaattttggtttcataataaatgaatttataataatgttacagtgtttgtacactttgaattgaatttatatagactattcaaggaatctcctcatcctgatgagaagcaaagacaacaattaagcaagcaattgggtcttgctccaagacaagttaaattttggttccaaaatcgtcgtacccaaatcaaggtgtgtatatatatatgtatgtatatatatatatttatatcatatcatattattggtatttatttatttatttattaattttgggt

SEQ ID NO: 303802 - DNA, 1869 bp, Cannabis indica
tcattctaacttttcaataaggataattagaatcactgagaaaaagtgcgatagaaatcgaacttccttttgcaaaaaatgacattttacacaaaagcacgcgaaaccattgaaaggaccacactaagagtttagtgtccatctctgtacaaaactttcctaaagaaaatcctgattcgcagcatcagagatagattccgtcgcaacaaatcagaccagaaaagaaaacttgccaaaaatgagtccgatcttgtattgggtcttgatactttccataaatagtatgtatgatctgatcttatcaagacacaatcgaacttattaaggaaaataataatagtcaaagtttcctttaacaaccaactttctataagagaatttcttatctgacaagaagtttccatacaagaaaaagtccgttgaaaaaaaaaaaatctttcctaagatagaaaagagcaataaaatcgaataataaaggtgataaaatcggattgatagcacaaagaaatctcaccataaataaaaaatattttggcatctaaatttctaaataaggattttacaagattctttaagaatttggcgggtgttgtcccagtttttcttctcagaatcaaacccctcaaccttgcctttcagttttttttattttctatcttcaacaagctcgcctttaaattagctatagttatgggagagtttggtgtctcaaggtttttctttaatctagcacaggtcttgattaatttctctttttctttatccattggaggggcaaatttcatagcatgagcacatcttggggcagtctaaataaatcacaataagcaaaaaaaataagtcgtacaattcattgaataaaaaaataataataaaattaacgaatatataaaaatatatacaaaatgtatttttttcatatgtttagataaagttcgtaccttgattttaaaaatagcagcatcctttaaaatggatacttgcccttttgaaatataaaaattatcatcaagtttacgaacttcttcaagcaatgatttgaaataattctcagcagatttctcgaaaggaaaattcttctaaatacggaatgtcgagatctcatcccatttagtaggtgatttattaggatgagttgtcacttgtgggataccttgatccccgccaaactgagtcgagggtcgagccacaaaaggcaataacacgagttgaggtatctcagaagaaggacgaatatgttgggaagaggcagggattgaattcaaaggtacacttagattagtagcatagataaccgtgtctttggatgaagacccgggcatttgggaagtaggaggcgcaggaacaaagccactaccttcacctacttccaaagcaagggtggcatcttgagaaatattcactaaacaagactcaccaagagaatcttcagtagaaagattaaattaagaggcttgccccgtctcaaaaggttcattagcatcaacggtagatttgacaactttgcttcttgtattttcctttgcctctttttggcagtttctccataagcctgtttaggcagtcgacattttgggcttcaatttcttccatggatagttcaaaaagtttcataataatagttacaataatatgaacttataataaacatatatgggtaatttgcggcataacctccttaagtgttcaggtttttgcaactaacccctaattctaaaatttttgtggtaaaatcttctaaacccaagttctgttagcacttagccctttccatccatttttggttgttaactgtcatggtgtaatgtctacgtgtacacagtgtacgtgtggcacaattttattagtccacgtaaataaatatttaaa

SEQ ID NO: 303803 - DNA, 3317 bp, Cannabis indica
aaaattaaactaaaaaaactttttcttaaatacgaaaataaataacaaaacacctataggattgtactacaaatttttcatatttttagcaggaatgaattgttcaaatcataatgtaaaatgtagcaaacatagacctctttagaacctagatattctagatgattattattatttgagtcattcaaataagttttcattagtcatgatattggtttgttttttatagtacaagagcattaattttctctttgaaagtttacatttcaccaacccaagaaaatttatatcatgcctttttttgtgtggccccatttttaatgcaaatgtgcaaaatagaaaagtcaccctcttttgctacttttgtggggttaacccaataatatttgggtactcttctctatatgtttgttccattagttggaaaattttaagtatcctaagttacttttgagctagcttgtgcttgaagaaacataaagaagagaggtaataataagaggataagaggaatctttgttgtagttgttttaaaagagagctatatttagtttcaaaactatgtgaaatgtaaaattgtgttggtaaaatttacttaaatggcttaattgttagttttataatagtttggaaagtaaatgaaagtttgaactatgtataaataaatgagaaaaaaaaaagctaattagtgctattatacacacactattgagaattgtcaaaagattatttgtaattttaagttagactatagtatataatacttattttgtaagacatattttaaaagataaattgttattatatatttaatattaaaaaataaaataaaaacaaacaaaaatgatcacgataacacgtttactaaactgtatctgaaattagaataatcaataagagaaataaaatggttaaaaatataaaataatctgaaataatattttattatgatgtttaaaaaaaaatagaattattttattttgtttaataactaagaagataatcgaaatgataaaatttgactaaattgtcattgttaaaaaatttaagtatttttatttataactttttgaagtgcatatttggttttttagttttttattaataatattaaaataaaaataaagtagttacggaggagggctattacttggaggagaaccttttttttctccttagtttaaggacatgtttacttaaaggaatggaaatcaatgacatggtattgattctcgtacaattgtatactaaatttttgaaagaaaaaaagtagtagagcccacacaaattaggaagaaaataagaagaaatgttctctccccatttttatagagaatatcttttccatcctcacttattttattttgattttaattttattaactaaaaaaaaaaagaccaatatgctttttaaaaatctataaaaaaaaatatttacatgttctaataatgataattttgtcaaattaaattattctggttatctttcctaattatgtaaacaaaataatatgattttgattttgttactggataatttagtaaacaacataataattgagagtcttgcaaggagatggacattcaacagaaaatactgtattgtagtgatatcttacaagtttggggaaaggcttacactgataattctaaagataggattaaagattgtaaaacaaagattaatattttgaaaagctcggtgtccaagtttaaggaagctaagagaaactttttgaagttttcactcaaagagatatgttttagagacaacgctctaaataattatagcttcaagaaggtgattagaatattaaattttttcacgctgctgttaatgctagaatgagaaataatgcgattgtgaagcttcaagggcctaatggagcttggtttgattgagaaaatggtttgtatgatgtggtggtcaattattttcaagatatcttcttggcttcaggggtggacaactctgaggtcataaattgtattagaccttatatcactgaggaacaaaattgctttctacttcagccgatttcaaatgaggaggttaagaaagctttgtttcatatgcatccaaataaatctcctggtcctgatggtatgacaccagctttttaccagaagagttggggagtggttggggcagatgtgattaatcaagttcgaaaattctatgccgaaggattttgcctatggcattgaatgatactaatgttattctcattcccaaaaagaagcatcctacaactatgggcgatttaagacctattactctatgcaatgttctctataaggtgatttctaaagtaattgctaataggcttaaaagtgttttgtctaacgctatttcagatactcaaagtgtgtttctgccaggaaaattgatttctgacaatgttatggtctcctttgagattatgcattatttgaagcgaaaacggactggcttggctttaaagctagacatgagcaaagcttatgacctctagagtagtttttttttaagagaagttttacaaaggatgggctttagtgatacatggattaagcttctaatgacttgtgtgtcatcagtctcttacaagtttgtacatggtggatgggagatgggtcctttgatatcttcttggggcatttgccaatgtgatcttttgtctccatacttgttcattatttgtgcagaggggttttctttccttctacataggtatgagatgaatggttctatttggggttgcaaggtggctaggagagctccaatagtttctcacatgttatttgtcgacgataattatgtgtattgcaaagttattgaacaagaagcctctactgctcttaatctccttcgggtgtttgaaggtgcctctagccaacaaattaatttcgtaaagtcttctgttttttcagttttaatacggaggttagtgtccgaactaggatctgtggtttattagggattcaggaggctggtgagaatagtacttatttgggtcttcccaatactatgggttgtaagaagactactatcttgggtttccttagtgattggttgaagaagcggatccaagggtgggagggaaagcttctttctcgggctggtaaagaagtccttctaaaggctattgcccaatctcttccaaattgtgttatgagtgttttcctcttaccacacggacacttgtaaagaattggaatgtctcatggcaaggttttggtggcaatctgattcttctcaacataaaggtattcattgaatgagttggtcgcgcttgagtcatcaaaaacatgttggagggttgggctttcgtaat

SEQ ID NO: 303804 - DNA, 1117 bp, Cannabis indica
attgcacttaacatcacttaattaaaaaaaaaataataattataagtgcattacacgtaacatcaacctagtataaaataattttctgatcagttattgatcaaaggacaccttatagaaatactccttcgatgtggttattagaaagctatataacataatcatataaatcctagtgtaacgtaagatttatgtacaaccaaaccgtgttgaacttttcaatatattccaattacgtacatattaattgaacatccaataatatttcaaatataataattgcttatggttttcctttttgtttaaccatgttacacgtacctacattatattagctttattaacttaccaaaaagatcagaataattattattatttttttttatttaagagtttatatattacaattatgttttacttgagactcgaaatcaggaccttcaacacacttacctatggttacttgagctagcctcaagtgattattttatatctaaacacactttgtatttttaaagtaaaagtaatattatgttatgtaaatatttatgttattatatatccaatagtaattatacaatatatataacttccaaacaagatcttgttattcaatttcttctttctacaatagataataagttggtaagtttgtgcatggtagtgagttagagacaggtcacatctgtccagtggaagaaaacatatccccaatcttagctgtgcccttgccctgtcaacatcccttaaccgatgctatatattagggtttatatagtctctctagctctctctctatatatatctatatagaacagtataccattcatcgccttgtctcatgactactccccttctagccacataattatgcattcttacagcttcaatgaaatatgaccttttcaatcttctgtctcttttggtggacctattcatttcatccatatataagaatagtaccaataaacctattttctttaactttctttcagataccaaacacgtaccctatacccaggcccggccctgggcataggcgtgctaggcctgtacctagggctcacccagcccaggagcctaaatttttttttcctcttttaaaattatacatttt

SEQ ID NO: 303805 - DNA, 1526 bp, Cannabis indica
tacatttattttttaaaaagcaatatttttgttggtgggggctatagcccccatataagcactactgggtctgtccctgattataagatagtgctttgtaaatgactaaaaatattttatattaatagttattaaaattaaattttatagaacttacttagtacttaattctacaatataaaatcttgagtagtgctagacatgagtagcattgctaatgcctttcaggggcattttgttatggttattgagcttgcttgtaaagtagtgtaagtagtgaaaattgaagggcaaatgaaactctaggggtaaaaagtgttgagttatcaataaatataactatcagtctcacaaaatactcaagattcttagtttaaaatttaaaccaaacaaagagtagattttacattccccaacacctatactttactccatataccaaaaagccccttagcatttctcttttttcaaattctgactatatgattaattttacaataagctcttcaatttctctctctccaagttaggctttttaccagcatattatgcttcattcattccatttccacttactcatcttttagtgtgtaaaaaaagtagctaaagtataaataatcattagtatacaaagaatcttctctattccaatgcttttcattgtatatataaatacttttttgtttttttgttattattattatatttttttatatttttttttatatttatatttatttttttaaaaataaaaaaagttaaaaaatagtatatggagtaattcccattattattattattaggggtttttttatttttacacttcaaaatatatatatatatttttttgtattattaggaaattctatataaaaactcctattgcaactagtggagcaacttaaatcgcaactaaaaatcgtatagcatccacacaaaaatcaccgccagagaaaatactttagaaactcaaactgtaaatttgaaatttttttttttaaaaaaataatatatgaggtaattattattattattattattattattattattattatattatttcgctcttataagttatttcacttggaaaagtatattgttttaggttaattaattaattaattagcttaaccacttgaggttattattattatgatcataatggttattggtgctaacttatagttagagattaaaaatatttgacttttagtgtcattgcaagttcaaaaaaagagagacaaattaattaatgtatagattttctttacttgattttaattaattggtgtttaactatataaaaattcacatatttatatatggaaaattttataacgcacctcctaaatggagtgcaccaatatatctttatctattttggaggcatttgaaagatttttttaagtctattttttaatgattgtgtatattacagttaattaagatatcttgaaattttttgagaaattctaaaaaatttaacacattaaaaaaggttgtctgttgcacgtgtgactttt

SEQ ID NO: 303806 - DNA, 1572 bp, Cannabis indica
aggataagcaggatcaaattattactatcgctgttcgcgaaacacttgaagaaaaattcaggcaagatgactctgaagttaaagagaagaaaccagaacaaactgatgcagacaagtcccaggatgaagtagttccaattgttcatgagcttgtttcagaatcccaaaaagctgagactaaagttaaagatgatgagcctgatgtttctgttgaagtaccacagaaggctgaggttgatgttatggaaaaagaaattgagaaagctaatgcagataaatccctggatgaagtaggttctgatgttcatgaagttgttgaagagtccaagaaagctgagtctgatattaagaaaactgaagaaggtactccagttgagttggcaaaagaaacagttgatgagtctaagcaacctgaggttgaagttaaggaaaaagaggctgatgaaaagcttgaagtaccaattgaagagtccaaagttaaagaagaggagaagaaaactgaagcaaataatttggagaaagaaaaagttgaagacattgaaaaatctgacagagctacagatgaaaaagaagttctaaccaagtcaagtcagaagcagtcaaacaccattctgtcaaaggtgaaaagttcacttattaaagctaaaaaagccatcattgggagatctccaagctcaaaaacaccagcttctgatggcaaaggggacattaaagtcaagtaaaagagaaaacaatggtcaagtttagaaaatatattgcatgtttatgcaatcttggacatgcataatgcagtggttggattttagtgttgttgatgttcactcttgtctgttttggctcctacttttggcagggatgtgtatatagaaggtacaagcatgcatgcaaatactcaatattgtaaaaactagaaagacatttgttacccttcttttataggtttattttgtttttctttgcatttactttttattttgtggtttattattccattgatttcagttgagtactgttttgtttggtggtgctttgcttggatactgtttgttgtccattatgataagaactctagtttgtggctaatgtgtacacttgtatttttattactatttttaaagttgtgattattattgtcattcaaaaaattgtactcatgattcttttacagccattgttcttttcaattctttcctttccatttttatatgattttgcttactgagaaaaacatctgcttgtagaaaattaccacacattgttctgcatcaaactaagaaataagtgtcatttttacttaggaaggagcacacattttcagttaaaaaatatatacacagaagaaagtgaaacatggtgattcaacactcctgttatgatccactttcactgatccttttgttaaagtctgattaagtatattaagtctgatccaaaagtgtaagtcaacattaaaagatacatcaatattgaaagaattgttataaaaactctgaaatacaaacttgaaaacataattgataataggctaattagcaatttttccccccgaactttgacatataccaaataatg

SEQ ID NO: 303807 - DNA, 4312 bp, Cannabis indica
gagagagagagagaagcgagtggttgtcacgaaatggtgaccattggttgtcttgttaagggtttcgaaaggtctcgaaaacttcaatagaagatattgctagtaagaagctcttaaggcacatctaaatagtaaccaaccggccagaaagccctttaaacgaccaaaccaaaactaccaaaatcgggcccctttcgaaaccctaaacctcatggagaagatatttcgtaataataaaccaaattggatacccataaaaacttcaaagaagggaattgttgaacatagtagactacaagagaaacagagtgaaataacacagaaaactatcggcgccaccctcagcaacccatgggagccactctctggcagtactgggcgatttcaaattacctgtacggaatattgacccttttcataatttttattactacagttgtataatctttttcttacattgtgtagaaagatcaccacatttgacaactcaaatgcttagtgaaaaaggctttgacttaatttcaaaaatccagaaaagtgtctttatgttcacatataacactttatttatgttgacatacaacactttatttatatatactcttttatatgagtaattataatttacaacaacaattcattttgggttttacattgaagatgggatcatgtaaatgaaccaatcgaagatagatgcctaatagtttctttgctaacatatttgtcttttttccttttaagaaaacctaaagctgaaggaatgctattaattccacaacaaacaacaaccctgtgatcagcctttaatttctactgcgcctattattgccaaaccacaatataattttcacgtgatattgtattcacaacgagcaaagttaacaaattacgccgcaacagttaatgtaagactctcttttatattaactacgtttcacatttgtacacagttgacttgagtaacaataacaaccctacaaaatacaaattcatttctaaacaaccctaaagtaagatctattctagtctttccaccatcccctaaacaaactttaattttttgtattgtgctattaatagcttggtagagaagtattttcttatagaatgtatatatattatatatacatagtggcttttattcagttataattataagaaatagaacgatgacagcctcacatgatcacatcatgctgcattgcatagaatagatgagaaaataccgaattatagagttgggtagggcggcattactctctatatatctatataccttatgaatatagatattgataaagttaaagggacactaattaattgtgattagaaatgtgacttcaacagtatctttactccaactaacatttagtttcgttcaactgcaattgtaatactcttgtttaattgcctcgttctttaaacaatattaatatgtcttaaaaaaaatagtaagtgaagcacataaataaatatatattattgttgcttactctcaagtaaagttattattttaaaaaatatatttttctttctgttttgtatgtctaagaataattacatataaaattaaacatggtgagtataatagttaatgagaatcctaaaaaatgggttacaatttatatgcagtactaggcaatacttgaactaattaattaactatggagagtatggagagttttatttgcacctaactaaaatcttaaaaggctacctttttttttcataatttttactttttttatgaaattatatctttaatgtatttttgttttattaattttttccatgtaatattgttaaaaaatatacatagaaaatatatttattcattgcaaaaaatatatatatttttaatattaagaaaaaaaattaaaatacaaaatatgaaattttataagataatatataattaaaaacatatgaatttttcttaagtaattattaaaattaacatgagataatataaaaaaaaaaaaggaaataaaaaaaatgttagtaattttttattaattaagtttttttttttatactaaagtacatttataattttgtggggtaaaaaataaaagtctcaaatatataaactagttaggctcatgctatacatacaattcaacttcacacaacgtcggccaaactatagggaacaaaaacaaactgaccaatttacaatcaatatatgtaagtggatatttaagtccatcttttacctatatatccacgtaaaaaaacattcacattcacaattacacctcatactaaggggtataatacaatattaataaacaagtaaatcgtaataattaataatatgttatgggcatatatgggtcagtttcactacaattaacaaagctatgttagtttttcttttttcttttgtgatatcaatcagtcatgctcatgagtgaccagtgaatatttaagcacccattaatttgggtcaataattgatgttgttgctctccatgctttttgtccgatcacaccaactaaggttatgatcataatttgttttaactttaagatataatatttattttattttaattgttttaattttctaaacattaataatgtgatgccaaatatgaggagatagatggatatatgagcaacaaaaatcaaactctttaattccgaacttggatgaaaagaccattttggaaaacatgtagctagctaggggcctgagctttggaaaaagacattatatagaaaaagataagaaattatttatgtaggagatcctcgttttgatagactttttattcatttggatatttaaaaaatatttttaatcttattattttataattatatattttataactatttaagatgacttgtaaatttttataaaattctgaatagtttatagtatggaaaataaaatttaagtaattacttactacacttaacaaaaaaacaattatgcatataataaaatatataaattttattttttacattatttttttttatttttttaaataattctaaataattataaatataaaataaaaaataaaaaataaaaaataaaagaactttcacttctaaggtgtaggatagacttagtcttatacacacaaacaaattggagaatatttaatttgttgtgttgtgtgttcacgagcggagttaatatggtggagagagagatgcaatggagatataatagtcgttttctgtcacttgttgaaaaatattctagaaagtattacgtgtcgtacatacatattatagagtacggtgctcacatcattagatttcatgatcataaaaaagaagaaatatgaaatgagcattattaactactagtcgtgcctactactttctccgtatgtcacattgcgattggtcagtaatactctttaaaaattattatattaaattatattatgtgggatccaatactcagttggaccaatagcgatattaacacaaaagagtgtactgggcaccactagtaccaacacttctggaatgaaatgtacatatacatatttattctaatcccactcaaaaataataacccatgccatgtgtcatttgattgatccttatctgaaacaactagttagtgtggtaccattggggtagagaggagtggatgtgagaatattgaatatctttaacccacaataatttacaagtttagtatctctcaaacaaaatgaaaaataataaatcacattttaggaataatgaagaagataattccttaaaaaaaattaataataataacgaaaaaataagatacttttacaatgcacatcataaaaaaaataattgatgcactatttatttattttagtatttaaaaaaattatagtcatttttttttcatttttgtgtacgatataataatttaagatattttataaaattttgagaaattcagaataatttacaatatagaaaagattatttaaatagtctttttcacacgcgtataaaataaaaaagtcacaagtaaaacacactgcttaaatcctattttcgacatgttaaatttttctaaatttcttaaagttttgtaaaatattttaaataattataacatacatgaccataaaaaaattgagtacaaaattatttttaatattagaataaagaagtatacattagtgcatctattttaagaatattagtgtatgagtattgcagaagaatattagtttgagttgtgatgagtaagcgaggtaaggaattctgttattgagaaacacatttactatagcaatgtgtaaggaccgtcggacaccatctatttctctattggtatgatattgtccgcttt

SEQ ID NO: 303808 - DNA, 1882 bp, Cannabis indica
taaacaactgctaatttccaaattaactatgcgggctttacaataatataaattaaaaaaaatatggtattggttaacgtgataataagttgaatagaattaaacgttacattgacacaatcaatcattgatatatagattatggctcttctcttttccctccgccacccccggctaccataccttgctgaaccccgcctcccaaaaacttgataaagattaactgtgatgtaaaagtgagaagcgagtcgatgtgtgggattgctgtagcagggatcagatgggatcagttttgtggattgtctccaataggatggacttctcaaatctgctcattggagaagtggctgcctggaaactagctattcagaatgctattggtctgaagcatcagtatgttctcattgaaagtgactcagagatagttatcaaggctttgaaaaagcaatttctgtttggagtattgataactatgtaacaacctctaacagactttctagtttgtttttaagttgtaattttgtttatttatcgaaattttgtaattttatggcccataatattgcaaaatgggtcgatacaaacaacattacatgattggttgatgtttcgactattcctactaatattttctataatgaccatgaggtctaacattttttttatagtaattcactctacttttcctttaaaataaaggtctataaaaactgagaaaaatccttttatatgagatatatgtgttaggatgaatttttcacataaaatgatgagtatagtctcgtatttaattgacatgtggatctagttttcggtaggaaaacaatgacgtgtgaagggtataaaccccgataggttttcatttcatgctataaatatgcgagaagatgtgactaatacatggtctagtcgcacactatgtgtctcatagaaaatagaatagaagtcagtatagttgcaacatacatcgaatatatgcaatgactcagtgtttctcccccacgccctatgtaaagaccgcatctttacatcgatttgtccaaaatgactactgtacgtgacacctcattatggacccacgagtcctatgttattagtacatgaatgcccaatatgtcattggtataattgcagacattttataatataaaattgcagtaggttcacgcatcttaataaaaacttcgagagtttcatgtgttatattatttattaaataatataatatttaagattacaattgtggtctattatatatgttataatgagtataatatataatgtgattgagagttgcatacatataataattactatataatgtcattgggaattacatacatgtaatattcatataagttgtaacataagaggtggagtaactcatattttgtaacttccacatgatcaccaattaactgtgtaaagagtggttacacaatttgattttttgaaattcaaagctataatataaatatagctgttgagaatgatttgaaattgtttggagagttatttacaaatgctgaaaaattggataacaagtaactagttactgtttttatcagctttaatatattagaactttttttactatggggatgccttttaacaactcacataatcttcaaatcacccatttaatcttatttacacccaattaaaatatggtaatagccattaggtgtaggatgtttgaatttcaaagtgtgcgatcctaaacactataaatagagaccttggttcatcctttgtgacatactcttctcttctatctttcaaacacaaagctagagagttctaaggcttaataattcccagaactattcccacaattccctaagtgtttcatagagggaaaaataatcttcttggataaagg

SEQ ID NO: 303809 - DNA, 1460 bp, Cannabis indica
ccaacagcagcgcccttaggatgtttgtaaacctttgacatgggtcacacttccagacataatcaatgcaatcttttttcattgtggactaaaactatccttgccttaggatctttttggacaggctgggacgcccagtgtggtctccatagaacccttcaggatttcttcaattatttgtttagcttcagtattagaaacacaccttaagtagggcatacacaagcctcttttgtataaagtgccattgatcatgagatactgaggggcttggtattgtactttccaggaggtggcctgatcttggggtaattatcccttagttagataattgactgtaacttctgccttggccagaatgcttggatctagaaggtattcaatgggtaccaccgctagtctttctacgtctttgttcgaagccaactttgttaagtattgaacgttcttctcctttataatctactcgattttatagcctttgaactcctaaattaggtctcttgcagtaacaacgtaagaagccattctttctctacaagttcggtatttcccaagtatttggttaacaaccaattgcgaatcactgaagacttctatttttttgagctcctacgactttcgatagtcttaaccctgctagtagagcttcatactatgccttgttagaggaagggtatttaaactgcaaagctatgtgaagcctcaatccttcgggtgacaccatcactatccctactaccgatccgtgcttgtttgaagctccatccacatatattttccaagtgggggcgcagattttaggtttgtgagcaactgcttcagttttttttttgcattatagaatgaagtctgctagggcttgccctttgagagatgcgcgagacatattgtatgtcaaactaactgagctccattacccatttgatcattctctcgaaagcttctggcttttgtaggacgcccatttgatcattctctcaaaagcttctggcttttataggacctatcctagttggtggttggttaagaccttgatcgaatgtgcttcgaaataaggtcgtagcttccgagaagctatcaacaaatagaaggctagtttctctatcaaagggtaccaaacttctgcacctaccatccttttactgacatgataaatagggtgctagacttttccttcttcccaaaccagggctacactgactgcatttttcagagacggccaagcataggaaaagatcctctctgtggatttgtttggtcaaaattggtggcttgggcatatgctccttcaattgtttgaatgcttcatcgcattcattgttccactcaaaattttagcttttcttcagtatattgaagaatgggatacatttgttaatggaacaggagaagaagcgaatcagggctgctatcttccttgtcaagctttgcacatcctgttagaatttattttacca

SEQ ID NO: 303810 - DNA, 1835 bp, Cannabis indica
ttcaaggaaaaaaattactaattagcttttaaatatcagatttcacgtaaagttttttctttttgataaattagaagtatcattactccacaaacaatttacatcctaatagcatcttcaagacctcaaattatgtatcgctatacattttacaatatttagacccattctctagctatcaactatgctgacttttttttggccaaaacataattatcccatgtttaatgttgtcacaaattttatccctacaattaaatctacatgcattttctccactattgttctataacttcaatccttacaataaaatatataagaatgttatgactattaaattacactaataacaatattacatctcataaaaatactataaacatcgtaaatacattttaacattaatcataaataaagtaatatatgtatatggtaagagctttgaaataatattaattaagatattattgataataagtagctaggtagatgccatttattaaatattactcgaaataatacatgaggttaggtaaccgtatacaggatcagcagattcattaataaatgtctttaaaaaatcaccaactcatatatatacatcattaacaattaattaatattcaactgaagtagctagctagtactagtatagtgctataaatagaacgttattagtaatgcttaactcatatacacataataacttattactaataatatatatagttatatatgaatatggagaagagtactaaaattagtgtgatgataatgatgatcatgatgagctacatagtagttactacttatgcaatttcaggtggaagaaatctcaataatgttattcaacttcactcctcagatgaatcagaatcagaaataatcaacggtcaagatgaaaagatggcgacttttatggaggctgatgcttttgtggatatgctattgaaggaaaggtcattaaaatgcccagatagacgttgtgagcctgggagatatccttgccctagtggatgtatttgtgttagatcatcaaccacttctacgtacggaacttgcaagtaaaagtactgtactttatatatccatatcgattgacacctacatatataaatatatatatatatatgtgaaatatctatgaataatgtcaatcgtattataaatattgtaatgaataataagaatgctatactatacatgcatgatgatatcgtgtgatgcatatgcatgcatgcatgtgtggcttctatgtatgtatggtgtaaccaactttatgtatttctttatcgttaatcaaatggaaaagtactattatcatatatattgattagtaagtattgtgtatgtttcactatatattattgtgtttagaataataattagtacgaattttgatttggctccaaactattatcagtttttgattgtagctgatccttagaatgttttcagttcttaaaaaaaaatcttaaattgcgttgaaatataagatttctattttttttgttcctatctttgattaaattacatctaaaatattccaataactcatgtagtctttggaggtctatgcctttagttcttaccaataaccgaatacatagagtcttttgttctcgattattacaaaatcacaacaaaaaaactactacttttagtgataacttttgagtcacaacattattttttgtgtctaaatgtgacttttagtcacaaattatttgtgactaaaacatataacatttagacacaagctgtcactaatttagttttagttacaaacaagtaatgtgattaaaaatacaatttagttaagtactttaaaatta

SEQ ID NO: 303811 - DNA, 1631 bp, Cannabis indica
ctttatagtaagggcaaaaaaaaaaatttgcctatagcccatttcaactcaggaccagccctggtgatacctacatattagtttttgtgagacaataaaattgatacattctatgaagagcaaattaataagttatatagaactcgtttagtacattgtactttgtatattgtatagtattgtattgaattgtattgtattaatattcactacaacattgataggatgtagacatgttcaagtgaggcacaacatggtgtagtgcccatagcatattatatttggggtcgacattcctaatgttgtgcccattcttttgttttcttaattttggagataactgggtgcgacacactgtcaatgtgcacaaaattgttatgctccaaaagtttcaaaaaacgaacgttaattcaggcagaaattttcccatatttacaattgggcatgacaatgtcggctccatgccttgatatagcgtgccaattaagggtacgatatcgtcgggcctagtttttccctttttttaaataaaaaatcagactcgagagaacccatttcctcttcaacacctttaccttttgctctctctttatctctctcactcaccacaactccgatcttctcattctcttgccctcacaatgtcgatcttcttcttctctatttacaaattttgtggatggctcaaaggttaggacctgatattcgtctacctactaatgaggagttgttcggaatggccatgcctctaacataaacacttcaacctcaaatatctggaaatgggtctgtttcatcttcacatcctcggacttcctagtatcaccaagcacaatagaatcatattccttttatgtatttttcgtcatcacctcagcaaatgtctaaatttccttggttgtcaacgccaatgtcagagatgcagataatgaatatgcagcagaggcctttgatgcaacaaatgtcatcgatgcagtagccaccacaaatgcagcaaaaaccttcgatgcaacagaagtcatcaatgcagcaaacaccacaaccttcgatgcaccatatgccatcgatgcagaagacaccacctatgcagcagcaaccttccatgcaacagacatcgtagatgcaacagcaaacatcatagatgcaccagatgcattccatggagcaaatggcgcatatgcattagatgtcacatttgcagcaaatgccttcaatgcagcacacaccgcatacgcatgagatgcattttatgtcatcgatacaacatatgtcactaacgactcagatgtagcagtgccaccgattatgacaccaatgcaacaaataacacatatacaacagtcgtactacccatagatgctagaagtataacaacaatcttactatccataaaatgccacatattccacaaaaaaagtgtggagagaatggtgatgatgaatagtccgcacatttgagattgcagtgttgttatttgtaattgtatgaatttgacgatataagtatttttatttgaatacttttattttaatattgtagttagttatttgtaagggcttttttcataaatgtacaacaaaaactaaaataattacgaaaaaatgtagcaaaaaaaaaatttatttaaaaaa

SEQ ID NO: 303812 - DNA, 2316 bp, Cannabis indica
aaatttcactatatggtgtaaaaatccctttaataaaatatattgttgatatttcctaaaaaattatgtatattgttgatatactacagtaaaatgtaattaatttgttttatgtatctataattgctttaaattctataaaatgatgctacactcttttttatttatttttaaatagaattcttaatttggaaaaatagaatttatagattttattttttttaaactcttaaaatccaaattcaaggtaagggtggtaaaatgggattcaacacgaacatggtacacaaacacgacacgaattttacaggttagaattaaaaatattagacgcaggtcaaaaatgggtcgacacaactttacacgaaaaaaaaaacgagttaaacacgacatgacccgctaaacgcgaatttgatacgtttaacacagttttttaaaataaaataaaataaaaaattattaataataataatataattatgtaaaaaaaatatatatgtagtgatttaatgttaagttaaaaaattttaaatttaattttctttaaaaagatattaaaaaataatttttattatatatataaaaaaaaatcaacatatacatttcttttataccagttttgataatagtaaaataggtcaaagtggattaaaacgaacacgaaattattttttataagtcaagttatggttgataaaattagacacagtcaaaaacgaatcgacacgccttacacaaaatatagaagtgagtcacacaaaatatagaagtgagtcacacaaaatatgacgcaaacactacatgataacaagttttgagtggaaattacattatatacccgttttactttatttcttttcatttttacctttatttccatattctttaaaatatactcacttttataaatgatgtccctattatatcccagtataaagtggagagtaaggatatattagacaacacactcataaaagtggtagattttaatgaaatataatataaaagtatttttgattaatagataaaaaaaaaatattcttcaatttaacctaagttttgacacccctaatccaaggtccaaagtcctaaaagattggaagaaactcaacaataattttgcacagttgaccatttcttataacatgtaaaagaaaaataggcagagtgagagagaatgatacaaaccagaattgggaggtaagagcaggaggagtggggaagtgggccagctcagcaccaatgctatcaaagaaaaggcccgttaaactcttgccgtcgattactgggatgctggacggtgctagccatccgatcaatccaaatccaatcacattgaaatcccttcgcaaccaatctctctcaaagctacattaacatataatttaaaataaattaacaaaaatcaacggtcctgattgttttgaacgaagatgattagtgtttaattaccaggtaaacctcccacccgaagcgcgtgcttgtttcaacgggttccttacgctcacgctagacttcaaaaaccctattacatatatatattaatttaattaattatttttctgtaaaaaaatatatatataaaattaaaggaaaaaataaagtaatataacctgaagagagggttgttgtcttggttttgggagaagagagggaagaagagccaagacccactacggttgaagcggtggcaaaggttgatgccattttttcttctgtttctgtatttttttagagtgagtgagaaatgtgtgtgtgagagagagtatgtggtgttgttgttcttctgttacagatttttgtgggaaagatagattgcaattccaagagaagattcttttctgcaatcaaaatctgccacgtggtatttttatggataaagtgggtcctattatattttcctattaacgatcaatattgattattgatgggtttactagagttttacatcatcttgtcagtttgtgacttattttaacggataaatactcttttttataattaaagttttatattaactctgtatgatttattaaaattagaagtgctttacgcaaataatagaaatataatctataaaattaaatataaattaaaaaataataaaattaaaatagaaaataaaaagtagataaaagatgtaactcccaattttgtgtctgtttttgtattaaaaaggctaattagcaattttttctttgaattttgacatatactaaatcatgctccttgaatttttttggtccgaactattgagattgttaaatttaaagacttttgtctaatttcatccaattttactgtttcaagtactaa

SEQ ID NO: 303813 - DNA, 1724 bp, Cannabis indica
aaaaaaaaaaaaaaacatatattaatgcattttaaaatagtagattaactattcaaaaaaaaataaaagtagatcgcaactgaaataaattagattagctgaaaaaaaaaactgtgacaatatgtaatggttttttttatggacatgtaatggtttttaatgcataatttacctatatcattaattatttatttttatattggtttgtacatgtatatatttagtatcataaacaaaattgtttttttaatcaaacaaagaaaatgatttgtaagaaaaggacctgagtggttgaattattcgtttatcaacatgttctaaaattataatatgtaacaaaaaattgaagaatacaaatatagtatatatgagaggtagtaaaattcagccccaacaaataatgtttcaaattttttattagggtaacactacttctgtatgaatcactatttttaatctttcaaacttcagcaaaattaataaaaataatatttttgttatgattatgatgatgatgttatataattatactatatatatatacctctccagtgacaaacttaaggacaaagcaagctaggatggaaccccagacttgagcaaggatgtagtgaaggccatttaggatggtgatgtggccgccgatggtcaatccaaaggtgacagctggattcaaatgtccacctgagatgtttgcagcaatagacactccaacaaacagtgcaaatgcatgagcaattgctatagccactagcccagctgggtccaaagctcctccactagtcagcttacctaaaaatatatatcataatatattaattgatcaaccaaaaatacacagttattaaatataacaattgagttaattagtactatatatactcttaccgaaagctatggcagatccaacaccagcaaaaacgaaaataaaggtggcattaaactcagcaagataggccttgagagaagtagagctgaaacagtcaccaaagctacccaaagtcaatttcaccatttttcgacaaaggaaattataaagagatgatgagttggctcagttgctagctcttgatgaatatgggttgtgtaaaacattattttgagtgtttcttaaatactagtttagtagccaatatagtagactaagcaataatgcaaaaataaaaataaaaataggcatagccggcaccgaccatgataccccacttgggcagcctttgaaattattcataattggagttgccaaccttttatttttgtttgtttttttgagaaatatattttatctatcttatatttatttttggagcaacttatgtagcattatgaggataagacaagtgaaataaatatataattagtggtggagagaacacatgaatattataaatgtatagtgcaaataaatgagataagattaatgttccttttagaaatatatatatattctacatatagaaattaaattaaaagtttaaagacctctctctatatatatatagccttaattagtggttagttcacgagagagtgactgcagtttttagattttaacgtcacattttatttagggtaaatactattttagatcctctcttttacaaaagttattaattggactctgtgttttattaaatgacaaattgaaccctgtattttctaaaatagtacaaataggaccctaaattgattttttgtcaaaataaagtttaattataatccga

SEQ ID NO: 303814 - DNA, 741 bp, Cannabis indica
ttacacaatttaatatatttgttgacaatgtaattatattgtaattgtgtaattattaataatgcaatgcgtgtatgcttaattgtgtgttcgatttaatttagatgatttattaaattattttgtcatataatttaattaaattaacattgtaatattaagaaaacaatatttaacacaaattttaaaatagaactgtaaaagtagtaaatttttgaaaataaatatagttaatagtttctaagtaaagttatgtttgtttgtgaaataaattttttaacttaagtgcactcatagataataattaggtggagttcatctggatcggaggggcattattggtctgagttagaccagtaggagctttggtagctggatcggcactggtggactccattgttgacgtttatcaatgacaatttgatattatatgtagaattctgagtatgaatttcatgaaaaaaaagagagaatttaaaagagagaaaatacgaaaacaaagttcactttatgattgaaatgaacagaactcattttagtgatacaaagacttacccaagaatacttaaacaagaaaagaaaataatagactgaacaaaattgttataaaactgtaacagaaagctaacagatttcctattcagattgtatatttatattgagaggttttaattatattatttaatttgtatgaccctcatgagtaagtataatttaaactgtataattattaaaaaaaat

SEQ ID NO: 303815 - DNA, 991 bp, Cannabis indica
ccaaaaaggtaaatctaaaagcagaaactccaataccataaatttcacacaatcaaacaatagaacttacaaaattaaaatatatacagatatttgtttgtttgcatgggaataaatagcgaaatattcacatcatcgactgtcaagttttctaaaagataactaaatgagtaattaaaaacaaaatggcaacactgtaaattattttgtttaagagtaaaacatactgaattcgaaacacactggtttggaagcctctataccgctcgtaacagctatctatctagctcgagatgaaggaactaattcaaataaaaataatggtttctccaactcttttcccaccgttcccgcgattttttctctccacccaaacaaaatattattaagaaaaataccagacctaaatagaaggcaagaacgaaacactgagtaagtcgtgataatcctacgatctttagagaacgaaaaaggtatttaacaaaatgaatgcagatatctgagaagaggagagaggggaagagcctgaacctgtcgccgtaagctggagaagacgacggagttagggtttccagtcgggttcgggtcgggcggagaaggcccgagtgacaacctttaccagatccgaataacgaaaaccagaaaacaaaagcgactcgagccaaagctgtgttttttctctctcctcgtttggctgctgcttgcttctcttttcttctcttgtgctttggcctaggcccttgttatttactgctaccggttcatcttgacaaaacctggatcaacggtggatcattgatcttttaaactcttgacggctgagattctttttctaccttctatgttacgtttcgcacctcaattcgtccacttatttgtattgttatatgatgatcacccgacttgtataataaaatatatcaaaatatattaattttttcttatcatttttattttttaattaataaatataataaataaaatatatata

SEQ ID NO: 303816 - DNA, 1317 bp, Cannabis indica
cataggaattaaatagaacacttggttaagatactttaaatttacatgagacaccatgtttttaatttttttgcctattttttcttatgtgtatctatattttatttattaaataattaaataaagtataagattcgaattaggatcaaacttatgaccactagaatagaaagatgctgctaaaccaccattctacttaaatttaactagttatttattgttttggattatattaaatgtataagtaagcccaccctaaaatttaatcctgatccgccactaactattgaagcatatcatcaacccactcatttcttctatcacttgagatattcaagagtcaagactaatcaaagcctagataattattaatcaccaccttgttcagttgttcccatgtcaccatgtcagatatggtgtacgtaaaccatgggcttgcagcagccagaggaagaaagtcacaaccatcctcggtctattctatgatgttgagaagatccatgaccttttgccattaatgtccaacaccaccattatgaagtgacatattgagattcctcttctgccaaacacctttgccagcacagcgccccacctatactccaaccaaacctcattcattatcattgagttctatattaacttcaaatttcaaagagacaattttacaagaaattgctggcgcattaactctacctcaggattatgttccggtactaataacttctcaatttccacaaccaaaaaagaatagatgctagccaatataaagaaaaaccaaacttaaatgttgaagttggtaatcccaatcaatacctctcataagaaagaaagctttcagaataagtgaattcattgtttaggtgaacaattctcgtttgatccagaattcagacgccgctggtgaatggattaatcacacgaaaagtattgcaactaaacatttctcaccaaaaagatacgaaaatcaagtcagaaacaatttcagtgtcttttttcttcaataaaataaactaatcacaactcaacccgaaaatagcaaaagataaaaggggtacaaatttaaaagtgcagagactgcaaactaccaaaaacgcagagtatgacagaacttcccacgaagatccttttcaggtaaccaataaatgaaatccctcaaccaaatcattactaacaacaaccactacagaagagaggaccaaaggacggtgttacttttgttggaagagatttcaaaactaaattaagtttttttcttttttttttttgttctttgagggaagagtactaattctaaccttctattacaacttctta

SEQ ID NO: 303817 - DNA, 1981 bp, Cannabis indica
tgggacactgttccttagatagacggataccaaatctagaaggcatggttgcccctttggtgttggtcattgagaatctctctaaaaccttatctatgtaagttgtttgagagagagcaagggatctatcatcaagagagcaagggatctctctaaaaccttctcgtgtattgatacaaggtgatgccctttgggctaaaaaattcaggagcatcctaccaaccacttgtcaataaaatgttcaaggacctaatcggccataacatggaagtctacgtggatgacatattagtcaagtccaaaaaggatgggggacatagagaaccggaacgagtgctttaaagttctttgagaatacaacatgaagatcaagcccttcaagttttcatttggagtcaactcgggcaagttccttgcttcataataaattcctagggaattaaagcaaattttgagaagatccaagcttttttggacatgaaatcgcccacaaatattaaggaggtacaaagtctaactggccaaatagcaacactaagaaatgttttattaaaatcaacaaataagtgtgtttctttcttcaacatcctctgctgaaagaagaagtttgaatggacagaggagtgtgaagtttcctttttagaattataaaagcaactagcttaacctcccatcttgtcaatacccctagatattgaagaatttagaatatacctggcagttacaaaatttgttgtaagtgcactcctcatctgagaagaagatagagttcaacatctaatatactatgttagcaaaaggcttatcgatgtagaaagttgatactctccaatcaaaaagttaatatattgcttgctactagcttctagaaaactacgaccttactttcaagctcatcctattagagtataaattgaccgacctatatgtcaagtgctacaaaagcctgatgcatctggccggctgcttaaatgggcaattgaactgggataatatgagacaacctatgagacaagggtagcaataaaaggccaagctctcaccaactttatggctaaatgcacgaatgtagctcctaaaaactctgagcaagagcaagagcagaagcaaaagctagagaagaggtgaatgtaagagaagaagcaagagcaagagcaagaaaaattagcatggaagttgcacgtaaatggctcttgtgcaaattaattatctggcaaaggaatcgccctcattacacctgagggcaacaactacacaatgccataaagtttggtttcaaagcctcaaacaatgaagcaaaatatgaagcccttattgtccagctaaaattggcatacgaggttcgagcaaagtacctagacatattcagtgactcgcaacttgtggttaataattcttaggtgaatacgctgcctagggagaaaaaatgatggactacctaagtaagatacaagatttactaacttaattcaaatggtacaccatcaaatagatccctcaataagaaaattccacaacaggtgcccttgcccagcaagctagcaacacaatagaagacaagaccaatctattccctattcaatacttacaaaatccaagtatctttataccagaagaaatagagatgctagatgatagcccaacctggatgacaccaatagtaccatacctttttcaggagtcataccagaaaataagaaagaagcaagaaagataatgaggaaagctacccggtatctaatccttgacagaattatgtactgtcgtagttttatgatgccactttcaaggtgttttgccaaagaggaagctgcacgactcctaatcaaagttcatgaaattttttgtagtaatcatgttgggggcagtctttcaaagaaaatacttagagaagggtattttagcctacaatgattgaggattcaatggactatgtcaaaaaatgtgacaagtactagaggttctctaagatcccaagagc

SEQ ID NO: 303818 - DNA, 2152 bp, Cannabis indica
attgggagaatttgcacccactaaattgtctgacaaacaaagaaaaataattacataaatgaaagaaaatgctagccaaccatttaaatatgctcacctcaaatccattaggaaaagttggacttcggtgggatttctccaatgaaccttgtggaatgcaatctgatgaaactgcttaatgagtattgattttaaaacatactagctcacacaaacacaagatattacaattcattcttggcccatattagttcataagattacagtggaagcattttaaaacatttttagttcatagtgcttcttcagtgcagagccatattcaaccagcaaaatctggcagaacttttaaccaatgagtgtgttcataatggtgcataagacatggcaaaggttggtgttagagcaatttacatctacgtaataattgaaaccagactgcaagttcttaatcaaccccagctcccaccctttctcaaaaaatgtatcttatactgccctttaagtttccagttacatgtatataaaataattaagaagaaattacataaaccctcaccattggacttagctgtatccttagcatctgatgtctttacacatgatactagcattcccttgtgctttttagaagagtacattaacttcccaccaatagtcaaattatggatgcaagatctatttggggtcaattggctgccattatacgccgaaagcataccaggcttctcaatgaaagaccttgtatgtgaattaatgcccactgaacctgaatttttcagaccacaatataatataacacgatcaaaatcaagctttttactggttgcttgctacataccagttcgaactttgcaaaataaactttaaattttatatccattgcatcaatgaatgcctaaaagtaccgtactgttattttaaaaaaaatctataaatggaatagtttttaactcggaaaaaacaaaacaataccattaaacaacttaatctaaagagtagaaacaatcgagtaggcagaaacatcatcactactgcagaaaaaagaaattaagcacaaatgtcaaattaaatccactgagctcatgaaaacaccattcgcgattgccatcttccagctcgagataactagatcttaccgtcctaatgccgacattcaaacattcaaagaacttagatttttaataatcctttattcctcgaaataagagcaaagctcaaatatatccatttccagtgaacctcactccaaaatttactttcagtgctatagcaccaatacatttgtagagatacatatctacattaagcgagaaaaagagagatgtacttacaattgaaggatcggagaacagcagcggactccatggaaggagagtgtaaagaaagaagagaaattgatttgggaagaaaatggagatggagaaaataattaaggaaatggaatagcgttgtaaataatattatgggtatgaggttggtttaacttaagcgttgtctttgttatgtccgcccccctcatcacatcagtttctccgttttagttcatcccctcatcctcgctaacgtgcgccaggggtatttgtccacttacgttacgtggcccttatctggcgctcctttgaaattcacggaagaagattttgtacaatactattactatctacgataatgtataatacgacatcgagttgctatgaataagatgatacgacgtcgtataattactcgtgtgttaacgggtctcttggttgatagtttgtaatttccttttaatgggattatttcatatttaatcaaaacaaacaaaaaggtaaataatattttagacatgtgttttacaaaaattattaattagaccctttgttctgttaaatgataaaatggaccttgtatttttcaaaatggtaaaaacaggaccgtgagcttaatttttgacagttttttttttaatataaccaacttgaagataattcctaacacgaacatatacagaaaatataaacagttttgtcataatacctttagatcggattattaagttttattttgataaaaaatcagttcagggtcctatttttaccattttagaaaatacagggtcaattttatcatttaacaaaactgatgatccaattgataatttttgcaa

SEQ ID NO: 303819 - DNA, 1760 bp, Cannabis indica
ataataaaaacaattttattatgctttttttaagtatataatgtcaaatttcccttttctaaatttattaatcgaaggaaaagcttataatatctttattggtgaagataacattaatataaaaatttaaaaatatttttaattattaattaatatctttaatgattattgtctaatgagtttgactttaccatctataattctagaagactagaaaactcataaaaaatggcttcattaaaatctcatgagtaaacccaataaaagatttttttttaaaaaaaagagtgttggataataatattaatcataaaagtttatctgtaaagtaggatggtcaggagagtacacattattagcaatctttggacagtaacaaaaaaaaatatcaaaaaaaatattaatgtctttagaaatacatcatacataagactgatagaccttactataaagaatgacattaacaagagtaagacaactagactccaacacaccctttgataactaagaatactagcaagcaagacccttgagtagatacccaaagtctcagcaacatcaagagagaagctacccttccaagtccaagtactagaagttaagaaaaaatcagtatcatcacgaaacaccactcctgccttagatttacccaacttagtacacaatccaatatagcagttgattttcaccacaccacagggcaatttggtctatctaagatgagtattacaactattagtagaagtgaaacgctataaaaaatcctcactccagtcaaacaagaagttgtcatctgcacaaactttttctttcacccatttatttcgtctatatcgaattctctaaagacaaacaatgaacttttcaaacatagcagtagatgtaaagtctagacaagtatcaaagaactcataaatgtcccaacaaagaaaaaaaagggactttaagattgagggtgacaacctcacggatagaagaaagcttatcataaccccaaagagcatgcaaggaggtctcaggcacttgttattctcgctatccccagtgatcatgttccactgtatgataatttggtgtggcattttatttgatggggtccgagatccaaattagcataagtaggcagccagttatgagagatcttccaaagaaaataattgacctttgcagggagatgtaattgccgaaccttattccataagccaaatttaccattggcattagaaccttgcccaataccaagaatgtgaatggtattccagtacctactcctgacggagtaaatatctgatctctcaaaatgccacaccaggttatcatatagtggaacatgatcactagggatagcgagaattacacttgccttattcgcagagaaagagatattaattaaagatgcatttcaacaaccattagccattaacaaatcattcacaatggcatcaacaagtagaacacgaaaaaaagaagacttattatcatccaagttaagaatctattgatcattataaatagaaacctcaattccatcactaatgagcaaccaacctccatctttaaaaatctccttagtccataaaatagacctccaaatgaaagaagtttttttggacttaccaaccattaaaaaaaataaagagttaggacgaaggagaggggcgaaactataaataaaattgaagtgaggaaattacatgtttttatattacagtagaacctctattcaagaatacacttgggaccaagtaaattatattcta

SEQ ID NO: 303820 - DNA, 1263 bp, Cannabis indica
agaaaataaagaaaaaaaaaactttttatttaaaagataaggccaatattgcaatgtccttgaaataaagataaagcatattccaattatctttttaataactcaaacaataataataattataataatcaaaagaagtatattttttctaatttttttagggaaatgcttttgattcttatactatcaaatatgtttggtagcagtcactgttttttatattttttaatttgtattatattatatacgcatactataaagtattttcttattagaaaaggaaagatagaaaagtcttgaatgttctctcgtgaaaaccctacaggagcgaagcagcatcgtgtttctctcattttctcggcctcaactcgtcggtcggcgtcgccaatcaatgatgtccaccaactgcaagtcttgtctgttgtgacatggtgtgattgtttttgatttgtgttcgtttcttgtttttctgggttgagcttgcttctagtttgagagtctagggttttggttctgtcgttatttattccagggtgcgactgtcttcctggggtgcggtagttgctagggtgcgactggcctgccgtttggtctctggttttggctttcctggggtgtgactgggatgtggtgtgcgactaggttttgtcgtttgatctccagggttgttttcttctttcgtggttatttttcccagttggagattgtcttcatggggtccagttgtcttcgagtttgtcagtgttcgttggtctacgatcagtcctaggttgtggtagtcagattaatagttcagttgtcttcgtgtcttactgtccaaggttgtcagtgttttgttggtgtgtgatcagtccagggttgtggcagtcaaaaactatttgttttgttggttgcagtcaacgcagaagagtgctccctcgtcgtggcagtcaacgcagtagcacgtttctgggtcattttttgggttcgtgtttgttttttcggccatggcttcatcgtcttctccggtggaccttaatttggagcgtgtgtcgattatccctctggaggaggaggaagagcatgcagtcagttatgaggggccccttattgccgaagcggaggttgatactcaatggagtattgtgggacgtttcttgacggatacgccaattgatttcatggcaatgcagaaccttatggttgtgctttggaagcctggtatgggcatgtatgtgaaggagttaggaggtaacaagtatatttttcaattctatcatgaaa

SEQ ID NO: 303821 - DNA, 3919 bp, Cannabis indica
aaaactgattaaaaaaatgttaccaaacgctactaaaattatttgaaaaacagcattgtttatcgaggcatttttctctagtctcgcgagacataaacctctagatgctttgagtaagaagaaaaactttataatattgattgtgagaaaattacgactaaagtgtagaatcaaattaactaaaatttaattaacaaacaattagtaataacaagaataacaaatcacacacaataaacgaaaattataatagggatgaacaaagtcttataaccataaataataaagcaataaaacaatgaaatcaatagcaaaatgcatacctggttcgtcctatagggtacaatagagtgtttaatctcacattctaacctaagaatctttttcatctacagaatatttttcatacaaatcacaaaccaaatctctttcttttctctatacttctcaatctttctctctcaagatcacctctctcaaaactcttttgttaatcacctcccttcaaaatgataagtgttagtggtatttatagattagggatatgaattccaaagtcgatggctgcaagtgctaagttgttaagtttgttacgacataacaaacttaacaaactccttgtaacgaaatctccacgtcagcttaagttatagtgttcccaaatgaagcaaacacttccgggactatgaattgaagcacacgctgaagagtttcccatataggaataaagacagatggagtcgactatacaggactcccttctaggagagaacagctagccatcgggaactccttttcggaggatgactagctttcttgaagactccttccacgtggataagttagactttcgagaatgcccttttagatgtcatctaactttctataatgagaacaacttttggagatctttacatttagaggaactataccacaataacaaacaacatataacttttgttgaaaaaacaacatattcctagttccgactcaaaggctgaagaagtcatcacgatcatcatttagtaatattttctaaagaataaaattaaatggctggaccataagataatcctagttcgaactcaaaggatgaagaaattatcacaatcatcatttagtaatattttttaaaagagtaaaattgcatggttggaccgtaagataatcctagttccaactcaaaggttgaagaagttatgacgatcatcatttagtaatattttataaagagtaaaattgtatggctggaccataagataaactctgataaaggctgaaggaatgtcgtatgcctccctgatttggcttctacaatgcatcccctaaaaggtctacggatgcactctttatttatttcggcatttaagagagtttcaatctaatttttttcgtggtcgtctatgttgtagctgtttaatacatcttgtaaaattttgaagaaattaaaaaaaaaaattaacaacgtcgaaaatagagttcaaacagtctgttacacgcgactcttttatttgacatgaaatagactgtttgaatcctattttcggcgtcttaaatttttctaaatttctcaaaattttgtacaatgtcttaaataactagtgagactagcatgaaaaaaaattgaactaaaaaattctcctaaatactgaaatagataaatagtgcatcggtaaatttcttttaagagtgcattgtagaattttcttttgatgtattaaaaagagaaaaaagaaaggttcaaactaaatgtgtctacatcaatagcaatagttgaggcctcgctagatgttctagccataacgatagtgttgttcaagggaaaggaatccccctgtgacttttaatttcttttcctagtttaatgaactcagacgttctttacaaaaaaaaaaacaaaagttgaggcctcgcttcatatacgtttttgcacacttatactaatttctaaaacttcaatttctttttttaatttaaattttgcaatgaagtgttaaattttatttataatattttattttagaaaacaataattttttaataggtttatgatacaatccaattgacattgaatataatacaaatttttagaacttcaatttatttttaaatttaaattttgtactgtgctaaattttatttataatttttttatttttagaaaatgaatttttttaaatatgtttattatacaatccaattctttggcattaaatatatttctaaaacttcaatttattattttaatttaaattttgcaatgaagtgccaaattttatctataatttttattttagaaaataagaatttttttaataggtttattatacaatccaacattaaacacacaaataatagctctaagaatgcatatacatactctcataatttatcattaaaatactgtttatgtatatattttttatcttaactcttgaattggactagattaatattatgttagtattatatcaacaaattgtttaaataaataaccagaatgcaactgcaaaggatatttgtaatgatttttacaatttaggagaaatttttgcaacagaaaaaatttaagaacaaaactttaaaagggttataattcaatagaataaatcatatttattcttaaaataactatcatttccaatactagctataggcttctagccaatcaaaagattaatcataaaactaaatatcattagtgaaacaaaattagttattattattagacattgcatattctcttcgccttcaaccttgcatattttccatcaaggccggagttcaggaataaaaatgattcttctgtcttgtgaatcaaaattattttttacttcgcctccatcctccatattttctatcatgggtgaattaggaatccttgttgagggaataaaatatttaaagataattatgagaaaatagagcaactcttcttaaaatctcaaaaagtgttgagttgtaatcccgagtgtttcgtggtttaaaaatattgaatctcgtcttaatcatcatttttcaagactattggaagtaagctccttggcttaaatagtatatttagttcatgtcgctatttctgagtccaaataaaaatacgttcgatggaataattttgaactcggatgaaattcatttttattgaaatagatttatattatatataatttttttttaataatactcatatgcaagaatttttagttcaaatttgattacgtaattacataaatacaaggttggaataacaaaataaataaaaacttactgttgcgaaatattaaatatgtatattgttaaaataaaattaagtatttcagtgtagcacctttttaaaactgattatattttctgtatttattcgtgttaaaaattgtcttaaagttagttatattaaaaaataatgttgttaaaaattgagctcagggtcttatttttactatttttgaaaaatataaggtccattttgttatttaacaaaatagaggatccaattagtaacttttgcaaaacacatggtctaaaatagtatttacccaaaaaaaaacaaatactaaatttcattttttttttttgtttttatatttaagtaaggaatgaaaattgaggtgagagaaagttggtagagagtcgaggtctagggtttgggtagggtctgagtttgggttcaggggctgcgacggaggctaaatccggtgtcggggtctgggattcgaggttgagatcttggtcagtcacaggatcggagtccaaaactttaataaaagaaaattcaaatagactaaaataaagaaataaaaaattgtttaaataaattttataagtgatttttttttcaaaaattttattttatttttaaaactaaaagtaaaaacaattttatagaatatgtttttaaaaatattttcaattttttttt

SEQ ID NO: 303822 - DNA, 1920 bp, Cannabis indica
ttcaaaaaagataacagacataccttcaggcccatgtgccttcatacttcccatcgtaaaagatttttctttatttccttaggctctagaaatctaaccattttagcttactctagaggggatgtggtcctgggtaagatagtccaagctttccaacaagccaaaagtaaaactcgagaaaattccaccaagaaaactagtgaactcttttccaatttcactgcaagacataacccaacaaccattcttattcaaaatactgtcaacagtattactttagtttctaattgtagcagagatgaaaaagaattttgaacatttattgcaatctttcatccaagagacgcgggatctctgttgccaaaataaagcccttcttttagctcctcattaagttcagtccgcaccctctgttcctgaacccaacaacaagatcctgtctccatacattggatgtcctggagctgcgcttctaaccttttaatgttatagttaaatttaccaagtttctccctattccacttatgcagagcaagttttgtagcgcctactttcttgaacaccctcgtaggggcccaagaatgattgacttccaagcatggtcaatgaccatagcgctatgagagtctttcgtccaccaagcttcaaatcaaaattgacatttaaaagttgcctcaaggaccccaaagtacacatataaaggtatgtggtctgagttacagatatggagagattgaatacctgcctctggaaataattgaagtcattccttattcacgattgctttgtccaaagaggatttgatatgagcagaaccctccctatgattgtcccatattaaattgttacctttcatgggcatgtcaatcaaaccatggtagttaatcatctcaaagataaagggtaaaaaattgtccttattcttcgactcgacacattttgaagaattcaaaacaaaattaacatctccaagtgtcatccaggggccaccaaactttacaccaagattcaacatatccaacttgaattttttcttttaataaaaataaggtgggccacacacaggacaaaagccaatggtgattagcagggtcaaagtacacaataccataaatttaattttcgaataaacaaatattctcaaaaataaatccaaatttctaagctaacaaaatacccctacacaccccaaaacagcaacaacaatattattataaaagtataaattttttagaagacgtactaaaggagtagcttccactttcaattcagtcaaaaagatgaaatccagagagcacgaccgaatgaggctttcagttcaagaaccgtaaaggtctatcccaaccctctacacttccttgcgacacctctcatggctcctttggacgggataccaaatcctcctccatagatgtaacactagcaagggtcaatccaacttgtgagccttcatcttcaattataacaacttctctctctggggtgataatatcagtaagtcgagctcttttcttccaagtcgtgagcctagaggactgtcctagagaaattggcttgtccacatggtaagattcagcaccaaaatggtttgacactttgtcctcaatctcttttgagcatttaaaaggttctttgaatgaggcattgtgctcatttgcattgcgttcgctccgaaatggttcttttgatagtcctagaccaactggaaaatctcttctaactaggggtgtttgtggtgcgggcagtgcggtttttgactattttttcaaaccaacccgcacatgcagttttttcaatttcccaaactgcacccacactgcaaaactaaaaactacaaaaactgcaccgtaaaaatagtgcggtaaagtgcggtttttgcagtttcgactatcactaaataattaaactatcacaaacaaa

SEQ ID NO: 303823 - DNA, 2215 bp, Cannabis indica
aaataaaattggagcaacaaaaacttttatctaggatccaaaaccactgcaatagtcataatcccatgaatcttttctcaattttgaaagttaaacatcatttgagttgccttaaccttaaaaaataactcatttgatgtcattccttttttaattttccttttaattttatacatatgcgggaaaaacaaattggctgtggggtacttggttccagaaaacaactctgtcacctcataaaaaaattttagcctttcacataacttttgagcactaattcaatcatcttttgatggaaaacatttatactttggatcacaaagttttactagctcaaacattgttttatacaataaagttgtcttcatcagtaagtatgttgaattccatcttgttacacaatcaagagataactttttaacacatgtcactccaagataacgagcattctcctcaaatttctcataccgtttttgtgtgaccaataagcgatattgtctcaaatcttatcaatgttatcaccaataacagacaaaccatctccaacaattagattcaaaatatgcgcacaacaacacatgtgaagcagctctccattcaaaataaagcaactaggattaatttttttcttcaaaagtggaatcattgcatcattagtgtatgcattatcaagtatcaccgtactaaacttatcttcaattttccatttagacattaaagaacttagtgtctctataagtgttggagtgtcatgtgggtatggcacatacttaaatcttataatccgactatttaaggtccaagcattaaacagccatatatcctatgttttgatgattgtccacatattagtggtcaaagctattctacttttatttttcttcaaaatttctctacattttgccttctcaagcttatgtatcttcataatgtcaggccttattgtattccttgccatcaaatgaaacataggagaaattgtgtttgcacaatctataaattcactatggtcaaccatcgataaaagggtactcatgtagaatgatcatctaagctcttttttcttcctagttcttgatcaagattgcaggtgactacaagacttacaacgatatttgcacgttgttctttctgtggggttttgtgccataaataaaattaattttaatataatcagatttactaattaataaaagatcaaaaattagaagaaaaacagctttttgctctcatcctctcttccgtccatggcgaagaagaggaaggtaggccgaaggtcgatccctagaaccactacaggatcgcccattaagcaatcagagattgaggaagaagctggtctctgtgaggaatctggagcaacaatatgcacaggagatcaaagccctaatatgacagtagaggaggaacctggtgcagaaactgaatcgttgaagtcagccagaagtaagagttgggcagacgaagtggaggagaaccactggtcgactgttcagaaccactggaagaaattcacaacaggtaagagcataaactctgatgctaaactgaaatttactgaaccattagttaaggatggtaggaacattgctcaaattggtttggaggaggtagaattggaagaaacaagttggaattcggttgttatgtgtatggttatgggggctaatgttcctgctacagtatttgatgggtttatccgaagagtatggggacatttgggcattcagcagattgcaaggatgacaaaaggtcttaccatggttaaatttaatgatgaagctactcgtgatgaggttcttgagaatggaatgattcaattcgacaggaaaccagtaattattcgaccttggacttcaaatttgaacacaattaagttggtgaaatgggtccctctttggattaggcttcacaattcggggcttcaatattggaggaaaaacactctaagtgctcttattagcacaatcgtgaagcctattatggttgacaaacacattaaggatcgtactaggatccaatttgcccgtgttcttgttgaaatggacatcacaaataatctggagaaatctttctggtttgtgaatgagtatggtcaattggtggaataaaacattgagtatgagtggcttcctgttaaatgcaagcattgtggagggtttgggtgttgggttttatgccctaaataaaactctttacaatctgattagttatc

SEQ ID NO: 303824 - DNA, 3260 bp, Cannabis indica
tttttttttttttgttgttgttgtttttataaaacaccctaaaaatgttttataaagaattctgtaaaaatataaaaattttataaaaaaaatagtattttatgtaattatttcttaatattatgcactaaaatatcgtggggcccatcatatattctgggtaaataccattttgaatcctgtgttttgaaaagattattaattggatcctctgttttgttaaatgataaaatggaccctgtattttttaaaatggtacaaataggactctgaactaatttttttcaaaattaaatttaataataatctaatctaaaggtgttataacaaacacccctaagtaaaaaagaaatataatatgagtaaggctaaagagtatggttagccatttataaattgtaacttgataacatttgatatttctcacaactgaacaagcttgcaaccactatcaatggatcttttaactccatccaataccaactgtgtctttctactaatctcaggccatttacaatttggctgaaccccatcatacacaacaccacgaacaagcctagaaaactcttcaaccatcaaagcctcttggggtaattcacaatccacactcacttcctcaggcactgcattccacccaatgtggagatccacaaacatggcaccacaacttaactcaaaagaagcagagtcttcttggtatgggattatgaagtcattggtgtgaattgtagcattagaaccagatatagtcaggtccattgaagtgttggagaaaaaagagcagtgaattgttgcagccgtgttgttcgatgaaatgtcccaatgaaatgctgctgtaaaggacaagatgactccggtgcagtttgttgtaacgtcctgagcttgtactgtggttggcaattggtagtcctttgcccataaaagggctccaatgcagtaccaccccaagtccccaagcgcgccgagaccgtctaagtcgggttttacccttatgttgctctccgaaaattctgggcttactgacattgtggatgtgctgtaaatcttcaaacaatggcaaacaaaaacaattagctcatctcatattcattgaattatctcttagtttttggtttggcatgttgttgattaatttgataccaataataattgtaacacactcaaactacatatacactatctacacttaatgttgtataattaaccttaactacataactaaaagtgatataagtgatgtgatttctatatttaatcatgaaaaatgcttaaaagaactaatggtgtttaatattttctaacactgtcatattgttattgaaatatcaataattagttgtaagacactatttttagatggttttaagtactaatagtgtcttaaaacatctctgaccatgctctctaaacacattagttaaaataaaaagtgaaatttgaagaaaaaaaaaaagtttacaaccctacaaaaaataggtctttataatagagaattgacaggaagctctctaaatgtagtaaatataaggagcacctaacttaatcgttacactaaaattattattatgtctataaatatcatattttattataaatataactagttaaaatacatatacatttttttttgctacaatgtgggtaattaattagttaagcaaaacaattagataaactcaaattgttgataaacaaatagatctctacaatgaaattaatcaaattttcagaattcatagtctattttgagataataaaattgttaaaattatttactaactacttaatataaattttcaaaataatcccaatatacattttattaattattaacaaacttacgaaattaatttggccaaaagttttattggaatgagagatcaagtctttcatcttgatcgtcctaggatgatgcagccacatggtaccgtccatgaattgtacaccgttggatcggcatgcctccaaaatctgatcaagctcagccacattaagagcagccggcttctccaacagcacgtgcttcttcttattagctgccttcactgcccactggatgtggagactagtaggcaggggaaggtacacggcatctacgcatgggtcttccaacacttgatcgtagctcccataaagctttattatctcatgatcagttcccgaaactccaatcagggacgcgaatttctctgctttgtcgatcgaacggctgccgatggcgtagagggtgacgcccggcgcgagggacatggctcgagctagttttcgagctatgtcggcgcatccgatgattccgaaacgaattggattgtttgagctgagcggagcttgatgatcagccattaatgctatggagtgagtgagtgagtgaatggtgtttggtaatagagtgataaaatgatgtgtggactcattggctgccatttatctatctataactatataacatacgtacaataaggctaattaagattttttactccacatatatataaaaattatggtattagtgacacgcgtataatttattattgacaaaaaaatatgtttttaaaattattaattaaattaaaattaataattaaaaaattacgtaaaattaaattaaaaaattaaattattttttttcaaattcattatagaagtggcattgatatagtattaatatgacaactgattaaatagacatattatcattttttttatcatgtgtgacataaaaagtttaggggcataataatacttggaaacgaaaatcctaaataatcaaaaaaattaaatatataaaaaattataatttttttgaataaattatgtaattttattaataacaattaactaaaataatagtctacaatccaatcggaatatcttccttggagacacaactaggattataataaaaaaaactagtcaaaataatctgccacctaatttccaaatcatttgacaaaaaaaactaaaaataaaattaaattaaaaagattacagcatttaagaacacctgtattcactttcatctaccgcttagagatagaaattgttgcagcaaattcatttaacctcgtaaattaagtattcaactattgtacaacgtacgtaactacactattaaaactcgctttgctacataaaagtaactattaaagaaacatttaaattataaatatataatataaaaaaccgtcaacaaaataacaagaatataatataaaaataatatgaaaacatcaaaagattatattttctataaataaaat

SEQ ID NO: 303825 - DNA, 2618 bp, Cannabis indica
gaaaaagaaaaactaagaaaaaatagaattaatcgtggtactatacgataaatatcatggatgaaagcaaagcaaagccactcatttatcaattagattatctttatttaattataaagtcttgaatggcattttgtcttttttataacacttgaggacgctcctttctcccattttaccaagaatgcgacaactctatctcttaaaggaccataagtattaattattaccacaatatttaagttttttttaattatggttttatcgtgtagctagctagctagtagtacacacgatatagtgatgtatatgtggtggccaactatagtgtttgtgatcggtatggtattattagtgtccaataataatgttctaaaagaggattgttaaaaaaacattagtcgtttctagtactttttattagtggcgtcccataatattatttaaaaattatttttttaaattatatagaactcgatttacttaataacactattagatgtatgacatcgataaaagtgttaagcactgattatactttttaatatttttttattataatactcaacaccttctttttcttttctttttaatgtacagtacaactttatgttgtttatgttaatttagcacaatatggtctaaataatagtaaaacatttcttggatatacaatgatatataaggaaacttcatgagtacttattgctattttgtgtctaccaccataaatgttaatggtccatcataattcagctagcaaagaaaatgataatgatgataagtactagaaaacgtgtgatggtgataccatgtccagcccaacccaaggacatgtgaaacatttttcaaaaaaaatatgtaatattaatttattcatggtcaattattggagacttaataattgtacacatattaaatattaataataaaaaaaatatttacctttactttaataaaaaacattgaataaagactttttaataagtaaaatatttatttcttttaaaatcaatatcttatttttttatttttaatttttgtaaatattattattatttaattttaatagataccaatggatctccatatatccaatgaggattcccctaccctaaacctattgaggattaagcgaggcaagggccgaaataaggagataaatattataaaatggggacgaggttgggaggcgcattaaccgcttattacccacccaatttttatccttactatcaagtgcacaattcagagaaagaaaatgagctacacaaatttggaaaatcttaatttgtctttgagctagaggccttttatttatagaagaaagctttacagagaaacaaaacaagaaaagagacagttgttacaacaaacctgtaactaacacgaaacagttaaaaaacagaataattaataacataattcgttattctgtatcacttccaagccatttcatgaaattattaaaattctttgaagacgcaccatattcacctatagcattcattcccatctctttaaattttaaagatctttttcttatatctaggtcagtcagaagtttttccactttatttttcacctcttcaccagttataataccattttcattgggtacaaactccatcccaactttccaaaaattacatatgtaatctttgtccaaaaattgatcagcaaaataaggccaacacaaaaatggtaccccattgttcaaaccttccatagtagaattccaaccacaatgactgacaaaacaagcaatagaaggatgttttaaaaccttttgttgaggagcccaagtcactatctttctaaaatcattattaccacccaaaaattcatatgggtcaagctccttatttgatataaatccaggacgaacaacccaaagaaatggtctaccggtgagctcaagcccacgagccaactcaagaaattggtgttgctcaagagaagtgaagctaccaaatgcaagatatataacagaacgagacttgtgttgatcgagccaatttaaacaagaagtgtcttcaacccaaaattgtgatccagagatatctaatgggctactagctttatcggccaataatggacctattggaagaagcttcggatgtaaagaaagtgcaacatgttcaatatcataagttgtattgcacatacaccattgtgcagcttcaaaaccattacaggcttctaaataaatttcaaacgctgccttttgttgagctaagtcgtcaaccttccatggcaattttgatgtgtccatactaggcatgtttggagatagttgaattatttgtttttttgttgcacttcctgcaaaattagaataagtaaaatattttaatcaccaacaaaagttaaatgccttgtactgttgtaacattttcttgtaaattgtaattgttgtgataagcttacataacattttcagataaataaaaataagccttaaaatccataaccacaatgtactttgactaaagtttaattttcaattattaaaggaatttttccaccacatatcaaaatttttaattttttactttttttttttttgtgaggtggaattttttaaaaatttctgtgttttttttcaaaaatattgt

SEQ ID NO: 303826 - DNA, 1634 bp, Cannabis indica
aaaataagtgtttatataaaataaaaattagatcttattgtcattgcagctaatgtttaatattgttgataattcaatcatactagttcagttttgagcataagcccatttaactatattataggtcgcaaaattacaaagtctaaaaataaaagagaaattacatcccaaaaataaattaaggagtctattacattgatacatgtagttaccaatactctaattggaacaggttccctgaagcgttttgataactgtctcaaagtcgctcacaaccaacaaaaaatggtgcttcaaggaaactgtcgcctccaaggctaacaagcaaaccgttgcttcgccaataagggtatcagagaagctcactctattggtggccattcacaaaatcgttcctaggtggtctctagctaactccaccacacacattgctcattccccaccttcgcgtcacaattaattttaatccaatcttctgagggtggcgaccaaagaagtgaggcaggaactggagaattagggaacaaataggagtcataatctgcataacaataactgatataatcaatatattgtttgatgttactcatattgttattatgtgccttgtcattacgggcttaccaaatcgtatccaccacaattgaagcttagaggaaaagcccatcaacattgacatccttcaacttcaaggcccatagaaactttatccaatcccaaacacgagcacctgaatcaaaaaccggcataaccctttaggggaatatctccataagtagaaagttaagttataattgagaaaaaggtgttccgtagtctcctctaccttacctaaaagagggcaaaagacatcttcaatttgtattctctaagctagaagagcttgaattagaagggcatttgagagattgctccaccaaaaaaccttatggcatttcaacactttgttattccataattttttccaaagggatggagccacaagggaggagcactgtcaaaagcttgaaccaagtaagcaagtttactatagaatatacttttaggttccttggtctaaatccaccggtctttaccctggctactaggcttaccccttttcagaatattacaaactgaattagagacttacagtcaaggaaggaataaagcttaaggagatctcaatctccattgtcttacaacaggccaacaaccttttcaagacccctagtgagattggccacaggactaggacataactctttgccatgaagtatccatgagtcttcctaaatatttttgtctttcccatcagacaccatcttacaaacccctttcttcataatctctctggctttcacaatattcttccaaaattaggagtccgaatttttataagtgcacttcattaaatgctttccttttagatactcggcacttaagaccctgcaacatagtgattggtgctcattgagcatatgccaatcctatttagctaagaaattctagttcatctccataattttttggaagcctaagcccccacaagatttggggaggcacagactatcccacgctttcaaatagagaccatgatttctgtaacaccctaacaagcataggcgtattacgtgattttaaacatactgtgc

SEQ ID NO: 303827 - DNA, 1826 bp, Cannabis indica
atagtaataaaaaaaaatttttgatattttttttttaattaagtcgttaaactaatcatagaaatttaaaattttcttttattattctttattatatcaaaatttataattaaatttgtttagtaatcacattcatggataatagccattaaaaaataatccatatataaaagtaatttgaaaaatatttaatatgtactatctcaaatcaataaatgatacatatgtattttactaatgtttttataacataaaataatttattaaaatagatatggtgatgatgatcatcatagaataataaaggagagtctaaaaagtgagtaagaattctcgtagcactcgtcctcaaataatttaattagtcattggagtgatttcctggattgcctaccaaatataattgagaagttattacaaagataattagtagttgaaaagttaaaaaaattggtggagacactaaatgaaagacattcatcttcaccttcaaccgtagaatatattaaagacacaatagttatgtttgctctctttttcgtggaatataattccgttttgggttttctcataattatattgcattaattttggcgtttgttgttgctgtaagatatttattgtgtgtttatattatatagttcagtgatcttttttcattttaataaacgagcaaaacataaacgagcatctgtttggtttgaatatgacagttaacgcatgatttcgtagtcaatttttaatagtcaaaaaggtggtgcttgtagtttttctttcgtacgtcatacttccattaatatacattgtatattttagataattagtactgaaaatcttaaacttagcaatatttattaatttattcctccgggaaaataatattaataataatgctgaaagcaccaaatttatagaggttgagattaaataatatgtatgagtcatgactagctagagttttcctatttaataaaagatatacgataagaatgggttttaagtttaactatcaaaatatcaaaaaagaaaagaaagagataagcatgagtaaataattctcttattgatctgtgaccgtacacgctgaaaatattgtaaaccatgttatagaaagggtttgctttatgctttggatatgaacaaagaaaattaaaataagcaaaagctactaatctaatggagtcgtaataatggtgatacatacataaaggtgtagaaattaaattaaaaaacagaaagaaaaaaaagaagggatatgcaaatccctaataggcggcaaactttaggtaggcattagagaagagagtcttgatctttagcctttaacgtttagctaaccctaccattaaccaatataaatgaatttataattgaaaatacgataaagaagtcaatatacttttgttattttataaacttgtagggtttaatcatcatgatcatagacttatagaatcctaagtcgttttcatatggtatattttacaaaaaattcaagttctagcaatatatttaagagattttaccataaatattctcattaatcgcttttggcaattaagtttttatgagaaaacaaaattggcaatcaactaagtcaataaactctcttattaatgtagtctttatatattatttattccacaaaattcttgatttttggatatttatatataaataaatatatatatgggtgatgggtattatccattcatgggtaatattatgaaaaaccctaaaccctaaatgaaagcaccaaacttttgacgcagatttttcactacaagaaaatatagcaataccggcggaattaataccggcggagc

SEQ ID NO: 303828 - DNA, 1212 bp, Cannabis indica
taacggccaaaaaagttcaagagacacgatttactatatgtcaaaattcagggagaaaaattactaattaaccttattaatattatcactactgatagtaaaaccttaatatatttttttgtaataatctgatagttcatacttctcacattggtatataaatgagtacatgatagtaatttagtaaaagtaagtaaaatcattatactatacggatctagtagcaccagctttatgtttctttaataataataataataataataataataagttaatattttcatgtattattttgctaagaaaaatatttatatattaaaaataaaaaaattgtgtaaaacaaggcagtggcgccagtgctaatacataatcacatattagcacttttcttaccaaatataactaaataacttgatagaactatataataaggtttgttggtgtttattaattttcttgaaaatgtcaacttatctatgtttatattcgcacaaagagttcatcaataatgcttttcacgtcagagtttattgttttttttttttttaatttcactagagttgacacagaaataaaggaaaatatttaagtttagaggtaaataatagaagaccagtaatagaagggcaagtgaaccaatgaaatggatggaagagttactttatatgaagtgttagatttggtgccgactacgtaaagaccccacgagaggagtagtgttgcggatggtgaacacgtgtagggctgtaaatgaaagaggagactaaaatgacatagctggcgtcgtcaaacaaagcatcgccatcaagacagcgtccaatccaccaacaccaagcaaacgctcgtggaatccccatcgtgcgttgggcccactcccccgacctccacattttctactccctacatgccacgtgatctaccatctcattggttctttttttgtccacaataaatacttatttatatattattaatacatgtatatatacgtatataaatacttattggactgagtacatattcttacaatgcacagtcgccgagccacgacacttttaggattggagtggagttgagtaaaatagaaaaacaatggtttaatataatgaaagtgatgattcatcttttataatagggacaagatgagaatcaagtaattttacatgtactaaagaaaatttagtggtcatgtcaaaaaaaaaaaaaaaa

SEQ ID NO: 303829 - DNA, 1473 bp, Cannabis indica
ggtccaatctgtaacttttgcaaaatacaggatccaaaatgatatttaccctaaataaaatttgaaaaaggaattttgcgctggcaagtctaaacatatccagtgataaacggtagtagtagtagtacgacttctttttttcggtctctcatctccaataattatcatcatatacaattttatttcttttgtttttctttttaactccattttagtttttcagatgcaacatgtattgtataacattaatttgtaatagtcagaataattagtttggaaattattcgattttttcttttttgtgtgattgaagaatattgttgagtagagtataaataatcttggtcattaatgttatatattatatatattaatgtaatattcttcttgctcgattctcaatatatatataccaaatacaaagtctcgaaatccaagaaaaaataggctggctagcataatccgcacgcgttaacaattaatttatagttagatcatcacataattaatttaagagcatggtacattattgttcaatactttcagtatatagaattttataattgattaataatattaatttgtaaattttattttctttaattatataaaattcaatacttataataataataagatgacaccgaaaataatattaaatactaataatattttttaataattctcttaaaacttaaacaagcgctgagaccaatgcactgtgtttttcgttctacttttcaaacatctcatattaatgacaggtatttaaatgtaaaaaactctaattatatttccagcagtattgtctaacactttttacagttaatactttgtgattagttaataaatttttttaaaaattattacagcacccaatacttataataatgataaattaaagggtattaactattaaacactgatattacgttttaccatttcttctcttacttaaattattggggttttcttcttctttctcaattttgttgttattattggatttcactcctcctctggcaagaaaaacttgtctttatttacaaggaagtcagatctcaagataatgaaatatcttttaatatctcttcttccaatttcgattatgaagattgaagatattatgagatactgttaaatgggttgactatatgatcgatatgcacgtataaatctcttttcagatatatatataatgtgaataggtaaatcgcttaattaaattggttttcttattgtaatgtttaacatttatatttattctatataaagtgtaactatataacagaatttttaagtttaacgatatttttttacatttttacattaacgtaaatattctttattaattttagggactattttatttttatactttaaaatagttttttttatttttttttttagtcattttttatagaattttacataaaaaccttattgtagcgctgcaacttaaattgcaataaa

SEQ ID NO: 303830 - DNA, 1126 bp, Cannabis indica
gatgttaatgaaacatacttgttagtaaatctagatcctggtaaaatattaccaacaagtagttcactcctcatatcgtaaaggtaatggagatacgactacttcgaacatttatttatcacaagagcaccagttgggtacaatagaattagagtaaggagagcttccaaatttctagagagaaacacatgagttttctagagggaagatatgaccttatggagagatttcataatgtaattataatgtaaaatgtaaaaaaatgagcaagaggttccttccatttataggaatggaggtacaataaaaaaatacaaaatcaggaatattcctagaatatattgtatgggttgattaaggcctttgattgtgataaaaagtttgaggatgaccaccttgaactaggatggtgatcgttgatgttaagagatcgaatctaacacgtcaggttgtttttgggtaatgtgaggctaaaattgcacattggcttggaaataaaattttcaaaagaaatcttcatcattttgatctgaccatgagatatgcatagaaatttcttgaaaagagatttctaagtgcttacccaaaaactaaacctgatgaaattgacttcaatgtttgacacgtatcaagaacgaaagcattcatggagttaagtgtcctaagtcgtagaagtcaactcagggaaaggtccatagccttgggggcaagtagactttgcgacttccataattagtattcaaattcccctaagttattttcaagtgaccatcctttagtattctgaactgataagataagaagacttcaacttgtgagcatgggaacatgaagatgtcaatttggcatctgagaagccaacccaggtgccttgggtttcactcggtgcctaggttgacatctggacctcaagttcaattttctccatattcatccaaaataaagataaaatttcttttagaaaataaattaacttggagactagaaataccacgcagcgcccaggttgaccctaagctagggccccagcgcctaggttggcatatttttaacctaggccacttccaacaacaattcttataaaatcttccgagagtcattagatggccaagaggctgacccatcg

SEQ ID NO: 303831 - DNA, 1758 bp, Cannabis indica
cttgccttaaagaatattctcacactagctagctatatattactctaattactattattagtccattttgataaaaagaaaaagaaaaaattaccttactattattaaaagcgacacttaaattaaaggtcaacatatatggaacattgaatgactaataatagtttaatgttttttaattttttttatcatgataaatgttactaagatgtttttattactattagttcaattaattgttgagtatttttttagtaatagaataattattaaatatcacatattttaatttaataatatactaactactaaccatatgagtgatactctaaaaacacaagtatcatatgtttagaaatatagttattttttaatggtacaaaacacaaatacaaaataaaaaaaaaaaattaacaaagcttttagcatagtaatgcttttagagagggaacaattattgataataatagtaataaacgtgattattgattaatagatcaaatcaatagtaattaattaattacaataaagaagtagtatatataaatataataatatatcaatagtggttagtactattttcacgtggggttgaatgtgcattttgatcctttggaaggcgcatgcatagccccacagaaaggctctttctttggtatcatagtatttgcatttatttatcatggcaagaaaatgactatgtccaattccatgttttcacgcatcatctccttcaaatgtgttacatatagtttttattattcttctttataaatattaactcatcttttcggactagttccttctacgcactcaatttatataaagaatatgagtgtctcacattaattcatatgtaatgtatacacaaataaaacaaatacataacaaacactagactatattgaaattgtttactcagaataagtatgggatggtccaccatctttatatatatactcgaaaggtgtatgggacctaagacgattgctcttgtggtgtttaatttactattattattattatcttttatttcacatgggatgattatggtactatagcaaccaattaaaactctacatgtataaacattaaattatattttaatatgcattttcttttgcccccaaaaaaggctcatttattcctctcactcttacttaagcattccatcatatacatcgtcatctccactatatactactctttagtcccaatgaggagtagggatgagatactaatagataatgttcaatcttctgatcccccacattaaaacaataattaagcactgaaattactatcattctattggtcctaacttccaagaaatcataatattgacacctcaaaaatttggtttgtctatttatgtttaaaaatataaacacttttgctttttaagttaaaatacggatcaagtagtggaaaaaagaaatatactaattaagcttaataaattagtgattatctttattttattgtatacctttttgtagtgtctattctatggccacctcacacgtcattattcaacatgtctacttataaaatgatagttataccaagagctgcctagctaaaaatatgggctggatattggaaaatggaagagtatatataaaaaagagctatcgtctcaattaccgtgaatttcctgttatgatctcttagtcaatttttacgttcgaaaatatatatcaaaatattttttttttcacggaatattcgttatacttacaacatcattcctgtaaa

SEQ ID NO: 303832 - DNA, 1618 bp, Cannabis indica
tttggttctaatttattatattgtatgaataattatagtagcttaattattattttttttctcattactttgttttcaaatatccatgtatataatatagtagtgcatgtagagatgtgttagagacatgtaactccgtcaaaatttgtaggtgaatcaaatattttatttttatcaattaagtttaaataaagacagtatgatacatgttcttcttgaagataagatatgtcattttctgttgtcttctatgaatttcttctttcttatctgttgctaaatttttgtacaattctcttttttcgcatttctatactcttatcttctataatttttttaaaaaaaatgctactaacaaatacaaattcagtaaataaacttaaatacttcatatttatataataattaatttcctctatccattattgatagttgtgtgaaaaattcacaaatattactcatgacattagtagttttcttaatttcccattatattattgagagcttcataacattcgtttttaatatttgatgttgattagaagctgcattacttgttgaacttttttttttcggcatatctttctctttttcttctataatttttttctttcatttcttttaataaaattttataagcttttcttcttttcatattctttgccttatctacaagtaaaaacacaaaataaaatttagtatttatttgtataaaaattaattaataattatggccaaatcttactctttctcattatatttgaaaactataatttttatccacaagaataattattactttttcattgactgaactttttggtttattctgccaaagaaaagatttaagaagcaaaaaaatcataacatatttaatattctcaatagcacaaataagtttcaaatatattgtaataattattataagttacaacgaaattaaatagaataattttgatttaaataattaatattaattgttataagttacaactaaattaaataaaataactgagatcaacaaacagaaagaagtggattcgtacaaagttaattggcaatacaatcgacatgaaataaatgtatacatgtaggcatttttacactttttattcttattttaaattcttctaaatacgaaacaatttttacctaaaaatttatcattttctccaactaaaaacatattcaggtaaaaaattgtaatctcaacattatccgtaaatgaaaactaatcctcatatatatatatatgtcatgttctttaagttcattcttatatacaacatcaaatatattataaactatataaatgtattaattataaaataataagttcattcttataaatttctttcttttctagatatgaaaaaataatacaaatatatttatttaagttatgatgttttttctttcatgtctttgaattttgtctccagagaaagagttaaaggtaactgtatttgggatatgttaccaatagctcaatattagaaggccaatgacagaagctcattgaagaggaaattagattatatatcctttttacattgttttttttttaatttttttaattttaccttttttttaagtttattatatttacctctttttt

SEQ ID NO: 303833 - DNA, 879 bp, Cannabis indica
ttcattgaccatgattgaaaatcaaaaaaggaagccaagcagtcagtacccacactaaagaaaatagcaagggaacaagagaatcctctctaataattgcttagtgaggtcctcgtcggaccttacatgtgggagcaaattggaaaatgatctaggatgatagatcgagaacataaaaataaaaaaggggtcaagggttaaaccatccgacacaaggatctctgacaaaagaaaccaatcacgacaatgctttcataaaccttgtcgaacctcacttatttattcgtattgcaaaatagggaaaaacgacattcacaaaatcctaattttcctaaggcagagaagagttcctaagtttaatcactcctatcacatcctaagctctgcgacgaactattttaaacatcgtcttacacggcagagcattcaactgaaaaatctatccaaaaacccaaaatgcatggtgagcaacatataatttctacccagaacttaactgcagaaaaaaaggttaaactactagtttaggacgaaagtacttacttggtaaagtagagactaggggtgttgagtttctaggtaccgaatgcaacctcgcttggaaattttggagacgtcttaccaactcgtcgttgttctcgtagaagtttgacaaccacggtacatgtggtgtataagtctctgaagttgggggtgcatctggaaataacttcgatcgcagttggagaagacggtggtgaagctcagtgttgggttttgtgccctaaataaaatctatttcaatataatcagatttactaattaataaaatatcagaaatcgttttatgttgcatagttcacatgacttgtttcatgattatgtttaatgtataaattc

SEQ ID NO: 303834 - DNA, 1599 bp, Cannabis indica
attttaaaatgcaaagtatgtttagatatttgggtccttcggatgaagttgtttctaatctcataactcacgagagacaatgggatgtggcgttgctcaaccaataattttctcggttagatattgatcgtattttgacaatacttctaagttttttaggaacgatgataccctcgtctggaatcaccacacataaggtatttattctgttcaaacatgttatcattttgcagtgtctcatgaagacattgataatagctcaatctgttcttcggcaaatcaatggtggaagttcttttgatcactacagttaccacaaaaactcaagatttttgtctggtgtacctacaatgacgcacttcatgttgctacaactttggtcaggaaaaaaatcattgtagattctacttgttctatttacaaccaagcatgggaatctattggccacactctttttggctacaagtacgcacgagcggtttggcaacattcaaatcaagttcttgactggtccaattcgtcgacaatgtgactatctagttcatttgtctataatttacacgtgctgaaacggaacaaatcttttgcactctttggtcgatttggacggagagaaaccaagtgatacttagaaacaaagctaaactagccaaagaactagccatttttgtagtaaattatctgtagaatttttgatctgcacaagccaaataatactgcccgaaaatcagagcacccgcacagtcatcttctttagttgttgaaccagtaaatgtcgatacagcagttgatgcaaccaacaaagttactgctgtgggggttgtagttcgtgactccttcgacaatgttaaagttgctctttcaaaaccaatcattggtaattttgagtctcatgaaatggaggcactagcgatgtttcatagcttaaattggacacttcaacttcatttgtctattactcaagtggaaacgaatgctctacgggtctccaatgctttatgcaaaccttcatttgtaattttttctttccaaaatttaattgtagatatctctagtctttcatccttttttcctaatgtgaatgtcactcatgtcaaacgtacaactaatatggctgctcacgggttggctaagtttactttaagagtggatgaagcttgtttttggtcgaattgtattctcctgcctataaactttgttgttgtaccattttaatttataacaatagttttttattttttaaaaaaataaatgagatctaatctgagccatacacgtgtcttttttgtttaaggtaactgagcaatagtaacagaatgagctaaaatacaacattaagtaagtgtataaaattaaaaacatataatatatgtgccataaatttcccttgtttgaaaatatgtgatcaaaattgacctcacggtatcaagttgatctattttatgcatatccaccctactataatgcttttgtatctttcttcattataattattactagttgttttgatgttattttcctgttacttttatgtagtttttttgttgtatttgtgttgttcctatagaaaatcgtaaaattgtaaaaaaaattctttaa

SEQ ID NO: 303835 - DNA, 2741 bp, Cannabis indica
aaggcttttcaaaatcactatcacattccatgccaactaattagttcacgaacacacacatcaacaatttaagttcagcaagtaataaagttcaaataaagtgtcatatactgatgagcatggttttctgaaattgttcctgaagagaagttcacacttcacaattcataccaccaaaaagctcagcatcataaagcatgaaaacattaacttcagattgtaaagttgcctacaatcatgtgttttttctcttaaaagcactgaaaaattaccttttttcttccctcccttggttaaaaaagttgtcagttccaaaccttccagccttctcattatttgaccctgcatgtatgtgatatgtctatgttagaatatattgtccacattgaagcagttaggtttagtaatcgaaactgagttcagttatagataacaggcgtaggcttctaaaaaatcccccaaaccacatcactgaataattgtattcatagtagcagtagcagcaatcttttttggcatttttcttgtctctttaacccaaatgaagggcactttgcaataaacaacactcatggtttttttacttatgttacagagtaaatcaaaagagctcaagtgaaggaatctaatcacattagtacttctgttgcttcttatttttctgcctagctggactaaggaggaaaataaaacttgggagaaaagtaatatctacaaacctcttcctctgtgagcattaggagttccaaactttttgtttccatgtttcataccatgaaattgagaattctgagatctacacaaaattcaactccattgtaaatcgcaagccacttatataaatgagaaagcaaacaaatagaaatcattacaaattatcttacctgccttgagacatccctccttttgtattcctgttgaagtttctattcgatggatttttcccattggaaggattaagcccaccaccactttgcaaatgatttctctgcaaacatagtaaacacagtttttgctattcagtggcaaataaatcattgataacaactaatttgaaaacaaaaatacattgacgaaaacaaaagaaagaaatgtaataataaaagatgtagaaacacatttaaaggcagtaatctaataacagcaagggagattttaggaccacttcaaaggatgaaagaataaagtaaaagaaaggcttaagaaaacagccctaacgatcaatggatcaaaataacatcatttatgatagctcatacaagagcaaagtcacccactcaatctcaactaaaacaaactgacatctttttaataagtcatacctgtgttcccatgaatcctgaagattgcatgttattagtttgctccataggcaagttcccttgcaattgttgatttgctacaggtgatggtttcagtgtatttacatccatcacaggcagagacaagttatgctgattctggttaacttgcggtacaatctgattatagtgcatattaccaaattgcggactagccaaaaaggcaggattttgaggaattgtgggctgtagtgcttggttcataaccccgtatgtattctgaggaacaaactgagaaagattttgcatttgcatttgcataggcaaaaattgattcatattctgcaaatgatttggcatacagaattgtccaaagggcaaacccatattctgattgaaatgcggtaaattggacatgttaccgggttgaaatccttgcccgcgaatgggaaatgtggcaatggagttcatatggtttacaccaatctgtggaccaaatccaacctggggattaccttgttgaggcaaagggccattcgggttacctaaatggggcgctcccataagatattttgagaagggaaacgattgttaggtgcgttcatgaagccgggttgagttgccatggaagtaggcgcattgggcatacaaggactaccaaaagggttaggaatttgagaattgtttaaaccaaattgggattgaggccccataacctgctgtttcataaaagcaagaaacaaaaaaattgagccttgagaataaattgtctgaatcatgcacttacttattcatataaagaaattggagagagagagaggtacctgttgagaaggttgagcggggttttgcatgttggtggaatgattaggaaaggaattgtagagaggacgcatttgagaacatgagagagcagtgagagcagtagggtttttgaagcgaagctagggtttaagctctgtaagttataactgtaaccaaatggagtttaatttcaagtacgagtctcttttttaacacatcacattaaaatagagaattttcataaaaacaaaaacattcaaatagagaaaatatatattttctttttacaaaaattatattaataaggaaaagaaaaacatattatttaaataaaaataaaaatattttacaatgagcacatgccacttcaataataataaattattaaaaaatatatttgaggtttaattatatgcttatgcatgagtaaaactatcaagctattcgtctatatttttatactcatagctaagtgcatgagttgtaaatttgtaatctccggaaccaattgctccatcatcgaagatctattcttttcattgtttaatgtgttcgtgatcatataaattaatcaaatttatataattatttttgaaataaaatttgtgttgcgaaaaattattaaatactacgcaa

SEQ ID NO: 303836 - DNA, 1469 bp, Cannabis indica
aaaaaaaaaaaaatcatcttagcatatgaagtttctattaaatatttttagggaagagcaaggtagaaacttgcctaaaggatccaatcatccaatagtagtttcttgaactcaattgtcagccctggtgagaaaactagcagcctagttccattataatctactatagaaacttcatagctttagaactaattaaaatgcaccatgatgatgattattgtgttcataccctcttacaacaattttgtaacagctcattataccagcttgtcagcattgaaattcatcttacatctactttacaaactatataaatatatatgtattatacaaagcagcagagtcaaaatactcaccacttgtcaaaacgccatagaaaaagtgaattatcaacagatgcccatgccctacgaatttcagggaaaatgccacataaagcagttccttccccaccggctgcattatacctttcaacaagtaccggaggtaactcccaagtatctaccacctcaactaaaggaggccactgcaaatggttcaagacataattacaacgtaatagaaagaaaaaaaaaatagataaagttcaaacctttggaagtaaataaaaaagaaatggtatgaagaaagaagaaaatattattattattattacctctttgggatgagttgaataaggatggctcgagtaacgggaagcttctagggcttcttcaagatcaagatgagaagcaatttctcggccaattcgatcgccgacgacgataccggcactggttacatcccgcaaaacgagctcatcctccctcgacatttagtcccggaccctaaagttttagggagcgggaaggaagtgataaaggtttgatttttgaaacgaaagagaaaagagagtgaagggaatctggagtggagtgattttccctcgctttctcggggaccaaacagaagaagagtgaaaaaatagggttttggagagggtttgcgttgatgttaatggcgggccgagtcacagattcaattccccaaatcccaaatcaaaatctttatttatttatttatttatttatttctgacaataaaaaatctgtatttattaatttttaggaatgtaccgttgaaaataattttttttttttgaaatggaccgttgaaaataattggacaatattttgaaatcttttggacagagttaaaattggattaatgttaatttttatagtataattatattaaaatgatatatattgtagaatacaaaagtgggattgggggataataataataagtaaaaattgtagagcaatattaaaaaaaaggaatttttaattttatggtttgtaaaatatgtctttcggttagaaaatgagctattctggttcgaggaggttccaacacgaactctagtttgctgcattgttaatcttgtgtgactctgttcaccacgtcaaaaaaaaatatatatatat

SEQ ID NO: 303837 - DNA, 714 bp, Cannabis indica
tatatatctatatatatttttaaaattaacaagaactaaataaaacaattattaattatggaccactacttgtcttggccaattaagcaagacaaagaccgcgagtccctatctattcaagtcaatatattattgcaacagagcaatatttatgatataatatataccagtactacactgcgagaatcacatggttgctttgtatatatatgtgactgtatctacatgtatacaatatacatgtatttaatcacaatataatatgtttagaggtactagacaatacaagtagataacacatatacaacacaagcatttcaatgaagtttccaatctttcaaaagagttccatgagaagaccaagacttttcgataagaagatcacaataaataagaaaatggataagaagaaaaaacgttggtgtgtatacatttattattcgaattaatgacaccaaaatagactcatgatatgaatatatgattaaagaagaagaaaagaaacctgggtgaaagtgtgaagcaataattaattacttcctacttttcaagagaagttgataattagtagagttttctgaatagaaattaatcaacgctgttatcaaatctttttggtaataatttgcggcataacctttttgaatagtcaggtttttgtaactaactcccaattttaaaattttagtgataaaacttcctaaattcgtgttc

SEQ ID NO: 303838 - DNA, 1371 bp, Cannabis indica
atttgctagagtttcggggtctggaattccagagcttgaactaaggggatcagcacttaaaagaataccatcacattgagcatcagaccttgttgattcagataactgacatgaagataatcttggagaaaagaagggtgactggtttgctgaaaagaattgtgaggatgatgatgacatatttcttgaagtggtgactggtactgagccaatcctgccgctatcttctcccagatccatctatacaaaattttctagttttttcacctaccaaattatatacacacaatctccaactaccaagaactactctgaaatgggaaaaaaatcttgagtaagtaacataactataagaccctgtacaaagaagttaatgcttatattcatgtagctgatttcaatggtcaatacttgataaatagcacaaacacttcacatacatctacagtaaaagaacaaaccatgttttagaaatggaatgcaaaacaaccaagtaccaaaacctagctgcatatgatattcccatatgcttcgggaagattcttaaagaaatggtcaaaaactcaccaaatacgaaaaaaaaaaactaactgcctaaaatgggtggagatggcagcattcgaaagttatcaaatatttaagcttgcattattcatgttaactaaaatgaaatatacaagttatcctaacacaaagaaacttcatgaatggagaaaaggaaattgaaaagacatggaaagcatgaactttaaaacataatagatctaaaaggcatctctttaatatataaataagcatcgaatagaggccccactccacatcacagaaacaaacataatagaatagtatttcaattatagtttagatctgagtacttactgggattcaaatctcaaccatggtatcaacagaactcatctgtaggcttcaaatcaaacaacccagttcttatcatttgagttctggctagcccaaatcttgttcttagtgctatctataatcaggcaaatgaagtaaacaccaaacctgcatataagggtaagaaaattaattaaaaataagacacgaatggagaaagcagaaatgtcttcaatccaaagggtcaaggattttcaccaggacaaataaaaaagttgacaaagatagaaactttagtctcagactttaactatctaattcaatccagagagtattattctgaaaagagatttaagaaagaaatagaaaatatttatatatatatatatatatattcccaccccaaaaaggtaaaaaccccattttcaggaaaggagggttggagttaaccaatgtgaaaaaagatgagatagcaaaagaatgaacgaacaccaaaaatgaaaaaaaaaaaaa

SEQ ID NO: 303839 - DNA, 2336 bp, Cannabis indica
aaaaaatataaatatacagttctaagattatttaattggacttggaactatatacactatgctctagataatccacaataaatggtgttgttgaacgtacatcagaattgaacagttatggcaacgtcaatgattaattactcaactatgagtgtctttctagagatatgccttagagacagcaaaccacattctcaatgttgtcccatctaagtttattccctagacacctttagaatgttgaaatggtcatttacgccattagaaaatttgagaagagccctggtcatgttcttaggaataaggtatgaaagctagaatggtttacatttttttggatattttaataagactaggggtggaggatatactatagtcacaaaaataagaaagtttttatttttacaaatgttatttttctagaagatggctatatcattaacctgaaaccatgtagcaaagttttactagaagagaagctttcaaattttattccaatagatatttcgtcatcttctacatgtgaagatgatgatcccactccctttgtttaaactgacgcaagtcatattaaaacaaagaggaatataccactgttacttctcattagacagtcgcaatatctcatcgtagtggggggatttcaagaaactctactggtttcaatcttgacagtcaaattaacttggtggttggtgacattagtgacgacaaatcattgtccttagaatagagaatggtaagccctaataaagaactatgaatcgaagcaatgaaactagaaatgggtttaatgtattccaattctgttttggaatcttgtaattgtacaaagtaactttaggatcattgaatgcaagcaaatctacaagaagaacaagaggcataaatggaaaagccaaagcttacaaaattagacttgtagcaaaaaagttataccaagagagaaggtgtggattataagaaaactcttagtgaagtcgccacactcataaccctctatatactcttatccatacccattactctcaattacaagatttggcaaacagacgccaaacaacttttccttatagaatgtttgacaagaccatttacatggatgaaccagaagtttcaaattataaaaacaagaagggaatgtctacaagataagttcattcatggacttaagcaagcttcccgttcttgaaatcataggtttgatgtgatcatcgaaacctatagcttcaaatagaatattgatgggcctaacaaaggcaatcaaattatggtattgttggtgctttacatagatgatgtcttattcattggaaacaatgttagaatatcgtcagacgtgaaagaatgactggacactcaaatctaaattaggatttgtagcaagcaatgttcttggtatttaaaattgaaagaataaattctttgttctcacgcaagcaacttatgtagataaggtgctagagaacatctctatagttaactcttaggaaggtcgtttgccttccagacacaaaatttatctatctaaggtgtagtcccaactattccagaaaagataaaagcatttagaaaaatttcttataaaatagtagtaggaagtcttatgtacactttgcagcataatagattagactagagatctattatgaagtgagagttgtgagtagatatcagtctaacacaggattagaacattggataacagtcaaacatatcctgaaatacttgaagaggactagaaattatatgcatagtctataggtgaggtgttctaaacccttttggctacgctcagatttccaagcatgtgtcaaataatagaaatctacatctgagatggtgattactctggggtgaaactgtgatttctagaatctaagctctaccatgaagattgaatacatagccgtctccatggctgctagatttccaagcatgtgtcaaataatagaaatctacatctgagatggtgattactctgggctgagggagttttatataaatttttgtattgctccaaaaatagattagttgctagtgttactatatgataacactgatgaaaatgccaatagtaaagaatccagttcttgtaagaaagtaagcatgggaatagaaaatttgacattatcatcaattttgtggataatagattaagttaatattgaagagaatttagtaaatatttttaaatatagtggataaattgaaatgtgcatttggttttatattgttgtaagtgggatatattgatttttgtatataaataaaacttaatttcaatttagtagtggataaggttgatactatttatttgtttatatatatatata

SEQ ID NO: 303840 - DNA, 2380 bp, Cannabis indica
ggaaaaggatgccacctatatatctttactttcttactttttcaattattattttgtcataaaataagaaaatttaattatttaatatatattaaatagtaatataatattattttaataatttttagaggtgtttaccattaaaatactttagaacataaagtatcaaaaaataattcagaagagagataaaataaaatattacatttttaggtgatgtggaggtttttgacacccttaaagaatgctatcattggagatactctaagagtgctaaatactatgggtgtgtacatggtgccctttagagcatctccaatggtagtatcctttaaggatgctaaaaatcttcacatcatgcaaaaatataatatttattttatctctcttccacattattttttgacactcttacttctaaaaatactctaatggtataacactcttcaaaaatactacaattatgatgtcacataatattatttaatatatctcctattttttagcaacaataactttttgctttaattttttattaaaaagatgaataacatcaatgctactctatagcatctatgtaaatttctagaataacattcatctctctctaatggtatagcatttcaatattttaccacttaatatgtccacctcaatcctctaaattgaatatatatgtggattaaaatatcaaagtatcatatttgattgaatgtacataaaatatcaaattaagtagaaaaaagtcttgtcctttgacatggtggaaagtgcgtgagtgtgtttgcaagttttgtttgttttcgtttgaagtgtttgtgaggtactcgatatttatggattttcaaagaagtgatcaaagaaatagggatctcccttatgctgttggttcaaatatggaggaggatgaatgattcatttacgataacgaagatgatagactatccgagattgatgaccgttggtgtttggtgggcgcttttttaacaaatcgatccatagattttcaagcaatgcaacatcaagtggccttgttagggcaacccgaaaggggaatgtatgtgaaagaattggaactgaacctattcatttttcaattctaccatgaagtcgatatcaagagagtcattgaagggagccgacgttcaatcgggctccgttaatttttgaacgtttaaaatagggggaaaatccctttgctatcgtactcaatcgcctgtacctttaggttcaactccactaaatgacaaccgggtttatgtcagcgcgtgtcctgcaggatattagaaactacatcgataaatttgttaagggtgacccaaacaattttacaggtgtttggaaggactaccttagggtgcatgttctggttcatatatatttgcctcttaaaatgaggaggaaattagagatacggggcgacccaatttgctatgcacatttcaagtatgaagacttgcccactttttgttttatatgtggaattcttggacattcgaaaagattttgtgaatgtattttttgatactcctctagattcaatcaataaaccttatggactatttttgaaagctgcgcctagaagaagaaatcacaccattggctctaaatggctccgatcaggagtggttttgaaaaataacaacttcggtgagccaagttgtggtgcgggagggatgagaaatcctgttttggaaagaatcccaaatgacaaaattatggggtcacttgtaagacctccaccatttgggggcaatcaatccttgactccaattgtccttaatgattctgattgtattgtaattgctaatgatacaagagatatgggtagagggaaatctattttaaatgagaatgaatctttggcgcctattcataacttgtcctctgttgggcttctagttatggaaaacaaaagaataaggcccaataacattgacaaaggagatggacttttggataacagtgttgtggaaatggattctgaggaaagtgatacttcaaaaaacaagatgttggcgggctctgttacacagatccgccaagcattatgaatattttaagctggaattgtcgagggcttgagaaccgatggactgttcaattctttaaagagattgtctctcaaaagaaatctaatttaattttttttcgtatgaaataaaatgtaacaagtcaagaataagttggttgagtaattatttgggctttgaaggagccttcactgtagaagcccgaggtcggtctggtggatttgtaacgccctaaataattaggcacactacccaaaatgattatgaaaccctaatcccctaaccgggattactaattaaaaacaacgcataatttacacttttatattaaacagactgaaaataaa

SEQ ID NO: 303841 - DNA, 2106 bp, Cannabis indica
aatgtaaccattaaaacctcttcctattaatttattatatgttcactaatcgaacattgtgtcatgctaattatatttataatatataatataacgtacatatctcgagttagcggtaggtcttatacatatattttattaatccttttctccaaattaatattgttatatagaataatataaagaggaacttaatttttatatttttggtgtttacgtacgaaaattattgagatgagaaacaagataatgggaaacatgataatattttggcaatgatattgtgtatcacagcggatgtcctaccaagatctgtggatatatattgagaagtaataagatagatataaacattaagaataaagattactgaaccccaaaaaacaaggctcatccagcaactgcctctgtttttctaatctatatatgaatgttgtgtctggtgacctatatagctagagatgagtagagaaaataagaaataatgagagggagtgagttttaagttttatccaatgctaagatgcagagtggctcaatgacgcatgtgtccctgatccacacgatgagttgggataagattgggtggctcatcaatgctacacgaaccctatgctctcgatcggctcattcatacatcgagccaccattatctggggcctccatatctcagatcgatatatagttgaattactaataaacacgttattatccttcaaaaaataaataaatgcgtgaatcacacggcttccatcgatatattgtagccaagttttctacgagtatgtcaattacgatttactaatatattttatttttttcaaaagaagggaaaatcatgacaattaacttattgaactgtatatagccacatatatagacgagagatgagaaatctatatttcgttctttgatacttaataatatatagtgctaaaacttttattagtggtaactaactttgattaattagcctaataagactaaattgttttttcgtcttagtgggcgttcagtccaggtgcattacaccaatataatttttcgagttctgtgaacttgacgagtttcatgcaaattaagataagtaaccaaacctaacaagatagtataaattaagtaattatatatatttttatatatacgcgtgatatatcgaaagttcctatctaaattttattcataagctcttgatccattttttgtagatatatatctatataatgtatgtctgtgaatgagtggacataattaaagatcaaattaagaacgcataaacaatatgatgataccaagttatttttaccggcactctcttaatttacaggtaaataaagtacaccttatataaacatagatatgtggaattaaccggaccgcttttacaatcccccctcttgtataaaagtaaaataaacaattttcattttcaataaataaagattatatatttatatatatgaaaaagaaaaagaaagaaaacaacttaactcaccggtccaactttgaataaaatatatactaataacttaattggaaattttagagaattggggttggctgattttaataaaggccaaaggtatatgtaggtggtaggatgtgagtggtgacatctgtcccgaccccaccttatttcccctatgctccacgttataaaacccccacccttcaccgctcactcgctcactcactcgtcacctcttctacttgttcaagttactctctgccacctctcctcattaatctctctctctctctctaactccccctcttcatcatcaccatgcaactcccaccaccaccgttttccgatagtaatattggtccacagtcacttctaactcctcctgaatcattagtctcatcaaccatgatcgtaatcttaattcctattctgttttgcttcctcctctgcctcagcatcaaatggcagcaacccaaaatcaacaaacgattgcctcccggttccatgggttggccttacataggagaaactttcaagctctacaccgaaaacccaaactccttcttttcccaccgccaaaaacggtaaaagaaaaaaaaagactgtcgtttcccatggttaatctgtcgtaggagtat

SEQ ID NO: 303842 - DNA, 1648 bp, Cannabis indica
aaaaaaccatatttttagtttgattggttagataatgtcatatttagtgacatttactttttatgccatatttattataaccttaataatttttcccatatttttaaaaatagccctatttaaatggactaagttgctaaacaaaataatcactatgatagttttatttaggcccaattagtattgggcttactcagttaataataattatttaattaaatgttaaattcctctcttttacaacaatagtagaggaaacatgaggatactaaaagggcatagatctctcagtaaccttttctttttcacgaaggaaaataatgaaaggataaagaggtagagaaggactctcatcacatttttgcaaatatacattacaatatttcctagtatggtcaagtttcccacaaaagtagcaaaagtcaggaaatctttcatatttaaaatctaaccatttgatgatctccctacccatcttaataaacctaacattcatgcctctcctaataggcaggttcatatcaagaaggactctcatcctcaggttagacccagtaccctccctaatagtagttttgtctacctcaataaggtcaccaacctcagtagcaatgaacttggctagatcataggatttgcacataaaagggattccataaacttggatccaaaatggcacatagtgaagatgctctagagtaataggaaatgaactatcaggggttgcaaaaatagtgacactatgagcaaagttctatggctgaccctctaaaatcctacccttatctccctcacactcaaagcttaccaaaaaaaacccaacagtgtgcttagaaactaaaacagggaaacgacactcggatgactagatttcagacaaagtcttcatcaaagagggacgattaaagtgtctaatagtgtgcaacttaagaagaagactaatggaaacatgggactcagtggaattaacatcataggtaaagatagtgttttccttaggggttaacactagagcatttgaaatattagaaagaaaatcatccatagtgtaaaggaaaggaatcaatactaagaacagggaagaggaaatgaaataatattggcgatgaagagtgttgtgacgagccttaataggaagaaccagaaagcctttcgtatccttctgaaggatttcccaatcctatcaccgatcgtaggagaggtagcccaaatgatgaaggggatctgattagccaccattttccaagctttcgcctccattttgccaagatcaaagcatttatccagaaaattttttagatttttacaagagaaagaggacaagaaaagatggcaaggccaggtggaaccatttgaggaaggaagagagaaaagcttgcaattaatgccctgccaaagataattaaatttagagaaaggaagagtatcctccccaatacgattaatgttgtgatttaagctgaaagaaaaagagtatataaaaaaattttaccattaaagatgctcttagatatgaccaatcccttctaccattttcgtgttttaaattatagtcttatatctattctatataaagcgtgtctatataactgaattcttaattgatgagaaattcatggatgactttttatttatatttaataaaata

SEQ ID NO: 303843 - DNA, 2554 bp, Cannabis indica
atagttggcagtttgtaaattggcagaaataacaaattagcttttctgagtgagacgaccgacgagagaagcttccattgatttttgctatcgcttcagaagaagaagacaagtaaagaaattcaggcatggatcttgatctttataactcccagactctgaaggtcttagaagaggtaagtagtatagtaatttaagggaattaggtttaattttcttgggaagaaaatcaatctataattgctttttgttcggttcaaaattcttgtctaatctttccttttctcttattcctctatagtttcttgctgggacaacaacggttaatctcgatgattttcaaaagacatatgatgtttacattagttttagaggaacagatgatcgatgtaatttcactggtcatctctatgctgcattgatgaagagtggaattgaaacctaccttcataatagggttgatacaacagaggagttctccaaggctgttatggatatcatcggccagtctaagttctgtatagttttgttctctgaaaattatgcatcttcgtggtggtgcttgaatgagctggtgcatattcaggaatgcatggaaaagaggaatcttatcgttttacctgttttttactatgtcaatccaagtgatgtgcgaggtcagaagagaagttatgaagatgcatttgtgaagaatgcagaacgttttgataaagatcagatcaagaaatggagggttgctttaaccacagcagctacccaatttggatgggatgcaaccaataccaagtttgttctcttctttaactttgttgttttgtttgtacattagttgttatcactcatcatatcattttagttttagccttttattatttttactaagttcagtttggagatttaactatatagatgtatctaatttaggaatgaagctgagttagttgatgaaattgtcaatttcataagaaggaaaatggacgaagctattatagatctcaacaagcgaaagagtggccctcctgtctctgtttcagttgattttttgctcaagaagatctcttctggtgtagtgagatttttgaggggaaagaatgactccgattttagtaggcttcttcacaaaatagagactaccttcctctctcttaatcaggtgcttggagacgctgagctgaagcagattagaaacgctagtgttgagaagtggttggacaagcttcaagatgttgttgaagatgcagaggttttctttgaggaaattgagtatgatgcactaaaacttaaggtggaattggagtcggatgccgatgattccaaggtagctaaatttttatcctagatttaaacttgactaggcaaaaaagaaagtcagatttggagaagattctagagcagttggatgtttttgagaaccaaaagtacatccttaatttgcgaggagatgttgagaatatccaatcagagagactaccttcaaaatcgttcataaatagttatgagatttatggccgagatgatgagatgaacattttgaaagggatgttgctgttagataaggtgggtagtgaaaaaataagtgtgattccgattgtaggcatgagtggaatcggcaaaactactctcactgaagtttgtttttaataatgatgaaagttaacaagcattttgaactcaaggcatgggtttgtgtctcagaagaacttgatgtttgtaaggtaacacaaaatattcttgtagcattgactagaaatgcttgtgctgttgaggacttaattgtgttgcaagaagaggtacaagaattattagaataaaaaaaagtttttaattagttttggatgatgtctggaatacagagttttgggataaaataaggttgctttttagaagttggtgcacaaggtagcaagtaataataatcacaacaagtaacatggaagttgcgtcaatcgttggaacgactggacctcaccaccttgagcttctaaaaggaaaaagcttgtttcgagttgtttgtcaagcttgtatccgacaatgaagggtttaccacaacagattcatacttgggaagtattgctaaagaacttcttaagaaatgtagaggcttgccattggccgtgagggctattgcaagcttattgcgttgtacaagtgtgaaagaatgggaaaaaaatgctgacagtgatgttttggatttatcccttaaaagataaatatattcttccttgtttgggattaagttattattatttgccatcacacttgaaacgatgctttctttattgttctatgtttcctagaaattatggatttgttaaggtatgagttggtcttactttggatggttgataatatattggagtcattcaggtggaaataggaatataaagagtggggtatgaatatttgatgatttagtggctcgatctttttttcaacctgcagcatgtagattcgaactaaggtgttttgtagtgcatgatcttatggctgagttggctgcttttgtatctaaaaaacaagttcatttatgtgaaggaaaacatgatgtatgata

SEQ ID NO: 303844 - DNA, 2530 bp, Cannabis indica
accttctggtactccaattcccaacaattctctaatctcctttttcctcacctcagcagtgttcttgctaaagaaaatagaagttttgagtttattgacttgttgtctagaccaatcacaaagcctctcaaggcgttgccagtagccttttgcttcttccaagatggccctacccactaagattaaatcatctgggaaaaaaatgtgggagagaataggacttctccgactcagtcggatgcccttgatatcaccatcccccattgcctcctttaaaggcccagacagaatttctacagcccaaataaaaaggtaaagggacagggggtttccctgacgaataccacaagacggagtgggggtggaaatacactagtcaacccacttgcgaaaaattgtcaaagccccataataagatagcacgtgatcaataaattttcaactaagcttacgtaagctttcacgagatcaatcttaatggcgaagaacccctccttaccctttttcctattgaaaaagtggataatttcttgaacaatcacattattatcttggatatttctaccaggcacaaggcagcttatgttgggcagatgagccttggtaagaaaggttgaactctgtaggcaatgatcttggatatgactttgtacgtcacattgcacaaggatataggcatgtaatgttgtggtctcttagggtttggatcttaggaataagaatgaggttcgtaaaattaatagctttgtgcatagagccagagttaaaaaaaaatcaataattgcatcacaaatattttttttaaaaaaatgtttacattgattaagaaagacatattgtctttagtacacttattcttttattaaaaaactttacctttggatgaaaagtaactgtataattattaggtagtgtaattagtagttacacagttacactctattttaaaatacaaggtgtgatagtgggaatctcgtgatctataaggaaaaaaatcgagtaagttgtacaattccacatcgcttggaaaggttaagtgtgatgattctaagatatgtaggaatgggactacacagttaaaaaatgcttgaattaattaaatatttgcaacccaatatttatatggggttggtaaaaatatactaaaccgaccgatatatacccctaatttattgttcaaagtcaaagatacccaccaacttaatctgaaaatgatatgcagcagaatgcctctggtttatatttgagcctcatcacccatatactcataaaccatcttaatcatcttatttattgtatacttgcaaaccttccaatttgattattctccctcctcatttgcaattttttttttttggaccatttgaattattttctatgaaaatcagatttgactatttggatcattttgtatagaaagtattctcataatcctgcaacaaccctcacacaatatctaacatgattcttagttaaaatcgttttagagacattaatcccatcatgtcattgccttagctataaaatgtatacccttccataaaaatatatatgtatacctttttaaaataaataaatgaataaagtcatacgtgcacacaacttactgcaattgatattaaatttcccttatttaacccaaataaattataattgttcacttgggtcttgaaatatcacccattataaaatttaggataaattgaattttattttcttaatataatttgtagacattcgtggcatgagtttcccaatttgtgttaaatatgtcactaacggctgaagtcattcattaaaaattctctctcttgtccttgttttgtcgaggtccactttagttggagcttactggtttttcatatgtttaaggtcattatgtgtcatttttgttacattttgtttattttttaaacaatttatttagaccactctcaatattttataggagatttattttgtatactagttttaatttttttaaaaaaatttacggtttaagttgctacagtaatttttatgtgaattttgattgcgatttaagttgttccgttaattgctatatgtattgctgtgtcaatttccgtaaaaatacaaataaaaattgctttaaaatgtaaaaatgaaaaaaaaaaaatctattttatatctaacttatatattacacatataataatttttctatttttattctctatattatttaaatattatatttttattcattttcaatacttctctcatttttaataatatttaaatttccttgttcaacaaataatatccacagaatcagtttaccatttgggaatttggtttaccggttttagctgttttggtttttcatgttttatcgatataagctatctattgatagagacttctatttttaaatttaagttcccgaaaagtgatttagcatatcatttatcagttttatgtatgttgagaatcatgggattccatctcaaaaccaattggcaatgagtggagtagcccattttcttatatatggctcaatacttttaca

SEQ ID NO: 303845 - DNA, 2259 bp, Cannabis indica
agtggttccattaatgagtaaaaagtaaaaaatagttggcaatttttttttttccatttcattcgattaccccaaccaaacacactctagattctatataggtatggtctattaattaaattaaggtataatgttgtgaaagaataaatgaatatgagagtatgagacccagctccaacaaaccaagaaaacaaaaattattaaaatttctttttttttttagggaaaaaaaaggtcatacattaatcctacttctctcaactcatcaatcttcagtcattattgtacccataaaagtaataataataaaataaaataaaaaaaaaaaaaagagtacattagagagatcattgcacgccactgtggtgccttatcactttatcagtgggtcatggatattggaatttcatgtataattaacagtgaaataatatttggaattactacaaaagtggaaatttctcatcagcatggatcatttaatgaaaatgactttgttttctataattgtgaatgaaaaagaaaaaaaaaaaagtgtttacattattgcattttatcaatgagttgaattatgtgatcaatgaaaattaattaatgaaaaaatagcacatggtgtttccatcaatccatgcatacttagagattatagcaaaaccaaaatatgcactaagtactaaattattgtgttacttccacatgtgtgattgattatacttcttatttgtcgtaatttgttaagattattatttatttgatgggtctttttgtgtctttgatattggtaaattattctttaaaagtgaatgtactcataaatgaaaagaaaacaaacgttggcaaatttatgaatgggtagttctatatacacatatatatgcatgatgcatgcattatgcatatccttgtttttcttatctcaacctacttttaaataaacttcttaaagatgttttagatttataataatttctttttttattttgtaaacaaaaagatatatgcacatagtaaagaatatctaaccaaagagaacttttttggtaattagaaactcttcaacaaactaacaaccttgagttagtatggttttggaggaaggaattctagtgtggggtaatgtttacatgtttgttccaagtaatcgatgcacaagcggtggctcttttggtgagattaagatagactcagggtgttgaattacctatcaaagggtattctcatattcattatctttggtcctagcattagagagtcttatagaatagctgaacgaaatgggcgttattttttctgatgttaaaattttattgtctaattttcttgagacataatttctttttcatgttagctgcaactataatattgagacttgtagattggttaaacatatccttaattaagatagacaatgaatttttttgaatggaagacatctaccaccccttgtgtaacatagttattattaaaatctttaacgagaatagggacgtggagagcattccccgccaattctctatcccatagtatagctgattgtttaaaatcgttggctatagtatagcaacatatagatataaaacacacaaaaaaagctcagcccattgtcttataccataatatatatacctatttataaaacctctctccttcttttccattcccagacgcgcaatattgtactctctctctctccatggcaatggaattttctccgcctccagggacacaattcttcactctgggatggtggtttaagggtggctcggtcaatggtggttttcagaatatgaggacagggttcacgggtttcacactaagaagtcgaatgggtaagcatttgtggttggattttggcttctcttcagatttgagctttttactactaggtttgtatttttttttataatgtacagagccgatgttggacctgagcttcaccgttgcaccctcctagctttgtcggacctgtgcactcctaacctagttttgagtccatcactatttatttatagaaatccttctaggtttaggtttgaattatttagtattaaaaaaattgataaacaaatggtaaaagagacctcaagtggccggccataggatgtgggcccaccacttgcaattttaccatttttcaactatttatcctattctttcacaattgccttatgttctaattcaaccacttaaatgtctgaactatttatttaataattaaaattaattatcaaataaaattgcgatttaatatatttatta

SEQ ID NO: 303846 - DNA, 2888 bp, Cannabis indica
aacatgtttagaccttagtaggactgaaaaatctcagaccgatagggtagaaatcattgtagtactacatataaagcaaaaaaacattaattaaaaaaaaaaaacaagcatgtgtggatgtagcaagggctgtctccaacttccatgtttcaccatcctaccaaaagaaagaaagaatagaaagtggggttggaaaaagcaaaggctattttgtggtccacaatggggccaccagacaagaagcattattcaattgaatacgtgggccatgccagcgccgattgcctacataaggcaaccacatgcactattggattggctactctaatccactttgaacacattagtctatcttcatcagccaaagatgtgtaggctaacccaaggaaaaattgtggaccatctgatacgatatgatatgcttgcatatttattcatgacaacctggtatacaaggaagtggcttgaatttataactatgatgactttgtttattttcttcttgattctacatgtctgaaaatggagactttctgtctccccttcatttttatttttaactaagaaaaatgatggtacaaccagtacgtgtgggggagctggggatatcaactaaaccaaatggcatgtgacttctaataatacatgtaataattgagcttaaggcccccctttttcctaaaaaaagcattcaatttctcactttacacattccacaaaatgtacaatttaggtttactctgaaagcaaacttcaaagaacaaaatataaaactgttaacaccaaagctatcttcagcttcagctagttaaatcaatgttctgtaattttctgcaaatgttcctattctgaaatcttgtgattcatctgttcctataactagaagaaagcagaatttatacatgatgaaaaacatccagtattaagtgcaagtgaaacaagatttgatggccaaagataataattgattttccatactcagtccgtagtgtcggctgaatttccatttatgaatctctgatgctcttctttgttcctggaatccttatctcttgtgctcaatggtaatagttgtggagtggtagaaccaatggatcggtcgggcagctctggagaaaacaaacatagaatcacccacctttaaagcattgagtattccattgctgcttaattaataattattgtcctttgatattttgactaattcctaagattatgaaactgaatcaattttcaagtactttcaatttgaaaattcaagtagagaaaatgagtctcagaatagaagaaatcttaagagatgtgaaaattttcttgaaactaaattttttctaacctggcaatttgttgtcaacaaaaaatgctaccaggtttaccgcgtacctgggccagagaattatgcagctctttgtcaattacaactcaatactcctaaaattttcatcaagagataaaaaaagtcttcttaccaagcaacaacaacgtcaacagtgtagtgcttgcgagatgcaataattagaaggctcagaatcacagcaagtgcccaagcaaactgtttaatccatctgcaaggataagcattaacattacaaatagtgaagagggcataaaactggagatgaaaaacatagggaagagaaaacagagagtattaataggaagtatgcaactgctatgcttggtagatgaaacctcaatgtagctgtgcattctagttacattaaaatttaaattgttcaaagaacatgataatgtacctctttgttccaaacttttgatatgtgtgtacaaataccaaagtaaagatcatgtgtgatgaaaatatcaaatcaccacagccatatatagctccattaggaactgcacattaataagagataaaataaggtttgtgcaatttaagttctagattgattaggtaaagtaaaagtgtagatagttcataactaacagttgattagaagcactttaattgcactctttggagggggaagccttgccagttctgaaccctgaaagagacatttatctggttataaaaaaagtcaatataatcaaacgtacatataaataacatacagaaacattttactctgagagatcaaaatgcgtacttgaggaatgctgatgtaatcaaactgaacacgacaaactttagttaaacttacctctctacaatgatagtttggaccaggaagttgagtggaatagaatgtcatgatccgaagaatttgagaaaccttaaaagccaagcagagatatacataatgaatttcagaatataacaatacagcatagggtgctgtgaaatacctatctatttgggctgttagacaaagatagacttcaccacaggcagttacacaaaggtaaaagaatccaacctcggagaaattttaaaaactactcaaggatatgataacaaattatttagtgattagcagaggctgaaaaataaggacaacataaaggaaataacttctagtaagcttatacaagttgtagaaaaacatgttttcagaaaatagctaatctcttatactaaataatgtaaacaactatttcaatagattattctgcaaaaaaaactatttgaatagattataacaactggatacttacagctaagtaagctagaaccctgcaccaaatgaggactgtatatattcttttactttggaaaaagaacggattaaaagtccactgcaagacaaatattgttagttcacttgaaacttgagatgttagcattctataaatgagctacatcacataataacaggtgaaagattagaaaagtttagagatgccattgtaactgaaaaaactggaaacctttaggaaacgaagtataaacaaaatctgactgtgatttgcatcaataaaca

SEQ ID NO: 303847 - DNA, 1449 bp, Cannabis indica
tatttaaagcaataaatagtgttttatgtagagcatgaatcttaaattttaaacaaaaacaaaaaaaaaaaaaaactttaaataaagaattttaatttaattccttaaatattttaaagaatctctattttagagcatctcatgtgagtgctcttaaaatgatgttttcttgggtttaaaaaaaataacaaaatgaacattgactctctttctctattagtctagttttcaccaaactaaatttgtttttgtataggatgaaatttgtccccaacaaacaagttaagacttaagagtagacttataattttcttattttgaagccaattcactttaatttctattcatctaattcaataaatactatctcatacttattttatttcatttctttaagggactattaacacacaaatatcaatacaattatacatatatttatagatttattgagtaataatttcgcacataattaattaattaaattgtggatgtgtataaagtacaagtactatcaatgttgttgtctaagaagtataaattaaggtaacacattaatgattagcataatccattcatttatataattattaaaccccttttcactttgcttgcaaaaggctcaacattgttttttattttttttttgggttaataattattatatgatttaagaattagttattagaagtagacagtcgaattataagtagaatagttttttcttcctctctttataaataaaatatatatatatatcataatatttagagtaatatatttgggcccgagttttcctgacacgacatgagtttgggtggcacgagcacatcatatcatgttaggagaaagtataaatttaagtctaacaaaacacgaataaatatattataaattttgaatacaacacaaaaattataaatttaagcacgacatgacaattttgaaaacaccacattaaaacataaatatattatcatgaaacaaaaaacatgaaataaaagtacaagctaaagttatgaatataaaaattttaattagtaatccatatatattcttccaaggaaaaagagttattttgaaattatataaatattatttcaaaaaatttaaattatttaaaaatattaaaaattacaataatattatcatttatgcttaataaatttgaaactggtttgaaaaataagaaagaaaatgtaccaattttacaataaggccattgtaacgtccccgcttcaagtctttattgggtcctgactcttatacacgagtacgtcactctagctgcttcttagactgacgactagccctacagaccaacacgagtattttcagcgtgctttgtcctcactcgcacactttttgaaaaaacttttcaggatgtcacccatcctgaaattacttcccaggtcaagcacacttaactgtggagttctttcgtgatgg

SEQ ID NO: 303848 - DNA, 2490 bp, Cannabis indica
tttttttttttttgttagaaaaaacaaactttcaagttgattcttccaagtggttatagttttctgtactgattaatattgttcaaagcttgttaatatagttacagcctacattaggctgaaaaccaaagttgaactgaagtttctatttccataatggcatgtgaaatttcctcatataattgtggtttacgtatagtgtataatatgctcataggggtgattgtataagtttttaggtatggcaagagttttggattactggggatgttgatggacgaggtgtcccagtatcaaatcctgatggtcccttggaccatgatcttttcatgttgtgtgccagagacactgttaagcttctaaggaaccatcctagtcttgccctttgggtgggggaaatgaacaaattcccccagaaggcatcaacacagctttgaaaaaggacctcatacttcatcctttattttacaacgaattgaatgaagatggcaagtctgctacaggtttatcagttgaaatgaaggatccaagccaatatcttgatggtacgcgtatttacatcaagggatcattgtgggatggatttgcaaatggaaaggggggcttcactgatggtccttacgaaatccagtatcctgaagccttcttcaaaactgattattacaagtatggatttaatccagaggttggttctgtaggcatgcctgttgcagctaccatcagagcaactatgcctccagaaggatggacgattccattatttaggaaggtttctggtggttttatagaagaagttccaaacccgatatgggactaccataaatacattccctactcaaaaccagggaaggttcatgatcagattcaactttatggatctccaaaggatcttgatgatttttgcttaaaggtagatcacatgttttgcatattcaggcataacttgagatttagataatctcatttgacccattgacatattacaatgatgttgcaggctcaacttgttaattacattcaatataaagctctactagagggctggacttcgcagatgtggagtaaatacacgggtgtcttgatttggaagacacaaaacccttggacaggtctcagaggtcaattttatgaccatcttctagagcagacagcaggtttttatggatgccgctcagccgcagagccagtccatgtccagcttaatttggctacattttttcttgaggtaaaatattcagttatagcaatttaattggtgttatacttaatgccttaggatttgaagcaaataacgtggtgcaaatggtgttaaaagatagtaattttctcttcctgctttgaacagattgttaatactacgtcagaggaactatctaatgtagccatagaagcctcagtatgggacctggaaggaacatgtccatactacaaaacttttgaaaagctctctgtgccgtcaaaaaagacagtatccattgtagagatgaaatatcctaagtccaaaaacccaaagccagtctactttcttcttctcaagctgtattacatgtctgacaatcgcatcttatctaggaatttttactggttgcatttatcaggtggtgattataagcttttagagtcatacaagaagaagaaaatacccctcaagattacatccgagattttcatcaaaggctcaacgtatgaagtccatatgtatgtcaaaaataaatcgaagaagccagagtctcaaactttaaccttggcaaacaattttacctcaatgcaaagtgacaatgattttgattcttcctcgctggaatcaacatgtgaaaaaccaaatgaaagtgaagctgttggtttagttcataagcttttcaggcgtttctccaaagaacaagatggtttcaaggttaccgaaatgaacatgaatggttctgaagaaggtgttgctttctttcttcatttttcggttcatgcttcggtgacacagcacaaagaaggagaagacacaagaattcttcctgtgcattattcggacaactatttctcactggtgccaggagagggtttgccagtcaagctcacttttgaagtgcctcctggtgtcactcctcgagtaactcttcaaggttggaattaccctggtgcgcataatgtccattgatctataatataaattataattaaattttcatgtttgctgtttacaaaatgaggatgctggatgttgattcaactgtacatgttcatgttgagtgagtatttataacgaacccaacccaattacaactttttccttttttattagccagaaataaaataataaatttcaatttcgatatttttgttttaattattagaactatttacctttgtcttttactttatatatttatatttttatatatttatatatatatcatttcattatatattaaaagtgtctatctaacgttaattcttggtttaacgattctttttttatttagccttaacttaacagac
